(19) United States
(12) Patent Application Publication
(10) Pub. No.: US 2009/0119022 A1
(43) Pub. Date: May 7, 2009

(54) Emericella Nidulans Genome Sequence On Computer Readable Medium and Uses Thereof

(76) Inventors: William E. Timberlake, Bolton, MA (US); Yongwei Cao, Lexington, MA (US); Gregory J. Hinkle, Plymouth, MA (US); James D. McIninch, Burlington, MA (US); Jaehyuk Yu, North Andover, MA (US); Azita Ghodssi, Winchester, MA (US)

Correspondence Address: ARNOLD & PORTER LLP, 555 TWELFTH STREET, N.W., ATTN: IP DOCKETING, WASHINGTON, DC, 20004, US

(21) Appl. No.: 12/336,504

(22) Filed: Dec. 16, 2008

Related U.S. Application Data
(63) Continuation-in-part of application No. 09/404,520, filed on Sep. 23, 1999.
(60) Provisional application No. 60/101,665, filed on Sep. 25, 1998.
(60) Provisional application No. 60/101,666, filed on Sep. 25, 1998.
(60) Provisional application No. 60/102,358, filed on Sep. 29, 1998.
(60) Provisional application No. 60/113,361, filed on Dec. 21, 1998.
(60) Provisional application No. 60/126,265, filed on Mar. 25, 1999.
(60) Provisional application No. 60/130,189, filed on Apr. 20, 1999.
(60) Provisional application No. 60/130,190, filed on Apr. 20, 1999.
(60) Provisional application No. 60/132,861, filed on May 7, 1999.
(60) Provisional application No. 60/138,103, filed on Jun. 4, 1999.
(60) Provisional application No. 60/149,882, filed on Aug. 19, 1999.

(51) Int. Cl. G01N 33/48

(52) U.S. Cl. 702/20

(57) ABSTRACT

The present invention relates to nucleic acid sequences from the filamentous fungus, Emericella nidulans (Aspergillus nidulans) and, in particular, to genomic DNA sequences. The invention encompasses nucleic acid molecules present in non-coding regions as well as nucleic acid molecules that encode proteins and fragments of proteins. In addition, proteins and fragments of proteins so encoded and antibodies capable of binding the proteins are encompassed by the present invention. The invention also encompasses oligonucleotides including primers, e.g. useful for amplifying nucleic acid molecules, and collections of nucleic acid molecules and oligonucleotides, e.g. in microarrays. The invention also provides constructs and transgenic cells and organisms comprising nucleic acid molecules of the invention. The invention also relates to methods of using the disclosed nucleic acid molecules, oligonucleotides, proteins, fragments of proteins, and antibodies, for example, for gene identification and analysis, and preparation of constructs and transgenic cells and organisms.

[0001] This application claims priority under 35 U.S.C §119(e) of U.S. Provisional Applications Nos. 60/101,665; 60/101,666; 60/102,358; 60/113,361; 60/126,265; 60/130,189; 60/130,190; 60/132,861; 60/138,103; and 60/149,882, the disclosures of which provisional applications are incorporated herein by reference in their entirety.

### FIELD OF THE INVENTION

[0002] Included in the disclosure are nucleic acid molecules representing the genome of the filamentous fungus, Emericella nidulans (previously and still sometimes called Aspergillus nidulans) and, in particular, to nucleic acid molecules having nucleic acid sequences corresponding to genes, promoters, other regulatory elements, and introns found in the E. nidulans genome, a specific set of genes of E. nidulans and a set of primers based on the E. nidulans genes. Also disclosed are homologous nucleic acid molecules, complementary nucleic acid molecules, polypeptides expressed by such genes, constructs comprising such promoters, regulatory elements and/or genes, transformed cells and organisms comprising such genes and/or promoters and regulatory elements, primers useful for replicating parts of such genes and nucleic acid molecules, computer readable media comprising sets of such nucleic acid sequences, polypeptides and primers, collections of nucleic acid molecules and methods of using such molecules and sequences including the use of collections of nucleic acid molecules in genetic research and clinical analysis, e.g. for gene expression.

### BACKGROUND OF THE INVENTION

[0003] Filamentous fungi have a complex multicellular organization involving production of highly specialized cell types as part of their normal asexual and sexual lifecycles. Fungi as experimental systems are good models for plant and animal cell functions because of their evolutionary relatedness. E. nidulans is a model eukaryotic organism and has been used extensively to address fundamental questions of biology. E. nidulans is a more complex organism than yeast and has many genes which have a similar function to genes found implants and animals. This filamentous fungus has been employed in investigations into a variety of genetic phenomena including the mechanisms regulating carbon and nitrogen metabolism, cell cycle, cytoskeletal functions, and development. A set of nucleic acid molecules representing substantially most of the genes in the E. nidulans genome is useful in transcription profiling work to find, identify and characterize counterpart genes in other species, particularly microbial and plant species. For instance, it is possible to identify unknown plant gene function by studying a similar (homologous) gene in a microbe in which genetic modification can more easily be done. That is, if unknown genes are disrupted or overexpressed, transcription profiling can be carried out to understand effects of the genetic modification.

[0004] Moreover, chemical/drug discovery can be practiced using such transcription profiling with nucleic acids molecules of the E. nidulans genome. And, because many human or plant pathogens are filamentous fungi and E. nidulans is a model organism for filamentous fungi, transcription profiling with genome-wide expression of the E. nidulans genome is an efficient way to understand the action of such pathogens and their secondary metabolites, e.g. mycotoxins which can be deleterious to food and feed supplies. In addition environmental stress studies of the E. nidulans genome will provide insight into related mechanisms in plants, e.g. yield, stability, thermal resistance, water/drought tolerance, etc.

[0005] Nucleic acid molecules comprising the E. nidulans genome disclosed herein were identified and isolated from a sample of filamentous fungus identified as Aspergillus nidulans, FGSC Number A4, obtained from the Fungal Genetics Stock Center (FGSC) at the University of Kansas Medical Center, Kansas City, Kans. It has been determined that this fungus is more properly named Emericella, nidulans. As used herein the terms Emericella nidulans, E. nidulans, Aspergillus nidulans and A. nidulans refer to the filamentous fungus previously and still sometimes called Aspergillus nidulans.

[0006] Nucleic acid sequences of a species, e.g. the E. nidulans, can be generated by random shotgun sequencing of cloned genomic DNA and assembled into longer lengths of contiguous sequence (contigs). The final data set from an assembly process comprises a collection of sequences, which includes the contigs resulting from linking of two or more overlapping sequences as well as singleton nucleic acid sequences, i.e. trace sequences which are not incorporated into contigs. Such sequences can be screened for genes, e.g. full length or substantially full length or partial length genes. Screening methods include homology searches against databases of known genes and predictive methods using algorithms which infer the presence and extent of a gene.

[0007] The nucleic acid sequences disclosed herein are believed to represent substantially all, or at least a major part, of the genes in the E. nidulans genome. Genome sequence information from E. nidulans permits identification of genetic sequences from other organisms, including plants, mammals such as humans, bacteria, other filamentous fungi and non-filamentous fungi such as a yeast, e.g. by comparison of such sequences with E. nidulans sequences. The availability of a substantially complete set genes or partial genes of the E. nidulans genome permits the definition of primers for fabricating representative nucleic acid molecules of the genome which can be used on microarrays facilitating transcription profile studies. In addition the identification of the E. nidulans genome permits the fabrication of a wide variety of DNA constructs useful for imparting unique genetic properties into transgenic organisms. These and other advantages attendant with the various aspects of this invention will be apparent from the following description of the invention and its various embodiments.

### SUMMARY OF THE INVENTION

[0008] The present invention contemplates and provides a substantial part of the genome of the filamentous fungus Emericella nidulans. One aspect of the invention is a set of more than 16,000 contig and singleton sequences comprising coding sequence as well as promoters, other regulatory elements and introns represented by SEQ ID NO: 1 through SEQ ID NO: 16206. Contigs in SEQ ID NO: 1 through SEQ ID NO: 16206 are recognized as those sequences whose designations begin with ANI61C or ANI50C. Singleton sequences are recognized as those having designations which begin with ANI61S or ANI50S. Thus, a subset of the nucleic acid molecules of this invention comprises promoters and/or other regulatory elements of the E. nidulans genome as present in SEQ ID NO: 1 through SEQ ID NO: 16206 or complements thereof.

[0009] Another aspect of this invention comprises a set of about 12,000 genes or partial genes of the E. nidulans genome including genes represented by SEQ ID NO: 16207 through SEQ ID NO: 27905 and a small set of previously reported genes represented by SEQ ID NO: 27906 through SEQ ID NO: 28165. As used herein, a substantially complete set of genes for an organism is referred to as a unigene set. Thus, as used herein reference is made to specific genes comprising the unigene set of E. nidulas as “ENUxxxxx” where ENU is an acronym for Emericella nidulans unigene and xxxxx represents a number. Thus, ENU0001 to ENU27905 are used to designate the genes of E. nidulans identified herein; and, ENU27906 to ENU28165 are used to designate the previously reported genes of E. nidulans. Moreover, the term “ENU” by itself is also used herein to mean any of the nucleic acid molecules comprising genes or partial genes of the unigene set for E. nidulans. More particularly the term “ENU of this invention” as used herein means a nucleic acid molecule representing a gene or partial gene of E. nidulans disclosed herein selected from the group consisting of ENU00001 to ENU27905.

[0010] The present invention also contemplates and provides substantially purified nucleic acid molecules comprising the ENUs and other nucleic acid molecules of this invention as well as molecules which are complementary to, and capable of specifically hybridizing to, the ENU or its complement.

[0011] The present invention also contemplates and provides substantially purified nucleic acids molecules which are homologous to the nucleic acid molecules of this invention including, for example, those which are homologous to the ENUs of this invention, e.g. a plurality of related sets of homologous nucleic acid molecules in other species which are homologous to the ENUs.

[0012] The present invention also contemplates and provides substantially purified protein, or polypeptide fragments thereof, which are encoded by cDNA associated with the ENUs of the present invention.

[0013] The present invention also contemplates and provides constructs comprising promoters, regulatory elements and/or the ENUs which are useful in making transgenic cells or organisms. In particular this invention also provides transformed cell or organism having a nucleic acid molecule which comprises: (a) a promoter region which functions in the cell to cause the production of a mRNA molecule; which is linked to (b) a structural nucleic acid molecule, which is linked to (c) a 3′ non-translated sequence that functions in the cell to cause termination of transcription and addition of polyadenylated ribonucleotides to a 3′ end of the mRNA molecule, where components (a) and/or (b) are selected from E. nidulans nucleic acid sequences provided herein and more preferably selected E. nidulans nucleic acid sequences from the group consisting of ENU00001 to ENU27905.

[0014] Still another aspect of this invention is a set (and subsets thereof) of about 24,000 primers for the ENUs of this invention, including a specific subset of about 16,000 primers represented by SEQ ID NO: 28166 through SEQ ID NO: 44345 which can be used to generate and isolate nucleic acid molecules representative ENUs of this invention and homologs thereof in other non-E. Nidulans species. The nucleic acids molecules of this invention including primers represent a useful tool in genetic research not only for the species E. nidulans, but also for other fungal species, other microorganisms and life forms with more differentiated cell structure such as plants and animals. The present invention also contemplates and provides primer pairs for replicating or identifying parts of the ENUs.

[0015] The present invention also contemplates and provides computer readable media having recorded thereon one or more of the nucleotide sequences provided by this invention and methods for using such media, e.g. in searching to identify genes associated with nucleic acid sequences.

[0016] The present invention also contemplates and provides collections of nucleic acid molecules, including oligonucleotides, representing the E. nidulans genome including collections on solid substrates, e.g. substrates having attached thereto in array form nucleic acid molecules or oligonucleotides representing genes of the E. nidulans genome. The invention also contemplates and provides methods of using such collections and arrays, e.g. in transcription profiling analysis. The present invention also contemplates and provides methods for using the nucleic acid molecules of this invention, e.g. for identifying genetic material and/or determining gene expression by hybridizing expressed and labeled nucleic acid molecules or fragments thereof to arrayed collections of the nucleic acid molecules of this invention.

[0017] The present invention also contemplates and provides oligonucleotides which are identical or complementary to a sequence of similar length for an ENU. Such oligonucleotides are useful, for example, for hybridzing to and identifying nucleic acid molecules which are homologous and/or complemetary to the ENUs of the present invention.

### DETAILED DESCRIPTION OF THE INVENTION

[0018] As used herein, a nucleic acid molecule and/or polypeptide molecule, be it a naturally occurring molecule or otherwise, may be “substantially purified”, if the molecule is separated from substantially all other molecules normally associated with it in its native state. More preferably a substantially purified molecule is the predominant species present in a preparation. A substantially purified molecule may be greater than 60% free, preferably 75% free, more preferably 90% free, and most preferably 95% free from the other molecules (exclusive of solvent) present in the natural mixture. The term “substantially purified” is not intended to encompass molecules present in their native state.

[0019] The ENUs of this invention and other nucleic acid molecules and/or polypeptide molecules of the present invention will preferably be “biologically active” with respect to either a structural attribute, such as the capacity of a nucleic acid to hybridize to another nucleic acid molecule, or the ability of a protein to be bound by an antibody (or to compete with another molecule for such binding). Alternatively, such an attribute may be catalytic, and thus involve the capacity of the agent to mediate a chemical reaction or response.

[0020] As used herein the term “polypeptide” means a protein or fragment thereof expressed by a nucleic acid molecule in a cell.

[0021] The ENUs of this invention and other nucleic acid molecules of the present invention may also be recombinant. As used herein, the term recombinant means any molecule (e.g. DNA, peptide etc.), that is, or results, however indirect, from human manipulation of a nucleic acid molecule.

[0022] It is understood that the nucleic acid molecules of the present invention may be labeled with reagents that facilitate detection of the agent, e.g. fluorescent labels as disclosed in U.S. Pat. No. 4,653,417, chemical labels as disclosed in U.S. Pat. Nos. 4,582,789 and 4,563,417 and modified bases as disclosed in U.S. Pat. No. 4,605,735, all of which are incorporated herein by reference in their entirety.

[0023] The term “oligonucleotide” as used herein refers to short nucleic acid molecules useful, e.g. for hybridizing probes, nucleotide array elements or amplification primers. Oligonucletide molecules are comprised of two or more nucleotides, i.e. deoxyribonucleotides or ribonucleotides, preferably more than five and up to 30 or more. The exact size will depend on many factors, which in turn depend on the ultimate function or use of the oligonucleotide. Oligonucleotides can comprise ligated natural nucleic molecules acids or synthesized nucleic acid molecules and comprise between 5 to 150 nucleotides or between about 15 and about 100 nucleotides, or preferably up to 100 nucleotides, and even more preferably between 15 to 30 nucleotides or most preferably between 18-25 nucleotides, identical or complementary to a sequence of similar length for an ENU.

[0024] This invention provides oligonucleotides specific for ENU sequences. Such oligonucleotides may be nucleic acid elements for use on solid arrays (e.g. synthesized or spotted) or primers for amplification of ENUs of this invention. Such primers for use in polymerase chain reaction (PCR) primers are preferably designed with the goal of amplifying nucleic acids from either the 3′ or the 5′ end of an ENU or a fragment of an ENU, e.g. about 500 to 800 bp of nucleic acids from the at the 3′ end of such a nucleic acid molecule.

[0025] The term “primer” as used herein refers to a nucleic acid molecule, preferably an oligonucleotide whether derived from a naturally occurring molecule, such as one isolated from a restriction digest or one produced synthetically, which is capable of acting as a point of initiation of synthesis when placed under conditions in which synthesis of a primer extension product which is complementary to a nucleic acid strand is induced, i.e., in the presence of nucleotides and an agent for polymerization such as DNA polymerase and at a suitable temperature and pH. The primer is preferably single stranded for maximum efficiency in amplification, but may alternatively be double stranded. If double stranded, the primer is first treated to separate its strands before being used to prepare extension products. Preferably, the primer is an oligodeoxyribonucleotide. The primer must be sufficiently long to prime the synthesis of extension products in the presence of the agent for polymerization. The exact lengths of the primers will depend on many factors, including temperature and source of primer. For example, depending on the complexity of the target sequence, the oligonucleotide primer typically contains at least 15, more preferably 18 nucleotides, which are identical or complementary to the template and optionally a tail of variable length which need not match the template. The length of the tail should not be so long that it interferes with the recognition of the template. Short primer molecules generally require cooler temperatures to form sufficiently stable hybrid complexes with the template.

[0026] The primers herein are selected to be “substantially” complementary to the different strands of each specific sequence to be amplified. This means that the primers must be sufficiently complementary to hybridize with their respective strands. Therefore, the primer sequence need not reflect the exact sequence of the template. For example, a non-complementary nucleotide fragment may be attached to the 5′ end of the primer, with the remainder of the primer sequence being complementary to the strand. Alternatively, non-complementary bases or longer sequences can be interspersed into the primer, provided that the primer sequence has sufficient complementarity with the sequence of the strand to be amplified to hybridize therewith and thereby form a template for synthesis of the extension product of the other primer. Computer generated searches using programs such as Primer3 (www-genome.wi.mit.edu/cgi-bin/primer/primer3.cgi), STSPipeline (www-genome.wi.mit.edu/cgi-bin/www-STS_Pipeline), or GeneUp (Pesole et al., BioTechniques 25:112-123 (1998)), for example, can be used to identify potential PCR primers. Exemplary primers include primers that are 18 to 50 bases long, where at least between 18 to 25 bases are identical or complementary to at least 18 to 25 bases segment of the template sequence. Preferred template sequences for such primers are selected from a fragment of any one of SEQ ID NO: 16207 through SEQ ID NO: 28905 or complements thereof.

[0027] This invention also contemplates and provides primer pairs for amplification of nucleic acid molecules representing the ENUs. As used herein “primer pair” means a set of two oligonucleotide primers based on two separated sequence segments of a target nucleic acid sequence. One primer of the pair is a “forward primer” or “5′ primer” having a sequence which is identical to the more 5′ of the separated sequence segments. The other primer of the pair is a “reverse primer” or “3′ primer” having a sequence which is complementary to the more 3′ of the separated sequence segments. A primer pair allows for amplification of the nucleic acid sequence between and including the separated sequence segments. Optionally, each primer pair can comprise additional sequences, e.g. universal primer sequences or restriction endonuclease sites, at the 5′ end of each primer, e.g. to facilitate cloning, DNA sequencing, or reamplification of the target nucleic acid sequence.

[0028] Nucleic acid molecules of the present invention include those having a nucleic acid sequence selected from the group consisting of SEQ ID NO: 1 though SEQ ID NO: 44,435 and complements thereof and fragments of either. Preferred nucleic acid molecules include those having a nucleic acid sequence selected from the following groups: SEQ ID NO: 16207 through SEQ ID NO: 27905 or complements thereof; SEQ ID NO: 16207 through SEQ ID NO: 26804 or complements thereof; SEQ ID NO: 26000 through SEQ ID NO: 26804 or complements thereof; SEQ ID NO: 16207 through SEQ ID NO: 25999 or complements thereof; SEQ ID NO: 24035 through SEQ ID NO: 25999 or complements thereof; SEQ ID NO: 16207 through SEQ ID NO: 24034 or complements thereof; SEQ ID NO: 22710 through SEQ ID NO: 24034 or complements thereof; SEQ ID NO: 16207 through SEQ ID NO: 22709 or complements thereof; SEQ ID NO: 17681 through SEQ ID NO: 22709 or complements thereof; SEQ ID NO: 16207 through SEQ ID NO: 17680 or complements thereof; SEQ ID NO: 17618 through SEQ ID NO: 17680 or complements thereof; SEQ ID NO: 16207 through SEQ ID NO: 17617 or complements thereof; SEQ ID NO: 17295 through SEQ ID NO: 17617 or complements thereof; SEQ ID NO: 16207 through SEQ ID NO: 17294 or complements thereof. Other preferred nucleic acid molecules include any of the above groups but where such groups also include fragments of such sequences.

[0029] Nucleic acid molecules or fragments thereof are capable of specifically hybridizing to other nucleic acid molecules under certain circumstances. As used herein, two nucleic acid molecules are said to be capable of specifically hybridizing to one another if the two molecules are capable of forming an anti-parallel, double-stranded nucleic acid structure along a sufficient portion of the molecule to allow for stable binding under laboratory hybridizing conditions. A nucleic acid molecule is said to be the “complement” of another nucleic acid molecule if they exhibit complete complementarity. As used herein, molecules are said to exhibit “complete complementarity” when every nucleotide of one of the molecules is complementary to a nucleotide of the other. Two molecules are said to be “minimally complementary” if they can hybridize to one another with sufficient stability to permit them to remain annealed to one another under at least conventional “low-stringency” conditions. Similarly, the molecules are said to be “complementary” if they can hybridize to one another with sufficient stability to permit them to remain annealed to one another under conventional “high-stringency” conditions. Conventional stringency conditions are described by Sambrook et al., Molecular Cloning, A Laboratory Manual, 2nd Ed., Cold Spring Harbor Press, Cold Spring Harbor, N.Y. (1989), and by Haymes et al., Nucleic Acid Hybridization, A Practical Approach, IRL Press, Washington, D.C. (1985), the entirety of both of which are herein incorporated by reference. Departures from complete complementarity are therefore permissible, as long as such departures do not completely preclude the capacity of the molecules to form a double-stranded structure. Thus, in order for a nucleic acid molecule to serve as a primer or probe it need only be sufficiently complementary in sequence to be able to form a stable double-stranded structure under the particular solvent and salt concentrations employed.

[0030] Appropriate stringency conditions which promote DNA hybridization, for example, 6.0× sodium chloride/sodium citrate (SSC) at about 45° C., followed by a wash of 2.0×SSC at 50° C., are known to those skilled in the art or can be found in Current Protocols in Molecular Biology, John Wiley & Sons, N.Y. (1989), 6.3.1-6.3.6. For example, the salt concentration in the wash step can be selected from a low stringency of about 2.0×SSC at 50° C. to a high stringency of about 0.2×SSC at 50° C. In addition, the temperature in the wash step can be increased from low stringency conditions at room temperature, about 22° C., to high stringency conditions at about 65° C. Both temperature and salt may be varied, or either the temperature or the salt concentration may be held constant while the other variable is changed.

[0031] Preferred embodiments of the nucleic acid of this invention will specifically hybridize to one or more of the ENUs of this invention or complements thereof under low stringency conditions, for example at about 2.0×SSC and about 50° C. In a particularly preferred embodiment, a nucleic acid of the present invention will include those nucleic acid molecules that specifically hybridize to one or more of the ENUs of this invention or complements thereof under moderate stringency conditions. In an especially preferred embodiment, a nucleic acid of the present invention will include those nucleic acid molecules that specifically hybridize to one or more of the ENUs of this invention or complements thereof under high stringency conditions.

[0032] In another aspect of the present invention, one or more of the nucleic acid molecules of the present invention share between 100% and 90% sequence identity with one or more of the ENUs of this invention or complements thereof. In a further aspect of the present invention, one or more of the nucleic acid molecules of the present invention share between 100% and 95% sequence identity with one or more of the ENUs of this invention or complements thereof. In a more preferred aspect of the present invention, one or more of the nucleic acid molecules of the present invention share between 100% and 98% sequence identity with one or more of the ENUs of this invention or complements thereof. In an even more preferred aspect of the present invention, one or more of the nucleic acid molecules of the present invention share between 100% and 99% sequence identity with one or more of the ENUs of this invention or complements thereof.

[0033] The present invention also encompasses the use of nucleic acids of the present invention in recombinant constructs. Using methods known to those of ordinary skill in the art, an ENU sequence and/or a promoter sequence of the invention can be inserted into constructs which can be introduced into a host cell of choice for expression of the encoded protein if an ENU is used or for use of an E. nidulans promoter to direct expression of a heterologous protein. Potential host cells include both prokaryotic and eukaryotic cells. A host cell may be unicellular or found in a multicellar differentiated or undifferentiated organism depending upon the intended use. It is understood that useful exogenous genetic material may be introduced into any non-fungal cell or organism such as a plant cell, plant, mammalian cell, mammal, fish cell, fish, bird cell, bird or bacterial cell.

[0034] Depending upon the host, the regulatory regions for expression of ENU sequences will vary, including regions from viral, plasmid or chromosomal genes, or the like. For expression in prokaryotic or eukaryotic microorganisms, particularly unicellular hosts, a wide variety of constitutive or regulatable promoters may be employed. Among transcriptional initiation regions which have been described are regions from bacterial and yeast hosts, such as E. coli, B. subtilis, Sacchromyces cerevisiae, including genes such as beta-galactosidase, T7 polymerase and tryptophan E.

[0035] Furthermore, for use in transformation of E. nidulans, constructs may include those in which an ENU sequence or portion thereof of the present invention is positioned with respect to a promoter sequence such that production of antisense mRNA complementary to native mRNA molecules is provided. In this manner, expression of the native gene may be decreased. Such methods may find use for modification of particular functions of the targeted host, and/or for discovering the function of a protein naturally expressed in E. nidulans.

### Complements and Homologs of ENUs

[0036] Another embodiment of the present invention comprises a nucleic acid molecule which is a homolog of an ENU of this invention which encodes a polypeptide also found in a plant, animal or bacterial organism. Yet another embodiment comprises a nucleic acid molecule which encodes a polypeptide which is homologous to a polypeptide encoded by an ENU of this invention where the percent identity between the polypeptides is between about 25% and about 40%, more preferably of between about 40 and about 70%, even more preferably of between about 70% and about 90%, and even more preferably between about 90% and 99% and most preferably 100%.

[0037] Genomic sequences can be screened for the presence of protein homologs utilizing one or a number of different search algorithms that have been developed, one example of which are the suite of programs referred to as BLAST programs. In addition, unidentified reading frames may be screened for by gene prediction software such as GenScan available for downloading from the Stanford University web site. The degeneracy of the genetic code allows different nucleic acid sequences to code for the same protein or peptide, e.g. see U.S. Pat. No. 4,757,006, the entirety of which is herein incorporated by reference. As used herein a nucleic acid molecule is degenerate of another nucleic acid molecule when the nucleic acid molecules encode for the same amino acid sequences but comprise different nucleotide sequences. An aspect of the present invention is that the nucleic acid molecules of the present invention include nucleic acid molecules that are degenerate from the ENUs of this invention.

[0038] A further aspect of the present invention comprises one or more nucleic acid molecules which differ in nucleic acid sequence from those of an ENU of this invention due to the degeneracy in the genetic code in that they encode the same protein but differ in nucleic acid sequence or a protein having one or more conservative amino acid residue. Codons capable of coding for such conservative substitutions are known in the art. For instance, serine is a conservative substitute of alanine and threonine is a conservative substitute for serine.

[0039] Regulatory Elements

[0040] One class of agents of the present invention includes nucleic acid molecules having promoter regions or partial promoter regions or other regulatory elements, particularly those found in SEQ ID NO: 1 through SEQ ID NO: 16144 and located upstream of the trinucleotide ATG sequence at the start site of a protein coding region. As used herein, a promoter region is a region of a nucleic acid molecule that is capable, when located in cis to a nucleic acid sequence that encodes for a protein or peptide to function in a way that directs expression of one or more mRNA molecules that encodes for the protein or peptide. Promoters of the present invention can comprise nucleic acids in the range from about 300 bp to at least 1000 bp or more, say about 2000 bp or even higher say about 5000 bp and up to about 10 kb upstream of the trinucleotide ATG sequence at the start site of a protein coding region. While in many circumstances a 300 bp promoter may be sufficient for expression, additional sequences may act to further regulate expression, for example, in response to biochemical, developmental or environmental signals. In a preferred embodiment of the present invention, the promoter is upstream of a nucleic acid sequence that encodes an E. nidulans protein homolog or fragment thereof or preferably upstream of an ENU of this invention. It is also preferred that the promoters of the present invention contain a CAAT and a TATA cis element. Moreover, the promoters of the present invention can include one or more cis elements in addition to a CAAT and a TATA box. For the most part, the promoters of the present invention will be located in contig sequences which generally represent longer nucleic acids than do singleton sequences of the present invention. Contigs in SEQ ID NO:1 through SEQ ID NO:16144 are recognized as those sequences whose designations begin with ANI61C or ANI50C, as opposed to singletons whose designations begin with ANI61S or ANI50S. Where an ENU is specified as being located on two different contigs, the promoter region will be located on the contig representing the 5′ region of the gene encoding sequence.

[0041] By “regulatory element” it is intended a series of nucleotides that determines if, when, and at what level a particular gene is expressed. The regulatory DNA sequences specifically interact with regulatory or other proteins. Many regulatory elements act in cis (“cis elements”) and are believed to affect DNA topology, producing local conformations that selectively allow or restrict access of RNA polymerase to the DNA template or that facilitate selective opening of the double helix at the site of transcriptional initiation. Cis elements occur within, but are not limited to promoters, and promoter modulating sequences (inducible elements). Cis elements can be identified using known cis elements as a target sequence or target motif in the BLAST programs of the present invention. Promoters of the present invention include homologs of cis elements known to effect gene regulation that show homology with the nucleic acid molecules of the present invention.

[0042] Polypeptides

[0043] Other aspects of this invention comprises one or more of the polypeptides, including proteins or peptide molecules, encoded by the coding region of an ENU of this invention or fragments thereof or homologs thereof. Protein and peptide molecules can be identified using known protein or peptide molecules as a target sequence or target motif in the BLAST programs of the present invention. In a preferred embodiment the protein or fragment molecules of the present invention are derived from E. nidulans.

[0044] As used herein, the term “protein molecule” or “peptide molecule” includes any molecule that comprises five or more amino acids. It is well known in the art that proteins or peptides may undergo modification, including post-translational modifications, such as, but not limited to, disulfide bond formation, glycosylation, phosphorylation, or oligomerization. Thus, as used herein, the term “protein molecule” or “peptide molecule” includes any protein molecule that is modified by any biological or non-biological process. The terms “amino acid” and “amino acids” refer to all naturally occurring L-amino acids. This definition is meant to include norleucine, ornithine, homocysteine, and homoserine.

[0045] One or more of the protein or peptide molecules may be produced via chemical synthesis, or more preferably, by expression in a suitable bacterial or eukaryotic host. Suitable methods for expression are described by Sambrook et al., Molecular Cloning, A Laboratory Manual, 2nd Edition, Cold Spring Harbor Press, Cold Spring Harbor, N.Y. (1989), or similar texts.

[0046] A “protein fragment” comprises a subset of the amino acid sequence of that protein. A protein fragment which comprises one or more additional peptide regions not derived from a base protein is a “fusion” protein. Such molecules may be derivatized to contain carbohydrate or other groups (such as keyhole limpet hemocyanin, etc.). Fusion protein or peptide molecules of the present invention are preferably produced via recombinant means.

[0047] Another class of agents comprises protein or peptide molecules encoded by the coding region of an ENU of this invention or complements thereof or, fragments or fusions thereof in which conservative, non-essential, or not relevant, amino acid residues have been added, replaced, or deleted. An example of such a homolog is the homolog protein of a non-E. nidulans filamentous fungus. Such a homolog can be obtained by any of a variety of methods. For example, as indicated above, one or more of the disclosed sequences for primers of this invention can be used to define a pair of primers that may be used to isolate the homolog-encoding nucleic acid molecules from any desired species. Such molecules can be expressed to yield homologs by recombinant means.

[0048] Antibodies

[0049] One aspect of the present invention concerns antibodies, single-chain antigen binding molecules, or other proteins that specifically bind to one or more of the protein or peptide molecules of the present invention and their homologs, fusions or fragments. Such antibodies may be used to quantitatively or qualitatively detect the protein or peptide molecules of the present invention. As used herein, an antibody or peptide is said to “specifically bind” to a protein or peptide molecule of the present invention if such binding is not competitively inhibited by the presence of non-related molecules. In a preferred embodiment the antibodies of the present invention bind to proteins of the present invention, in a more preferred embodiment of the antibodies of the present invention bind to proteins derived from E. nidulans.

[0050] Nucleic acid molecules that encode all or part of the protein of the present invention can be expressed, via recombinant means, to yield protein or peptides that can in turn be used to elicit antibodies that are capable of binding the expressed protein or peptide. Such antibodies may be used in immunoassays for that protein. Such protein-encoding molecules, or their fragments may be a “fusion” molecule (i.e., a part of a larger nucleic acid molecule) such that, upon expression, a fusion protein is produced. It is understood that any of the nucleic acid molecules of the present invention may be expressed, via recombinant means, to yield proteins or peptides encoded by these nucleic acid molecules.

[0051] The antibodies that specifically bind proteins and protein fragments of the present invention may be polyclonal or monoclonal. It is understood that practitioners are familiar with the standard resource materials which describe specific conditions and procedures for the construction, manipulation and isolation of antibodies (see, for example, Harlow and Lane, Antibodies: A Laboratory Manual, Cold Spring Harbor Press, Cold Spring Harbor, N.Y. (1988), the entirety of which is herein incorporated by reference).

[0052] It is understood that any of the antibodies of the present invention can be substantially purified and/or be biologically active and/or recombinant.

[0053] Fungal Constructs and Fungal Transformants

[0054] The present invention also relates to a fungal recombinant vector, e.g. comprising exogenous genetic material. In a preferred embodiment the exogenous genetic material includes at least one nucleic acid molecule of the present invention which can preferably be (a) an ENU of this invention or fragment or homolog thereof or (b) a regulatory element, promoter or partial promoter of the present invention. In a further more preferred embodiment of the present invention exogenous genetic material includes a regulatory element, promoter or partial promoter of the present invention and a nucleic acid molecule of the present invention having a sequence within a contig selected from the group identified by SEQ ID NO: 1 through SEQ ID NO: 16206 or complements thereof or fragments of either. In a further more preferred embodiment of the present invention exogenous genetic material includes a regulatory element, promoter or partial promoter of the present invention and a nucleic acid molecule encoding an E. nidulans protein homolog or fragments thereof. It is also understood that such exogenous genetic material may be introduced into any non-fungal cell or organism such as a plant cell, plant, mammalian cell, mammal, fish cell, fish, bird cell, bird or bacterial cell.

[0055] The recombinant vector may be any vector which can be conveniently subjected to recombinant DNA procedures. The choice of a vector will typically depend on the compatibility of the vector with the host cell into which the vector is to be introduced. The vector may be a linear or a closed circular plasmid. The vector system may be a single vector or plasmid or two or more vectors or plasmids which together contain the total DNA to be introduced into the genome of the host.

[0056] The vectors of the present invention preferably contain one or more selectable markers which permit easy selection of transformed cells. A selectable marker is a gene the product of which provides, for example biocide or viral resistance, resistance to heavy metals, prototrophy to auxotrophs, and the like. The selectable marker may be selected from the group including, but not limited to, amdS (acetamidase), argB (ornithine carbamoyltransferase), bar (phosphinothricin acetyltransferase), hygB (hygromycin phosphotransferase), niaD (nitrate reductase), pyrG (orotidine-5′-phosphate decarboxylase), sC (sulfate adenyltransferase), trpC (anthranilate synthase) and gfp (green fluorescent protein). Preferred for use in an Emericella cell are the amdS and pyrG markers of Emericella nidulans or Aspergillus, oryzae and the bar marker of Streptomyces hygroscopicus. Furthermore, selection may be accomplished by co-transformation, e.g., as described in WO 91/17243, the entirety of which is herein incorporated by reference.

[0057] A nucleic acid sequence of the present invention may be operably linked to a suitable promoter sequence. A protein or fragment thereof encoding nucleic acid molecule of the present invention may also be operably linked to a suitable leader sequence. A leader sequence is a nontranslated region of a mRNA which is important for translation by the fungal host. The leader sequence is operably linked to the 5′ terminus of the nucleic acid sequence encoding the protein or fragment thereof. The leader sequence may be native to the nucleic acid sequence encoding the protein or fragment thereof or may be obtained from foreign sources. A polyadenylation sequence may also be operably linked to the 3′ terminus of the nucleic acid sequence of the present invention.

[0058] To avoid the necessity of disrupting the cell to obtain the protein or fragment thereof, and to minimize the amount of possible degradation of the expressed protein or fragment thereof within the cell, it may be preferred that expression of the protein or fragment thereof gives rise to a product secreted outside the cell, especially in the case of expression in host cells of fungus or bacteria. To this end, the protein or fragment thereof of the present invention may be linked to a signal peptide linked to the amino terminus of the protein or fragment thereof. A signal peptide is an amino acid sequence which permits the secretion of the protein or fragment thereof from the host into the culture medium.

[0059] A protein or fragment thereof encoding nucleic acid molecule of the present invention may also be linked to a propeptide coding region. A propeptide is an amino acid sequence found at the amino terminus of aproprotein or proenzyme. Cleavage of the propeptide from the proprotein yields a mature biochemically active protein. The resulting polypeptide is known as a propolypeptide or proenzyme (or a zymogen in some cases). Propolypeptides are generally inactive and can be converted to mature active polypeptides by catalytic or autocatalytic cleavage of the propeptide from the propolypeptide or proenzyme. The propeptide coding region may be native to the protein or fragment thereof or may be obtained from foreign sources.

[0060] The expressed protein or fragment thereof may be detected using methods known in the art that are specific for the particular protein or fragment. These detection methods may include the use of specific antibodies, formation of an enzyme product, or disappearance of an enzyme substrate. For example, if the protein or fragment thereof has enzymatic activity, an enzyme assay may be used. Alternatively, if polyclonal or monoclonal antibodies specific to the protein or fragment thereof are available, immunoassays may be employed using the antibodies to the protein or fragment thereof. The techniques of enzyme assay and immunoassay are well known to those skilled in the art.

[0061] The resulting protein or fragment thereof may be recovered by methods known in the arts For example, the protein or fragment thereof may be recovered from the nutrient medium by conventional procedures including, but not limited to, centrifugation, filtration, extraction, spray-drying, evaporation, or precipitation. The recovered protein or fragment thereof may then be further purified by a variety of chromatographic procedures, e.g., ion exchange chromatography, gel filtration chromatography, affinity chromatography, or the like.

[0062] Plant Constructs and Plant Transformants

[0063] ENUs or other nucleic acid molecules of this invention may be used in plant transformation or transfection. Exogenous genetic material may be transferred into a plant cell and the plant cell regenerated into a whole, fertile or sterile plant. Exogenous genetic material is any genetic material, whether naturally occurring or otherwise, from any source that is capable of being inserted into any organism. Such genetic material may be transferred into either monocotyledons and dicotyledons including but not limited to the plants, alfalfa, Arabidopsis thaliana, barley, broccoli, cabbage, citrus, cotton, garlic, oat, oilseed rape, onion, canola, flax, maize, an ornamental plant, pea, peanut, pepper, potato, rice, rye, sorghum, soybean, strawberry, sugarcane, sugarbeet, tomato, wheat, poplar, pine, fir, eucalyptus, apple, lettuce, lentils, grape, banana, tea, turf grasses, sunflower, oil palm, etc.

[0064] Exogenous genetic material may be transferred into a plant cell by the use of a DNA vector or construct designed for such a purpose. Vectors have been engineered for transformation of large DNA inserts into plant genomes. Binary bacterial artificial chromosomes have been designed to replicate in both E. coli and Agrobacterium tumefaciens and have all of the features required for transferring large inserts of DNA into plant chromosomes. BAC vectors, e.g. a pBACwich, have been developed to achieve site-directed integration of DNA into a genome.

[0065] A construct or vector may also include a plant promoter to express the protein or protein fragment of choice. A number of promoters which are active in plant cells have been described in the literature. These include the nopaline synthase (NOS) promoter, the octopine synthase (OCS) promoter, a caulimovirus promoter such as the CaMV 19S promoter and the CaMV 35S promoter, the figwort mosaic virus 35S promoter, the light-inducible promoter from the small subunit of ribulose-1,5-bis-phosphate carboxylase (ssRUBISCO), the Adh promoter, the sucrose synthase promoter, the R gene complex promoter, and the chlorophyll a/b binding protein gene promoter. For the purpose of expression in source tissues of the plant, such as the leaf, seed, root or stem, it is preferred that the promoters utilized in the present invention have relatively high expression in these specific tissues. For this purpose, one may choose from a number of promoters for genes with tissue- or cell-specific or -enhanced expression. Examples of such promoters reported in the literature include the chloroplast glutamine synthetase GS2 promoter from pea, the chloroplast fructose-1,6-biphosphatase (FBPase) promoter from wheat, the nuclear photosynthetic ST-LS1 promoter from potato, the phenylalanine ammonia-lyase (PAL) promoter and the chalcone synthase (CHS) promoter from Arabidopsis thaliana. Also reported to be active in photosynthetically active tissues are the ribulose-1,5-bisphosphate carboxylase (RbcS) promoter from eastern larch (Larix laricina), the promoter for the cab gene, cab6, from pine, the promoter for the Cab-1 gene from wheat, the promoter for the CAB-1 gene from spinach, the promoter for the cab1R gene from rice, the pyruvate, orthophosphate dikinase (PPDK) promoter from Zea mays, the promoter for the tobacco Lhcb1*2 gene, the Arabidopsis thaliana SUC2 sucrose-H⁺ symporter promoter, and the promoter for the thylacoid membrane proteins from spinach (psaD, psaF, psaE, PC, FNR, atpC, atpD, cab, rbcS). Other promoters for the chlorophyl a/b-binding proteins may also be utilized in the present invention, such as the promoters for LhcB gene and PsbP gene from white mustard (Sinapis alba). Additional promoters that may be utilized are described, for example, in U.S. Pat. Nos. 5,378,619; 5,391,725; 5,428,147; 5,447,858; 5,608,144; 5,608,144; 5,614,399; 5,633,441; 5,633,435 and 4,633,436, all of which are herein incorporated in their entirety.

[0066] Constructs or vectors may also include, with the coding region of interest, a nucleic acid sequence that acts, in whole or in part, to terminate transcription of that region. For example, such sequences have been isolated including the Tr7 3′ sequence and the nos 3′ sequence or the like. It is understood that one or more sequences of the present invention that act to terminate transcription may be used.

[0067] A vector or construct may also include other regulatory elements or selectable markers. Selectable markers may also be used to select for plants or plant cells that contain the exogenous genetic material. Examples of such include, but are not limited to, a neo gene which codes for kanamycin resistance and can be selected for using kanamycin, G418, etc.; a bar gene which codes for bialaphos resistance; a mutant EPSP synthase gene which encodes glyphosate resistance; a nitrilase gene which confers resistance to bromoxynil, a mutant acetolactate synthase gene (ALS) which confers imidazolinone or sulphonylurea resistance; and a methotrexate resistant DHFR gene.

[0068] A vector or construct may also include a screenable marker to monitor expression. Exemplary screenable markers include a β-glucuronidase or uidA gene (GUS), an R-locus gene, which encodes a product that regulates the production of anthocyanin pigments (red color) in plant tissues; a β-lactamase gene, a gene which encodes an enzyme for which various chromogenic substrates are known (e.g., PADAC, a chromogenic cephalosporin); a luciferase gene, a xylE gene which encodes a catechol dioxygenase that can convert chromogenic catechols; an α-amylase gene, a tyrosinase gene which encodes an enzyme capable of oxidizing tyrosine to DOPA and dopaquinone which in turn condenses to melanin; an α-galactosidase, which will turn a chromogenic α-galactose substrate. Included within the terms “selectable or screenable marker genes” are also genes which encode a secretable marker whose secretion can be detected as a means of identifying or selecting for transformed cells. Examples include markers which encode a secretable antigen that can be identified by antibody interaction, or even secretable enzymes which can be detected catalytically. Secretable proteins fall into a number of classes, including small, diffusible proteins detectable, e.g., by ELISA, small active enzymes detectable in extracellular solution (e.g., α-amylase, β-lactamase, phosphinothricin transferase), or proteins which are inserted or trapped in the cell wall (such as proteins which include a leader sequence such as that found in the expression unit of extension or tobacco PR-S). Other possible selectable and/or screenable marker genes will be apparent to those of skill in the art.

[0069] Technology for introduction of DNA into cells is well known to those of skill in the art. Four general methods for delivering a gene into cells have been described: (1) chemical methods, (2) physical methods such as microinjection and bombardment, (3) viral vectors and (4) receptor-mediated mechanisms.

[0070] It is also to be understood that two different transgenic plants can also be mated to produce offspring that contain two independently segregating added, exogenous genes.

[0071] The present invention also provides for parts of the plants of the present invention. Plant parts, without limitation, include seed, endosperm, ovule and pollen. In a particularly preferred embodiment of the present invention, the plant part is a seed.

[0072] Transformation of plant protoplasts can be achieved using methods based on calcium phosphate precipitation, polyethylene glycol treatment, electroporation, and combinations of these treatments.

[0073] Any of the nucleic acid molecules of the present invention may be introduced into a plant cell in a permanent or transient manner in combination with other genetic elements such as vectors, promoters enhancers etc. Further any of the nucleic acid molecules encoding an E. nidulans protein or fragment thereof or homologs of the present invention may be introduced into a plant cell in a manner that allows for over expression of the protein or fragment thereof encoded by the nucleic acid molecule.

[0074] Uses of the Agents of the Present Invention

[0075] Nucleic acid molecules of the present invention may be employed to obtain other E. nidulans nucleic acid molecules. Such molecules can be readily obtained by using the above-described nucleic acid molecules to screen E. nidulans libraries.

[0076] Nucleic acid molecules and fragments thereof of the present invention may also be employed to obtain nucleic acid molecule homologs of non-E. nidulans species including the nucleic acid molecules that encode, in whole or in part, protein homologs of other species or other organisms, sequences of genetic elements such as promoters and transcriptional regulatory elements. Such molecules can be readily obtained by using the above-described nucleic acid molecules to screen cDNA or genomic libraries of non-E. nidulans species. Methods for forming such libraries are well known in the art. Such homolog molecules may differ in their nucleotide sequences from those found in one or more of the E. nidulans genes of this invention or complements thereof because complete complementarity is not needed for stable hybridization. The nucleic acid molecules of the present invention therefore also include molecules that, although capable of specifically hybridizing with the nucleic acid molecules may lack “complete complementarity.”

[0077] The disclosed nucleic acid molecules may be used to define one or more primer pairs that can be used with the polymerase chain reaction to amplify and obtain any desired nucleic acid molecule or fragment thereof. Such molecules will find particular use in generation of nucleic acid arrays, including microarrays, containing portions of or the entire encoding region for the identified E. nidulans genes. It is noted that the molecules on such arrays may contain native intervening sequences (introns) of the genes and will still find use in microarray based methods such as transcriptional profiling for functional analysis of E. nidulans genes and metabolic pathways. Particularly preferred primers are those set forth in table 3.

[0078] The nucleic acid molecules of the present invention may be used for physical mapping. Physical mapping, in conjunction with linkage analysis, can enable the isolation of genes. Physical mapping has been reported to identify the markers closest in terms of genetic recombination to a gene target for cloning. Once a DNA marker is linked to a gene of interest, the chromosome walking technique can be used to find the genes via overlapping clones. For chromosome walking, random molecular markers or established molecular linkage maps are used to conduct a search to localize the gene adjacent to one or more markers. A chromosome walk is then initiated from the closest linked marker. Starting from the selected clones, labeled probes specific for the ends of the insert DNA are synthesized and used as probes in hybridizations against a representative library. Clones hybridizing with one of the probes are picked and serve as templates for the synthesis of new probes; by subsequent analysis, contigs are produced.

[0079] The degree of overlap of the hybridizing clones used to produce a contig can be determined by comparative restriction analysis. Comparative restriction analysis can be carried out in different ways all of which exploit the same principle; two clones of a library are very likely to overlap if they contain a limited number of restriction sites for one or more restriction endonucleases located at the same distance from each other. The most frequently used procedures are, fingerprinting, restriction fragment mapping or the “landmarking” technique. It is understood that the nucleic acid molecules of the present invention may in one embodiment be used in physical mapping. In a preferred embodiment, nucleic acid molecules of the present invention may in one embodiment be used in the physical mapping of E. nidulans.

[0080] Nucleic acid molecules of the present invention can be used in comparative mapping. Comparative mapping within families provides a method to assess the degree of sequence conservation, gene order, ploidy of species, ancestral relationships and the rates at which individual genomes are evolving. Comparative mapping has been carried out by cross-hybridizing molecular markers across species within a given family. As in genetic mapping, molecular markers are needed but instead of direct hybridization to mapping filters, the markers are used to select large insert clones from a total genomic DNA library of a related species. The selected clones, each a representative of a single marker, can then be used to physically map the region in the target species. The advantage of this method for comparative mapping is that no mapping population or linkage map of the target species is needed and the clones may also be used in other closely related species. By comparing the results obtained by genetic mapping in model organisms, with those from other species, similarities of genomic structure among species can be established. Cross-hybridization of RFLP markers has been reported and conserved gene order has been established in many studies. Such macroscopic synteny is utilized for the estimation of correspondence of loci among these organisms. It is understood that nuclear acid molecules of the present invention may in another embodiment be used in comparative mapping. In a preferred embodiment the nucleic acid molecules of present invention may be used in the comparative mapping of filamentous fungi.

[0081] In an aspect of the present invention, one or more of the agents of the present invention may be used to detecting the presence, absence or level of a organism, preferably a filamentous fungus and more preferably an E. nidulans in a sample. In another aspect of the present invention, one or more of the nucleic acid molecules of the present invention are used to determine the level (i.e., the concentration of mRNA in a sample, etc.) or pattern (i.e., the kinetics of expression, rate of decomposition, stability profile, etc.) of the expression of a protein encoded in part or whole by one or more of the nucleic acid molecule of the present invention (collectively, the “Expression Response” of a cell or tissue). As used herein, the Expression Response manifested by a cell or tissue is said to be “altered” if it differs from the Expression Response of cells or tissues of organisms not exhibiting the phenotype. To determine whether a Expression Response is altered, the Expression Response manifested by the cell or tissue of the organism exhibiting the phenotype is compared with that of a similar cell or tissue sample of a organism not exhibiting the phenotype. As will be appreciated, it is not necessary to re-determine the Expression Response of the cell or tissue sample of organisms not exhibiting the phenotype each time such a comparison is made; rather, the Expression Response of a particular organism may be compared with previously obtained values of normal organism. As used herein, the phenotype of the organism is any of one or more characteristics of an organism.

[0082] Nucleic acid molecules of the present invention can be used to monitor expression. A microarray-based method for high-throughput monitoring of gene expression may be utilized to measure gene-specific hybridization targets. This ‘chip’-based approach involves using microarrays of nucleic acid molecules as gene-specific hybridization targets to quantitatively measure expression of the corresponding genes. Every nucleotide in a large sequence can be queried at the same time. Hybridization can be used to efficiently analyze nucleotide sequences.

[0083] Several methods have been described for fabricating microarrays of nucleic acid molecules and using such microarrays in detecting nucleic acid sequences. For instance, microarrays can be fabricated by spotting nucleic acid molecules, e.g. genes, oligonucleotides, etc., onto substrates or fabricating oligonucleotide sequences in situ on a substrate. Spotted or fabricated nucleic acid molecules can be applied in a high density matrix pattern of up to about 30 non-identical nucleic acid molecules per square centimeter or higher, e.g. up to about 100 or even 1000 per square centimeter. Useful substrates for arrays include nylon, glass and silicon. See, for instance, U.S. Pat. Nos. 5,202,231; 5,445,934; 5,525,464; 5,700,637; 5,744,305; 5,800,992, the entirety of the disclosures of all of which are incorporated herein by reference. Sequences can be efficiently analyzed by hybridization to a large set of oligonucleotides or cDNA molecules representing a large portion of a the genes of a genome. An array consisting of oligonucleotides or cDNA molecules complementary to subsequences of a target sequence can be used to determine the identity of a target sequence, measure its amount, and detect differences between the target and a reference sequence. Nucleic acid molecule microarrays may also be screened with molecules or fragments thereof to determine nucleic acid molecules that specifically bind molecules or fragments thereof.

[0084] The microarray approach may also be used with polypeptide targets (U.S. Pat. No. 5,445,934; U.S. Pat. No. 5,143,854; U.S. Pat. No. 5,079,600; U.S. Pat. No. 4,923,901, all of which are herein incorporated by reference in their entirety). Essentially, polypeptides are synthesized on a substrate (microarray) and these polypeptides can be screened with either protein molecules or fragments thereof or nucleic acid molecules in order to screen for either protein molecules or fragments thereof or nucleic acid molecules that specifically bind the target polypeptides.

[0085] It is understood that one or more of the molecules of the present invention, preferably one or more of the nucleic acid molecules or protein molecules or fragments thereof of the present invention may be utilized in a microarray based method. In a preferred embodiment of the present invention, one or more of the E. nidulans nucleic acid molecules or protein molecules or fragments thereof of the present invention may be utilized in a microarray based method. A particular preferred microarray embodiment of the present invention is a microarray comprising nucleic acid molecules encoding genes or fragments thereof that are homologs of known genes or nucleic acid molecules that comprise genes or fragments thereof that elicit only limited or no matches to known genes. A further preferred microarray embodiment of the present invention is a microarray comprising nucleic acid molecules having genes or fragments thereof that are homologs of known genes and nucleic acid molecules that comprise genes or fragment thereof that elicit only limited or no matches to known genes.

[0086] In a preferred embodiment, the microarray of the present invention comprises at least 10 nucleic acid molecules that specifically hybridize under high stringency to at least 10 nucleic acid molecules encoding E. nidulans protein or fragments. In a more preferred embodiment, the microarray of the present invention comprises at least 100 nucleic acid molecules that specifically hybridize under high stringency to at least 100 nucleic acid molecules that encode an E. nidulans protein or fragment thereof. In an even more preferred embodiment, the microarray of the present invention comprises at least 1,000 nucleic acid molecules that specifically hybridize under high stringency to at least 1,000 nucleic acid molecules that encode an E. nidulans protein or fragment thereof. In a further even more preferred embodiment, the microarray of the present invention comprises at least 2,500 nucleic acid molecules that specifically hybridize under high stringency to at least 2,500 nucleic acid molecules that encode an E. nidulans protein or fragment thereof. While it is understood that a single nucleic acid molecule may encode more than one protein or fragment thereof, in a preferred embodiment, at least 50%, preferably at least 70%, more preferably at least 80%, even more preferably at least 90% of the nucleic acid molecules that comprise the microarray encode one protein homolog or fragment thereof. It is, of course, understood that these nucleic acid molecules can be non-identical.

[0087] In a preferred embodiment, the microarray of the present invention comprises at least 10 nucleic acid molecules that specifically hybridize under high stringency to at least 10 ENUs selected from the group having SEQ ID NO: 16207 through SEQ ID NO: 28905 or fragment thereof or complement of either. In a more preferred embodiment, the microarray of the present invention comprises at least 100 nucleic acid molecules that specifically hybridize under high stringency to at least 100 ENUs selected from the group having SEQ ID NO: 16207 through SEQ ID NO: 28905 or fragment thereof or complement of either. In an even more preferred embodiment, the microarray of the present invention comprises at least 1,000 nucleic acid molecules that specifically hybridize under high stringency to at least 1,000 ENUs selected from the group having SEQ ID NO: 16207 through SEQ ID NO: 28905 or fragment thereof or complement of either. In a further even more preferred embodiment, the microarray of the present invention comprises at least 2,500 nucleic acid molecules that specifically hybridize under high stringency to at least 2,500 ENUs selected from the group having SEQ ID NO: 16207 through SEQ ID NO: 28905 or fragment thereof or complement of either. While it is understood that a single nucleic acid molecule may encode more than one protein homolog or fragment thereof, in a preferred embodiment, at least 50%, preferably at least 70%, more preferably at least 80%, even more preferably at least 90% of the nucleic acid molecules that comprise the microarray encode one protein or fragment thereof.

[0088] Nucleic acid molecules of the present invention may be used in site directed mutagenesis. Site-directed mutagenesis may be utilized to modify nucleic acid sequences, particularly as it is a technique that allows one or more of the amino acids encoded by a nucleic acid molecule to be altered (e.g. a threonine to be replaced by a methionine). Three basic methods for site-directed mutagenesis are often employed, i.e. (a) cassette mutagenesis, (b) primer extension and (c) methods based on PCR. See also U.S. Pat. No. 5,880,275, U.S. Pat. No. 5,380,831, and U.S. Pat. No. 5,625,136, the entirety of all of which is incorporated herein by reference.

[0089] Any of the nucleic acid molecules of the present invention may either be modified by site-directed mutagenesis or used as, for example, nucleic acid molecules that are used to target other nucleic acid molecules for modification. It is understood that mutants with more than one altered nucleotide can be constructed using techniques that practitioners skilled in the art are familiar with such as isolating restriction fragments and ligating such fragments into an expression vector.

[0090] Preferred aspects of this invention comprise collections of genes, nucleic acid molecules, polypeptides and/or primers of this invention ranging in size from about 10 non-identical members or more, e.g. at least about 100 or 270 or higher, more preferably at least about 300 or 350, most preferably at least 500 or higher, up to about 1000, or 2000 or even higher, say about 5000, or more non-identical members. As used herein a non-identical member is a member that differs in nucleic acid or amino acid sequence. For example, a non-identical nucleic acid molecule is a nucleic acid molecule that differs in nucleic acid sequence from the nucleic acid molecule to which it is being compared to. For example a nucleic acid molecule having the sequence 5′ CCC 3′ is not identical—i.e. non-identical—to a nucleic acid molecule having the sequence 5′ CCG 3′. In one aspect a collection may comprise all of the genes, nucleic acid molecules, polypeptides and/or primers of this invention. Such collections can be located or organized in a variety of forms, e.g. on microarrays, in solutions, in bacterial clone libraries, etc. As used herein, an “organized” collection is a collection where the nucleic acid or amino acid sequence of a member of such a collection can be determined based on its physical location.

[0091] Preferred collections of nucleic acid molecules can be selected from the following groups: SEQ ID NO: 16207 through SEQ ID NO: 27905 or complements thereof; SEQ ID NO: 16207 through SEQ ID NO: 26804 or complements thereof; SEQ ID NO: 26000 through SEQ ID NO: 26804 or complements thereof; SEQ ID NO: 16207 through SEQ ID NO: 25999 or complements thereof; SEQ ID NO: 24035 through SEQ ID NO: 25999 or complements thereof; SEQ ID NO: 16207 through SEQ ID NO: 24034 or complements thereof; SEQ ID NO: 22710 through SEQ ID NO: 24034 or complements thereof; SEQ ID NO: 16207 through SEQ ID NO: 22709 or complements thereof; SEQ ID NO: 17681 through SEQ ID NO: 22709 or complements thereof; SEQ ID NO: 16207 through SEQ ID NO: 17680 or complements thereof; SEQ ID NO: 17618 through SEQ ID NO: 17680 or complements thereof; SEQ ID NO: 16207 through SEQ ID NO: 17617 or complements thereof; SEQ ID NO: 17295 through SEQ ID NO: 17617 or complements thereof; SEQ ID NO: 16207 through SEQ ID NO: 17294 or complements thereof; SEQ ID NO: 28166 through SEQ ID NO: 44345 or complements thereof. Other preferred nucleic acid collections include any of the above groups but where such groups also include fragments of such sequences.

[0092] It is understood that all these preferred collections may also range in size from about 10 or more, e.g. at least about 100 or 270 or higher, more preferably at least about 300 or 350, most preferably at least 500 or higher, up to about 1000, or 2000 or even higher, say about 5000, or more non-identical members.

[0093] Another aspect of this invention provides the genes, nucleic acid molecules, polypeptides and/or primers in a substantially pure form. For instance, by use of the primers of this invention, any of the ENUs can be produced in substantially pure form by PCR.

[0094] Another aspect of this invention is to provide methods for determining gene expression, e.g. identifying homologous genes expressed by non-E. nidulans organism. Such methods comprise collecting mRNA from tissue of such organism, using the mRNA as a template for producing a quantity of labeled nucleic acid, and contacting the labeled nucleic acid molecule with a collection of purified nucleic acid molecules, e.g. on a microarray.

[0095] Computer Media

[0096] One or more of the nucleotide sequence provided in SEQ ID NO: 1, through SEQ ID NO: 44345 or complements or fragments of either can be “provided” in a variety of media to facilitate use. Such a medium can also provide a subset thereof in a form that allows a skilled artisan to examine the sequences. In one application of this embodiment, a nucleotide sequence of the present invention can be recorded on computer readable media. As used herein, “computer readable media” refers to any medium that can be read and accessed directly by a computer. Such media include, but are not limited to: magnetic storage media, such as floppy discs, hard disc, storage medium, and magnetic tape: optical storage media such as CD-ROM; electrical storage media such as RAM and ROM; optical scanner readable medium such as printed paper; and hybrids of these categories such as magnetic/optical storage media. A skilled artisan can readily appreciate how any of the presently known computer readable mediums can be used to create a manufacture comprising computer readable medium having recorded thereon a nucleotide sequence of the present invention.

[0097] As used herein, “recorded” refers to a process for storing information on computer readable medium. A skilled artisan can readily adopt any of the presently known methods for recording information on computer readable medium to generate media comprising the nucleotide sequence information of the present invention. In addition, a variety of data processor programs and formats can be used to store the nucleotide sequence information of the present invention on computer readable medium. The sequence information can be represented in a word processing text file, or represented in the form of an ASCII file, stored in a database application, such as DB2, Sybase, Oracle, or the like. A skilled artisan can readily adapt any number of data processor structuring formats (e.g. text file or database) in order to obtain computer readable medium having recorded thereon the nucleotide sequence information of the present invention.

[0098] By providing one or more of nucleotide sequences of the present invention, a skilled artisan can routinely access the sequence information for a variety of purposes. Computer software is publicly available which allows a skilled artisan to access sequence information provided in a computer readable medium. The examples which follow demonstrate how software which implements the BLAST and/or BLAZE search algorithms on a Sybase system can be used to identify open reading frames (ORFs) within the genome that contain homology to ORFs or proteins from other organisms. Such ORFs are protein-encoding fragments within the sequences of the present invention and are useful in producing commercially important proteins such as enzymes used in amino acid biosynthesis, metabolism, transcription, translation, RNA processing, nucleic acid and a protein degradation, protein modification, and DNA replication, restriction, modification, recombination, and repair.

[0099] The present invention further provides systems, particularly computer-based systems, which contain the sequence information described herein. Such systems are designed to identify commercially important fragments of the nucleic acid molecule of the present invention. As used herein, “a computer-based system” refers to the hardware means, software means, and data storage means used to analyze the nucleotide sequence information of the present invention. The minimum hardware means of the computer-based systems of the present invention comprises a central processing unit (CPU), input means, output means, and data storage means. A skilled artisan can readily appreciate that any one of the currently available computer-based system are suitable for use in the present invention.

[0100] As indicated above, the computer-based systems of the present invention comprise a data storage means having stored therein a nucleotide sequence of the present invention and the necessary hardware means and software means for supporting and implementing a search means. As used herein, “data storage means” refers to memory that can store nucleotide sequence information of the present invention, or a memory access means which can access manufactures having recorded thereon the nucleotide sequence information of the present invention. As used herein, “search means” refers to one or more programs which are implemented on the computer-based system to compare a target sequence or target structural motif with the sequence information stored within the data storage means. Search means are used to identify fragments or regions of the sequence of the present invention that match a particular target sequence or target motif. A variety of known algorithms are disclosed publicly and a variety of commercially available software for conducting search means are available can be used in the computer-based systems of the present invention. Examples of such software include, but are not limited to, MacPattern (EMBL), BLASTIN and BLASTIX (NCBIA). One of the available algorithms or implementing software packages for conducting homology searches can be adapted for use in the present computer-based systems.

[0101] The most preferred sequence length of a target sequence is from about 30 to 300 nucleotide residues or from about 10 to 100 of the corresponding amino acids. However, it is well recognized that during searches for commercially important fragments of the nucleic acid molecules of the present invention, such as sequence fragments involved in gene expression and protein processing, may be of shorter length.

[0102] As used herein, “a target structural motif,” or “target motif,” refers to any rationally selected sequence or combination of sequences in which the sequences the sequence(s) are chosen based on a three-dimensional configuration which is formed upon the folding of the target motif. There are a variety of target motifs known in the art. Protein target motifs include, but are not limited to, enzymatic active sites and signal sequences. Nucleic acid target motifs include, but are not limited to, promoter sequences, cis elements, hairpin structures and inducible expression elements (protein binding sequences).

[0103] Thus, the present invention further provides an input means for receiving a target sequence, a data storage means for storing the target sequences of the present invention sequence identified using a search means as described above, and an output means for outputting the identified homologous sequences. A variety of structural formats for the input and output means can be used to input and output information in the computer-based systems of the present invention. A preferred format for an output means ranks fragments of the sequence of the present invention by varying degrees of homology to the target sequence or target motif. Such presentation provides a skilled artisan with a ranking of sequences which contain various amounts of the target sequence or target motif and identifies the degree of homology contained in the identified fragment.

[0104] Having now generally described the invention, the same will be more readily understood through reference to the following examples which are provided by way of illustration, and are not intended to be limiting of the present invention, unless specified.

### EXAMPLE 1

[0105] This example serves to illustrate the generation of the 16206 nucleic acid sequences listed in Table 1 as contigs having SEQ ID NO: 1 through SEQ ID NO: 16206. About 390,000 genomic nucleotide sequence traces are derived from 11 different M13 and double stranded libraries. The two basic methods for the DNA sequencing are the chain termination method of Sanger et al., Proc. Natl. Acad. Sci. (U.S.A.) 74:5463-5467 (1977) and the chemical degradation method of Maxam and Gilbert, Proc. Natl. Acad. Sci. (U.S.A.) 74:560-564 (1977) using automated fluorescence-based sequencing as reported by Craxton, Method, 2:20-26 (1991); Ju et al., Proc. Natl. Acad. Sci. (U.S.A.) 92:4347-4351 (1995); and Tabor and Richardson, Proc. Natl. Acad. Sci. (U.S.A.) 92:6339-6343 (1995) and high speed capillary gel electrophoresis, e.g. as disclosed by Swerdlow and Gesteland, Nucleic Acids Res. 18:1415-1419 (1990); Smith, Nature 349:812-813 (1991); Luckey et al., Methods Enzymol. 218:154-172 (1993); Lu et al., J. Chromatog. A. 680:497-501 (1994); Carson et al., Anal. Chem. 65:3219-3226 (1993); Huang et al., Anal. Chem. 64:2149-2154 (1992); Kheterpal et al., Electrophoresis 17:1852-1859 (1996); Quesada and Zhang, Electrophoresis 17:1841-1851 (1996); Baba, Yakugaku Zasshi 117:265-281 (1997). For instance, genomic nucleotide sequence traces are generated using a 377 DNA Sequencer (Perkin-Elmer Corp., Applied Biosystems Div., Foster City, Calif.) allowing for rapid electrophoresis and data collection. With these types of automated systems, fluorescent dye-labeled sequence reaction products are detected and chromatograms are subsequently viewed, stored in computer and analyzed using corresponding apparatus-related software programs. These methods are known to those of skill in the art and have been described and reviewed (Birren et al., Genome Analysis: Analyzing DNA, 1, Cold Spring Harbor, N.Y.

[0106] Over 390,000 quality genomic sequence traces are assembled generally as follows:
[0107] (a) all traces are quality clipped using yc_qual_clip.pl (with a minimum PHRED score of 12.5 and maximum length of 50 bp);
[0108] (b) all traces are segregated according to library construction method;
[0109] (c) all traces are “vector-trimmed’ i.e., 5′ and 3′ vector and linker sequences are removed;
[0110] (d) all traces are re-united in one file;
[0111] (e) all traces are then clustered with PANGEA's clustering tool (available from Pangea Corp., Pittsburgh, Pa.). A cluster includes 2 or more traces of sequences with 90% similarity over 60 bp. After clustering the set of traces includes clusters and non-clustered traces referred to as “singletons”.
[0112] (f) A high stringency PHRAP assembly is run on each cluster to separate from clusters singlet traces which do not meet stringency criteria. The arguments to high stringency PHRAP are: minmatch 25, minscore 50, penalty −4;
[0113] (g) Contigs and the singleton (including singlet) traces and their corresponding quality files are united; and, then are assembled with a low stringency PHRAP (using default PHRAP arguments) to generate a “final” assembly; and
[0114] (h) the final set of 16,144 nucleic acid sequences (identified in Table 1 by contig identification number “ANI61xxxx” and by the corresponding SEQ ID NO: 1 through SEQ ID NO:16144) and 52 nucleic acid sequences (identified in Table 1 by contig identification number “ANI50xxxx” and by corresponding SEQ ID NO: 16145 through SEQ ID NO:16206) are run through the annotation and gene selection processes. Contigs in SEQ ID NO:1 through SEQ ID NO:16144 are recognized as those sequences whose designations begin with ANI61C or ANI50C. Singleton sequences are recognized as those having designations which begin with ANI61S or ANI50S.
   The genomic sequence traces and many of the contigs and singleton traces are disclosed in copending provisional applications for patent identified by Ser. Nos. 60/101,665; 60/101,666; 60/102,358; 60/113,361; 60/126,265; 60/130,189; 60/130,190; 60/132,861; 60/138,103; 60/149,882.

### EXAMPLE 2

[0115] This example illustrates the identification of ENUs within 16206 contigs assembled in Example 1. The genes and partial genes embedded in such contigs are identified through a series of informatic analyses. The tools to define genes fall into two categories: homology-based and predictive-based methods. Homology-based searches (e.g., GAP2, NAP, BLASTX and TBLASTX) detect conserved sequences during comparisons of DNA sequences or hypothetically translated protein sequences to public and/or proprietary DNA and protein databases. Existence of a E. nidulans gene is inferred if significant sequence similarity extends over the majority of the target gene. Since homology-based methods may overlook genes unique to E. nidulans, for which homologous nucleic acid molecules have not yet been identified in databases, gene prediction programs are also used. Predictive methods employed in the definition of the E. nidulans genes included the use of the GenScan gene predictive software program which is available from Stanford University (e.g. at the web site http://gnomic/stanford.edu/GENSCANW.html). GenScan, in general terms, infers the presence and extent of a gene through a search for “gene-like” grammar.

[0116] The homology-based methods used to define the E. nidulans gene set included GAP2, BLASTX supplemented by NAP, and TBLASTX. For a description of BLASTX and TBLASTX see Coulson, Trends in Biotechnology 12:76-80 (1994) and Birren et al., Genome Analysis, 1:543-559 (1997). GAP2 and NAP are part of the Analyis and Annotation Tool (AAT) for Finding Genes in Genomic Sequences which was developed by Xiaoqiu Huang at Michigan Tech University and is available at the web site http://genome.cs.mtu.edu/. The AAT package includes two sets of programs, one set (DPS/NAP) for comparing the query sequence with a protein database, and the other set (DDS/GAP2) for comparing the query sequence with a cDNA database. Each set contains a fast database search program and a rigorous alignment program. The database search program quickly identifies regions of the query sequence that are similar to a database sequence. Then the alignment program constructs an optimal alignment for each region and the database sequence. The alignment program also reports the coordinates of exons in the query sequence. See Huang, et al., Genomics 46: 37-45 (1997).

[0117] The GAP2 program computes an optimal global alignment of a genomic sequence and a cDNA sequence without penalizing terminal gaps. A long gap in the cDNA sequence is given a constant penalty. The DNA-DNA alignment by GAP2 adjusts penalties to accommodate introns. The GAP2 program makes use of splice site consensuses in alignment computation. GAP2 delivers the alignment in linear space, so long sequences can be aligned. See Huang, Computer Applications in the Biosciences 10 227-235 (1994). The GAP2 program aligned the E. nidulans contigs with the A. nidulans/E. nidulans EST library in the microorganism databank maintained by Bruce Roe's laboratory at the University of Oklahoma.

[0118] The NAP program computes a global alignment of a DNA sequence and a protein sequence without penalizing terminal gaps. NAP handles frameshifts and long introns in the DNA sequence. The program delivers the alignment in linear space, so long sequences can be aligned. It makes use of splice site consensuses in alignment computation. Both strands of the DNA sequence are compared with the protein sequence and one of the two alignments with the larger score is reported. See Huang, and Zhang, “Computer Applications in the Biosciences 12(6), 497-506 (1996).

[0119] NAP takes a nucleotide sequence, translates it in three forward reading frames and three reverse complement reading frames, and then compares the six translations against a protein sequence database (e.g. the non-redundant protein (i.e., nr-aa) database maintained by the National Center for Biotechnology Information as part of GenBank and available at the web site: http://www.ncbi.nlm.nih.gov). TBLASTX compared six possible frame translations of the E. nidulans contigs against six frame translations of Aspergillus fumigatus, Fusarium gramineareum, Saccharomyces cerevisiae, and Candida albicans genomic sequences.

[0120] The first homology-based search for genes in the E. nidulans contigs is effected using the GAP2 program and the University of Oklahoma A. nidulans/E. nidulans EST database. A collection of about 14000 A. nidulans/E. nidulans EST sequences from the database with known 5′ and 3′ orientations and mate information are clustered into about 3500 distinct sets or “clusters”. These clusters are then mapped onto an assembly of E nidulans contigs represented by SEQ ID NO. 1 through SEQ ID NO. 16206 using the GAP2 program. GAP2 standards for selecting a DNA-DNA match were >96% sequence identity with the following parameters:

[0121] gap extension penalty=1

[0122] match score=2

[0123] gap open penalty=6

[0124] gap length for constant penalty=20

[0125] mismatch penalty=−2

[0126] minimum exon length=21

[0127] DNA matches with ESTs fell into three categories. Firstly, ENUs are identified when a 5′-3′ EST pair aligned to the sequences on the same contig. Since EST's are necessarily derived from genes, no corroborating evidence is required to validate the gene prediction. Certain ENUs are identified by 5′-3′ EST pair match on a single contig. These ENUs are identified by “EST” in the selection basis column of Table 2 and include SEQ ID NO. 16207 through SEQ ID NO. 17294.

[0128] Another group of ENUs identified by DNA match with EST's is selected because of alignment of a 5′-3′ EST pair which spanned two contigs supported by BLASTX similarity or clonemate information. These ENUs are identified by “MCEST” in the selection basis column of Table 2 and include SEQ ID NO. 17618 through SEQ ID NO. 17680.

[0129] Another group of ENUs identified by DNA match with EST's is selected solely from a 3′ EST match of at least 300 bp using EST's which are not previously aligned. These ENUs are identified by “TPEST” in the selection basis column of Table 2 and include SEQ ID NO. 17295 through SEQ IS NO. 17617.

[0130] The second homology-based method used for gene discovery is BLASTX hits extended with the NAP software package. BLASTX is run with the E. nidulans contigs represented by SEQ ID NO. 1 through SEQ ID NO. 16206 as queries against the GenBank non-redundant protein data library identified as “nr-aa”. NAP is used to better align the amino acid sequences as compared to the genomic sequence. NAP extends the match in regions where BLASTX has identified high-scoring-pairs (HSPs), predicts introns, and then links the exons into a single ORF prediction. Experience suggests that NAP tends to mis-predict the first exon. E. nidulans introns are almost without exception short (<150 bp), and NAP routinely predicts very long (>400 bp) introns leading to a very short, and biologically unmeaningful, 5′ exon. The NAP-predicted ORFs containing long introns (>175 bp) are first segregated and truncated (the long intron and the nonsense 5′ exon removed) and the remaining portion of the ORF established as a gene. Selection in a first pass is for sequences with (a)<600 bp from the 3′ end with >50% coverage, (b)<600 bp from the 3′ end with >300 bp coverage and (c)>1000 bp from the 3′ end with 500 bp coverage. Selection in a second pass is for sequences with (a)<300 bp from the 3′ end with, 500 bp coverage and >80% coverage or (b)<300 bp from the 3′ end and >500 bp coverage. The NAP parameters are:

[0131] gap extension penalty=1

[0132] gap open penalty=15

[0133] gap length for constant penalty=25

[0134] min exon length (in aa)=7

[0135] The ENUs identified by NAP with (a)>300 bp and >10% homology or (b)>175 bp and >50% coverage are identified by “NAP” in the selection basis column of Table 2 and include SEQ ID NO. 17681 through SEQ ID NO. 22709.

[0136] For NAP alignments with large introns GenScan are used to locate the terminal exon and extend the 5′ end of the terminal exon. When there is no GenScan indication of a terminal exon, the gene is identified using the longest exon cluster without a large intron. The ENUs identified from large intron alignments are identified by “LINAP” in the selection basis column of Table 2 and include SEQ ID NO. 22710 through SEQ ID NO. 24034.

[0137] In the final homology-based method, TBLASTX, is used with genome information from three fungal genome sequencing projects: Aspergillus fumigatus, Fusarium gramineareum, Saccharomyces cerevisiae and Candida albicans. As a general rule, non-coding regions of DNA accumulate mutations much more rapidly than coding regions. With this knowledge, we use TBLASTX, which compares hypothetical translations, to identify regions of DNA that code for highly similar amino acid strings in both E. nidulans and the four other fungal genomes. As with EST matches, the TBLASTX hits fall into three categories of defined genes: matches that fall within an E. nidulans contig, matches that convincingly bridge contigs, and long matches that contain sufficient portions of a gene for use in transcriptional profiling. Unlike GAP2 and BLASTX/NAP analyses, we have comparatively little experience in interpreting TBLASTX scores as a tool for defining the unigene set. For this reason, conservative standards for inclusion of TBLASTX hits into the gene set are utilized. These standards are a minimal E value of 1E-20, and for terminal exons, a minimal match of 200 bp within the 1000 most 5′ and 3′ ends of an E. nidulans contig. In addition to these criteria, in part due to conflicting data from TBLASTX analyses (where different TBLASTX matches will suggest two or more mutually exclusive possibilities) and to concerns that repeat regions may be sufficiently similar to confound the method, TBLASTX predicted genes bridging two contigs are included when corroborating evidence in the form of GenScan predictions and/or clone mate evidence from double stranded clones is available.

[0138] The GenScan program is “trained” with E. nidulans characteristics. Though better than the “off-the-shelf” version, the GenScan trained to identify E. nidulans genes proved more proficient at predicting exons than predicting full-length genes. Predicting full-length genes is compromised by point mutations in the unfinished contigs, as well as by the short length of the contigs relative to the typical length of a gene. Due to the errors found in the full-length gene predictions by GenScan, inclusion of GenScan-predicted genes is limited to those genes and exons whose probabilities are above a conservative probability threshold. When used with TBLASTX the GenScan parameters are:

[0139] mean GenScan P value >0.3

[0140] mean GenScan T value >0

[0141] mean GenScan Coding score >50

[0142] length >200 bp

[0143] minimum TBLASTX E value <1E-20

[0144] Significant TBLASTX hits to single contigs that are greater than 300 bp contributed 805 genes to the unigene set. The high E value threshold limited the vast majority (99%) of the TBLASTX hits to the fungal genome comparisons. The TBLASTX hits with GenScan corroboration identified 1965 ENUs identified by “GTBX” in the selection basis column of Table 2 and include SEQ ID NO. 24035 through SEQ ID NO. 25999.

[0145] To identify ENUs solely by TBLASTX, the TBASTX E values is set at 1E-30 with a length of >200 bp. The ENU's identified solely by TBLASTX are identified by “TBX” in the selection basis column of Table 2 and include SEQ ID NO. 26000 through SEQ ID NO. 26804.

[0146] A final set of genes is predicted using the GenScan program “trained” with E. nidulans characteristics and the mean GenScan P value parameters changed to >0.4. The ENUs identified solely by GenScan are identified by “GSP” in the selection basis column of Table 2 and include SEQ ID NO. 26805 through SEQ ID NO. 27905.

[0147] To insure that the same nucleic acid molecule is not inferred two or more times with different methods, an all-versus-all BLASTN analysis of the all the identified ENUs is conducted. There are instances where sequencing and assembly errors will confound the identification of duplicates, but such instances are comparatively rare.

[0148] The confidence in accuracy of the identified ENUs is highest for those identified by a match of a 5′-3′ EST to a single contig (identified by EST) and lowest for those identified solely the GenScan predictive algorithm (identified by GSP). The order of confidence for the ENUs is in the following order:

| Selection Basis | Confidence |
|---|---|
| EST | highest |
| TPEST | |
| MCEST | |
| NAP | |
| LINAP | |
| GTBX | |
| TBX | |
| GSP | lowest |

In Table 2 the ENUs of this invention are identified in the sequence identification (seq. id.) column the name ENU (Emericella nidulans unigene) and begins with ENU00001 for SEQ ID NO. 16207.

[0149] Other modifications of the above described embodiments of the invention which are obvious to those of skill in the area of molecular biology and related disciplines are intended to be within the scope of the following claims.

### EXAMPLE 3

[0150] This example serves to illustrate the design of primers of this invention which are useful, for instance, for initiating synthesis of nucleic acid molecules of this invention, specifically substantial parts of certain ENU's of this invention. The primers specifically disclosed herein, i.e. in Table 3 by SEQ ID NO. 28166 through SEQ ID NO. 44345, are designed with the program Primer3 (obtained from the MIT-Whitehead Genome Center) with a “perl-oracle” wrapper. The criteria applied to design a primer included:

[0151] Primer annealing temperature (minimum 65° C., optimum 70° C., maximum 75° C.)

[0152] Primer length (minimum 18 bp, optimum 20 bp, maximum 28 bp)

[0153] G+C content (minimum 20%, maximum 80%)

[0154] Position of the primer relative to the gene

[0155] Length of the amplified region (500 to 800 bp)

[0156] PHRED quality score of the gene template (minimum of 20)

[0157] Whether the gene was defined from one or two contigs

[0158] Maximum mismatch=12.0 (weighted score from Primer3 program)

[0159] Pair Max Misprime=24.0 (weighted score from Primer3 program)

[0160] Maximum N's=0

[0161] Maximum poly-X=5

[0162] The primary goal of the design process is the creation of groups of primer pairs with a common annealing temperature (Tₘ). When the program could identify a primer pair for any gene that fit the criteria, the gene is removed from the bin of genes needing primer design. Genes remaining in the bin are subjected to additional rounds of primer-picking, with the gradual and simultaneous relaxation of the criteria (i.e., lowering the annealing temperature, increasing the size of the window where primers could be predicted, expanding the range of permitted size and G+C content, removing the need for a G/C clamp), until primers are picked for about 8,000 of the about 12,000 ENUs of this invention. After the E. nidulans specific portion of the primers is selected, an additional common primer tail sequence (universal primer) is added to the 5′ ends. For the forward primers, the additional common bases added are: (5′-GAATTCACTGCGGCCGCCATG-3′); for the reverse primers the additional common bases added are: (5′-GTTCTCGAGACGAGCGATCGC-3′). The universal primer tail sequences are added so that subsequent reamplifications of any primer pair can be done with a single set of primers. In addition, the primer tail sequences contain restriction digestion sites for 8 bp cutters (NotI and SgfI) and 6 bp cutters (EcoRI and XhoI) to facilitate cloning of ENUs into vectors. The forward primers contains EcoRI and NotI restriction sites; the reverse primers contains XhoI and SgfI restriction sites.

[0163] Reference is also made to Tables 2 and 3 for identification of the primers and reference to the ENU for which they are designed. The primer pair for a particular ENU is identified in Table 2 by indication of the complementary or identical nucleotides in the particular ENU under the columns “Primer 5 pos” and “Primer 3 pos”. The primer sequence numbers in Table 3 correspond to an ENU identified in the “Seq id” column. For example, the primer pair ENU00001p5 and ENU00001p3 represent the sequences for the 5′ and 3′ primer, respectively for ENU00001. The primer sequences provided in the sequence listing all contain the universal tail sequence described above as the first 21 nucleotides. It is noted that primer pairs are not required to contain the universal tail sequence, the relevant portion for amplification and/or hybridization probes being the E. nidulans specific sequences designated in the “Primer 5 pos” and “Primer 3 pos” columns in Table 2.

Lengthy table referenced here
US20090119022A1-20090507-T00001
Please refer to the end of the specification for access instructions.

### Table Column Heading Descriptions

### Table 1

[0164] Sea Num

[0165] Provides the SEQ ID NO. for the listed sequences.

[0166] Contig Id

[0167] Arbitrary identification assigned to each contig or singleton. Contigs designations begin with ANI61C or ANI50C. Singleton designations begin with ANI61S or ANI50S.

### Table 2

[0168] Sea Num

[0169] Provides the SEQ ID NO. for the listed sequences.

[0170] Sea Id

[0171] Arbitrarily assigned number for each ENU (Emericella nidulans unigene).

[0172] Contig Source

[0173] Indicates contigs or singletons from which the ENUs are identified and the location of the ENU within the contig or singleton. In cases where the first numeral is higher than its corresponding second numeral, the E. nidulans protein or fragment thereof is encoded by the complement of the sequence set forth in the sequence listing. The first numeral separated from the contig or singleton ID by a colon represents the starting point for the codon for the most N-terminal (if the first number is lower than the second number) or C-terminal (if the first number is higher than the second number) amino acid for the protein or protein fragment encoded by the ENU. For MCEST selected ENUs, locations on each of the overlapping contigs or contig and singleton are provided.

[0174] Primer 5 Pos

[0175] Indicates the sequence segment within the ENU which is complementary to the hybridizing portion of the 5′ or forward primer.

[0176] Primer 3 Pos

[0177] Indicates the sequence segment within the ENU which is identical to the hybridizing portion of the 3′ or reverse primer.

[0178] Selection Basis

[0179] A code which identifies the ENU selection method. The selection methods are described in detail in Example 2 and briefly summarized as follows:
[0180] EST: GAP2 identified 5′-3′ EST pair match on a single contig or singleton
[0181] TPEST: GAP2 identified 3′ EST match of at least 300 bp
[0182] MCEST: GAP2 identified 5′-3′ EST pair match spanning two contigs or a contig and a singleton
[0183] NAP: NAP predicted ORFs which have no unreasonably long introns (>175 bp)
[0184] LINAP: NAP predicted ORFs with long predicted introns and false 5′ exons removed
[0185] GTBX: TBLASTX hit with GenScan corroboration
[0186] TBX: TBLASTX hit alone
[0187] GSP: GenScan prediction
[0188] Database Hit

[0189] Indicates database entry for sequence which matched to the E. nidulans contig query. For EST and MCEST hits, the database is the University of Oklahoma A. nidulans/E. nidulans EST database. For GTBX and TBX hits, the database is a private microbial sequence database containing genomic sequences of Aspergillus fumigatus, Fusarium gramineareum, Saccharomyces cerevisiae and Candida albicans.

[0190] Ncbi Gi

[0191] Refers to National Center for Biotechnology Information GenBank Identifier number which is the best match for a given contig or singleton region from which the associated ENU was identified using the NAP or LINAP selection basis.

[0192] Aat Score

[0193] The aat_nap score is reported by the NAP program in the AAT package. It is an alignment score in which each match and mismatch is scored based on the BLOSUM62 scoring matrix.

[0194] Blast Score

[0195] Each entry in the “Blast Score” column of the table refers to the BLASTX score that is generated by sequence comparison of the designated clone with the GenBank sequence listed in the Description column.

[0196] Blast Prob

[0197] The entries in the “Blast-Prob” column refer to the probability that matches occur by chance.

[0198] % Id

[0199] The entries in the “% id” column of the table refer to the percentage of identically matched nucleotides (or residues) that exist along the length of that portion of the sequences which is aligned by the BLAST comparison portion of the NAP program.

[0200] % Cvrg

[0201] The “% cvrg” is the percent of hit sequence length that matches to the query sequence in the match generated using NAP (% cvrg=(match length/hit total length)×100).

[0202] Description

[0203] For NAP and LINAP selected ENUs, a description of the database entry referenced in the “NCBI gi” column. For EST, TPEST, and MCEST, the resulting ENU sequences were analyzed by TBLASTX against the non-redundant protein database maintained by NCBI, and a description of the top hit is provided.

### Table 3

[0204] Sea Num

[0205] Provides the SEQ ID NO. for the listed primer sequences. The first 21 nucleotides of each primer sequence contains either a universal 5′ or 3′ tail sequence.

[0206] Seq Id

[0207] Identification assigned to each primer sequence. Primers are identified by the number of the ENU and either p5 to indicate the 5′ or forward primer, or p3 to indicate the 3′ or reverse primer. The location of the E. nidulans specific sequence within the primers is provided in Table 2.

LENGTHY TABLES
The patent application contains a lengthy table section. A copy of the table is available in electronic form from the USPTO web site (http://seqdata.uspto.gov/?pageRequest=docDetail&DocID=US20090119022A1). An electronic copy of the table will also be available from the USPTO upon request and payment of the fee set forth in 37 CFR 1.19(b)(3).

The application's sequence listing, which the Patent Office published only in electronic form, follows.

SEQUENCE LISTING (44345 sequences)

SEQ ID NO: 1 - DNA, 5008 bp, Emericella nidulans
ttcggatgactatagagattcaaaggggttaggttcccctgactgaatctgacactgaccagtgcctttgcttttgttgttgaaacaccatctatacagccattgctgatctcccgtccaaaccacaccaacaacgccaacctactttggctcaacaccacgcgctggtttctgctcagaattacttggaaataagcctacttagatttaagtaccgtccccataccctggtcaatcctgagcaggatcggccgactggttgcaacagaacacttcgcccaagagccaacggaaccattcgctttggccgaagattgtgccatacaaagcaattagaccttaactccacgattctattgttcccggggcccagtgggatagggttaccttcacagtaaaccgcccatggacaataacccaaaataatccagttatgcatataatagctttaacaggcagtgatctgcatggccaaataaaatactgtattctaatatagtattataaactatttatgtataccaaaataatcaaaatacagtaatatacctactcagatagcttgccaaccagcgagttgctccgccgggctttggggcagccaaaacatccaaatccaatggattattacatggtctaacccaacccaatccttggcgggtcggggggggttggggcgggtttaacaagtctagtctagattgaagaaggcacagtttgcaagctgctgggtggggggtccatggcattagtatgctgtgtggacccgcagaggcgggagcggttgcggacctggagttgtgccacatccagcattaggggtgcagtgccgtccgggttaggtttcaacccactctgcaatgaaaacaacaccactcaatttgtgtgctaccgcgcgggtttaaaaaagacattagaatacgtacatttcataagttttttgatataatgcattcttacgatattttatgcaggttagtatgtttctacgcatttttcacccgcacgggtctcctatcaggaaccgtagcccgcgcggactgccaattatgcgactctccccgcaccgctgcgggttgcggtgcgcgttagcaaccctatcgagcagcaggtgcattgtatagtcttggccttcctagataccagacacttcgtaattaatacgagttattgggcatgtgtcacgctagctgcatcacatgacttgcttttagggcgcccgatcatttggactgccaccacctgtaagctggcctcctaacattaatgagtaggcaaactcatcctctctaacagataatcataaggccatattgaatgagcaaaggtgagtaacccatttgatacactgatgccatttggacttcagcagttgtctaatctttcgcagccccaaatatataaacacatacaccactctacgatgatgctccccgccaaatcgactctccttgccctcgcctccttcatatctctcgccgtggctgtcgatgtcggtgcaccgtgcgacagctcaagagagggtgtatactggtgtgcaaacgaccaagctaccattgctgtctgccatcttggagcctggcatgagtcttctaaatgcgggattggttgctgcgcatggcattgggttaataatttgccatattgcttttgctaggcaaagcgttgatggcccctagtgctagagatgatggagttagggcggggaggccagtaattatctggactgggatgaggggttgcagtggggtttattgaaacctgcagataaattcacggtgatatgaggaagctggcacagaataggatgaactaagtaattagtgtctgagggagcgagtttatggacttagttagagaacagaaaggtggtagatatacacgtgtcatcttacatagccccttgctaggggatgtaatcagatggatcatcctatctgtcatagaatatgctcaaaggggaaatggtagaaggaaactgtatctataacaggcatgggcattattgttttcaactggctgtgctgtattcacaagtatcataagcttgaagagaggtatgggattgccttcctctccctctatatacatgctcctaagcttccatcgggttttattcaacttcctagaatgttctaacttgtctgccattcaagtactatggtagggcttcctgtagcccagcccagggacaaccgtgcatggtacggcaacgcgctctcaaagtcaaggactaactaaattgactgcacaaacacctctctctgcaccacgattttctgcgccctccctaaaaaccccaatttcttgcgcatgccgctggtctgagtcccaaggccgcagctcctcgcgtgaagagtaggacccctcgtaccctggctctggcagctccgacctaccccccctccaaactcaacacttcactacgaccctcatctgtcggatagacaccccgcaccctgacccagacacacttcagcagcggcacatacaacaccgggcacgcggtgacctggtatatgcccgcctcgactgtcgcctacatgaggatgatagccccggaccaggtgttattcatgacggcactggtggacgatattttcgtcagggagataattgccgcgttaagaccactgtgagagtgtcactaaagcaaaacaaaggcagggagacgaaatggtggatggacatacatattccctacgccaaacgccgccaaaataccaatcttcattcgcagcctcatctgcagcctcgccacgtgcgggatcggaagcgccagcctcctgacgtcgcaaacgatattcaccacccgcgttgtgcgtaacatcgtgtttatggagacgcactggcccggcacgcccgcgtcccagagtttggtcagcggcctgcacacgacacttaggaggactagcgctatcagcacatttgcgagaatgattgcgccgagcgcgtagcaggttatttttgttgggcggtggatgccgaaggtttggaggtggaggcttaggattgcaaggcgcgggggcacgacggcgagtgcgtaaaggtacgagattgcgactaggaagattgccccaggtttagctggtaagaggctctgcgacattagtgcaggcggacgccggcgtatttggtgtcagctgttcggggccgtccgtggttagcattgaggtacctgcctatctaatggtcggggtctgggtatctggctgttgcatcctgggaggtccaaaggttgctcgaatagtctctacagctcttcaagcttattctgtctttgcaaggtcagatttgctggcttcgcctccttaggcttaggtatagaagctgtagccaactcaactgctaattctgttcgcagttgcttgctaggattgtctctcttgatacgactatcttttcggattctcttgtctgtctcgtccgtcttgtatatggttgccccggtcgtctcagtgggctctatctcgaccgcctcgctcagccctggtgccgtctcggtctcatactcctctctattggttcatcaaatgcccgagtacgttcctactcggccccgctaggtctttcgtattctctcggctcgatgtaacatctcccggttcgtggatttcgtcttcgagccagcggcatccgccttgttcggttctaggttcgttgttctatagctcgatcgaggatagataggtaagttgtacaggcctggccaccgtcacaggagcaaggttcaacgggccacgtacagttccgatcttctgctgaattgggtgagtacattatgtctcacacattccccctagatgctaggcctgctggttaggctagatgtagcagcctgggctcattgccaatgttgtggattagacttgttaaaccacgggttggggcgggttttcaggcctagctgatccgcccacgcgggttttggggtgggttaccttcacagtaaaccgcccatgggtttagcaaataattctaacccaacctaaataacccaaaataacccagtaatgcatatcattactctaatagataataatctacatagttaataaaatactgtatttaaatactgtattataactatctaagtaagaaaatataatctaaatacagtaatatacctatttagatatcttggcaacccagcaggttgctccgccgggctttggggcagccaaaaatatctaaaacctaatagataattagaaggtctaacccaacccatttcttggcgggtcggggcgggttggggcgggtttcgtgggttgggtttaacaagtctagtaatagactgctaacttcttagaatgttaccggcacctttagtccatatattaggtgtattaatgatacaactaataatctgactaaatattactgtagttctattcaaggctatgcagtgcttgatcttcagttcttagaggatctttttaataaagatattctaccagcagctgaggaatgtggtgtctttgaactattatctgtagcgggccctgcccggaagtagtgctcgaggccgtcgacggccactcgcttcacgtgacctttccgtcacatgacccatcggtaagctggcgcatatctagatgtttctatcctgttgatcttgtttcttctcttttcttctttctttagcgtgttcttctgtgatgatcctacctgtaggataattaatggcattagcccgtaacattagaacacgctcacaaccactactacaacaagacgtcggacagcggacattggacaacagacattggacaacggacattggacaacggacactggacaacggacattggacaacggacattggacaatggacattggataacggacattgggcagtggacattggaaacagacattagtaacggacattggtaacggacatcggaagacggagactggagagtgacttttggacaacggtttgaacaaccagtcggacaatacggacagcgaacgtgacaccggacgcgacacttataccgaa

SEQ ID NO: 2 - DNA, 1209 bp, Emericella nidulans
ggctgatatctggcctagtttttgtagctagatactgcaagctgccagtaccgtgctggtattctttgatattgatttttggatctggagcatcatcgataactgttccaggatcaaggggtgatttggtaggatgggcattatgaagcctaaaagagttgataatattattaatttgatcctcctgtgacaggtggatgcctgtaggcgttgttttgatatttatgcctagatatcgcttgaattccggcgcttctttaatttcaaatcgggatttcaagctttcgagcgcttgtacggcgttttgggccttttcaccaacaatcatgaagtcatcaacatgggtggtgatatagagcttttctgtaacatgtacgaataggcctgggtcatgcggggaaaccttaaatcctatagattcaagatatgctcgtagatcattgtaccataggcgcgcggacggggttaggccatatagtgattggcggagcaggcaaactagggtccctggctccccttcagcgaatccaagtggttgatgcatataaatcggttggccttttaactttgtatttagaaatgctagaactgtatctgcctgaataatatgccagcctttttgggcgctgacaccaaacaagatttgtgaagtaataggatcaacaactggggcgtatgttgctccttcaaattctgatttatcaagaagattccccctgattacctattgtgctttgtaacggatagagttgtcaggattaagcttctttttataaacccatcttcctggtatggcgcgtgcgccagcaggcatgtcagattttcagatcaaatcccaacattgcttctgtttcaaggtatttatctcttcttgcattgctgcatgccattgaactgattcagggcctttaatagcctcattgtacgatttgggcttaggtagaggtgattcaacagattttaggatagcaaatcctttggcaggtcggtatagctcttctccggaggtaatatctgatatatcctgtataagaaggtcttcattggttttgggttctgcagcttcggcagtttcgccaggtttgacagtttcgagagctttaccagcttcgggagctttggcagcttcgtacggcttgctcagtggcgggttaaactcctccttgatagagatatcactggtatcacgtagttggttgatttcagggt

SEQ ID NO: 3 - DNA, 1567 bp, Emericella nidulans
gaaccaggttgagggcatggcgacaaccaagatcaggccatagcctgtgacaaccactatcaaatacatcaatactaaggggtggccaataccctccaccattatctttaaaggaaaagtctatatagagggatagtttattgaatgcatggtccctggcagttagaggattgaaataagcaccaatagttagactatagatataattggcttttgctggcttcaaaatatcttcattccagcgacaaataagcgtacaagggggggatattggctgcttatctcacctcctaaaccctttggatgttggttgttgcagacctttaaagaaggcatatagcaagcttattgaggagaaatgacgcctgggatataactatattaacatgctagatttcttgaaattttacctagcaggttaccaggaagtctttactacagagaatatttaaagcagattcaaagtaactaggatactaccttctgatctcatggtagtgcttgaaaagtcaaatatcagcctgggtactctaaccccccctccaagccaagggggtgcttcaatcccttcttctcagcttggtacgccttatactgtgtactatgtatattgaaaagtctcttcagttaaaaggatgcttgagagaaggttaaaagtcccctaactccctccaaaagaagtcttagataagttggtaaaagggtgtaagttggctatctataatacaacttactagcaagggaaaactgtggtctctactcagccatagagaataacagacaggaaaagagttattcttaatactagataactcctatacaatgtcttccattccaggaagccagggacctaatttagacaagaaataactaaatacaggcaagataggggggtgctggcggaggtgcgcctcaaactttagatgcacctaaatatactctaccaacatgttttagaatataatattcagggctataagaggaccagctgtcctactcattatagaatttagtttattttaatttgaatcacttttagttgacgcacagtacttcagagtcgagcaagaataggttttgaagggaatctcacggatcacccggattttacgttaaagcctagaggataatgcaactgaaagcatactcaccaaaataattgttaacctctgtttaagaattaatactgccagcgtatatcagacctatccttatttagtacccaagtgaagaattgaagtataattcgagtattataggtaaaagaatgaatagttaggttaataaaccgatttctatatttaggcaggataggcagattggaatagttaaaactagtattttttcactatttgggtgtttatagcctagaatcatttatccctagttctctcgttttgtgttttatttatctgtccattactaaatcaatatcatttttattgtttttcctctttattattatttggcgttatgttctttaaattacttttagttcatttattttccattttttttttattttcttctcttttcatagttactcttcttcttccatccatcttct

SEQ ID NO: 4 - DNA, 408 bp, Emericella nidulans
gttgatggaggtactctctcagctgtggacaaccagcggcccaacatcaccctggaaggcaaccaacgccacctttatttattctctactccttcctactctaaacacatttatccggagtctgctgtctgccattgtggggctaccggaggatgacattaccacgtccatggccagcgatatcctgacctcaacttctccgatggcaaccctagtcctctcctttatctcctcttagaggctcgcacatatctcatcttgactcccgtcactcatggccctcgctctcttctgcgcgccattcgtcagatcccaactgccaactacatcgcaagtactccgttgattccaaattgtatcttctctcgacccgtcctacaccgtcctcctggaatttatttagcttca

SEQ ID NO: 5 - DNA, 4602 bp, Emericella nidulans
aggagtcagtattgcaaggctacaaagataatgaacaaatactatattgatattgcaggggggtgaagcataattagacggtaaggatgaagaaagcccctccgggtatcaggaatattccaatgtttcttgctgattacagacaatgcaacctgatatcaatgggtttatacccttcaaaccagagatagggctattcccacctttcagggatggctgaattatttcaaaaaccaaggatatagcccaccagctttggtacgaagtgatcgcgaatttataactgaaaatgtcaagaaactatgccaaaactatagcctattttgggaaccaaccgctgtagactccccatggcaagatggcgtcagtgagcgcggaatacagacagttttgcagtatacacgggcaatgttatataactcaggattaccatgctggctatggccgctggctttacagacagctgtttatcacataaactgattacctataagggtcctcttgtacaatgatcgacggcctatggcactaaccagcgatccagaaattcagccatgtgcccattttacgccctattctgcctggatcaatggcgatgccaatatcaagcatcttgtcaaatttgggtcacctgcttggatgcacctacatggagcttcaaaatatgctagcaagccaaccagcaagatcgacccaaaggctaaaaaggtacatgttgtcggatatcaaggctcccatatctatgttatttgggaccccgaaatcaatcaactccgtgacaccagtaatatcttgatcaaggaagaattcagccctccacagaacaagctgtacaaagccaccaaagctgccaaaactattaaagctaccaaagctgcagaaccaaaaaccaatggaaaaccttcctatacaggatatatcagacattacctccagagaagagctataccgacctgccaaaggatttgctatcctaaaatctactaaatcacctctacctgagcccaaattgtataatgaggctattaaaggccctgaatcagcctaatggcatgcagcaatgcaggatgagatcaataccttgaaacaaaaataatattaggatttggtctgaaaatctgacatgcctgctggcacacatactataccaggaagatgggtttataaaaagaagcttaatcctgacaactccatctgttacagagcatgataggtaatcagggggaaatcttcttgataaatcagaatttgaaggagcaacgtacgccccagttgttgatcctattacttcacgtatcttttggtgtcagcgcccaaaaaggctggcataatatcaaaccagatgcagtcctagcattcctaaatgcaaagctaaaaggccaactgatttacatgcactaaccactcagattcgcgaaggggagccgggaaccctagtttgcctgctccaccaatcactctatggcctaaccctgtccgcgcgcctatggtacgatgatctagcatatcttggatctataggatttaaaatctccccgcatgacccaggcctattcacacatactacggaaaagctctctatcaccacccatgttgatgacttcatgattgttggtgaaaagccccagaacgccgtacaagcgcttgaaagcttgaaatcccgatctgaaatcaaagaagtgcctgcattcaagcaatatctaggcatgaatattaaagcaacatctactggcatccacctatcacaggaggatcagattgatgacctcgtcaactctttcaggctccataatgcccatcctaccaaatcaccccttgatcctggaacaattatcgatgatgctccggatccaaaaatcaatatcaaagaataccagcgtggtactggcgtcttgcaatatctagctacaaaactaggccagatatcagctgagctgcctccgtcgcttctctctgcatgtcaaccagaagattttccaaatctggatacaatagctcttgcgggtgagccggtgccacaggggttagccgacgcttgggtgagtagacacttactcaatctatatgggcctgcagaggtacgcacctctgtttcttttccagaggaaaatcattaacgggacatgacagtgcggcatgatctcaaccggtacacgcctcttccctcgtcaaaaaatcactatcggcctgcctctgccgggaatgaacgcatatttattcaaccaccgccgatgcccagttcccgctggggttataggggagctgtatctctctggggagcaagtgacgccagggtactggaatttcaagcataatgcggctttcacacacgaccccttctctccaggccagattatgtatcgaaccggcgacctggcgtactgggactccttcaagaaccttgtatacgtccgcagagtggacaaccagatcaaagtacgcggttaccgtgttgaacttgaggaaattgagcacgcgctgggcagagccgatagccatgttcggagcgcagcggctatcgtcgtagataatgtgcggataatcgcattcgtcgcgccagaaacagtcgacgcctctgccctccgtcgacaactggttaccttgctgcccaaatataccaggcccaccgagatcttcgcactcccatctttaccgacgtctgcgaatttcaagatcgaccggcgggtgctgctagacctggcgagaacaaacaaaggccaaggtgaactgccatctacaccgacagagactcttattgcgggaatctggagaaatttgttacagtctcacttagacccgactcgggaaatccaccgcgatgatgatttcctgggcattggcggaacctcgctgctctcaatcgaggcggcgagaagcatatctaccgcactaggccatcagattcctatctcggtactcattcgggagaccattttgtctgacctggcaggcagggtcgatgagtatagcaaaaccgagcacggcaccaccggctcgtttgcatcctatctcaaggcaaaccctactctagccgaggacgtaactacaccttcctacctcgaagaaggactcttccatctctactcacaaacgagcacgaaaagtgcatttcgcgtcgctgttcagttcgtcgctaacgggattgttaaccatgaggctctatgcgatgcctttatagccatcatccgcgaagaccccatcctccgagcacgctattccgccgaagaaggtgttcttcgccggacgattagtgaacaggtttcccctcccaaattttacgttgggagtgcgattaattctgagcagcttgaggatcttgctaacaagcccttcaaccttggatcggatcagcttctgcgcgttgtgatctggaagagagatacaaaaacgacagttattataattgttgtccaccatattatcacggataaagcttcaattgctcttatgctacaggctttgacccataactaccatgctgcccttggaagactttcagcaactcataacccgtgcaccagactatccgagtaccaaggcaactatataacgtgggcgcagtggctgtgcgataccggaagcaccagaggcagcacagaagcaacgcgcaaaagggaagtgttctggaaatcctatcttcgtgatataaccctattgccggctctttcttcactctctagcaagactgcctgccacgagggcactcaccgctccaatctcatcccataccacgcaggaaagccgtactcacagctcgccatcgcaacaacagcgctttctctccatagcgcattccaagcgactgatatggtcttggctgtcccatttgtcaaccgcgacgacgaagccacggccacaaccctcggactgttcgttgatcggttacctatccgcctaaacctgaataagtacttggagtctgatagcatactccaccagaataaagacacattcgtcgcagatgtatcagatcagataactggtgctgtggataattacctgccttataggcacattgcaaaactcctgtctgacacgaccacggatacggacagccttcctgctgaacccttcttcgccgcgatggtcgtctaccattggcctctgatgcgctagagaacagttttaacctctaactcgaacggaaatttcactttgggcggtgatgataatggcagcactgaagttaccgtgcgcagctgtcctctccgccctcgtggcgcaatgcaccccctaacgtttgagttcaccgaacaagaggatggcttattgtgtgtgctggagttcaatcctgttcttatggcggatgaacatcttacagtcattctggaggcgcttccaagggttcttagtggtctggtaaagggactgggaccgcaggatattctcactgccgtcacagtcgggcagagcagtgccgggttagcaagggcttagcttcttaatgcagcgcagtacaacttataatatacagataacatttctatattgaacaagcatctctttgtgactacaaagtcagcgtctcatcctcctgttaatattcccgtttggcggttggcaagcagagatatatattttcgcaacatttggatcaacaat

SEQ ID NO: 6 - DNA, 1052 bp, Emericella nidulans
tataattatcaagtccttgaaaaatatatctaagatatatataaatttattctatactaagaatattattatttataacaatatttataataatatccaagctgtagagctaatattttttattaatataaattatataatagtctctagctaatagctctatactaattccctttaatattattataatagactttattatatagctacctctaattagcccctataatatcctattagtagttattaataaatttactaaatacctaggactacttcctggtttatttgattagaatactaaatattataatattccttacttctttatcttagattataatatctattttatatcagaattctggcagggcatagttactatacttaaattaaaataatagtatttaactatattctacccccaaactaatagtcaattagaatatataatataaactattaaaattatattctgccatgcctgtatacagggcttataatagattaattaactacctataattattacagctataaattcttcccctagtactacaactggtaaaacactatattgcctactctttggtattgacatcaaataaccatggcaactactcaaaggcgtgttcaagaagcaagacttctctgcccggttggatgctgaagaagcgctcaattttgcagctatacgaatcacctgaaccgcctgcaattcatgatgaatgatatcctgaagactccgatcgctatgaagtggacagaatcattgccaagcgctttatccgcaaaggccgcaaccgaacccgataccttcaataccttgtccgttggaaaggatacagcccaatggatgattggtggatggacgccaaagaccttgatagatgtgaagagcttattaataaatttaaaaacaaacaaagaacagaaacctatattgacaaggatgtcagtttttagtaagggggcatatattatcattcatggttaacagatatttgtggttgcatattgtgttgttacctaattctgcttaatgttaccgc

SEQ ID NO: 7 - DNA, 1978 bp, Emericella nidulans
gaaaggaccaactataggaaatctgtatacaggtgcgcagctcgcttacatgcttagttcgcttaccaaccatgttaaagaataaaactaattatagttagtttagcagcagatataatctaactatattaggactagtattgcaaaatatggatttgtggtgtgggctgttctaaatcttgcagtttttagtgctccaaacccgcgcgggttgatttctaaccctgcaggttgtacccaacccgcaccgagtacatccctaatatagatgatctatactatataaattattctaaatcttgcagtttttagtactatataagttatttttctagaatttgcaaacctgtgcagattgatttctagtcctgcaccaagtacatccctatcctgtataatatataatggttatagttatggcatgtaactgcctggtttgtcttgtattgtattcttgcctaatacgttacgggatgcttccataacacgcaccgcgtagcgtacgcggctatggtcacgtagctccccatccatctccaatttctgatctgtcctgtcccgctttctcttcttcttgagtgattccttcttgtacatatagcacgaatagataggaagatccgtctaaatacgtcccgtaacataatgctgtagtagaatagcctgtaactgcctgccttgtcttgtattctgcctttgtctaatattgctgcttctagcagggtaataatctctagttctggtggcttaaccatcaagaacaacaatcatagctcatcaagattatcaatttgtattttgttttacaaattactgtattagtacataattatcctcgtctagttatccctataggattagttttactattcttagatagtactatataatcaagattagggatctgattgctctgtaaacgtaggggttgagaattttatattaaaggtaaagaaataaatactgcacatggctttgtatatagatcaataatagtggcgacattagtagtatgatagtgaaaataaacaggattcaatagcatcagatatagtatagcatcagatatagtacaggttgaaactaatggggctgattcatgtttcgctagaacactatttctttttcttggctgatcttgattctggagagaaaggatgatgttaaattcagccattgatatgatgggtaagttgaccatacctgcagctgttcgttttttctttggtcttccctttccacgcagtttggcactgtattatatataagcaaaatataccttaccacgggcagagcaaaactcacatctgaatggcctcttctctgtcgtcttcggcttcatcaaaagtcgtcagacccagggagttgcacgtcgttcgcaaatctcgaaatgagactgttttcttaggataccatgctgccagtgctggtcctcgtaacctttggcgtagcaccttattccctagccgtagcctatcagggttgaagttttgtgagaagacccggcattggacctgttacaacgcctgtaaaccagaattacaatgacataaatttgttgagaatggtgtaccttagccaattccaatagccgactatactgagcggccatcatccacggggttcaagaattgttgcttcgtgagcacctgagagtcgagatgtccactggctccgacaaccagaaagcacaacgtcacgtgacaagactaggatgcggcaccatatttgacgaagatctggcgttaaatgttaattgcaaccattgtcagagatacgccaatggatagaaagcgtaaatcaatctttgcatcatctcatgatgacaatgtagcaagaacaagagtgaaggtcaataacctctcggaagttcataactagcagctgactgcattagcaacatcatgactatagtcctataaaaacttaatcgcaacagcccttcccagacagtgatttacaaaatgacatacggaca

SEQ ID NO: 8 - DNA, 1433 bp, Emericella nidulans
gatgagattcaggatagtaaggtaacatatagcagtattcaagtttagatgtgattagaggacgtgttggatgattgctaagaataactctgtcaatctgctgccagttagcaactagtcacaaactaggtaagaaaaatgaagtcttgtacctgttctggaacgtcaatagcacctggaatttgcggagttgtagacatggtggcagcaagttgcaaactagtcagtgactagtctgagactatttcttattggcagattgaagttgaggtaaataaaggaggaaaagtccattactgacaagtggtattatattttagctaactctaagtcgaccttactcctttgggttagtgcgctcaaaagaggaatagccgacttagagttagctcgcgacatttaccacgtcacatgtggtctcttcacagtaaaccgcccatgggtttagcaaataattctaacccaacctaaataacccaaaataacccagttatgcatatcattactctaataagcagtgatctacatagttaataaaatactgtatttaaatactgtattataactatctaagtaagcaaatataatctaaatacagtaatatacctattcagatatcttggcaacccagcgggttgctccgccgggctttggggcagccaaaaatatccaaaacccaatggataattagaaggtctaacccaacccgtttcttggcgggtcggggcgggttggggcgggtttcgtgggttgggtttaacaagtctacttaatactagtaatatactctgcttccatgctaatatctgtaattattatatctatctatctatccagggaccagagttgttttgggatctaggagataataacctaatagtactctattagaattttaaagtatctatccccagctaggcttgtagccttctttaacagtaggaaagccttgccctgttctgttatagtaattatatacctagtgttatgggtcctttgcctatacaaggaccttagaccttagtgactcggccaaggcctgcgctgtcctgaaggcggtgagccacctacaagacttccttgcaacaacaatccttctttctcatttcttctttagcgattccttcttgtacgtacggcacgtctagataggaagatccatctaaatacgtcccttaacacctagttaatattacttatacctgtataattatatctggaaccttcctagcaagggtaacctggatactatatagtctgatagcccagaggctggaggaggctgggaggcagaggaagatatagtagttagtcttatttaactgcttcagcttttattatatagtttgcttggcttatatatactatttagaggtaatagtttaccagttcccctggccagctcttagagctgttagggatgcctaagttgt

SEQ ID NO: 9 - DNA, 2436 bp, Emericella nidulans
ttggatcttctggtagccttcgatgcattcgttgtacatcttgaggaaaaccacaggaaatacattcatcggtcgatttgactttgcgagcaatttaggaaccaaatctcgaaagtggaaaaggtgggcggggaaagctgagtgcaaaaagcatgttgtgaggttgttttcgatgtcgtggaagagtgctagcaagcacttgattggcgtggagtgtggtgtttgaatcaccattcctgccctggctagaatcgaaaaaatgcctatactatggtgaagagccggttatcataccttctccgtccaggcccccggccgcgttctcatgtccaaatttggtaaaaatcccagacgaatatccggtcagaattgatagtggccacgggaggtttaagagtttcgacaaatactgaatagtctcatcttcaaggcctaacccatctgttgcgggtttgttgataactcccccaaaaacgtcttcaaaatttccctcaggatacttggctcgaccgtcatgagaggcaggggatgtcatgctagtcgtgcctgagcaatagagtcaagaatagcacagatcacgacttacagtaagcgtacttggccataatcctgctctgctaggtctactgttgactgtagagcaggttaataaccaagtcggcatatgtttaggttaaggagccatacattctcgtcgagccagtctctgacctcatgctctagaagttggccgctgcgagtacaattgcttgagaacgagcagcaaatctacaagatgtcagagcaggccgtatagtgttgggtgtagtaaacaaagtgcgtgcctgaggacgacaacactctaaaaaccatatggaggctgtttggtctagctctgcacgagagaagcggccttcaatgtcagatgctcgactcatttcgagcgtactaagaacgtggtatacactgtttcgggacgactctgccgttgtctgatctttccagaaggtattcagaaagtggtgggaaaccacaaggggaaaatgaccaggcgaggggagaccatggcggttgcagcgagctccggctttcaactgaggccaaaggtggctatgttgtaccggtagtggggctaaggaagcgccgagttgatcgtgacggcaaaatcacaatcacaagtagacaccagcaaaaggccaagcactacccacatttaaggcggtggtcactaggagccgccctggtaaacgagagacgactaattcccagctgattgactgttcagttctgtacattcttgctcaaggtgttggtacttccattcataaatcaaaggtaaggctgatggcaaaggacctagccccgcatgttggtttagagccctccctttctcgctgtacggctacatacacccaatatcgcaggtttgatcttgagttcggccacaatatggtagatggatgaagtaatgtatacatacacctagcttttgtcaatttgtttgcttttgcaatactttatgaagcgatgcatgcttgtttattggatggtacccgggacaggaccagaaatctatctaatggtgactaagacaagtgctaagccacaagcggggagaccgcgacggatctgatcctggaaacctctggcagcactgcccctctacaacctgtgcggcaaacggttaagcctatgcattacagccaaacacaggaaaaaaatgctgcggagaagtagacttggttaaacccaccccacgaaacccgccccaaaccgccaagaaatgggttgggttagaccttctaattatcccttgggttttggaacatttttggctgccccagagcccggcggagcaacccgcttgattgccaagatatgtgataggtatactactgtatttagattacatttccttactttcaggtaacccaccccaaaacccgcgtgggcggatcagctagccctgaaaacccgccccaacccgtggtttaacaagtctacggagaaggcaccggcggggacgaggtccagtggcatccttgagggaagtgccaatacaaacaaagcgtcctgcgtgagctcgagtcaatgcagaaggaatcatacgtgaaaatctgtccatccccagtgaggccattcatggggcgggagcatgacggcgcgggccctcgcgataccgctactggtgttggatcgtcggccggccgcatggtgggcacgttctggggacccgaagttgggtaccccggagcaagctatgatttattatcaacttatcggtagagctacataacattggcccaaagtccatttccaataacaaaggttgtctgttttggttatcgccattttttcgttaatggtaataatttgtataaacattttgaatgaatagctatatgttgataataaatacttccaaccatctccgtgttaggttctaaatatgttatg

SEQ ID NO: 10 - DNA, 406 bp, Emericella nidulans
tgttccagcggtattaaaccagtgctgaacgcaaagttcttcgcaaaactgctgtagactttggggtagttgacactaagcatgccagtggtggccatggtgtgaaaccaacccataacttctccgaacccgggactagaagtagcagagccgacgtgtcccgctgagcccagggctgagagtccgctcaaagcaagtgcagctccagccataccagcagcagcataagacacagcgggaaccaatgcacgcaacctctttgccgtcgtccttcgactttaactccagtttggccactccatccagatccggtatcgagaaggcaatcgaagggtatacttagggcaaagttgttcaacgtaattggcgtcatcgcagggatcaaagtctttagtgtatactcgtt

SEQ ID NO: 11 - DNA, 382 bp, Emericella nidulans
cacttttctgagcttctcgcggggactatcattacgtccattgctcgaacttgggcttgatttgccaccatgaggacaatttatgccgcgttgcttgctggggccgggctggctactgcaatccctcatgcgtctccgtctgtcccagcatccgccccgacgggagtcagttatgcatcaggattcgacatgaccagaagctgggccaatctcagcccctacaaggatgcaggcatcgacgagctgtcccaagttcacgtcctgcaccgccatgccgagcgataccctacgggctatcctctggatggtgaaggtatggaagatttcgctggatagttcctgaatgactgggagtacttctgggtgaagaacacttatggtg

SEQ ID NO: 12 - DNA, 365 bp, Emericella nidulans
tgcacttcagcgcatttgaatagacttgtacctgcggtattccaaccttccaatcagttctcaaaaatgccagaccccaaggaaggaaagcaggcaaccctggggtacgtcaaagaccggcaatcgactctcgggtatgtcttacgagactatattcgggcttcttatatccctaatgccgtttaattgtgcttattagatatacaggaggttttttggatccaataccaacgcaccactcgaagcaagtcaacttctgcaagtcggccgaacagggaaccctcttccttaaacggaaataccaaaaatgcatcagctgttacaagaggccaattcccgctgaaacgggacaagagcgaggacgt

SEQ ID NO: 13 - DNA, 2970 bp, Emericella nidulans
acactctgccattaacctggtccaggttcttgtttacagggaataggaggccttccaacagggaaaagacacggtgctactcctactagatataaaaggggcatttgatgctgtaatataccaacagctcctttcttacttatgcctgtaaagatagcataaaggcttactccagctacttaaggactagcttactagccactctgtatctgttcatatcaaagaaggcactgccacagcactaattaaagaaggactctcctaggaatccctcctatccccaatactcttcctactatatacagcaagaatagtctctaccttagagagctccttctgctatgcagatgatataggtatattattaactaggaataccctggaagagagctcacaataactagtaggggcctataagcaaattactgccctagggacagagacaggcctccctttcttaatagagaaaacagagatacaatacttctctagaaagcagcagcagtatctccccacagttactctacctagtataggggagattatactatctctatatacatgttggttaggagtttttctggatacaaagcttacttttaaagcctatattaatttagtcttcagccgcaggaaacaactcgcccagcacctaaagagacttagcaatacccagcatagctgcctagtagcctccatgcaggcagtagttatatagtatattctcccaacagctctgtatggtgcagaagtcttctatacaggcaaaagacaaaaaggggtagttaactccctactttctctcttccgcacagcagccctggctattatcccagcctacaagactacccctactatagtacttctctgcaaagcagacctactactttggccctatcctagtaactaagggacatggccccgcgggccccaggacagaggtctataatgcagaaatcatgggtgctgtagaaggcctacacgcagccctgggacaactatgtgtgggttactctatacagctagttatcctcctagacaacctagcagcagcctccctgctagcaagctataggcccactccgcataggcatagactgtcagagtcctttggccagcttgctacccagtggttggaagctccctcaatcctaaccaggccacggaagccccttcaagtctgctagatcccaggccattctgggattgctgggaacaagctggcagacaagcttgcaaagcttaggtcctctatatacagccctaatatccccccatcccctgcatacctatgacgggagacaaaacagtggctttgtacagagatatatacagcatatactagtaaggcaccacaagcctacaagaccctggatatcagaccccatacaaaggaaagccgcacccgcgagcacaagcttccctgttgggtacttggccaactcgtcgctgcctgtacaggccacggagactttacagcataccaccagcgcttcaaccactcagactacctggagagctgctcttgtggtaggaccaagaccctagtatacttcttcttctgcccatataccagaaagcgctggaaagatagatggagatatataagggacagcccgtcaaaaataatagactggctcttaagtacagctaccagggctgaagaattcagccacattatacaagaatcatccttcttcaaggatatatgcccgaactgggcccgccggagtgcttgatagtgcaacagtccacacatctacctggataaagggtccagcccctccccccaatctataggtagtcaaaacaggcatctgccctcaaagacctggccagggcagtaccaggtgcttcttctgcttgtttccaatatatattgtccatagttgctgcttcaaacctgtatctagctagctcctaggcagttctgtttaggtagcacgtccagatgccccctaggaggccgcagatcacgtgggccccgtgatccgccgagtgacgttaaataataaaaacaaaacaaacaaaaccaaaccaaaccaaaccaaacgacacatgtaggtcaccacgtgacgagcatacctgcatacagtcacgtgcaaacctccggcttggcaccaatttcgtccgcagattcttgagatttgccagtcgcgacattgttttaatcttagcattgtgtagcaacgattgaaagcctgtgccgtggctccatactatcattttctgcatcagcaacttcacatttcgccatgaaaatgatttgtcaacgctgccggtcgagcatcctgacccgactccagccccagactttcacaaccccgttgagcatcagtcaacgagtccagtttcgcagctacagcgatggaaggcctacggtatcggctacacctccacctccaaagccccgacagcctattggcgacgacattaccatcccgtccgcaatctcctcagcaacccctggcgtctcgcagcccttgagcaccccggagggcgtccatattgatgtgaaccccacaaaagctaccaagccagtcgagcgtcccccaagctcctgccctgccggaacgcctctagcaggcctcaactacttcaagaacaaaccagaggttgtggctctggaggactccgagtaccccgattggttgtggtcattgctggatagcaccaacaaggaagccaagaagggcggcgtggatccaagcagtatgtatctcgattttcaaaggacgtggcctcgaaatgctgacttacactcctttagctcttaacaagaagcagcgcaagcgttatgagaagaagatggccgctcgtgccgcaacattaccggttcagattccccttcaccatcaggccacggatattacgccggcccactacaaccgtaatggagagccctcagaagatttgctgcagaaggcggcggaaagtcaggagaagcggtctgagattacgaagagtgta

SEQ ID NO: 14 - DNA, 1644 bp, Emericella nidulans
cggctaggtgcaaggtatccatcatgagaaatgacgaccaggctttctaaagctcgaccacatcctccgggtcagtaaagacagcatcgaaatcaaaggaatcttctgcattttcggggtcaatgctcaagcattccgctagctcctgtagcgtcaaattccggataccgcgtactagccacctgagcaggcgctgcaccgaggtcacttcttcgtcccgttcagcctccagtctctgcaaaatccgcatgtaggtatcgtacagtgtcttagggaggtcatccagcgcgtttcgaatagccctgtcgttacgtagcttgcacagctggtcgatctggcattttacccactggaacatcccatgggctccctggatgagggtctcgcagatgaagttctggagtttgggatccctgagcttcagcttttttgctttgatcttatccgctacttccgatcggacgtacagctcaatatccgcggcgttatcgctgggctcaattgaagtgtgtggcaaatcttcgtaagtccgcgcgatatcgatctcatggcggctcgtcacaagtactctggcacatttacaagtctcggcaatccttctcaaggcatatgctacgccctctctatcctccgtctcatcgaccgcgtcaacgactatataacattgatcgaacgagtccgagaggaagtcactgaaattattcaacagctcgtcgaactcagcggtgtacgccgggttttccctgtgttgcttctcgaagaagttatataggcaacccaagactgcatggttttgccttgcaaatttggacagtaaggtggttagaaggactgttgacgactgtttttgcttgtccttgtagtcgcaataaaagtaagccaggcctctggcttgattctccgtgtgctgccgcagccagtcgatcacggtcgatgcgaggattgtctttccagcacccgctgcttgttgttagcggcaggccatatgcggtcactttgaggcaggactcacgaattgcatgaagccagaggaacgagttatccgctgcgagccagtcgtggaacggctggccattgacaaaccaagtcccggtccccgcgcggcgtaacttggtggctgtgttgtggttcgcagcagcattaacagaggccagccactgattcagttgtgcaaccttctgctggtcaagatattctgtgaccgaatcctgtcgcgcttcaagcctttcccagcggtcagcctgccgcttccgctcatcttctgctttggcgcggccctcgctagcgagttctttctccgcaatatccacctcttgctccacgcgcgccatagacttctggatctgttcaactatatcgccgaactgcaatttgaacggcttccatatcaccttccatgcggcgcgcaggctgacggcacttgtgctaaaccgtcgcactgagctctgctcattcttcccctgtcgaaagaccgctcgagcccgggcgcagaactccaggatagcctggaagatattcaccatggactgcgccaggaccgcgttgtcggagtacaaccgtgggtagcgacggaggcggctcagattatacccgatctcttcgacattccggagagtttgtcaaaatactcattatagtcctttg

SEQ ID NO: 15 - DNA, 399 bp, Emericella nidulans
ccagtttacgtttagactgccctatatcaggcaagtcaggcaagtcaggcatagaaaataaagaaaatatcctgatttctcatcttcgatatcatacccatctacttcgcttgcctgcagatatcgtgatcatcccaccgcctggagacatgtcatacagaccgcaagaggggcgatttctgggtcccgtctcgactccagtgccatgactgtggaacatcgagtttcaagtctcgagttcctgagagtggactgtattgtaagaggcttctttctccttgctcctttgtggagcagttctgctgcagttcggcctgggaggctgaaacagcgacctacggtaatagtcttgaaaatcataagtctaattcattatactctgtagatagtctatggcgt

SEQ ID NO: 16 - DNA, 991 bp, Emericella nidulans
atgcgagagagtcggctggatgtgcccaaagtccagctcggggtattcctgaaaatggtggcgaggatgtgattgcgctcgaaatttgagcattcaacagatcgctgcttgctatgtgacattggttctactcgactcaattatatagatctactgtaaccctaaccaatctaaactaaccccatccgcaacaactgattcccaaactcgagcagatagtaatccgcgtagaccatgacatttggaccgacaggcggcacgctgatctcggttctgatctcgtcacagctacgcgaacggtttggccggcggtatccgatctgcggtggatcaattattatcatcgtcggcgggatccttcaagccgcagcggtgaactacggcatgttcgtcctcagccggttcgttgtcggctttggactgggaatagtggctactgctgcgcctccgttgcttactgaagtcgcctacccgacgcaccgtgggaaactcgtctccttctacctggttacatggccgctcggctcgctgatcgccgcctgggtgacatacgggaccttcaagatggaaggctcagactggagctggcggatccccagcgcactgcaatgcttcttctcgcttgtccaggcaatccttgctctcgtcgcgccggaatcaccccgttggctcatctaccaaggccggagtgaggaggcccttgccattctgacaaagtaccacggccacggggatgctgactcccgcctcgtgtgttttgagatggccgagatcacggcgacgctcgaaatggagaaggtccagcgcctgtcccgctggaccgagtggctctctacgcgggggaaccgccatcgtctcttcctggcttgctatatccccgccatgcttcagtggtccggtaatgcactgacatcgtactacctcgccaaagtgctagtgactattgacattaccgatccaaagacgcagctcatcatcaacgcctgtctct

SEQ ID NO: 17 - DNA, 360 bp, Emericella nidulans
aatctgataagaatatttccttcatttctcgcatggacacgcaggtcaaacttaacggacaacggattgaattggaggagattgaacaacaatgcacattcatttcaccagcaaacacacaagtagctgttgatatcgtggtaccggagacaaaaaccgttgcaaaagctttggctgctttcattaccattgctggacacgaagcacaaagtgcaacgccgggactgggtgtctcccccagagaacaatcggacagcttcacaactctttgggtcaagttctgccacaagtcatgatcccaaggctctatttcccggttcgttacctacacaaatgtccagctgatatctacatgatttc

SEQ ID NO: 18 - DNA, 537 bp, Emericella nidulans
accattgaacatatgacagttcttactctggtccactaccaaggccttagcgcgagtattttattgaaccacagcactgaggtggtggcctttgtacctttcctgctgtacggcactgcaactgtcagctctggaggctccgagtaatgccagtcattgcctggtgattcatcgaccggcttcatacggtatcattctcctccatgtgtttgtctttagtttccgaaagatcaagccacaagatatttcacaatatatatgaagttcctctatttttttggttgcaaagccaagttgctcatacatctcgtgattgcccctcctccaagcggctaatgcagttatctggttggcgaggatcatgtcacgagactggccatgaggctgaaggtaatcaatatttcaagatactgagaggcttgttgcttttacatttacttcaccagcagctgtctatccaacaaagataccaagtctgactgattctttatttgaaactgttaaatttatcactgtcgactcgcacagatgcgccca

SEQ ID NO: 19 - DNA, 416 bp, Emericella nidulans
gctcatcgtcccggtgcgctgatttgtagtctgctgctgctgacatcatgatcggttactgggcacctgggacttggtaaaacagaggcgtcttgtcgaaaaggctgccgtctctgcttctccttttatagaattttctccgcgcccagccccggatttgctccacttaaggcttcacgagggtttgataccccagatcaacggagtatgggccgatacggtcgtcgaccttggcgtgctgataagctccgtttccccaagttctgactgcctctgccaatgcgaaattggactgattttgtcctcttgtgtccggcttggggtccggctaggctcagtagtcactgctggaaagttttgtatcattgctggcctgcttctgagaatgacagaaagcctcctcgttgaggaggaat

SEQ ID NO: 20 - DNA, 1277 bp, Emericella nidulans
taaccagaggaatgtcaaggctcctgactgtttaccaattatcactttattttctctagcaggggcacatgatgcccggtaccgtggtggaagccaaaccaagcgctgaccatttctctctatccatttctcatgcacgaatattgacttgtttgggaagtaagaggcttgaacacccaagagaagcaaaccacgatcagagttcagacaacatccatcagctgagaaccacatggcttttggtataacgttcaggtaatgtatttgctttccagcgccggtggtcgcgtcccagagccggatggtcttgtcattagacgcagatgcgactatctgcccgtcaggtgagaaggccactgccttgacgttgcctttgtggccctcaagcgtctgcttctcagcaccagtggccgtgtcccaaagccggacggtccagtcatcagaagcggatgcaactctctgcccgtcaggtgaaaaggccactgcattgacccagtctttatgacctttaagtatgtgcttctcagcaccggtggccgcatcccagagccgggtagtccggtcatcagaagcagacgcgacaacctgtccgtcaggtgagaaggccactgaattaacccaatctctgtggccctcaagtgtgtacttctcagcaccagtagccgcatcccagagccggatagttccgtcatcagaagcagatgcaactatctgcccgtcaggcgagaaaaccacggagttgaccgagtgtttgtggccctcaagtgtctgtatacatggatcccaggactcctgcattatatatgccttttctataaaatcagaccgctggttccagtagattcttttacctaagctttcttggggacagaagataagcgcggcactgtatatctggagaggtgtttcttgaattatcacagcattggcagttgcaaatctctcagcctctttaaatatagcctgattctcgctctgacaagctgaaagcttcttaagacttatgattccgtgccggagctctccagtaaggccaagactctccaaccagtggaggagatgtcgctcaaagaagccggatacctggcaatccaatgcttcgggcaatcccaggggccttaacttgaggaaatggtccaaccagtatgtgcaactgtatcgaaggtcgaagagcgggtcaggatctggtcggtgagccgctacttcaggaactaaaagtccaggattattgagatagtaaatatcgcgtttgagtttatttaaagagcttccgtgga

SEQ ID NO: 21 - DNA, 1456 bp, Emericella nidulans
accaagcaacagaagctcagatcaaagaatattaaataaaaattagctctatacagtaccctgcagttctaatacaagcagatattatatatactgttagccaattatctgaagccttaacaaatcctttaccagactatattcaggctgcaaacagggttattatatatctatatataatatatttcccggcaattaaatactcaggcaatgatactggcaaggaagttgttatattagcctctaatatagtatttgctgactaacctgaccagcaaagctctgcaggatacctttgcaagttatataatagcctgattaaatagaaatctagaaaacaatatacagtcacaactttaataactaaagctgaatatctagctttatccaatacagcaaaggcaatatactagtagaaaagggtattcagaaccataggttttgatccgcaacatcagatagcagtatactgtgacaaccaacagaccatcaacttacttacctctgaaaatatcaagcaataatctaagctctgttatgtcaatatacatagatcctggctttgtcaagaggttcaggaaggccgactctatgttaaatagatacctaccaaccagatgattgcggatggccttaccaagagcctgataatctaaaaataccaagaatttgttaggatgctcaacctagtagatgtaaaagaccttatccaatcccaagaaggaagctgaaggactcttgatgcactgagggggtatgtcaactagaggaggttcctccttactaatcaatattcagcaccttgtttgtttgcctgtctgtttaatactttatgctgtttatatggcagggatatctgtttaacaccttatactatttgtatggcaaggatatctcctgcataagcaagaaccttctttttgaagccttggaaaaggtataaattgcctatacagatcatagttaggagatcaagaccttcaatgaaatcgttcactacagatattgattacataaccaccccaataatccacacccacgtaacgcggacgggcgccttaccggtgcctatccgccagtaggaatatgagggatcgccagagccgtaccggtccgccagtaggaattcaagagacgagctgtactgggatcaacccatatattattgcagtaagatatggtggtatacataatcaccaatgcatcactgtaatagtattgcttggagatgccgaactaactatactggaggttatatgaagggcctcctgatgctatatatatagagatctccaagcaatcctttcaatattcttcagtactaatcaagctccctccattggataattattattgatagtcattgctttgttgtagctagagaaccatgatgttagaccatgtcttacagttaggattgcttccacctagctatccttgatcaactgtgactata

SEQ ID NO: 22 - DNA, 1499 bp, Emericella nidulans
taagaagaccttgccttgttcagttgtagtgattgcgtatcctgttgatatcacttgcacctgtgcaatcccgtccggaactttccctgcaagggtgacccagatgccatgtggtccaatagcccggagctagaggaggccgggagcgggaggaagatgcggtggtcagtcttgtttggctgcttcagctttcgttgtgctggttgcttggcttgcgtacggtgttctggggcaatagtttgccagttcccctgaccagctcttggggctgtcagggatgcccaggttgtaggctgcgaggttcgcctcttcagggggccttcgcaagcttcaggagtgggaggttggtttggctgttccatctgcctggatggctgtgggggtgcagctgctgtcatcagaggaatctgctgaggggagtcctgttttgctagggaaacaaatctggctgcaagccccgggccaggtctcttgggcggccctgtagagaggagacagttagatctagagctttagcaagagaggtcattgctagtttccaatcattaagaaggactagctggtcgtctgctaccatgctgacctgctcgcagatcgatggggcttgcggcaaatgggatacagggaccggagctgcagtgggagtcttctgtggggagaataaggcccttctcttcagggagttccggggtaggggggtcggggtggtaggtcctgaggggggttcagagttttcacccaggagcggagtccccggacgggctccgcctgggggggagtcatccacctccatggggtggagggaatgatcgatgagcaaagcgtaagagatcagttattggagcagtgtttggtttggttttattatttaacgtcactcggcggatcacggggcccacgtgatctgcggcctcccagggggcatctggacgtgctacctaaacagaactgcctaggaactagctagatacaggtttgaagcagcaactatggacaatatatgttggaaatgagcggaagaagcacccggcgctgccctggccaggtcttcgagggcagatgcccgtttcgactacctatagattggggggaggggccggaccctttatccaggtagatgtgtggactgtcgcactatcaagcgctccggctgagaaggtggagggtagggactggcacctgctcttagggctctgggggcacgtgcccttgtgatatgggccaggtacctatagggcgctgctaccaagttgtttatagctgtattaagcgctaagacgaaaaagcgtctccttccaactgcgttgatggaaacctaggtgcagaactcttatcaagctctccgctccaactgcggaatgatccataggatctacaagggcaaaagtcgtccgactgatcgtcttcagcctgtggtatacaatttttaaagccatatatgaatgaagacgcttatgtgtacattgtctcatctggctgaataccgccagatccgattg

SEQ ID NO: 23 - DNA, 1766 bp, Emericella nidulans
tataaaataggtgtaacgggtgtaggcagtattattcaactggctgtcctgtataaacgagtatcacaagcttagagaaagaaacaaaagatagcagcgcacatatctctcctccctttatcaacctttctgacttcccggacctgtatgccgacggatcccttttccaaagttatgaggacggatctcctttcctaagcttcgaggccgcaatttccgaagctgtacactgatgttgcagaaaccttatttagaactaggttgagggcatggccgacaaccaagatccaggccatagcctgtgacaataggtgtcattttatatggaatacagaggtggtccgctcgcttacatgggccactcgcttacacgatacgttactttatcttatttataatcagaaatatactcgcacatacgaccaagcgcatggagataggggctccttgtcccctaagctgtagttaatcaacagtttcaacgcaatgattgatagatattcatggcagacaacataggtgcaaggtatgctaccaaagaattggtaatgtctccgtaaaccaggagagggttgcaggagatgagtgcaattgggatctcaactcagaaccctaggctgtcgtcaatattgaaatgtcatgtgacgctcattctgtacaccacgtatacaggatgaacccgctggctggcttacgccacatgatatcgtgggcaagcaacgatctcagcccctgatgttacgacccctcaacgtatcgtatcgagaggttgaagaaggaagatagttaatcaatcgtcatatggcgtcgatcctgtgtgggctacgttcgtgtagttccttctgccctttcccctccaggcatccgcaacaagaaacaaaaacaatcaatcatacttcataccttgaacagaacttgctcgttgcaacaccgttcgggccgctctgaaccatcttctgtccaatggccagcctggccgcaacaaaaccattgaacccgagttgccggcatgccatccgacgcccctgactttactacatcctcagtataccctttaagatttcggtgatgatgactcgtcgactgcttcaaatcaaaaaaggccgacaacatccggagtcgctatctgaatcgtccttgcacaagtttgcacaggcctggatagggcttagtgaatctatgctgcttatatgactttgcgaatctagtagcgatggagatattatagtattcatggtgtggttattgtggcttattttatcttttcttctcaagaagacgcggtgcaagaaactggaggtggttgcaatattggaaaaggcacttatcagggcgaaggtgcaggttgcaacgttagaagaagtacaggtgaaagacagcgtgtgtagatgctaagggtcttataggtctattcatggagttgtgtttgatagtatgaaacgcgtctattatgagtaaaaatgactctaatcaggtataaaatacataatctaaaaccaattgactgcgccttagtagataccttttctataaagagaacaatccactcctcttctttccctgtggataaacaatcagtgcactaacaaacaacccaaccgtaataccaattgctgtctgaatcataccataacccaaactcgtcaacgaactaccattggtaccaccggacgtatccgccgtcccatttcgcactgcatccgagtactcaatcgccgataggatcgaccctgacgacgccaacccggaaggcaccagagtgaaga

SEQ ID NO: 24 - DNA, 1314 bp, Emericella nidulans
  unsure (1)..(1314): unsure at all n locations
tttgtcattccgtaaatctctcaggatagtttagtaggcctggcttttagggttcgatgagacaatgtaacagtctaggtgtgacaccaatttctagaaaacactgtagtcaggataaaggtaacagccagtcaatgcagcggacaagacagactccattaggcatcaaggctaacagtccccggtcaccttcaagaagcctaccatcgantcgtagcgctggaaatgctgttacaggggcccaccttagcagcaaagaggacagtacaaccagcagtccttaaaggagccagacgggactggcaggttagctcatcaggcaggcagctgggtagaatagccacttccgcgagacgaagctcgacatggcggtacgaggaatggaatagaagatctgaatcgtgactgggggtgagaagcgctgtttcatgtttgggtttcgttctaatacctcccgcactataaaaggagtgttgtctccctcaatcatctgtttagcttcaatttggctcatgtgcattaatagtatttgtggcggtttgttcaaggtgcctgtgtgctcgaactgccttgccatagtcgtactgtattacaccactatgacttttccctggtttactgacaatcacatacccaaacaaatatcattattcttgctaggaactccgcctccaacttccaccatcaatccgaactgaagccgagaaaaggttaagtgcatgcgagatacgacggccgcggcagatacggtttcatagacgccacccggtaggtgggcgatcacaatatgatgtttttcagttcgccaaattcgtaagcattcgaatcattgacctggtgaggtggagtgtgggatttgtcgagcatcgcgcgagcggctgccgccgccaacggcaaggcacagatccacgcgatcgttattgtcaagcgtgagggaagccatgatcggcggggatacaccggaaaagactgaagctcttcgcaataataacgttttcaggatagaaggattcccgtacgctgaattatagaaaaaagatcagcagctgggggaaaaaagagggtaatcaggtcctgcaaggctgactcgtcagactgaccaccaattaccttggcatatacgccaaatcacttctgcgatcatcaacgacaggaagacatgtcctgcaagggtcagcacagacacgaagcagttgacaccagtcaggcttcaaagcatgtaggctcaccgcgcagcatcacagcaatgatgctagagactctttgtaatcatctgcgcaatcacccctttgactatattataaaaatgacgct

SEQ ID NO: 25 - DNA, 2494 bp, Emericella nidulans
ggacttggactgtaaatggactaggctcgcgagatccctgtcagtggaatcgcctcgagcaacaataaggcaatatttagctactattatccaacatatctgtgcctcgcaggtctttattggtaaggttgctcggccggatcggatcggtctgtatcacctggctgggctgtacagtatgaagcaggctatttttctttattggaggctcgggagaggtcggagctttttacgggcgctctacgcaggtcagaaagcagtctactgcgtgggtcagttaagcgaagcaggcaagccaggagaagatcgactatggcgagaatcaatagagttggtagggatttgaggcggtcgaaggaaagcctggttatggcacatctcccacatccttctctctcgtcaaacatatgttaaatactcagactatttcacggagttttcagagggtctcaattgccctttactcaaatccttcggctccattggtacttcgacctagatctaccgggtacagagttctctgtacgtattaacctgtgccgtatatgtagtctagccgtacatgccctctaaggatataccagatctgcttttcaattagttgcacctcgacgattttaccatggtatatttaagtcagaggacaaccaatcatgttataacacggagaatgcaagaagtagttacattgcctgcagttgcgcgagaccgagtcatgattatgatcaggggtctactgcgaatgatagtaagtcagcgtttttttctttcttcatttacaatgccaagtatacttgaattctagatgaggattagaatttgttttggatctgctgccgaaggttaaaagatatatactagggctgcttggtggcatactgtggggatggggtatattcgcgatcagggctacggttctcttgatcatcggttccctactatagcgcgtcttgggagaagcattagtctctaaaatgtgttttcgaaccgtgcacgagattgctattaacataactagacgaattaacataattaacataactatacgaactttaccctctgactccaccgcagtcacgtgtgatccactaaattcgcagaatgcaatatacacccatgatgtatcctaccattacgttttggcatctatagcagctaacttgctgttgcttgcccttactaataatataatttataatctctaagtacaggcaattagaatcacctatgattatagcatattctttacgagcttctctacctaacaagttcataattgctattatatatatttggatttgctgtgacagttagcagggcgccggaaacggctctgggaactggttttcttatataaaactaattattctccgatccaaatcgatcagataagccgcacgatagtgataccgataccgataccgtaccgataacgtgcgtcggcggatcccgcagcgggactgcccggccgactgttacacaaaagtatctataaaagcgatagacaccaacagggacccagattccaaataggctgtctatatataaagatttacacaatgccagccatcactgttaagccactaacaccgccagccgggtctgcaatcgacttcggtgccgtcattacagatgttgacctggagcatttgactggtacctgtgtccctcgagcaccctgtgatttattgtgtacaggtactaaatgcaatgacagacggagacttctcctcgatacgctcagccctgtacacacaccttgtagtcgtgctcaaaaatcaacaccaactcacccctaaagcgcaatatgaactcacccgccgattcgacccatccgctacacagtacggccacggcaagacccttgacgcaaagcgtagcatccttcacccagacttaaagactatcccgcaccagccacaagtgcaagtcatcgggcacggattcattgactcgtacgaggggttggagaatatcactctgaaacacccgcaccaccgcacattccaccgcgacccgatcccgcaggaggatgattacgattccacgcggttttataggtggcatattgatgccgctctgtatgggctcaacccgccaattgtgacaacgttacttgccgtcaaggtgccggggggtcgaagacagaccgtgcgatatgatgatggctccggtgagacgatggatgtgccgctgggcacaacggcatttgcctcgggagagcggatgttcgagctcctctcagaggaggataaggagtttgcgctgagtagccgggtcgaatatgcacctcatccgtgagaaacccacccttacaacagcccacaatgacagccagctggatcagacgctaatagcaacagatacatttggatgtccccagcccgctcgctcccgactggcctcggctgcacagtgacgatctcgaactcccgctctcggagctcccgcccatcgacgaatccgccatccagatccttcccatggtgtggaa

SEQ ID NO: 26 - DNA, 412 bp, Emericella nidulans
atatctcgaagcttgctcttgtagtaatcaatgtcctttaatccctaatcatggagtacagccccctactgagccttatggtgttgtcagcctcagagactcgtcaatgctagctcgttccgtgcacagattctcatctagataccagtcagatggcctagctgcgaacgtagatatgaagaggagaaaaagagatacagaaacattccgaactgggtgatgtgacaccataccttccccttaacgcaacccacgtattcagcttctatttctttgcttttgagaatgctcgcctctacccatagacacaatttgcccggtaatcgtcccgtgctatcgccgatctctccatggattcatatcttgaaagtagaagagctgaattttgcggttgtagttcaatgcagaggga

SEQ ID NO: 27 - DNA, 621 bp, Emericella nidulans
ttcctgcttatattataaagcctaagtattttatcttcttatattttaatttatatttcttaatatttaagtataggcctgctatttctgatttatttaaaattatttatatatatttctagtactagtcaaggttcttattagcataaataagtatattattaagatatatagagtagaatttatctaaatatttctagaaggtccagttaatatatttttagaaaatacttagtatattagctaacttaaaaagagtaactagctatttaaaaaatttatattttatatagaaagtaattatttattcctagtctttagctatatagattttatagaggataataaatatatttagcttagtaaactatctagcttgtctaatttagtttagtatcttataaattaggggtaatagatagtagttctttttaataataatatttaagatataatactcccaatacgcgtgtagctttgccctctttatataaatgatactagggctgcagctagtaaatatcttatataaataaaattctcatatagtagtagttctcagctttattttatttaaaagagctaaatatttttagtataatcttagtagctttatatagg

SEQ ID NO: 28 - DNA, 1135 bp, Emericella nidulans
  unsure (1)..(1135): unsure at all n locations
gagctttcgcccggattcctctcgattcctgaagacgactggcttcgtttggtcgataaagttcattcgtacggcctaaaggcgaaactcgagtcactcggcacgtccgaccctggaaaactggtgaacctgggacggaagttcttggatgcgggtgtggagcgtctgatgattgagtcggagggtatcacagagaacgtcaagtcatggaggacggacgtagtgtctaagatcatgaaggagcttccgcctgaacgggttatgtttgaagcagcagatccccaagtctatacttggtacattcgagagtttggcatcgacgtcaatctgctcgtcgatcatagtcaaattgttcagctgtctggtttgcgccacggcatttggggcactgcagatacattcggacggcttgtgtcttttcgggctgagtgagttggtggaaactgctcagttgctttaacaaaattcagtcccgcttgaccttagctgctgtaccttataagactgagtcaatgtctctgaacatgatttcttaatgtgacaagccctgatttttgcaggaatttaaagggtgggatgggttaggacaaattttgcctagggctagggggctttttttattccttaggcaaacgcctgtcggttgggttcacaaaccgggaanccggtacccgcctcatcatttcatatgaactttcaattcgagtttttctgtttgtatcgttgtaaaaacatacctctccgcatgattggggtgcctcacttgtaagtaccactttgtattcgttcttattagccctcattcatctttatctttcctggcaatatatatcttttgatcactcctccgctctcacttcagcgtatctctcgggttctgacatatgttataatctttctttctaggatatctgcttaaataatcttaattattcaccctctaatttgattgcttttatatatatactagttatggcatatttactgtattacacatctgtaccttttcttattatctcataacttcatcattctttcgtactaatcactgtgtctacatacttctttcgcaactttcatatcctcgctattggtgtatagttcacatatctttatgtatcattactttatcttt

SEQ ID NO: 29 - DNA, 1940 bp, Emericella nidulans
attgctcaatcgcccgtagcgggctcgcatgcccaagccgcgcctcagtggctgggcccttgtctccataagaattattgcatcgcccgcctgcagctgcgacctcctcagcgcaagtgtctgttccaatatcatggtgattaggcctgatcgcgtcaccgttgccagtctgctggcttggtagcggtagtagaggtcccctgaggatgctaggcccaagtaaaaaattgcgtgagcatcgaccaccgcttgcccgtacctcttgttttccggggctagtggctccttgtcgtatttgattgttgcagcaatcagaaacagctgacagaaagtgaacccggccagcagaatgcgcgggaccattgcggttagggttaggattgttgttgtgaggaagtcttgtaggtggctcaccgccttcaggacagcgcaggccttggcgatgttactaaggtctaaggtccttgtataggcaaaggacctataacagtaaccccccccctttctctatgtaggaagtataggtcataggggtaggtcatattgctttagcctttatatatgcatctctatttagtaagctgtcctaaagtctatactgttttgtataatctagctacttatctagagcttatactttctctaaagctgtggcagctagacttgttaaacccaacccacgaaacccgccccaacccgccccgacccgccaagaaatgggttgggttagaccttctaattatccattgggttttggatatttttggctgccccaaagcccggcggagcaacccgctgggttgccaaggtatctgaataggtatattactgtatttagattatattttcttacttagatagtttataatacaatatataaatacagtattttattaactatgtaaatcactacttattagagtaatgatatgcataactgggctatttcgggttatttgggtttggttagaattatttgctaaacccatgggcggtttactgtgaaggtaacccaccccaaaaaccgcgtgggcggatcagctaggcctgaaaacccgccccaacccgtggtttaacaagtctagaaagaatatataatagagaaaatcctggataaatatcccaggagatacaggagaggttactagctagaatacctagtaaaatagtcaggctatgcttagctaacttgggaagctgctaacgtaaatcccgggcggtaggtgcgtcccgggcggaaggtagttttctcgtccaccccaacgcgtttatcaacctcaatagacttgttaaacccaacccacgaaacccgccccaacccgccccgacccgccaagaaacgggttgggttagaccttctaattatctgtcgactagaaaatatgactgtctaagactaatttggaagtcatgacgcctttttggcttagcggtatattttaccgatattatccattgggttttggatatttttggctgccccaaagcccggcggacgaacccgctgggttgccaagatatctgaataggtatattactgtatttagattatatttgcttacttagatagttataatacagtatttaaatacagtattttattaactatgtagatcactgcttattagagtaatgatatgcatacctgggttattttgggttatttaggttgggttagaattatttgctaaacccatgggcggtttactgtgaaggtaacccaccccaaaacccgcgtgggcggatcagctaggcctgaaaacccgccccaacccgtggtttaacaagtctaatccccaatattaaaattaaaataactagaaatttaattataatagccaggaccatagaaaagtagaaatataagtaatatataatatttttagtagagtctagatttagatatatatagttacaaaaaatatactaaatattataat

SEQ ID NO: 30 - DNA, 3454 bp, Emericella nidulans
tgcctgagtatacaggacaacgacagactgcctattcggcaatattccgctcgatgaggggctttatcctatcaagattgcagcagaaagagttgcagctaaggaacagtaccagcgagaaaactggcaaatctgcaaaccgagctgagcagagaaaatgcttcaattgtggcaaaagaggccatttgatacgagattgtggagcttcaaaggacctagaacagagcaattcctgggagaaccctcagggaaggagtcaccgaaagggtcagagcagggccagaatacatggaaatggcagagataagagccggccggcagaggaacaattaggatcctgttgagtagggggaggtggctaggattcgaattgcattatacgtgcctaggataacgcagactctcctatcaactcaataattgcaggatatgggtatcgggtattattgttagagtcgtcaatcaataaattaaggtctgatggtaggtaggagccctgaaataggatggatttcctcattatgatcggaagagtattccacttgcaccgctggggcactgtctggcaaaagctggagccaaaagccttgttgccggattgggcgaagatggttatttgtgtggctccgcatcagtattttcccttcttgagcaactcctaattaatctgcttcacgagccttgcagcttcgtctttctgggctcttcaagttcactgcccaatgcattccggcttatccatgctattgaggaatcaatacttcctctttacatgctcagcacctcgatctgtatatcacattccatatatgaccactcatatctgcttgttggcggtttatatcagctgttcactgagaacgttcttctgagctcgaaaagtaatagactgccttcacatatcataaacggatgtcaagaccaatatatcagttcgcggtagatctcggtcacatggccgagactgacagtagctacgaaagcccacaatacaagtagataagactgaattaaagagcgatgtccagaggcagctatatcatgattctctaaagtgttgtacgacttcacggatgcagcacaagactcccgaagaggtcttatcaaaccaggcatgcagtcattgggcaagcggagactataagaaatactagctggctttggagtagcttcaatttaatgccggcagaatttggaagttccattcgtagtcagacccaccgtactaacagagccactggggtcaacgtattctgagtacgtattctcaagcactaagggtacgtcattccacgtccgtgcccgtaggagaatggcaagtcggccgagcatctggaaaaggtagcactttccgactttcgacattatcgtggggagatgcggctatacgaggaggatatgcagagatcagagaagcaggtgcaatataagtagatgccattcgagcgacactccgtctacactctaaattgagcatatactgaccgaggacggtcagtatgatagcctttttcgcctatattccagattgttgattgagcattttgtgaaagaagtgcatagggcgtaggtgcagctgggtggatacttgcccacaagaaaactgatggtcgatcattctattaaacaatataataattctaataagcaatatagtaaaaggtcaaaatgcccgtccacatatgccagataaacggacagtcacaatggaggcagatttcgtcgcgaacattgattggggtctctagtccgctcttgggcatgacctcaaattcatgtggatgaaaagagattatgggggataaaatggggaaaaaaaaagaaaaaaaagaaaaaaaagtctgacttgagagaacgaacttggcgccagtacttctctctgactgggcggccctattttggtggatcgggtcgctcatgctctacccaaataccatatattgcactcttttgagccacgattttttgccatgctttgccttctcttccagagcgattctatctgcttgctccatattatcaaagactaccgcggccgagaagtccatctcgctcggcttgacaatcctcgtcttgaaccaccactgcaggaccagtcagcggccttccaggctcacggcttatggggataggtagactctctcaccttgtagacaccatagtcgaagaagaacagcggcgccgctaggtacgtcgagaagaagctcttggcggaccccttctccccaaacgggaaacaggcgaggtagaactcgcatccgaagatgaacagcacaatcagcagactgaagcactgcgcgtagggcgtaagcaagcccttcaaggggagatcagcgaggttccttccttgggcaagcagaccagtccggaaccggaggtgtgcgatgtagatagacgcccattgaaagagggttacaatcgcgacctacatcgtgttcgcacggtaaccaggaaacgaggaaaacgggaaagggaaacatgaaagagacctggtgagaggaagggctaccaaagatgagagccatcatagacgatactgccagtgccgtcgacgttcaaatagcgaagaccaacgccgatggccaggctgacggcgatcgcgacccacggccgtccagtagcgtccttcttccccagggtcctatggacaaggcccagatcggccagagccgtgaggctccggcttgcgacatagacgctcgtcacgccgcagctgatcacagacaggaagatgaacccgttgatcgcatgcgccaaaccccagacgtctgcgcgtttcagtgcgatcacgaatggggacccagcgtccctgacccattgatgaggtccgagtcatcgtagggaacgcacatgccgacgagccagatatcgacaccgaagaaagtgaacatgcgccagaataccggccgcaccgtcttgcggatcgtgctgcgcgggggcgccacttcgccggcaatgactgcgatatgctcgcccccgccgaagctgaacgcggcctggacaaagcttttcgcgatacctttgattccgttattgaatgcacctgggttcttccagtagctgaagaccagcgggccatgcgctgcggggatcccgccagatgccatgataaacaggaagcagatcatgagaatcaccacggcgcatttgatgaagcccatgtaatactcgaagtacccatacaccttgaagtggaagacgttggccagagccatcagccaggaagattgtgatgtacgctgccagatggatggcgtccgtcgccggccagaactggagtactgagacggccgttgtgatttcagcagggatgatcatcacccactgcaaaagatcggttgaaagcccgtggcatttgagatgggatgtttggggattatacagcaaaccagaaattaatgccaatcgcgaacccaaacgccgggtcgacgaattcggcgcattggcgtatgaa

SEQ ID NO: 31 - DNA, 1826 bp, Emericella nidulans
ctccggctgtgattaaggatgatagagctaaacccaaactggttatcacttaatctataccaagcatctgtagtatccgccacagggaaatcctcggctattccaccatttcataaacttgtatggcgtgaggttcgtctataaaagatggctgtcacacccgcagtggaaaggatcatcatcctcaacatcattttcctcagtctctgttaacaacatcgactcgaattacgatgagggtttccgcgtttgctttgctggccgcagcagccactgccgccgctactagcgtccagggtgccgctgaaggtttcgccaagggcgtgactggtggtggaagtgcgactcctgtctaccccacaaccacagatgagcttgtctcttacctgggcgacgacgaggcccgtgttattgtcttgaccaagacgtacgtctgcgaagcgatgatatttatgggagactaacaaatgatatagctttgatttccgcggcaccgagggcaccaccaccgccaagggatgttctccttggggcacagcctctggctgccagctcgccatcaacaaggacggctggtgtgacaactaccagcctgacgctcctcagactacaatcacctagtacgtttcagtctggaggcattccatgctgatcaactcttgcttacagacgtgcagcgataccgccggtatgctgggcattaccgtcaagtccaacaagagtttgatcggtcaaggcactgccggtgtcatcaagggcaagggtatccgcatcgtcaacggcgctaagaacgtcatcgtccagtaagccccctatacccccagtccgtttcatgtacctgccctaaccgccctaggaacatcgccattaccgacatcaatccccagtacgtctggggcggcgatgctatcactctgaacgacgtcgacatggtctggattgaccacgtcacaaccgcccgcatcgcgcgccagcacatcgtgctcggcacgaacgcctgcaaccgcgtgactatctccaacaactacttcaatggcgtgtccgactactccgcgacctgcgacggatatcactattggggcctgtacctggacggcagcaacgacatggtcacgctgcagggtaactacatccaccacttcagtggacgcagcccgaaggttggcggtaacacgctgctccacgccgtcaacaactactggtacgactcgactggccacgccttcgagattgctgctggctcctctgtcctcgctgagggcaatgtcttccagaacatcaacgcccctgttgagagcagcagcttggctggtaacctgttcacctcgcccgattctaacacgaacaaggtctgctcgtcctacctcggacacacctgtcagctcaatgcctttggcagctcaggctccttcaaccaggcagatgagggattccttgttaacttcaagggcaagaacgtggcttctgcggatgcttatagtgctgcgcagagcgtgcccaacaatgccggtcagggcaagctctaagtggtcgctggttgcatgattgaagtgtgaagagcagaggtggatgtgggctctgattaattcaacatggctcgttgaggagcgcctcggtatatgttctttctttcttcagatgggccgtgccgatcttaatttttgctgtaatttatacttatatagacaatatagactcaacccccaattcagggaacacacttaggcttatcgaagacgcctgatggttctgacttaatgcaaatagttctccgaggtaaatttagttcctgtcacagcgtgaagcgtttcagcacatccatttcg

SEQ ID NO: 32 - DNA, 1244 bp, Emericella nidulans
gtctaactgcataaatgtagtctacaacgttgagattaccgaccagctggcctaaggggacctcgcaaaggcttgcggcggggagtatcaatatcagcgtctgagcgggacgacgatgatgatgataaatcaggaaggcaaggttgctgcaccacgacgacaaggtgcaaatgctaggctttcgtgggaaaacaatgtagactgtgctgggctggggatggggagccgtggatctagctgcatgtctgtgtctgttgactttatctgggtgctgtacttcgatgtggtagcaatggattgagacaatcaggtactgggtgctgtttcaaagatcaggagactgcgtcaaatggaagggctttgtagcgttctgtctctgtcaagtagcatggcatggcaacgagtgtctttcggcctggacaggccattacgggactgcatcttctacagcctgagtctaaataaaaaaaaaaaaatttggcatcgcatttgcaagaaacttgcgggctatagctagaacttataaaacaaggtgaccccaaagacaaaaagaataacgaccgatacgggactcgaacccgcaatcttggcttcactaccaaactctggcagttcaataggagagccacgccttaccattaggccaaccggccatagttgcgaattgcttcgcacaactggttctatagactatgagtaataacttttgtttgagttgagcccgaggattccctgcgaagtttagcaagcttccattttcgtccatcagcccagctgggccctagaaaccactactggcacgccagtcctcatactccaatgcatcatattctactcatttaagcgtgacagctggataaacgacttgttacttagacccacatcggtaactgaagagatttgatggcatcgctgatatgtgacgctgataaggctcgacgttagactagtgtactattagatcatgctagacgtctgtatatacacatatacacatcatatatcctaagcacctagagggtcttctctatccaatagacagacagatttctacagcaatgatttgtgtcccatgaggagatatacatcctctggactctattatgagcatggcaaatttccagaccttagaggactgggacacagccccgacaccctctggtgcaccggggtcatgatacctaggtaggcaggttaatttaggtagacacctaccacctccccctcctctcccccagaatcgc

SEQ ID NO: 33 - DNA, 1059 bp, Emericella nidulans
  unsure (1)..(1059): unsure at all n locations
agtaatgatatgcataactgggttattttgggttatttaggttgggttagaattatttgctaaacccatgggcggtttactgttcaggtaacccaccccaaaatcccgcgtgggcggatcagctaggcctgaaaacccgccccaacccgtggtttaacaagtctactgctgggttgccaagatatctgaataggtatattactgtatttagattatattttcttacttagatagttataatatcagtatttaaatacagtattttattaactatgtagatcactgcttattagagtaatgatatgcataactgggttattttgggttatttaggttaggttagaattatttgctaaacccatgggcggtttactgttcaggtaacccaccccagaaaccacgtgggcagatcagctaggcctgaaaacccgccccaacccgtggtttaacaagtctacccagcgggttgctccgccgggctttgggtcagcctaaaatatccaaagcccaatggattattagaaggactaacccaacccatagtttaacaagtttagtattgaattaactaagttagctttcaagctgacaaatacgttacacatgaaaaatcctcgttcagtcaatgcccccctccttctcatcaatcagacaaatcaccggaaaaagagctccaagaccttatgtccacccccccatatcccgtcactggcatcccatccaaaaccccctcacatgtcacaaaccccgaataactctccccaccctgtccccgaccaaacatttcctggtcaccgagtatactccgtatgctcagcaaccccctcccctcaattcccagtttccattgctgcgggtacacgcgccctgagcgtggcgacatccaaatggtgtccggagataggtccggctcaaacacgtcgatgggctcaagcgataatgcgctagagttgcggcggggttggatgtaaacccctcggctgtaaaaaagtacaaacgtgcgggatgtcttgtagcagnggtgttgatgtcgggggtcaggaatgtgacgaggatgag

SEQ ID NO: 34 - DNA, 322 bp, Emericella nidulans
tgtgcttacccgaattaattgcaaaagcatcaggtttcaggtagttcctgatatcgtaagccagtgggactacgacatcgtctaaaatgacgagatcatattcaccctcgttgagctcttcgagcttaaccaaagacgccaattccaactgcagctgctcagtggagctgattacttcttcagcagccatttgcagtagcgtcagggagcaaaacgccgctgctcaccatcccgacggttcaggtctggaggtgatgtgcaggatcttcgagtccgggaactggtggacaaagatctaccaagcgagcctggtcatccagga

SEQ ID NO: 35 - DNA, 365 bp, Emericella nidulans
agagtcgcacaggatattataaacattgatgttttctgtcatgtcagcaagggaaatttagtcggattggggccacttacgaaaagcatcaacccgactgttgggtggatgcgggaaccagggccacgggcgataaaaattgcccgcatcaacggatgttcatggtcgtacccgtgaattcctttcggatggtaaaactgaccgttctggagtgctgcctgagcgtcgaactcgcaggttacccatagaggggcgatgcgatcgttgttcttgaagtgataccgttctggcatgttttcgcgggtgtagatctcgatcgcgtctgagtgccgtgattcgcgcaatggccaacgtcgatatggctg

SEQ ID NO: 36 - DNA, 1353 bp, Emericella nidulans
aatatcttgacaacaaaaatggcgatcacatatgataaagacagcgctatgaaggtccaagccatcctaagctcgcgggatgactggcacatatggttttaagttattaaagaccatgcaaataagtaagaagtataggaatattttaatcctgatactgataataaaacaaggcctgagctgctgaccaaactgacaattctattagtaaataaggtgtcaaggtgcaggctcaggaatatattcagaacaggataacggagtagatacgacaggcaggctacggagtcgggctatcagacaggtgcatagacaagacaagacgtagctcggaggtcagaatcgggtcgaaatcagaactcgagaaatctcagccagccaggcggtcagaacaggcagaatcgcggaggctcgagcaggcaccgtgacataaggccttagaaaatatatattaatattatcaaataatgttgcagtgttatgggtcctttgcctatacaaggaccttagaccttagtgactcggccaaggcctgcgctgtcccgaaggcggtgagccacctacaagacttcctcacaacaacaatccttctttctcctttcttctttagcgattccttcttgtacgtacggcacgtctagataggaagatccatctaaacacgtcccttaacataatccagggccaaaggtcttgtagtaagtatgtacctattagaacctgccttgcctttgtaataagaagatatcctaattattctgcagctctattctgatttagtattataactactaagtactggtaagcaatgccttctgctgctttaaatattataatctgatgccctagtattttcttattattacttttcagatatttgacagtgaggctaaaaagattcttcatctggtttataaatttctgtacagtattaacatatttgctcttctattagtaggtaaagataaaatatattcttgtagctttattatagaaataggtaatctatttatccctgttcagaccaggtcatattttaataaggttaaaatatacttgctctagtgttatgggtcctttgcctatacaaggaccttagaccttagtgactcggccaaggcctgcgctgtcctgaaggcggtgagccacctacaagacttccttgcaacaacaatccttctttctcatttcttctttagcgattccttcttgtacgtacggcacgtctagataggaagatccatctaaatacgtcccttaacattaggaatcgctgaccaatctcaataatagtatgaggagaccttttactatgacaatggaagaagaaagcgtcgcattgttgctacagca

SEQ ID NO: 37 - DNA, 1205 bp, Emericella nidulans
  unsure (1)..(1205): unsure at all n locations
atgtattccctcatcgagtacaccgtaaagcagtaaattaaagccaatcttacctataaatctccacttcatttttgcttcaagggttcgtacataactctctaggactcggtatctgagccctggaaaatagccgggagcaactccatcctcctatcaacttcatctcctacgcaggcctaaagacaagctcgccaagatttccgccttgacgaccttcccccaggaaaacatgtccctttagcaaaccaagcgctcccgtagatagaactcttaattggaagccttctatcatcggcaacttctttcaaaatctcttggagttttcctaccaaggactagacactgcatttgaatgatggtgttggcgctgaacgggcttccacttactgttcggcagtctgttatggtaggacgcctgaaatcgccgattggtactatcgggactggaccaggcgcaaaaacccagctcggtagattataattatgggacatgatacatacttggaatacaggttctctaagatatgacttgctgccattatcccctatccatgatcctggctcgcaggaatggtggcccggttcgagacccaggtaatctgccgtagggcagaatattaaatggagtctcagctcctgtaaaccaatattgattgacatctaggggtgcacttgctgcgggttgggtacaacctgcagggtttgaaatctgcccgcgcgggtttgcgggttctaccgcgcaggtttaaaaaatacataaaaatacataattttcatagttttcacaatattatacatctttatagtattttatgcacttttgtgaatatatatgtatttttatttatttttctacccgcgcagtgcccgcaaacctgcatgtattcccctattagaaccccgcaacccgcgcggactgctaatttgcaaaccctcaatgcactgctgtggtgtggtatggtggcctgctgcaggttgcagtgcgggttgacaatcctattgacatcattagtaacatagaagtgtcatgtaacgctctttgtgtgtaccaagtgtacaggataaaccactggctggtgtcgaccagagaagacctcctcttactaatcaacatccagcacctcgctcgtccaatcatacgaggcaatcacaccgccatagcganttgcaactatctatatactaactgaattatctactga

SEQ ID NO: 38 - DNA, 380 bp, Emericella nidulans
tggagcgaggtccgatttggacagcttctcaagtggttcggtcacacatggctctgcacgatagtagtcccagtctgggcttaccagcgcctccgcaacccagaggttctcagtatgcactttacccggatttaattcttcggatccttgatcctcgacccattcgcaattgccgacgactactctgcggagaagttcaactttgcaacccaaactggcagccatggcttgtagattggacactcaatgtcccgtcatccgcaaccccaatttcgtagagagcaccttggctttcctcaaggccaggaagaaggcgtgacggttttgaagtcgcgctgcgtaatatgacgattgctgcaagcgccatagtagctgagttg

SEQ ID NO: 39 - DNA, 1405 bp, Emericella nidulans
ccgctcctgctagtgtaaatgaagtatagcaatgaagaaacatgtatataaatagaataagatggggaaaaggcaagcttgcagaaccaactaaaatatgaatcgccgggtttagttataatgtgctggtgtgcgtttcaactgtgaatcttccgtttgagtctgaatgcatgacgaaaatgcagttcagctccaggcaacaaggccttagcacctggacgggcaaatgttcgtttgctgctggatctttcaggctgacctgactagatagactcggactcagatattgggggccgtttatcctattatgcacgttcacctgcaacaaaaaaattcgaagtagggctaactgcaaaacaagtagaagaagacggtgctctagcaacaataataataataataatagtagtagtagtagaagaagaagaagaaaataaatacaatacaatacaatacaatacaataaagatgataaattatcattgatatcataaacctaatttacgcacattgataaactcacttccaattacgaaagactgcggccgtccagttgccctagcctaagacggcaagccaatcagaacatgtaatcgaccaccctggcgctcatattaagaatactaagcatagagaagagaattatgtacatggagagatcgattgttggaagtcttcgcgaaacgaaatttaacttgatccaataggcggtcaggaatgaccaatcacacgatgagctctgtagtctgtgttggctcataatcacagcacataggactgtgacaagcccttgattacatggcggccgccaacaacctggggaacgtccctgcgcgatccatgagtcgtagcacagactaacaaatcacacagtaagcgtgaacgcggtatgtttataggcagcagataccgtgtcttctagaagtgttttgtctatagcttgttgcaagagggaaaatattggcatctctcgaccgatctgacgacatttaccccttagctagggctaggtgcaatggcacttgggatttccgctccacccacgggaccggaacggtccgccatggcggacagccacagccaggcacgggtcgtctgtgctctgagcggttaatcgcttaaatcataggcgcaagagggaagacttctgaacatcccacgagtgacaatctaagcctttgtataatcattatagctcaattgtcaagtagcaatgtagatctgaaaagacagccgtaatttctggaaacccgaggctcggccccattcccccactgggatcttggacttggagcattgatagttagacacccgcttattgatgtctataaacctacaaccaagcccacttagggtttgttgcactattatctgtgttgatatggtggctcaagtagggacggga

SEQ ID NO: 40 - DNA, 335 bp, Emericella nidulans
ttaatacttactgttggtccctgtagatgtcccagatgtcaaagaccaggctagacaagatcagagccatctactcctataatcaagccagcttccccagagccgacgcaggagagttctatattacattcaagaggctgacaagggagcagatgctgaatattcttcagagaattgacaaggaactctacctatacagtcacaagacattttctctatagcacacagtaatcagaagcctgcttcttaccaacatgctatgcagacgtttgaaccagcttgaaaataactttgactatgcttaaaacaaataattaaaccttgatgcttcactg

SEQ ID NO: 41 - DNA, 1209 bp, Emericella nidulans
cgcggtctttatttggatttctgctgcacccatgagctcaacaggcgaccaatatctccgacttgttgtataagccttcgcagcggccaagtgcatatacgagatcttgctataaatagaatgacgtaaatgtgccgatacgaatgcctgaaatttagaattaaacctttatttatagaaagagggtgccccccgattacccctaaaaagtcataactgtactctattccgactcaaaactgttaccttaataaaaaagcaatccaacgacatgaagcctgtaatgacattaagtctagattattcttactttaacataaaaccattaccatcagacatgatgcacagcatgacaaatgcgatatccgaagtgaaaccgcaggtataacaaccgcctcccaaaaatgtacatttacgccttcttagcaatgtcctccacagtctgagtcacatccttctcagtcatacccatctcggccgcgaaggtgccgtggggcttccacttggaagaagtgcgaggggtggtctcctccatcatcttgtcgacctgctcaagagtaagacccttggtctcgggaatcaggaagtaggtgtagacaaaagcgcacgcgcagagggagccccagatgaagaacaccttggacttgaggttgcccttgtcctcgtcgaccatgtagggggtgatgacagcaatgatgcagttccagagccagttggaggcagtggagagagcgacaccacgggaacggatcggcaacgggtagatctcgccgatgacgacccaggcaccgggaccccaggtggaggcgaagaagaagatgtaaatgcagataaatgcgatctgagcgctgacggtcttgttgttagatccatcaacgacaccggcaatggcgacaatgaactggcagataaccatgcccagggcgccccagagaaggagaggacgacgaccaatcttctccatcgtgtagaaagagatcggagtggagaagacgttgacgatggtggtgatcatactgatgaggaaggggtcggaaatagtgccgagctgcgatagttagctaattgaacatcctctagggttcagggaaacatacgttggtgaagaaggtagtaccgaagtagaagacgaagttgacaccagtccacctgtggaaatgtcagtttgagcgtaaacaagaacggagagaagcacgtactgctgcatca

SEQ ID NO: 42 - DNA, 1230 bp, Emericella nidulans
gatctatattgacattcagagggcgttggccggcggtgcctgttttggaggagcaagaatggaatcaatcttttgaaggtgatagaggtaaacgtggctacaggcatacactctgaaaaggttataatacctatggagcactctgatgtccgttgttgagcggaggaagggactgagcaaggtttgggagggtggcaagtaattcagaaattgccggaggaaccgacgaagaaaggatatgaaaaggaggggagagggtgaatagcagaacttgctgtttaggcagatgctctatagtaagctatgcaataccaacttagccgatttctctgacggtagagcagcatagggtcgaccgtgtcacagttagggctaagatttagcatctgccatcacatctccaacaataaagccataagtagtactaaaatacacagaagccgcgcaatgactcaatttcatgtattatagacgatagtagaccaagaatatatacaatgaagtaagcacacaacccagtcaagcgccgtttgacttcatcccatcaggcactaatttgacatcaaagttcagctcaagcccagcttgtgggtcacccttgcgctcaatgaaatcgacaatcaacgattccttcacggcaaataccgcgtcgctcgtcagatacgggtcctgtcggtcgaatatctgcgtcgtgagaggcctgtacccgtcgtgtgttgcctgcagcaaaaacattagtatacataacacgcaaagccacgatatcctgagcgcccttaggcacaaacctgaggagacggtagaacatacaatgatatgaatatgcgccggtcggaacacatgcctatccatcaacttcaacagcatccctgcgggcccatcatccggcgcaggatacggcgtcggccgcagacaatagaacgagtacctcccattttcatcagtcctgaatttcccgcgcaggttaaactcctcctgctcgggatcctgctgctcatacagtccattcgtagaagcctgccacacctccaccaccgcgccaaccagcggctttttggtgactaagtccatcacttggccagccatgtaggctatctcgcctttaccgtctttctctttcggtgctgtcttgacgatgctttcgccgtttgagcggaagggggtgtcagcgcgaaagaagggccctaaattgccggcggcgttggtgcgttcgtggctttctaagcttgt

SEQ ID NO: 43 - DNA, 1254 bp, Emericella nidulans
tcgtcgttgttgtcagtgccctcgtactccgtgcagacagtgtccacgtcggtcacgcaagtgtcgctcttgatggtcgcagtgtcgccgtagttgctgttgataccaaccagcgacgcagagccagacacagcagtgaccgactccagcgtaacatggcgctcgtacatctcgtcgcagttgccgcacgaccggtacagcttgccgaagttgtaggccgtgaagccggagatgctgaccgtgccgccgccgttgtgctggatgacctattctcctcttttagcaccagcatttcacttactcgagacctcagcaggagaggtaggtaccttgtcgtcggcgttctgcgcaccaccgccgatgacggtgaaagggccatcaccggtcttgagagacagagcgtcctcgcagacggcctcccaccagacattctcgatcgtgcaggatccctcgcagtggacaccctcaatctgatcagcaccgatgatggcgtttttaagagtgccaccgtccttcactatgaacacggcatccgagtcgcctccctcggcctggccggagcagtcgacaccccgaccataggtcttcatgccgccgtcaaaggtctcgttgccagagatcgtgtaggtcgcctcaaaggtctggctgccctgcgactcggggatcgggaaggtgaagcgcttgtcgatgcggttgaagttgaggctgttggtgccgggattgcggacgccatgcgcggccagcgcgctggtggcaaaagagaggacggcaagctgcttaaaaaacattgtagtttattgtacagatacgaactggaaagagtgtgtgtgcgaaaggaaagcaggtgttgataccggaccaacgagtgtataggctgagtttgatgctggccttccacatctcgaggttcaatgctccctcttttatacctgctccctcttcccagagtctaaagtctagcaaatgcttggcggtttcaatgcatttcccgcattaatcgtgttgaaacagattagcaggaactggagcgcgttctgcagcccgttgtgccatgattcgtagtgtgcttccaccccaatcttcccttcgcttcccctgctaatcggcttggcaggaaaagcttggaagggtggaagtcagtatcaaacaccaagccctctaggcaccatccgtttgcttgatagtcgtgttgctatccattttcggcgtacggcccacaactagacaggacggttgtctgggtgtcagcgcccc

SEQ ID NO: 44 - DNA, 1113 bp, Emericella nidulans
aactgggcttggctgacaccctcaatgggtacaccaactgctatactggcaacgaatgggatacctccatctgcaccagcaacgaggtttgcgcggaacaatgcgctgtcgacggtgctaactatgcctccacatacggcatcaccacatccggcagctcgctgcgtctgaacttcgtcacgcagtcgcagcagaagaatatcggttccagagtctatctcatggatgacgaggatacatacaccatgttctacctgctcaacaaggaattcacttttgacgtcgacgtctccgagctcccctgcggtctcaacggggcggtctactttgtgtctatggacgccgacggcggcaaatcccgctatgccaccaacgaagccggtgccaaatacggcacgggatactgcgactctcagtgcccgcgggacctcaagttcatcaacggcgtcgccaacgtcgagggctgggaatcctccgatacgaaccccaacggcggcgtcggcaatcacggctcctgctgcgcagagatggatatctgggaggcaaacagcatttccactgctttcactccccatccctgcgataccccgggccagaccctctgcaccggtgactcatgcggtgggacctatagcaacgaccgctacggcggcacctgcgaccccgatggctgcgactttaactcctaccgtcaggggaacaagaccttctacgggccaggcctgacagtcgacacgaacagcccggtcacagtggtgacccagttcctgacagacgacaacacggacacaggcaccctctcggaaatcaaacgcttctatgtccagaacggcgtcgtcatccccaactccgagtcgacctaccccgctaatccgggtaactcgatcacaacggagttctgcgagtcgcaaaaggaactcttcggcgacgtcgatgttttctccgcccacggcggcatggcgggcatgggcgccgcgttggaacaaggcatggtccttgtactgtccctgtgggacgacaactactcaaacatgctctggctcgactcgaattaccccacggacgcggacccgactcaaccaggtatcgcgcgcgggacgtgcccgacggact

SEQ ID NO: 45 - DNA, 809 bp, Emericella nidulans
  unsure (1)..(809): unsure at all n locations
gaaacaatatagccttcagggccggctcactaaacaaagatgcatatataagggctaaaccaccatgacatccctgtgacctgtcctcccacatagagggaggggggggtactgttatgggtcctttgcctatacacggaccttagaccttagtgactcggccaaggcttgcgctgtcctgaaggttgtgagccacctataagacttcctcacaacaacaatccttctttctcatttcttctttagcgattccttcttgaacgtacggcacgtttagataggaagatccatctaaatacgtcccttaacatatcacaagcttagagaaagaaataaaagatagaagtgcagatatcttcctcctccctttatcaacctttctgacttcccggacctgtatgccgacggatccctttcgcgaagttatgaggatggatctccttttctaagcttcgaggccgcaattccaaggctgtatactgatattgcagaaaccttatttagaactgggttgagggcatagctggcaaccaaatcaaggccatagcctgtgacaattagctcttaactgctttaaaataatttntatatatattctatattactggataattttactattaattaagcagttattaagaaatataggttaatctatctaagtagtctacaaaaataaaagtttatatattactagaaaattgctatattaataaagctgggaaaaaaaaataaatattatattttaactactaannttagataaatataataaattatctaactctaagcttttctatagtataaaa

SEQ ID NO: 46 - DNA, 351 bp, Emericella nidulans
tagtgatactttgactcccccctaacgcctaatctgcgcgtctgtacatttggaaatatgattcgaactagtttcccgaaagacgcaggattcagcacggagacacgttcggttccacacttttcggcataacagcagtaaacacgatctctgcggacagagcctgtgctttttctgcagttctccttcaacctatggcgtataagattcagcaaatgggagcatgattatgttaccataccttttctgcctttccgccagcatccctcatgcttgagtacttctgccgccatttgcttcagtgtataaccctcatactgccgcaagagtctctgcttagcatcatgttca

SEQ ID NO: 47 - DNA, 6877 bp, Emericella nidulans
  unsure (1)..(6877): unsure at all n locations
gggtctatcagcagaatctgattggtgatatgttaatgaaagaggcgaccagaaagtgctatcaagacaaatccttctggttgacgcatgaatacttccagcagcaagatcataggcatgtcatcgggccgcgcgtggttcagctagaccaggttactggtgcatgcttgacatagggtttggggcagaagaagtgatccttaggagtggcactggttttgccaccaactgtaagtagaccgtatctagagtgaatgaatctgagattatattcaggattatcctggaatagtggatgaccccagccgaggcaaaagcagtgttgtaatgagatactgaatgctgtgttacatcttcacccgtaggtaggaggtcaggcatcattagaactgtctaaatgcctacctacctcccattttgagcgaagaatacatagatcgttccgctcggatcagccaatccgggtaaggtgttggtccgcgtcctcgcgcagctgataccccgcacacgatagcatgagttgcacacatggtttcgggctttaatccttcaaattttcaagtcaaaataaacgtcactgggttcattttttgagtgatgcagccacggaagcacttctgtacccgttgccagaaaggctttggtacggttcaggctaagcagcggcatatatcagactcacttaagcaccaccctgcagccttgctcctcgccgacagattatccaacaaaggaagaactcaacgagcatctcgaatatgaccataacgtatgcacggcttgtgaccgccaatttaaatcacctggccagcttgttcagcatgatgtagacaagcataatatgtgtcagacgtgccgtcggtattttagcagcccgtctaactagaaaagtgtttgttttatagctcaactaccggtaactggctgctaacgaaatgttccatagcacaagattacccatgctagaagggatattggctgtcctgggtgctcgcgtcagtttcccaccaattctgcaatgatgttgcacctcgaagctggaacatgtacctccggtgttgacctcgacgagataaaccacctagcttttgagtgctatcaggcgcaaagttacaagtcctcaaatacaaacttcaacttcgaatgtccaacctaccaaacaccatttctgtttatgagtggtcttctgcagcacatagaaagtgacggctgtgaggaagagttgggtagcgaaagtttgcttgggacattccttgaatttgctaggtcgcgcattatttatgaaagcagcgaatgctgaacattggcacagtgcagagaagagtgtctctgcttcagggtcatggaaattctcaaggatataattaaagagcatgaatatatgaagcacctactactgcagtagtaaaaagctgacagcgaacgtaaacactctgcacacccttaaatgtaatctaaggatgcctgtaatcgtctaagcaattcgcggatgtcatcaacaaaatgatggactactccaactgtcacactgtttctgacgaagaactcagcatccctgtctttatccgaggtccagacctttagtcaagactacttctacacaagaacataagaatcaaagcttgcattcatgatttgcctgaattactcctcgtggatcaaggaagggcatttaagcacagtgggtttgattcaatatgagacggcaagccatcagaacatctaaacaaccattctggtgcttatattcggaatcctaagcatggagaagagaattatgtacatgaagaggtcgactgtgggatgtctctgcgaaacgaggcttaacttaactcaataggcggtcagggatggcagaagtcagttcatcgtgtacaccggtgtacacgatgaagctgaccaatcacacgacgcttgttctgggcaccgcacccagaatgagctctgtaatctgtgctggttagcgatcacggcgcgtagagccgtgatacaatacacgcatgatatttcaaagccaacagaaaatgcactttcatctttcgtgtagaggcgtacagtctttctagaaatcgccttcaccgacaaacatatgacagttgttgttctgccccactaccgagacaattagcgcgagcagtatattgagccgtcagcactttaaaaggaaggcgatagagggccctgtgcatttccctccatacgaagcattgggaatacattgtcatatcgtatacctcaaccgtataatgtatccacgacctagcatacacgcaacattcactttttaccaacctaaaagatattcattgcaaagaaatttaatatactaattgatgaactacgtactgtcaaagttttgtacttgggatttctaaggctcaaatcactacgaaatttgttgacaagtctaaggttgtaggcctgatcacgagaaaaatacaaaagctactatttgcgcaaaatgttatacaggatatctatcggtaaaatataccgctaagccaaaaagccgtcatgacttccaaattagtcttagacagtcatattttctagtcgacaatatctcatttacgtgggcgttctttaagtggcctccgagggtgttcagccccaatacgtgtgctactgggggcggggatatttcttgaatatgtcaggtcttgcattaattacgaaagcagcgaatgctgaacagtatgtagcacaggtcaagaccttgttattagagatcagagaaatacaggggaaactaagagcgcgagtatataccaaacatgtattacagtgatgcagtagtaaaattatgataaataatacaagacggtgcaactcccaagccgatctagacaggttgataatcgttcaaccactcccgaacatcatcaacgaaacgccgggcaactccaactacaacgccatgtttgacaaagaaatcaacatctctatctttgttgatttgtctgagatcgaggccattagtcaacgcgatgtcgcacgctttgtcaacgttgtctttaagaatctgggagttcacccgtctttgctgccaatccgaatacttccggacggctagatcgagcggtagatccggaatcataattgcatcatcaaggctagggtctgaataagggagcaatggcggtgaaccagctggagtaattaacgtcgatgcctgagcagactgcgcaggtaaaagatggatattaattggtgccgatggcggtgattcgtttgacgattgccttccagttttgcgttgcctttccaaccggtgttgctcttctgcatataattgttgtcgaacctcatccgggacatcgtcatgagattcaatgttcaaatttttcttctttaccaaatgaacaaggtgtctcaagtggtgtgtcttgagtttgtaatgcttctttcccacggggtcctgccagcagtgcccgtcatggttatcacatggtggcccaggacatcgcaacgcattgtagacagaccgccaaggcgagtattgaccagagctttgctctgcgtcaatctgggcatccctatcagcaagcatagtcttggtcactgaagtagcaccgcgcttttctccagcgcgaggcgcattataatctgcaaggtagttaacgcaaatatcaagtttgatcttctttcccttgcgtaacagattggtccactgaaggagctgcctctctatgacagtccaatcgatatcaagacccgggaagtcttgataaagatcattggccgaacgatcgttaccgacaccagaatggttatattatctaacctagcccttcggttacgaaatattggtcgccgcttgacatcctgaactttgttctccaaggtttcttgccaatacgcactaggcgctatgactatatctggttctgtgacccttacggctgggcggtggttgagcttaactttccagtcgatcagataagaatattgcgcggcttcgggttccccgaacggagtttctggactgttgtcacctatctggcttgtggaggggctacgcacgggaggcgtgggtgtccgaccgaagttgcctgcggtaggggcgggatagagcggggttctttcccatgaatcgaaaagctggaattgcgaaggatcatctggatagtggggactgaagctcactgccttcaagtaactgccgaggaacctagcgtgacctcgtatgtcagtctcacattcggtgcgtcaccttgcatcgggtaggctgcagctaacaggctgaggagaatgataagcaggatcatgagtttatcattcaccagccagtaccaacaaggacacgagcgttctttttcggtctgagtcagaaactagggagttggggatgtcgtgtctacagctcaatctgcaaccacggggatgtccatgttgacagattgccagttcctattttgcacgtgatcggtgcggaaccttcgagaaaagaatggtctgatactgttactgtacgtatggaacgaaacgtaatgtatcacggaaagataatattccgaaactatcctatatattgactagcgtctcttggcgcgctcaaagagtgtagaggagttttttttgggttgtcaaactgattcagccgccgactgtatcattaaatcttctatcaactactaaaagtctgctttctacggaactgcgacactgttgctctgaagttagtacccactgtgaccatgatccaataaaaatcactgagatttgatccagcagtgcgctgaaggcgctagtacctcaaagtttgcctaactgaccagacgctgatgagagcctaattgatcatgcaaccatacaggagaatcattagacttgggcactgctgtaaacagtatttcgaagttagcagctttaaagaagctgtaacataatatatcacatcatgctttcctagttgcacgtggatgtatgatattgtcaaccggaggtctctccttaccagtactaatcaacagccagcacctctcatttctttattcatttgcatattcgtttgcttgtttgtttgatgcattacaccgtttgtatgtctgagctatctcctactcatcgagaaccttcttctgaagcccctgagagctataaattatccatacaaactgtaattagaatgatcaagaccttcaatactttcgttcgcagcagaccttagtcccatgaccagaatcgacgctagcagccacctcgaatgctcacatattttattattccctagatttgactctgcttggtttgcaacgtcctatctacagcttaaatgaacctttggattcaccaacttcaacatgtctaattatgaacccaatgatgaaggcccatcccaaagctcgcttgtcggccaagccagacagataactctgcaagtgggggagtctcgatttgttacagcttatgaaacacttgtaactgagagcattttcttcgcatccctgctgtctgggcgatgggacaatgctcttcccgacgggtcttattttattgatgcagatcctactctgtttgagcacatcctgcgttatctcaggcatggggtgctcctgatattttatagtatcaacaaaggtcatgaccacgcattatatcttgcccttcttaaggaggcaagatactttcaaattgctcggctccaagactggcttgaaaataagcaatacctccatgtgctagctgtggagtgttcagttaaagaagtaaagggactagtaatctttctacaacactgcccacagacacagcagttgtgcacgaccccagataggaaatcagaaaggtgtatatatgccctcgggggataggctgtcaccgtggacaaccccaatactgtggtataaaatgcatgaaggcacaaggtaataaggatgctgcttatgaggaggaaccagcttttaggtatctggtggtgaaaaaacgaattgtcctaaatatacaagactgtgtggttagtcaggaagggctacctactgttacagatggttgacctctcaagcctccctaacccaggggaactctgtcgtgagcttgcaatcttgattaacttaccaaatctctctcttgacaaccacatccaaccagtgtgatgtaatgggcgaaaagtctgctcttgatcagctgcaagaatgtatcaaatagagatattagaacaaactctctgtattgcttgttaattagaagggcgtagcagactagactgatattataagcaaatacgtcaggcgaccatagattgacaaatggatatgtcggacttattaccaaggagcattccgcgcaagatatcgccttccagaagagcctggcagtaaccagtgctagttttattactcataatataagacaaagtagattgcggcccaagatagacagagcattcgcccatcctactctgtgcataagttccctccagcctaaaagaaacacctttaagttgggtatttacagcagatttcggcatcttgactgtctcaggcatcaggcccaggcctgccgcatctagtgggcccagaatggtttgtatactggtaattatgtgctccaattccttcagtctagtgcagatatggtccagatacccacgtgcaacagacacacgcctatcatttggccctatatttgcgcgactgctgattcgcaacttctggaaggtcaagaaataccggatgggcccgcacccttgctgtgcgctttcacncgacgtatttcggtagagccatccttatggggcgtgggctgctcggcgatagctggctcttcgggatgttcgacaggtaagtgctttctgtatcacctctcgataagccttcttaaagatattatgaggaatagcttcatgcactcatttttgagccgaaatgactgtcac

SEQ ID NO: 48 - DNA, 690 bp, Emericella nidulans
ctgtctggtcaggaccagccaaccacggagcggcccgcttgtatgccgatcagtcctggagctgagctcagtataaagactggcgcccatagctatactggccggtatattcagtccttgatattttctaatatctagccatggcagccacagcgtggctggtccaagggcattggcggcttatccttcctggggatcatggtgggcattatctgcggtctcgtctacgcgatcttggactaccacgggcgatacgcgaggctgttcaaagcatctatagctgagtcgcgcctccctccggcggctgaagctcgtcttccaccagcaatcatcggcggggttgcgctcccaatcgggatgtttgcgttcgcgtggacgaactaccctagcatccactgctcggtcagcattatcctctccgcaccgttcgaatttggatgcatgcttgtcattccacttatgacctacctcatcgactcgtatacaatctacgcagcgtcagttctcgccgcggcggcgatctttcgtccatcatggcgcggtcttttcgttttcaccagcaggtgacagcatttacggaccccatacgaccgcgagtcacccatgcgcgaggcaactgccagtcgagtctgcagagaccacacatatcaggcatttccgatggactcaacaccgacgcgtcgctcgagg

SEQ ID NO: 49 - DNA, 372 bp, Emericella nidulans
cagaggcgtctcgcaacggctgttggaaatatcggaggaggaatcggagggtttgtcgctgcttcccaagcctagagagatatgcagtccaccgttctgacgcgagggtagccgaccattctggtacttgactttggcgagcccgagacggtcctggaggttgagcgacacctagagacagacggccattagcatgtttcgcgtaccttattccaagagtatctggatcaattgacatagtcggggtttgatgggaccattgcttggtgggtgacactgaaacggcggcgacggccataaaccaggaggggaggagactctgaggtagccaacaaagtgctcggaatccagagagtggagagagaccctgga

SEQ ID NO: 50 - DNA, 394 bp, Emericella nidulans
acccgttatccgacaccgttaacgcgaatacatagccaagatgtcttccaagagagggtgagtttttttgaatttattcggttgtgcttgtggttgcgctgggacacctacgccgtgaacggttcgattattcggcttgcgtcaatacatggagagagaaacgatccgaggatattgaaatggaacaagatctggaagctttgtgcgggatcagataaagacgatgcgaaaaatgatccactatggactcaggattcgaaatttgagattttgctaggaaagcgtcacgtcttaagaaaaagtagctgaccaaacttttttgaatagtcgtcggaagttccaatccgattcaatacaagctttacccgaacatcaagcatcgaacgtcggatat

SEQ ID NO: 51 - DNA, 404 bp, Emericella nidulans
  unsure (1)..(404): unsure at all n locations
atcaccaactccgcgcaacgggtctcccgagtcatggccagactcaggtttgtacgccaaaagcttccgggaatatcccaaggaacaatccgttgcatgacaggccaggcgaatggtgctaacctcgatcctactggaaacgaacagtgagccttgcgtcttcaatgcctgcccgataaacaaatcaatttctcctctttacttgaggccttcttgtctcgcgttgaagtcggcaatcgactgactgacgtaaaacaacggtcccaggggaccnctgaactgattcgtcccttctgttcagaagacgcgtggtctgaccgcgatcccccaggttgcggataacactgtcagtcatcgttagtaaacgatctagcgtggactgaaggtttaacaagctggattga

SEQ ID NO: 52 - DNA, 334 bp, Emericella nidulans
cagatttttgataactgcatctaaactcagagtaaccattcttccctcccccccgcctcaggggaactaatcgctagcatggaagccgcagctttcgcccaagcagcggcagcgctggccagcatgttcctggagattgtctccaccacgaaacaagtcattgagaccatgaaaggtgcacgcgctgctctcgtggaactgttcactcgtgccgagcgcatccgtctgaacctcgaactcttccagagagaactgcggccatctcgttcaacgagagttcataccggcagaccgcgaatgaagtccttgagcttgtgcataaagtggcggattc

SEQ ID NO: 53 - DNA, 400 bp, Emericella nidulans
cgtgacgtcgttgagaactgcacatcctgggcgtctttgggtgttgatgttggccgtattgcttttgtaactcatctcccggcagagacagcactagaaacattttctcttactttgttagattcaccggtctcgtacgactcgacaaatgtgacaatcaatcctggcaaccagattctggttcgctcggcgatcacagacgagcagcaagcctgtatacaggtcctatcatgtttctagcgaacagaattttgatgatcgcgcagagactgtcagtgtcggtgtcggggggcagatctccagactattggaattggattttgccataggacctagctttttgttgcaatcacatcggcgtttaacaatcctaaagcggagtggaagctatggggaggat

SEQ ID NO: 54 - DNA, 398 bp, Emericella nidulans
tgctgccagaggactgcaacaatcagaaccaaactcgctaacacgtcgaagctcagtacaaggtagaccacttccgtggcgggtaaaagcttgatttcgaattcgtcgccactgggtccacatcagtgtaccggccaggaaatgtactcagcgcggagaagctaaggaatatgaggacgatggccattatgctatttgtgcgagtcgcggtggatcagtcagtgtcttggccacctacttactgaggtcggtcggtcggtgggaagggtggacctacatgatcacggacagaataatctcgtctcggaagttgtctgcaatcgctaagatattcgctgcccgtggttcctgaagagtttgccgctgcacatagcccaaaatatccactcggatagtga

SEQ ID NO: 55 - DNA, 756 bp, Emericella nidulans
gagcggatttgccgattatcatcgcgatatcctttgtggttggcatatcccactgcgtgtactaaactagtaagtaaataacaaccccccgcaacaaccaactcccttcctgcaagcagtgccgcaaatcaaagctgcaatgcaaccatgtaagccctatctacaagcattggccaggcacaggcacattcttctagatagggagatccaatccatgtactgcaggtggcatgccttaatttagaacctggtttggggcttgtgatactagaataacagatgactttgactttctggtgtggtgccataatatccagtggcagtggctgcaggatttattgttagggtttgcttgacaaagatcataagtccctatgcagaagacttgttaaaccacgggttggggcgggttttcaagcctagctgatctgcccacgcggtttttggtgttatgggtcctttgcctatacaaggaccttagaccttagtgactcggccaaggcctgcgctgtcctgaaggcggtgagccacctacaagacttgctcacagcaacaatccttctttctcctgtcttcttagcaattccttcctgacctacggaacgtctagaaaggaagatccattaaatcgtcctttacatttggggtgggtacctgagaggaaccgccatagttagcaagggcagtatctactagttataaatccatttaaatctgttataacttctagtagaaattatctaaattgattcccat

SEQ ID NO: 56 - DNA, 396 bp, Emericella nidulans
atggagtaatcagacggagctcgctatcattagcgcctaatgtgagccacctttatttacgccctgttcaaacagctgcagctcaatattcatgttgatttatatattatccagatgaaaaccgggcaactgtggatattacataccagccattctgcagtacctactgcagcctgaaccccgccaggtcataattcctgtcgtatataatctatgcattgactatcgcctggacaatgacaaatctggttatactgaatcaagtgtgatgactttgaggattccaccttttggaatctgtacgctcaagggcagcggtagttgatatagtatagtgagaagtgtttcttatctgtgaactgccaagtgaggcaggtaccggttgcgatagtagtg

SEQ ID NO: 57 - DNA, 367 bp, Emericella nidulans
gtacaggcagccgttgtcgccgaagacaagggtttgataacagactcggtcctcctgtaccaccttgccgaagattatgatcgtgtcattgatatcataaacaggacactgtctgactccgtggcaactccccttggaagccccacactcaggctgcagcctctatggcctcgcactaacctgtcgcaggaatctggacaggagacgccaatagagccaggcaccagcctgagcttgactgtataatcggcctctacaaccagaatgctctatattaccagcgcatccgtcgatcaaatcgcgacgcatgtggtgttctgcttcgaatgatggagagaggatatgttgttcgcttttcacgtactct

SEQ ID NO: 58 - DNA, 535 bp, Emericella nidulans
agaaggcagctgatgatatcctgactgagctcgctgctgctagctcttgattcatattgatgagattacggagttgtatgaggtgtagatttgttaaaccaaccgacgaaacccgccaagaaatgggttgggttagaccttctaattatccattgggttttggatatttttggctgccccaaagcccggcggacaacctgccgggttgccaagatatctgaataggtatattactgtatttagattatattttcttacttagatggtttataatacagtatttaaatatagtattttattagctatgtagatcactgcttattaaagtaataatatacataactaggttattttgggttattttgggttgggttagaattatttgctaaatctatgggcggtttactgttcaggtaactgttaagggacgtatttagatggatcttcctatctagacgtgccgtacgtacaagaaggaatcgctaaagaagaaatgagaaagaaggattgttgttgcaaggaagtcttgtaggtg

SEQ ID NO: 59 - DNA, 12020 bp, Emericella nidulans
ctacctattaatgggaacatagctgtgtagggtccaaacctcacatgcaatagtgcgatgcggccacctggagggtttaaccttggccaatggttctcgaacacattcttaatcctattcaccgccagttcatgcaaacagtagcaaattaacatgcatgcgcctctgctgcagggaggttgtgcctcagagacaccattgggcctttccccgcaaccctgcgcggccctagacagagtaagcatgagctagctggttcgccactagggcatactctaatattggcctctgtctccgtcgggcaatacgcagtattcatctgttctttgtgctctaatcgctattgggcacctattctttcgggttcgcttgcttcgcccctatgaaccaggcacatcagctcagccagctttttcggtcgcgtaattaccgctgtcatcctccaatcatgaggctggtaagatccctccgaggagtcaataataaaatgattggaactgcagttttccttgtctcatgaagatcaaatatcggcggaaagcagaaagtactccgcaaacttttccagatgcttagcggtacagcgggttcatcccgctccatgcaagaagccagaatcgcttcagcctgcctgttagctatgcgtagactcattggtctacatatcagcacctcgttggccggtcgctttcgtcatttattttggcgcgaaagaggcacatttcttgttcccaactattataacttcaccgcgtcaatagattttggcaccttgagatcgagatataaggcatgcaattgcgtcaagaacagttatacctttctagttaacaagatgtctcatgtgagtcaatggttgtgccaaactctgtggagcgatatgggagatggtcattacggtcagtactcagggtctggactcaacctttctttgaccttcttttgcaacttctagccgacacaatgaaattagaccattcccctgtagacacctcgttatcgcggaaatagcaggagtcagctgaggctgggaatacagccatgccgatccacaccggtctagacttgttaaacccaacccgcgaaacccgccgcaacccgtcccgacccgccaagacttgggttgggttcgacgttctaattatccattgggttttggatatttttggctgccccaaagcccggcggagcaacctgctgggttgccaagatatctgaataggtatatgtcgactagaaaatatgactgtctaagactaatttggaagtcatgacgcctttttggcttagcggtatattttaccgatagtatattactgtatttagattatattttcttacttagatagttataatacagtatttaaatacagtattttattaactatgtagatcactgcttattaaagtaatgatatgcataactgggttattttgggttatttaggttgggttagaattatttgctaaacccatgggcggtttactgtgaaggtaacccaccccaaaacccgcgtgggcggatcggctaggcctgaaaacccgccccaacccgtggtttaacaagtctagatctcggagcagaagcacccagtcccaggagaatgaagatatgtctgaaccagctgatctagagaatatacaacgaccttgtcgagtacagaagaagaccaggatgccagaaggatttgaaattggaaccccatgagtgtataatagatcaaagaagcacaatactatttccaaaaaaaaggattttagtatgatactctatacaggcgagatactagaaaaataccaaaaagactgcataaaaaatcatctgaccagaaggtcacgaggcttagcctgtttgctatgtttacctaactattggttaaccgaaaccgcattgcggtcttaagcagaagaccgcaaccaaaccgcaaaattttgcggtcttggattaaagaccaaacccgcaccgcaaaaatttgcggtcttaatctaaagaccaaaaccatttggttttggatatggttgcggttaaccatggtctttgcggttagtgccgcagtctacacgctacattcaaggtctaacactaacatggctggtatatcaccgaaaacttctcctagctcctaatagaatacaagcagtgattgaagtcaacctggaggaatcaatggtcttattgacaactatgactcaagaaagcaatagctaagctactagcttgatacaaactaccagcaggatcccagctatgatggctcgctgcccgcgaaacaacacataattttcacacgacattgccaaaacagccacaacatgcctttagtgttcttacttgctcagagatcatagtttatgatctacaaacaagtctgttggattttttagaaaaaacggtaactgttccatagtctcttggtctgaggcacaggatttaatatctgcttgtagcctgagaatatcatcaggatttcgttgacgcaggaaatcaataagttccttaagtgtattttgggtttgttctgccttctttaacgcgaattttcggcgcctgtctcgccttgcgtcgaatatgcaattggcgtttatggctagacatcgatcgcatgggatggaaccggagcactattataattaacaagttccaagcaagataataatacagtagtgttgatacctttgtgcgtcttgtttggcaagaggtacaggctaaagattggcgtttctgcttgaaatcattcgagaggtgaggggcggcagtagtataagggattgcgggaagcaatggacgtaataagggcttttcagtcattgcgcatttctgttgagttgaaaggatgcgagtcaagcacttaagaaatctttcttcatttttaaaattgaaggctgcctttccttaaggggtgttaatgagagggggagaagatgggattcgacatgtcatatgcgcctttgggacatatttcggtagcgtttgattgggcggaactggaaaccgagagccgccagttgaacctccattcgccggggaatagccctacctggatggaggtcctgccgttcgacctggatgggatgatcggctttatgcatgcatttagaagttatacctggcacaattggaaagcaagcaatgactaaaatacagtcggtgatcacctgatgcacggtccctgtcggggcatactgccctacggcaccggtggttgcaggtgacctgaggtcaaaattttggtcgtgcgggacaaacctgattatataatggccttggcagtcatgtgatgtacaacctgtctttacaaagtatcgaccagaggagacctcttcttacaaacactcgtccacgacgaggggagaacagggccccctactgctctaataactgatctcttacgctttgctcatcgatcattccctccaccccatggaggtggatgactcccccccaggcggagcccgtccggggactccgctcctgggtgaaaactctgaacccccctcaggacctaccaccccgacccccctaccccggaactccctgaagagaagggccttattctccctacagaagactcccactgcagctccggtccctgtatcccatttgctgcaagccccattgatctgtgagcaggtcagcatggtagcagacaaccagctagtccttcttaatgattggaaactagcaatgacctctcttgctaaagctctagatctaactgtctcctctctacagggccgcccaagagacctggcccgggggcttgcagctagatttgtttccctagcaaaacaggactccccttagcagattcctctgatgacagcagctgcacccccacagccatccaggcagatagaacagccaaaccaacctcctactcctgaagcttgcgaaggccccctgaagaggcgaaccttgcagcctacaacctgggtatccctgacagccccaagagctggtcaggggaactggcaaactattaccctagaatactgtatgcaagccaagcaaccagcataatgaaaactgaagcagccaaacaagactgaccactacatcttcctccgcctcccggcctcctctagcctctgggctattagaccacatggcatccaggtcacctttgcagggaaagttctggacaggatcacataggtacaagtaatattaacaggatatgtaatcactacaactaaacaaggcaaggtcttcttactgtcagagaaggctgcaagcctagctggggatggtagacctgttaaaccacgggttggggcgggttttcaggcctagccgatccgcccacgcgggttttggggtgggtgtcaaggtgcaggctcaggaatatattcagaacaggataacggagtagatacgacaggcaggctacggagtcgggctatcagacaggtgcatagacaagacaagacgtagctcgaggttccgatttggatcagagtcggagctccagaaatctcagctaaccgggcggtcagcagcggcagaatcagggctcaggatgaggctcgggctggccccgtgacagtactcccctccttcagggccgagctccgtcgaggcttggccggggcttatgcggatatcggcggtggaagttctgtacgagctgtttggcgtgggtcaagtactcggcaggctcctctgtaggatcgtcatatccaacccatttaacagtatacttcagacgagggcctcctcggcctcgccgctcccagcgcgaatctaagatgctctcaacctcccaatgttcaagaccttccacttcgatgggtggtgggggatcagctctttgacggggcacaggattgtcggcggctgggcgaagtaggctcacattgaataccgggtgtatccgcatactggctggtaggtcgagctcgtaagcgtgtgcattgatcatcctttttatagtaaacggtcccaggaacttccaatcaagcttcttgcttgggcggagcgtacggatgttgcgggcatccaaccacacacgctgaccggccttatattgtcgggcaggttgacgggtcttgtttgattgttcttcataacgggcttgagcggaggtcatctgggatcggacatagtcagatatagcttgcatcttctgggcgaagttctcagcatcttggctagctggacagtcaggaacagggacaggttcgaagcccatacgtgggtgaaacctgtagttggcaaagaacagggatgttctgatagcttcggaataggtagcattgagagcaaactcggctagtggtaaccaggtagaccagttatcttgcaggtaggtaatataagcttgcaggtattgttccagcattgcatttacccattcagtttgaccattagtctctgggtgaaaggcggttgataataggctctggatatccaggtgtttatttaggtgtttccagaactcagcgacaaactggggcccacggtcagaagtgattgtccgggggaggccatgaagtctccacacatgttgtgtatagaggtgagcaactccttcagcatttattgtggcttgacaggcaattaggtgcctcattttggttagacggtccacaacaaccaggatggaatcaaagccttggctggtaggcagatgggtaataaagtccatggagatatcttgccaggcatgttcagggacaggcaggggccgcaatatcccttgccgcgccttataagagggtgtgattctctgacaggtatgacagttttttatccattgactcacatattaatacatgttcggccaataatattctcgggctaggagtttgtatgtgcatgctctcccaggatgtccagatgttggtttatcatgggctaagcaggttagttttgcctttaaatcattattgtctgggatatacaggcgattccggtagaacaggaggctcccttttctctcgcagtcagctagggtaatatctgggtgttgagcctgtctggtagctagtgcttttaagattgaccgtacaacagggtcagtctcatatgctatgcatattaggtcctgaatttcaggtggcagctgtagttctacctcatctctaaaggatactgattgtcttgttcccataggttctgcatgcttagcaggttctgcatgctcagcaggttcagcaggttcagcaggttcagcaggttcagcaggttcagcaggttcagcaggttcagcaggttcagcaggttcagcaggttcagcaggttcaggtaggcatgcagggtcaacattttcatgcttcagtacagtttggctttggtgcagtaggtgttcatccccctctttagggaggtcctctgacctcctggtcagagtgtcaggtttggctccttgcttcccaggacggtacacaatccggaaattaaaacaggataagaactcagaccagcgggcttgttgacggttcaacagcttggtggacatgaaatactccaggttccggtggtcagtaatgactttaatggggttcggggtcccttctagctcggggcgctattcctcaaagcagcggataattgctagaagttccttgtcatagatttcatagttgcattctgtggcagagtgcttcttagagaagaaggccacagggtgtaagacgccattatcatcatactgggacaggacaccagcagagacaaagtcagaagcatcagtttcaagaatgatatcttgggtccagtcgaatggcttcaaaacaggggcgctggtaaaggccttcttcagggcgtccatggccagctggcaggttggggtccattgaaactcgacatccttcttagtcaggttaactagcggggcaatgatctttgagaaatccttaatgaatctccggtagaagttggcgaacctaataaatgcctgtatatctgtaatgcaggttggcgtggcccaggctgcaatggtttgaaccttctcagggtctatcttgattctatctctagccactatcaggcccaggaacttggtctcatgaacagtaaattcatacttcactagctttgcaaacaagccagcttctctaagcttttggaggacttttcggacatgctgaatatgttcagacctggtttgactgtagatcaggatgttgtcaaggtaagcagtacagaagatgtccagatagtctcgcagggtgtcatttatatagtgctggaatgttgctggagcgccggtaaggccaaagggcataactaaggattcatacagccccaggcaggtgcggaacgcggtcagatattcctgtcccttcttgatccgtatgttattaaatgcggaaataatgtcaatcttagtaaagtacctcatcccttttagattattcagggtctccttgacaagtggcagagggtattggtccttaaccaaaatcacgttcagagcttggtagtccacgcagaagcatagacctccgccgggttttttaacaaataggacaggtgaggctgttggcgacgagcttgggcgaataaagcctttcctcagattctccataatccactcctgtagtgcaactagttcatcccgggacattccatataatgggccaaatggtggggtctttccatctattagagttattaaatagtcatatggctgatgtgggggcagcttatcagcttccttaggggagaagatatctgcatagtctttgtattctggtagtagtaggtcttcagggttaccatcccctgacctcttagccaatacctcgtcaatattcccaatagtggctgtaaacagggcatggacctacgggcgtaagctgagcaggcgcggagggagactagggcaatatcttgtttctccaatcctttgggacaggaagtcaggttcttctggcagcttcgggcaggcacgtcacgcagggccttgatcttggctggttgggcaggtatattgcaattctgtcgacaataggcactgtcaaatattaaggtgtgctctgcaaacccccagcgggggtcatgagtctctaaccatggcattccaaggattattgggtaatgggctagttgtgtagccaagaaacaagccttcttttcatgatggtcatggattgtcaggtttattctaacatagtgggttatcggccctccttcggattctctcccgtcaaagctttccaagtggattgggtttttcaggggcagcagctcaaggtggttgtcttctgcccattcttggtcaataaacctcttcccgtcagctccagtatctagcattgcgtagctggacaggctcttctcttgctgggtcaggataacaggcaggacagtcaggtcggcgcgggcagtttcttcttcaacagacattcctttaatagcacttgcagagaggtgaacaacgcgcttgggtagtggcgcctggtcgcgacttaggccaggcttacccctttttccgagaatccaggtgatggagagcgggagccttcggagacagcggtagactcagatttaattgatggggttatgttggatgctgggtaggcagagcggatgctaagagggcggttatcagggtgtgggcagttcctgaccatatgttctggggatccacagtggaagcattctccctgctcgcgacgtgtagggttatgttggcggatagatgacagatccatggcatcattatgtacatcaggctgtgtgcgttgtggggctgggttctctatagtcctaggcagggtagtgtagtttgttcttgacagctgactagtagcagttctagtaattgcagggtagtttctgctggctgattgcaggttgatttcataatgccggcggcggttctcaagttcctgtaagaacttagcaaattcatggtaatcttgggtaggtggttgattatgcataagcatccctttaagctctcgatttattgattgttccagaagtatagatagggtctcctcaggcatctctccctctagggcaagacgttggaattcggcgaagaacaggccaaactctttattattctgccggaagcggaacagctcgttgcgggcattgttaacacggtttgggtctccaaaggcccgatctagtatatccaggatgtcctcgtagtccttcagctggcagattcctttcttgacatagggcaagatttgggcataccgggcttcctttaaacgattgttgacatatgtcatcctactctgtggggtcgggaaacagtcacggtttatattcatcttctcatggatctgggagataaagcggcggaggtccttccggtctccctcaaaccaatccgggtcaggcaggcgctcggagagctggtgaaacacctgagtttgtgtgggtgagccaggtttgggttgtccatctgatataccagttataggcattgctggctggggttcctggggtttctctttggctagtttcaagaactcaatgtctttttccttggcttgctccttctggtactgtataactgcatcccggcgggatatcacgtcgcgcagacgggcgcacttgtcatggaggtgctcgttctcttgttgtagagcctggatctggagggcttccttgcccgtctcccacgaaagaagggtcgtctcggccgcggcgatatattgatctgcttggctgcagtattcgaaccattcagcagaatgactggttacatgctgcacgaattcagtggggtccttcggtaggaacgggggtcggggcgcagtggcgggcatggtacaacacgtatcaactccgtggggtgggagctacgtagtgtcaaggtgcaggctcaggaatatattcagaacatgataacggagtagatacgacaggcaggctacggagtcgggctatcagacaggtgcatagacaagacaagacgtagctcgaggttccgatttggatcagagtcggagctccagaaacctcagctaaccgggcggtcagcagcggcagaatcagggctcaggatgaggctcgggctggccccgtgacagtgggttaccttcacagtaaaccgcccatgggtttagcaaataattctaacccaacctaaataacccaaaataacccagttatgcatatcattactttaataagcagtgatctacatagttaataaaatactgtatttaaatactgtattataactatctaagtaagcaaatataatctaaatacagtaatatacctattcagatatcttggcaacccagcgggttgctccgccgggctttggggcagccaaaaatatccaaaacccaatggataattagaaggtctaacccaacccgtttcttggcgggtcggggcgggttggggcgggtttcgtgggttgggtttaacaagtctagctatatgccatgtcttgagatcagagttcttctggcaaccaataaacttagcctatgcatccagttagcaagtgtattgcatatacaaaacctatactaagaacataccctattgcaagtaaatatagctggaaccttatatgggcatgtaaaatgtctattataattacaaggtgcaatagctggctcgtcttttattatacaccgccagttatggagaaatccaagataaaactgttctgttttcttcttcaaaatattaataggtccaagattgcgatatgcgttccttcaacaacgccatagaaatttaaagaactgagggtcaacctgattaaaatcattatatggaataccagattgaccagaaataaagagttgttgattaatttaaggataatatttaatacctgagcaggtgtaggatcgatgccataccctacctgaggtcttgtcaccattaattcaagataaaagttttattaaatatagccgggctgctcctttgtgagatttgctgaaatagatctattaagcatatgttaggcatgtgctggacactagagaagaacatactcaagatatttctttagtaaagatcgcatttatgctctctgaatctatattaggaccgatagggttcgagcagtagataaaataaagtattcccgggtcctcaagactaccagagtcctttgtagctggatatgaaggcataatcaaatactcttgaatctcatctacagtgatttttgccttattattagctgatattatcagcccgtatgccttgatttccttatatgtaagacccataagtagagggatgtctggaagttcagagtcggaggtttgactgcgctcagaagctggagatttggtatcagagacatcagagtctgcatcagagggtgtaggttctgtatcctgtaaaaagtttagtatatgcaacatatatactaaacagtagctgaacagtagctgaacagtaggtaaactttaccttgataataggtaagtcattaaccaggcgaataatccggtcttggggctcggagtctgtcatcttggacagtatagttactagacactggactgaatattgggtacgagaggatacaactggtgggtaaccaatcaaataaaagcatggcgccttatacctgggcgaggtgaacgtggttcagaaatcaggtttactgcagatgccagcgtggttcagaaactggctgaatttgatggcagaatcctgacccacgccgacctgtgaacccaaataataaaaccaaaccaaaccaaaccaaacatcatgccatacagatcacgtggcacgtgacatgaggctcatgtggaagcatgaaggagtctggtattcaggggtgcggatgcacaaggaagctaggctaaatactaatgagatgctgactaagactgtgcagaccgggcaccccaaggacagggaggaacccatgctccgacaccccccctcgggctgcgcaggcgcaaggaagcatcaaaagaaaagctaggtacatgctgaatatcccatatagtttgtaaaggccttaatatagtctcaaaggatctatatcccttttcccatgtccaatgtaatataatatcccttgtgtccttcctacaggtatctcggacgaaaggtc

SEQ ID NO: 60 - DNA, 5371 bp, Emericella nidulans
aaaagatgcagcggaaacttatgcattgctgtacgctgagcattgcttgtacctagacctgccggttcatgccaacccccagccggtgctgccgtccagttcttcgaccctgggctactgcgaggcaatctggatgggacagccaggaatgaccgctatccattgcacctgatccatgagacactgaaccaaattggacaagccagatggtttactaagctggatgtgtctgctgccttccataagatccgcatagccaaaggacaggaatggatgactgccttccgtacgagatacgggctctttgaatggctagtcaccccttttgggttggctaatgcaccgagcaccttccaaaaatacatcaactggaccctccgggaatatctagatgaattctgctcagcctatatcgacgatgtgcttgtctataccaatggggacctccgccagcaccggaagcacgtacgaatggtcttgaagaaactggaagaagcaggcctatatttggatattaagaagtgcgaatttgagtgcaaggagacaaagtacttgggctttataatacaggcagggaagggaatcaaaatggacccggagaaggtgaaagcaataaaggaatgggaaacccctactactataaagggcgtccgaggattcctgggctttgccaacttctaccgaaggttcatccctaacttctcagggatcgtacgcccactgaacaacttgacaaagaaagggacacccttcttgtggactaaggagtgccaggatagctttgatctgcttaaggaaaagtttattactggacctgtcctagcaaccttcaacccttcctaccgtacggtagtagagaccgactcctcaggttataatacaggaggagttctctctcaatataatgaaaaaggggaattgcacccatgtgcctacttctctaaaaggaattctccagctgaatgcaactatgagatctatgacaaggagctactcgcaattgtacgatgtcttgaagcctgggatgctgaactgcgctcatgtggagaattccaagttattacagaccacaaaaacctggagtacttcttctccccaaggaagctgacagaacgacacgtacgatggtccttatttctcagccggttcaacttcaagctagtatataggaaagggtcagccaatcagagagctgatgcactttcacggagagaccaagacatgcctgatgatgaagatgacagggtcaagtctcgtacgatgcaactttttacagaaaaacacttggggaagacggtagttgccaccctccgaccggctgaagagcaaccatgggagccgtacgaaaaaagtgatatgtggaaggaggcactcaaacaggatgaaagatatagtgaagcagtactgtgcctgaaagatggagcaaggagatttcctccacacctacaattgaaagtcggaatctcagaatgccagctggacgcccaagaccatatcctcttccgtgggaggaggtgggtgcctgatagtgaacagctccgtacgagtataattcaggctgcacatgactctatattgacaggacatcctggccgagagcaaacatatttgctggttagccgtgaatacttctggcctaacatgtcccgggatatcagaagattcgtccggaactgtgatatatgtgggaggaccaagtcttggagagaccagagaagggggctattaaagcccctccctgtgcctgatcgtccctggcaggaggtttcaatggatttcattacagacctaccagagagcgaaggttgtacaaacatcatggttatcacagaccgattaaccaaaggtgtgatactagaaggaatgtcagaaactgactctgagagtgtggcctgggcactcgtacgagtacttataagcaaacacgggatcccgaaggctatcacctcggacaggggaagccagtttacaagtgatacatgggcccgcatatgtaccctgacagggatcaaccgccggctatctacagcctatcatcctcagactgatggatcaacagagagaatgaacagcacagtggaaacctacctccgcatgtatacctgctatgaccagaaggactggaacaggctacttccacttgcagagctggcaattaatggccgtacatcaacagcaacaggggtcagccccttctatctaagccatggctacaacctcagcccatttacccctaccgaggaggtagagcatctagctgaagaaccaaccaagagtcctatccagaaaggggaagccatcgtacggaaagttaaggaagccctagactgggctcaagcctccatggcctattcccaacagaatacagagaatcaggctaataaacacaggagcccggccacaaactaccaagtgggagataaggtctggctaagtctgaagaacatccgtacggaccgacccagtaagaaacttgactggaagaacgccaagtatgaggttataggcctggtgggcagtcatgctgtacggctgaatacgcccccagggatccatccagtcttccatgtggacctgcttcggctggcttcatcagatccacttccttcccagaagaatgatgatagccagccccctagcatcatggtgaacggtgaggaagaatacatggtagagaaaatcctggacgaacgtcgcaggagatacgggagaggtcaccggctggaatacctagtgaaatggtcaggctatgctcagccaacctgggaagctgccacagctttggaggaagtacaagctctggatgagtggctggatcgtacgaaacaatatagacttcaggacggctcactaaacagagatgcatatataaaggctaaagcaacatgacctaccctgtgacctgtacttcctacatagagggaggggggggtactgttatgggtcctttgcctatacaaggaccttagaccttagtgactcggccaaggcctgcgctgtcctgaaggcggtgagccacctacaagacttccttgcaacaacaatccttctttctcatttcttctttagcgattccttcttgtacgtacggcacgtctagataggaagatccatctaaatacgtcccttaacagaccctaaccctgactatgaccttgcctgcctattgcctgccaactactgcctttgctatgtactctgctggctctgcctgctgtaccctggcctggttcttgttgcctacctctgctctgctgctgacctggccttgcctgcctctaatctgcctctgctcctgctgccctgcctctgtgctggctgccctgcctgcctattagtagacttgctatatactctgctgccctctgtatctagctggccctggtactgataattattggctgtgctcctactatgctgtactgatctgccttgctctaattggctataacctgccatgatcttacatattgttggattagtactctgactgcaataatctaacccctgactattacataactggctttgactactagctaaactgctctatatctggcctgtatctagcctatatctggccatatctgcctatatctggcctatctacctatatctggcctatctgcctatatctggcctatctgcctgtatctggcctatatctgcctgtatctggcttatatgctctgccttggatatactctgcctgtctgctactagctgtgctgccagctttgtatctgcctgttattattgggcttgcctgctactctgtatatatatcctgctggcttggctaatatccctaataatcttaccctaatcatgctattattctgctacttctcctaatcaggtccaatcactataatatattaataccttgatataatctctctgctagttctgtattagttggtataaccttctgctaagcttttatatatatatatccatctctacagtatgctggaatatgttggctggctattctgaaataaccataccctgaccatgaaatatatctatgggctctgcctctgctgtgttggcttggggcttgtgctggcttggggcttgcgctggcttgccctgggctactgacccatcttgggctctgcccctgactgctatgatgcttatatgctttggctgcctctggtgcgcttgctgtgcttagcttggcctggcttgggcactaactcagtccagctggctgatctatacccaaactatgtcctatctgctggcaactggcaacaactataccctgaccctgaaaaataccctgtactaatctgctataatagctggtaatataaatatataatactaactactttgctaatcctggataatctgctgtagattgaccctatactagatattctatatagccaactcctggctggcctgtataaatctgctagtttagttatatataaatatactaaatttgctgttcctgccacccgacaaattattccttgggttagctgatatattaataataggggactaacttggtcctggcttgctttgtattagcctggcttggcgctctgctggctattatacaactatcaaaatcctgaccatgaaatcatgggctgtactaatcttgccaacttatactgttatatatatttatactttatactaactactggtaaatactggataatcagctttggattaatcctgtacttgctactttatatatctggcctgacttactgctgccctgtatatactgatataatatatatattaggcttgcatgcgctcggactggctctggtggtaatattaacaatcccttgttatcaactacttggcaaatacttgataactgcctgactgatactggctctggcgggctctggtaataactgcaataatccaaaccctggccatggcattactgacctggctgcagatatctggcctgattagcactggcccttacttgtgctggtatgcctggctggctctgactgggcctgggctgcttctgtatctggcagctcttgctccctgctaggcctgaccctctgggcttgtctggctctgctggtgataattatcctgctcaggatctgacaatcaatataattaaaccctaatcctgtgtcatggggatagctagtaactagtaaataatatatatagatcaggaaatatattgggttggttgggctgggtgacagaattatatatctgcaatggtataacacgtgggaaatatataatatgatgggaaggatgattggactcagatctgggcgctggtcctgcccctattctgttctaataccagcttctccctgatactgtgctggtattctatatgccatagtatttccct

SEQ ID NO: 61 - DNA, 9351 bp, Emericella nidulans
cggtgtttcaggcagctcttggagtaaacgtaccatgtcccgctcgacaatcgttttcttaaatgggatattctccacggccaggactgtggaagcatcgctgatttctagcatttgcgaaagtgagttgtagtcccaccccttgcttgaaagtcagcccatgatatctctttgacctctcgaataagcaagggctgttcagcacgtttgacgtgcaacacggccgtgtaccgataacagcttagttcgttcgttgccttcattcgcttaggccagatctcgacgtgctcgatcatgcccggcaattctgctggcaacgaggtgaagaaggctgggtcaacaaggagttccttctccaaacgggcaatctcggccatatgttggcggaatctggtaatggttaaaccgcggccatatagccgaaggaccttgctgacttgaaactcctggtacagcgcatatgagcggatgtcgcccaagaagatgctttttacgccctggcgtacaaggtctttgatcgtgttacgcagatagtcaagcgaggggaaatactgggctactgagttgataacagcgaggtcaagggtccccatatcctgcagtcgtccaatatctgatgcagtgccgcattttatattaactttcccggcagcctctggaacccaatggactgcccttctaacgaaatccacagcccggggggagggctccaggccaacgtacttctggatgctgccgatgatattgaagaggatcattccggagcccgttccgatctcaagaacactggacgggctgcagctgagtatcgctgtaatggtgtcttgtagccattcgcgcatgtcgttcttgtcaattggctccccatcgtacatgggagatccagcctagaaaatcagcccctaatgaatgtggctcaatggtaccaacactaccatagtaatcctcgccttcaacgacgtctagccaagaatcgacgtgttcagtctcagcacggtcgttgaatccggacgccatgtctgacactgtaacaaagctgacaagttcttggtcctgccgcgcaacagtcactgccgcgctgataaacggactcaacagaagagtgttgtcaatctcagccagttcaacgcgatagccccggaccttaacctgctgatccatcctgccaaagaactctagttgggcgtcgcgggggcgatatcgaaccatgtccccagtccggtacgcacgcattggggctacttcttcgctgatgtccagttctataaagcgccctatatcgtgcttcggatcaatatatcctctggctagtgcgggccccgtgacgaccagctcgcccagaaccccaaggggcagcagtcggagactacgatccacgacataagcgccaatgttggaaatcgaccggccgatagggacaccgttcacaccttcctcatccactgggactcggtatttggtgctaacaatggaattctcagtcggtccgtagcaattgaaaatttggactcttccggtggtgagccgctgaactttggctacgtcaccggggtcgagcttgtcgccgccaacatagagaatatccaacatgcgcagaagactgttacaggaggccagggtctgttttaggattgcaggagtcatgaaggcacgtctgattccgtgctgtataaatgtagcgcccagtgctggaaagtcaaaaaccacgctgttgtcaatacacactaatgtcccaccatttaagagagtagcatatatttcaaagcccgatgcatcaaatgacggatttagcatgtgcgatgcgatcctagagttgaccgcgtgggcaataatatctggctccttggctaggttagccacgccatggtgctcgatcatgacaccctttggcgttccagtcgtgcctgatgtgaacacgatatatgcgaggctcattggtccaggaggagtacatgttttcaaaaagtcgtggacatccgtgacggtttctttacatgaatctgcgatatacgcgaattggacgccctggacgcgggctctggggggttcaagtccggatgctactaggacaaggcggcaattgggcagacatgaaagaatcatctccgtacgagcctttggagcatcaatgtctagccggatatacgcgaggcctgccctcagtatacccaggatggcaacaatgctctcacagcttcggctggcgtacacaccaacgggagtttcctcggcgaaggaatagctgttctttagccaggccgagagcatggaggatctcttatgcagttctgaataggttagatgcccgtttatatctttgacagctacttcgtccgtctgagcgcggacctgctcgtcgaacaagtcgataatactcaacgaccgggactgctgaggatagatcaacccccgttcattcaatattgaatatccacctggaaatggcagtgagtcaatgctcgtatccggtttacgaatcccctcgcgaagaatatcgtaaaacaccaagaccattgcattgatggtttcagcatggaacaggtccatcgaatagaggacctcgccctgaagatctcctcccccttcgcctggatacaagtgaaactcgagatcgagccttgacacatggggcaggggaagttgttcactttccaagccctccagacgaagtttcccgaactgtgcctgcgtgtgtaggataaaggcaacctggactaagggatggcgagagacatcgcggtccttcaataatttggaaacaatttgatcaaacgggacatcttggttctcgaatgctgcagtgatggatgattgcacctgatgcacaagcagttggaatgatgaactgcagctttccaccttggtacgaatacattggacattgccaaaatacccaatcagttcctccagctctgcctggggacgagacacagatggaatcccgattgttgcatcactggcgccggtcaatcgataatgtgtcgctctgaacgcagcgaacaggacggtaaatggtgttacatgcttcattgaacaaaagcgcttcacatcatggtacaaacaaacgtctatcttcactggctgggatcctgccttacccgacagcatatgcggccttttcttatcacataggaactcagccggctggctaccatccaggtgcctcacccagtaggctagttgctccacactggttcgtgccttgttttgccgctgccatatcgagaagtcccggtattggatcggcagaggttcaaccccctctattggtgaatggccttggagagcagcagcataatatatctgcaatgtcttcagaaagatatcgaaggaccagccatcacatatgatatggtgtaggacaatattgaggacgtgttcgtcgggtgagagacggaatagcgtagcacgccagcactctttggtgagatccatgggccgtatttgctgcccgtgcagtgccgttatgaggtcagcatctgacccagatggtatttcaattatctccaattggtatggatgaaaaggcgcgaccacttgcaccccagacccctcccgatcctcaaatgttgtccgcaatgtttcgtgacgttctacaagggctgagaaagccgtttctaatgcatcaacccggagcgatccccgcagacgtgttgcagatggtaggagaagccacgtagagctggggcgtagggtttgcaggaaccatatacgcgcctgtgagaacgattgctcaacagtcccggagtcagaaatcctgtgtatagccctcggtaccaacttcaagtctccgggtgtgcttttctgcgcggagggttcaaggcctgctgggtaatgcactagtgaagcgacgtccaaaagcgattgcgctcgcagaattgccgcaacggttattttataccctttccttctaagtttattgaccaggagcatcgcggttaccgaatcaccacctagacttatgaagttctgccgcattcccagtgagagcggatcgagacgcaacatgtctgcaacgagttcatgtactagctgttcgatattggtccgtgggcctaccaatgaagggagtgaggcttgggtgtatctctccaactcatggcgtgtagatgactgtacaagatgccgcagagctttccggtcgacctttcgagagatcgtcttggggatgaactccaaaggaacgtaaacactggggcgcatatagtcaggcaaacttcgtttcatagtctccttgatcgtgcaaaccagacctgataaatcctcaggacacaaaaaggctacgaggataggaatcccactggaattcttcggggcagctgcctcgacaaccacctcttcaaccccagggaatgcccgtcgtatctgatactccacctctgtgagttcaacccgcatcccccgaatcttgacctgactgtctttccgagaaacatagcggaggcttccgtctgctgcgtactgtactaagtcaccggtcctatagaacctgccaccggtcgacgtcttcggaaacgctctggccgtctgctcagggtcccccaagtatccatctgccattgcgggcccttcaatgagtagttcagccactgcaccaacaggagccagtctgttgtaatttgctggatctacgaggcgtaggcgcgctgtatgtgaacggccaattacgcgcaggtccgtctctgaggtaatccgttgcgacacacagcatataccagcccactcagtcagtccaaaggcctggattacctctgtcttatctgccagggagtgaagtcggtccatggtcaaagcttctccagcgactaccagtgtattcagacatactaccgcgtcagcgatagatattgtcgttgatggggtaaggattgcccaggtcacttgcatggacagcagaatgctgcttaaagcgttaagtcggtcatcctcagaaggcacacatatggtagccccagcagcaagtgtacaatatatttcaatcaaggacatgccgtacgtgtatgaggcgaactgcaaaactcggctgtccgggccgattttgagcgccgtagtttgattgacaacgtcgctgagagctccatatccaaccacacatcccttcggccggccggtactaccagacgtgaaaagaacgtacgctggaccattgttgaccacggggctgatatcagcggcatcatgatgggcatttgccttgggaagagattctgttctctcatcagagattacaagcacagtctcaaccaggccgtgcagtctattggcaagatgcggcgatgagagagaaatatgtgactcagtagtaagtctcacaatattctcaagcctgaacaacgcctgccctggatctaacgccccccaggcgccaccggctttcaatatagcgagctgtccaatcaccgcccatttggagtgatccatcatgatgggaaccagacatcccgctttgactccttggctttgcaggtagatagcccattttgttgaagtaacgtccagctccgagtaggatactgtcccgtcccaggcatggatcgccgtgtggctgggacggtaccttgaatgccctcgtatcacctcgagcaaagaggcatctggagcttcctgaatttctgcgttccaacgagaaactgtgatttcattgaaaggactgaagatatcgatgtccttaacgcatgcgtcgggctgtgccaaaagttgcttcattgcttgcgtgatattcgacgccaagttttcagcgtgtaaaggggtgaaagtgcaagctcggtagaccaggtatagcttcgccggtagattcgtaaagttagtgtacgaaacagccataatcacgctatatttggactgttcgaaggttaatactcggcctcctgctgttcggttcctcacctttataaagcatgagagttccaatggatcagtcacctcggaaagcagcactacggctgtattgtgatgtgcttcttgaaacttgccgattttcagaaatttgaagtcctctagtactcctgatactagacgctcaggggttagagttgagtgtaggactttgaatgcgcatttgtcgatctctgctgttcttgcacggcaatctacacacccaatacacacagagttggtccctataaaggcacggagaacgaaagcccacgccgtcaggtagaaagagtagtctgggacattacatttttggcaggattgttgaagcgcaaaagtaaggaaaggcacaacctggtgcacagttactcggtcgtcttttatccccccatcaccgagatacgggaagattccatgacattcagccactggttccatttccgtggaaaagtgatttggctcaagaacgacagatctttcgtatgagagttcgctaaataggtggaaacacggaggtgtagatggacgaaatccgacttcagcacaccattcgataaatacgacaggaggttgagttgcacgggaagcatttaaccaggtgatatatcagagtgatcatttgtcttagtaaaaatctcccgggtggtgtgcttcggttatgggtagctctatggcctacattttcctgccaagatacataggttgtctgcagcaccggcctatgcattgcgtactacgtggcgctcgggcgaaaagagaaacgacgaatgaacacatggagggcaacagtcattgtctgggaaccgatacaacacagtgttctgccttctgtggtagcgatgccttatagcagtaatttgcaatggggtccaggtggtttcccttgtcaaactgataatcacgattctaggtcctctagtaggcttgctacaggcgtaaaaatagaggcgtaagcattattgtccctgtattaggaggaagatctctaaagaatcatatcgtctccctacatagaggttcagcctcatcatcgtggagcggctgctccgcctttaggttcattgtcttctcaattgagtttccacgaatagtcaacagcccaatatcgcgaggtgccgctgatcgctgacttgcccagccaaggagtctctgagcgagtggcgtcaaactctctatcacgggacgcggtacggccaagttgctctcgagcggagtgagctggctgatacccattgtgatggtaagaaggcgacgagtctcagtgcccgtggtctcagcacccccacagtggatggtactgtcagtaatgagcagtgcatctccaggattcatcagtgcgcgaaccgtcgcgtccattgacacattcgataagttctgccacttgtgacttcccagaattacatgggtggcgccattctccgctgtgaaggggctcagagccacgagaaaattgattgaagtggcaggcgcatcaggcttgaggtactcgactatagggtgactgaagcgcatgtcgcgatggagaggttgggcgggattactcggcgccagttccatcacggcgcccatcagaacccaataatcgccatatacatggaatgcgtcactgcagattcggtgcaggactttactgttcaacacatcctccctgtatgcttttgagattggagcgaggacgttcacaagccgggttgtagtcgataggacatggttaggatggtctttggttttggcggctggaatcggttcgattttcacgaaagggtctacctcttcgtttaggcgccgcacgatgtccaaagacaggaatgattcgatgattgcagctccatgttcctcgacagttggccagattttgtggaggtcgttgatggcagagaggcgggggatctgggatttgacatggtctttggacgtcattgttgcctgagaagatgggcagatactacaaagagaatagggcaaaagagataatcgactcgttggtctgtaattgaaggatagtagatgaccataccttcttgaggagacagatttaaaatccaacctaacgccgtttacctctgcgggaaatcgcaacagtgcccttgcattccacaaacctataaaggtaaggttagtgacaattgagtcctggtctatgcatgtatcaagcgagccactacacctacaaagcaaacatgtgtcagatgcttggactgccacagttttcacaattcacatggtgacaatctggttcacccaacctgagcctggtaataccacgcttgattagttgagcacattagtacctacatcttaattgcttacttgcttttaagacatcaatggtgcaagtcaatacaagaaaagaaaagaatatcactgcactgtctgccaatcaaggtactgggagttagttctaccgccatgacacagattcctgaataccgaaatatacctggacaccaagacagtttaatctctgggctacacagtagtctcaggttatttccttcgtcgcgtctaccaggagacacgagtcaataaagtgtgcagcgctgtcaacaactaacctgctaatctgccatctggcccagtaggattattgcgcacagagtgctaatgcattgaatatgttaccattcatttattgtaaactgtctaacacagcacctccagaaaacgtgttacaagctactggcagttctatcatgatagtacaacggattcatgacatacttacttgggctactgtggagctagacctcgacacaacccccgggttacccatcacagggttacccagatcccgtgacaggtcgggttccggttcactatctgaactcgtaaaggcttttgggtaacccatgggtaggcaaacagtacaaacatgctgtatgaacctaatatttaggtgactcagtatttttatacagaaaaacttgtagcctattgggagatttttatgcaaaagaaaatccgcgcgggttcacgggttttgggtacgggtcctgaccttcgacccaacccacgggttttgtcatgttctgtgtagcccaaatgattttcctggttacacctaccaataagcactggctaataaagtgtgcaacactataaacaaccaacctgttattcgccaactgggccagtaagactgtcacatgtagggtgctaatgcgataaatatataagtgggccatgtgggaccttcttagccggtgtatatcccttaatgccatgcagagtatctatatagtgtgatttagtctgaactggttaaagttacattgggcgggaatatgcataactgcctatttaggattcgagtacacaacagtgttaaatccaaataagcttgcagaactacggtgggatcgctacgaggttcttgattaccacagcattcccgattagcgcaccagtataagcaacccaattactagaccccaaaacaagctgcgatacgagtctaggagctcataatgactggca

SEQ ID NO: 62 - DNA, 12378 bp, Emericella nidulans
gggcaaacccccctggcttcaacgcacgcaaaggttgttgttggccataaacggaacatgctctcaggcatcatggtcaaagtcaggttcgtggcaaacataggcaacgggtcgggggttcactaagtggccgctgatgaagttgttaagggcggaccagtcatgttgagatggccagcaccgctcaaatgaccgacatcgacattggatccgttgagaggggctccagatgtacaggaagatgacaacgatggccgccgacaagcgaaatagagccatttcaatacggttcctgcccttggttgctagaaatagacccaaacaatttttacagagccagctgccgagtgcagggcaggtctttgttccgaggccgttagtaatgcatcccatctattgagggataaatggccaccaggaaggtattggaaactcctttctcctaggcctcgaccgtatgacccgcgctaatctacctcgtactaaccgtaacctatgtgccgtatctgtctctttattttttttcctgaaatggaatcacggggaatagctactagcagcctgctgcttcaccaaagtctaggccctgagaatgatcccagactattcagcaccttcacggcaaattgagtgattgatttgccacgcagcagcacgtaattgggtgtagaacaggctgctggccgagaccttattggtagaacggaatccgtgcttacaaggtttctcaggctaatctctctaccaggccgatgggctcatgattgttagggacactacagcgcttgcccgctacctagatgcgggagtcacttccgaaattgctggggtatctcaaaaacagacctctaacaagcacgatgagactaccatgagcagttgaaaggacgcatctctaatactcaatgctatagaacgcagcccataagtaatgcaagcgagacctaacttagagctggaagaacctcgcgaaaccccccattagcgctcatacacgccccattcacccatcttgcctcctcccccgcaaggaacccaacaatgaacgcaatatcttggggcatgccaactctctgtgccgcagtgaacgccttcgccagctcctccataaaaccctcagggtacaacttcccaacgacatgaaacccatctgtaacagtcggaccaacacaaaccgtattaaatgtggccgccttgtccgtagcgaattcggcagctagagagcgagtaaagctatccaacgcggctttacttgcgccgtaagtcataacaggacctgggttcgccaacttagctgccgcgctggaaatattgataacgcgcccaccggagacaggcagatggggcattgtggcgctaattatagaaattggcgcgaaagcgttcgcctgcatcaccttctggaagacggggagcgttagttcttcaacagaagccgcctcgcttggatcgagataggcggcgttgttgacaagaatgtcgatggttggtgtttcgaggccagctaacgcttgctgaacgagaccatggccaatgtttggatcaaggaggtcggctttaatcgcgatacccatcccaagtccgttttttcggcattcgtctagcgttgattccgctgctgcgaggttgctgatgtatgtgatcgccagcttgctgagccccttgcacgttagatggattgcgatactcggccgatgcctcgcgatccgccggtaacaatagcggttttgcgtgccagagaccatggagcttgtgtcattgtcgacagtaacaataatacgtagttagagatcgcagtaggggtgcctgttccagcacaatggcgtaacgtcagtccttgaacggaccgaagacctggctcattttatgttatcacggggtaataactagaaccatgactgcctggaagtgatattgggtaatacgaagagaggaaacaggacaatacattagggccgtcgtacatgtgccagcccaaaagtagcggccatagtgtaacatggccacccgagagtagctgacctccttaatgtcagataatggagctgaaagcatatttttctctaagccaaaaaatcgagcttctgtcttcctcattcagctttattgttcacacatatccttcctgtaccaaaaagcagtggcattactcctttttctcagcatgcctgtagaaaacgaatttcctcgtgaactcccaaacgtccttataaccaggctccatacccttaccgcgcagctgagtgcggataatagccttgaagcaaagagggaatgtctacaggtgtgcaaagcactcgctgatcagctccaagagccagatgacgctgcagtcaatatggctttttcggtacccagtatcctctattgtctgtgtccaattccccactgacttccccaagcccgttcttgccctcagtgcccgcattgctattgacttaggtctgttcacacacatcgttcaaaagtgccccattacatctcggtcactcgctgcaattactggtgccgaggagctcttgataagtacagataatccgggctacttctggggtgttgcttaacgatgtattcatagcacgtatcttgaggctcctctcaacagcccacttcgctgaagaaacctccacgggaacctgggcaccaacacccatcacaaagaccatggccaaagaggaaattgcggctgggtatcgatttatgtacgtgtctccgcgagatgcatactaattatcccaaacagtgtctaatacgctgtattgtagatgtcatatggttgttcctgccctccaaagcgccccgggctacttccagcatcacggctattcttgtccgactgatgcaaaagatggactcgtacaacacgccctgcaaactaaaaagaccagctttgagtatatcatgtctgatccccacctactcaaagacttcaacctcttcatgggaaatgggatgggcgcgcgaaaatcgtggctggattggtaccctgtgcaaagcaatattctggatggcgcggacgcagatccagacaaggccttgattgtcgatgttggcggaggtaagggccatgatctgatcgcctttcataaaagatacccgaatgctggacgtctggttttggaggacttgccagcggcattcgatgaccttggacaatatagtatggtgattgaaaaagttccgcacgatttccttgctgaagcccaaccggtcaaaggtactgcttttccattgatttcctcatttatactgtatagattcgttgacataaaacaggtgcaaaggcatacctatgtcaccacatcctgcacgattggcccgacaactactgcgtgcggatcctggagggaatctcctcagcaatgacacccgggtactcgaaactcctcctacacgagggcattgtgccggaaaagggagtgtgccagttccaggcaatgtcggatattgcaacgatggcgtgcaacgggggaatggaacgtacaagggaacaatggcgtacgctacttcatatggcaggcctccagctaatcaggttctggaattcacctgatgaagggggtgatgggattattgaggctgcgaaagtttgatacccaggtcatggtatcattgatttatcattcttaccagacttttgggttctctggctacgacgaagcgatggcatacgatattcgatcaatgtgagaacatggttcatacctaaatcataacctcgagatttctagatacctgacggccgggaggcctctatataagcgcccgtcttgctggcttgagtcttcaagtgtgacgggtgtcgaggatggaggatcgattaggtacggcagagaatcatcatgggatcaaggagtaacaataacatgaagctatctgtcacatttcgatcaagactaactcttagccgtcctcttcaaggttgcctagtacattatatagacaatatgaagagtcattccgctttcagagattgatgatgtccccgggtaaccgtccggttccgagttcgatccgcgctcggaccggaccatatgacaccaagcaacgtgtcctggatttctatatcctgtatcggtcagcatgacagcactgcagcgcaggggatgctcctcgagcattgtaggaatgacaggtcaacatgcaggactgttgtggtgagctcttctagggtgatgatgttacttggtgctgacattagctcctgatgaatagtgtatcaatcacatttatttgttcatcttcaatttcattatagaatactcctgtaactcgtgtggaaaggggcgaaatggggctggattaattacatgtacgtagcctactagaggagcggatgcctttatacttggcaccatacttggaatctctatttactgtatgaactgatatatctagattgaggcttggattcagaatgggaggatagacccttggagatagcagcaaagctgatatatagtatggataaactggatacatcacatgcacactataagggatcagcgtcacatggcatttgtccatcatctgtatggattagcctgctcttatcaaaagcatcaccagcatcaaccactgtaatggacccacctacacagggcggccctaggaaacaagggaacagctcgggatagcatcattgcaaccaccttggaaggtggtaatctcccggtggttccaagcagcgttactcgtctcgggccctaactatttatttgtttccccgccgataacacctaagtggggtcctagcctgcagacctgcctcaactggaggaccggaagtatatcggtagcatgacatggacagtcaggtcggatacattgtcagacaagatcagcatcagcctttctcctccatcttggcgcccttgttgtccagggacaaagcagcagcggtagtttggcagatagaagttgattgcaacaagatataaatgcagtgtaacagacacgtgaggtggaaagggtcacattcctgcattgtacggcggattgttgagagaaaatggctagggtacatgagtaggttacgtttcaatattcgcgaattccatccatattgcacatgcgaggtgctgctgggaatccagattgggtcacgacactctgtgccagcacctaaataaaacactcattaataaacagccatatcccaatgaaatacctgagcattgaatattgaaagaatccttgatagtccaccgccatcatgtaccacactggtaggaatcacactacatactttactatgcacctatggtagcccaccagctgagatcatatctgctgatgttgtttgtctagctcttattattacaaaggctcaggaaaatcctggagtctatagagtgggtagactggagaatggaaagggatatttactctcttcatttcctccaagaaagagtcgtgaattgcttgagctctgtgttgatatattctatgtgggtgcctcttttcttttcgcgcctgaccatgagggaccaatagcagctaacctcccctcgaatgcagattggtggctggatagatacattaacatctgagattgttattgaacttgaaacctgtggatttgacctcggtattttccatgggatggctaaccaggcactttgcgttaatcttgacctgccttttatcaaaggcactgtcaaaatggagttgaatgcgtttgacgagatctgggcacactttgatacagttcagcctgggaaagacaataggtttattaagtctatccacatgtacactctgcctaaagttgtctgcgaaccatgggtctgatgagcagatactcttaatacagttatggacgttgagtagacagattggaacagacacaaagatcagccacaagtacctatctcagtagattgaaaatgagatactgcttttcttacttctacaggtacacaatctcaactattccaaatccctcagtctctgtcccctggaactggcctgcgaatgtcacaaatccattataagcttcgggttcggacccatgtgaaccagtattcaactgattctccgtgcggctcttgactttgatgatcgcatcataactggggatctcaacagtccaggcaagaggataacttttgttggtggaatctgagtggaatatgtgactgagatctggtatccaagtaatattacagactgtctgggccccgtaggcattgcgaacagtagcaaatcgcacaggtgtaattggcgcagcccggtcggcatctgtatcacctgtccagatactaaggacatggccagttttgggaatatgaaggccataccaggtccagtttgtgaggccaccggtcccccactgccggtcataccaggttagtgagcgctttggatcaattggaatctgctcgtcgccaacgatcagaaaaccattggtccaacaggccgggaggctccattgcttgctttcgctggcgcccagcatcacaacacccgcgccgccattaatgagcggttttgtcgttgcatggtaggtgagatcgaacgtgacattagggtgcgagctctgaacacgcatagtggtatagttgtcgttcgaaatgccttcgaaaccattgcccttccccacgccggccttgagatgagaagggggcgaggcagtatacgagccattgccggcttggaagaagtagcggtacttcaggctgcttaaatcaagaatcgaggaccggtagacatcgtgaattccgtcattcacgtaatgcgagacgacaaaatattgccctccgcttacgctggttatccatgaacccgtcgcccaggacccgttgtagttggtcgactgcgtcgcggagagatcgtagatggtggggagtccgatgtcctgggatgtcagtgcttcttctagttttccattctgcacgtactttataggagccgtcaaacgtctcaggagcaaaagggtaagtggccttggcagcggcgggaagggtgctgaatgctgcgaggatggcgggccgcatacttgagacgtacattcaaacaaataggcacgttgaataattcttccggatatgggctgatcctccgggaccaagatgctgaaagctgccgtagttaggcacccgtgtgctctaaccctacctaggcaatcctgtctgctgggcacgttcacatcagcaattagcgcaatcgcaatggcagaaaagggctgggcaggcagcttacacatacaaccagatatagttttgtgaatgactcacggaaatctaccgagtgcgtactgagtacggctacatagagtgccacttgaccaagtggggggtgtggtggcgtcgtacaagagtgccgctccccagaatacaatccctatcgttactgaacgcaaaggttcctgaacataaataacccgatggagtgtaacacgagcgccacaatgaggggaccatgatttacttcatctgggctgcggcaaaaccgcaactgccgtttccaattcgttgggcgctttggcggactgctgttacaaggttgcccaccgggctagcggaccacagccttgaaagtgacgtctccggccgcattttctttatcgctcccagaattcccggcgtcttttctcttaatctgcgctgccttgcttggccctgtagtatcaacatgtcctcccaatctttccgccagatcatcggcctggcgccctcaaccgccacaatcaccgactccacgcttatcatcgtcgacgcacagaacgagtacgcccagggtcttctcagagtccaagaggtcgaccagagccgaaaagtaattgccgatcttctctcccggtaccgtactgccggtcaacacaagaacattgtccatgttgttcaccagacacctgctggggcaccggtcttcacacccgacacgcccctagcaaaggagtttcctgagctgagccccgcagttggggagaaggtcattaccaagaaatggccatcctcgtttgcgcagaccgatctccacgagtacctgcagtctttgggggcggtaggtaagaaggtcgtccttgtaggatacatggcgcatgtctgtgtgtcgactacggctaggacgggcgcggagttgggatacgatgtgcttgttgtaagggacggggttagcgatagggctattcccggggtggaggcgaatgtcctcgttgatgtggcgctaaaggaggtcacagatgcgtttgggacagtgattgcgtctggggagattaaagggtagctggaagggatctttgatggaaccggtattggagcagccctaatggccgcggccaagtagtgaatctatctggcaagtgttctctatagagttcgaaaggaattctttgctgggtacaacctcatgctctgttctcctgtctttacacctctcttatgttttcccttctgctctcccaaacaagccttgaaccttgtaggctgttaagtacctgactgcagtgctgtttctctgtgcttgattgggacccagtgtgtgttcctattagccaaagtgtgtgtgattgagcctggcaagctaggttattatagtataccatgctaacactgttacttttttatgcagggtaatatatcctgttatattcctctatctttatatacagggtaatatatctagttttatacctctgtctttatatataataatttagggcggtaactatatacctatctatagatcttatctaaaatataaatccttgtatttaaccttgactatgagtttttatctgaactaagcttaagtatctttctgcctgaccttcttattatatcttaacatagacttgttaaaccacgggttggggcgggttttcaggcccagctgatccgcccacgcggtttttggggtgggttacctgaacagtaaaccgcccataggtttagcaaataattctaaacccaacccgggctggttgaggcgggtttcgtgggttgggtttaacaagtctaagctcaaccactagctctgatactagaaggtttttttactgcttgtataagcagactcctcaagatcaaaatcctatcctgccaaatggggatcagcagcttgcaccctatgtgcacacccatgtcagataacagctgctggcccaacctggagcacccgtgccatttatacatagcagtatatttgcccagcagattaagcagcatccgccattatatatcaatgccctttctatctaatcccgcagcatagctatggctcagccctgtacaaactgccgctgtagacaggcaatgtacttatttacagaatgccgccatgtcccaggcgcatttggcggagcctgcggcaattgtaaatggtctgaccatggaaggcgatgttctgtacaagatgagtgatgggatactatagaggaaggcaggagtgatctactgcagggtagatggcacgttgcaccgaataggcagattgatattttcagcctagacccagagccgggcaagcagggaccccaattgacctagatgcagaggagggagaagaaggcaaccaaattgtactttaagaagattttaagaagattttaagaagatttatagaaggagaaatgcatgtttatttcttatctaggaattctgccaatcaataacgccgcaaatttgacccccatatatcctatatatattcgcattctgcgtactagcaccaatgtaagccgaggcgtactcatttgcagtgagagtctcagactttgcacacagcccctgtacaatcttactcgcactcgttccaacagcgaacttgaacccgaaattctcggataccgcaattgcaaggtgaatcgcgctcttggcttccaaagtcaccgtgccggagccagggtacgccaatacaaagccaatgagcgtcatcacggcatcccactggcagtaaaaggcctcatgccagccgtccaatagtgatgtttcttccaaaacctggtgtgtgagcttcgtcaaagcaatggcgtgagcggcgcagcgcgtcgcaagttcaccgggtagtgagttctctgatatgtgcacctggcttgctggttgatacggaaagcatatcattgatctgaataggttgacgcagacgtggtggtacgtgttttcgaggagcatgcgctgtcgctgtaaccactctggggcggacagctctaaaacaacgcgggcgccatcagtggagaatggtctgctgttggaatcctaccgtttcagcttcagggcatcagggacgctatcgcaccaagcgtcgagggacgggatatgcttagcgatgatctcggcgccggcttgaagcgcatccgggcgatcccagattggctgtccctcttgtagatggaaatcggtattatgaaaggaggtataagctgctcggaatgttctgcagagcgttatctgtcgcagattaaagcttagccacgtcatatcttcatcagcggggacgaacgtcgagcccgacgatgctgcaacacgcaagctatcgatgcagagggcgggcatagaatgggactcgctaagcatgaacgaacgtccgagtttcatggtagcgcgggtatccatgaaataaacggtccaccagagccgcctccgcatttcgcgcttcgcctctgggagggtcgatggcagatcccggtggagaccaaggatgtatgctgtgcgcacggcctgtgccatggctgtgtccatcatattgtggaacgatccgccgcagaggtagatcgagcagagtacgtggcattgcagggtggatatcgacaggctttcgagctcgtaggtcagtaatgtttggccgcgccagtagtgccagcggccggctacagaggcatctttgccttcaactaggccgctttgcgagcctagggggagtgtagagatgtgatactgcatacaggctgccacgacgatgtcgacgagagctgatggtttgcgccctttgccatcggcgatcaggaggctctgatagtgctgcttgaactgggcatcgtctagaattgggcagagcgagacgtggtacgtttgccagaagtaattccaaaagtattcctcctgcaggagactcggatagacgctgttggatgaaggtccggatgatggagcgaataggtcagcccctgtcaccggcctgtcgagaagcttatcgtcgcttgcggaatttgggagtatttcgtgtggaatgtgttcttgattcagcctcacgttcaaaaaggaactgagccgctgagtgaacgcgtacagtgaggagggccaagccaaagactatttgtcataccctggctttggcagcatcgcgggcatgcttggcctcgcgggcccgcttggctgcgcctttcagaactcttttgggcatatcaagtcagtaagcgacaaatatcaatgccgggaatatcaagattgggaaacctctgcaagcactatgggaaattacgatccttatatatccaggagcgggcaggcgccttgtctattcagaaatgacctgcagcttgtcgacaaaggcaacagaaataacaacaatgggttatattgacattaacaatagagctccaactctattgtaggccaaaacggcttagcgtcggatcgaggccgatcctttctttattgggggggagagttgtcacgggccgacgccggagccagctggcgacgacctggccctgtgacacgtgatccctatccctcaattcccacgtaacggcggacgggcgccttaccggtgcctatccgccagtagaaattacgaaaccagggttagctcgccaagagactttacatctaaacttgcatatgactagtccgtacggctagaggatttgggaaacaaagttgcagagttcagtgggagcagcgcggttgtgcaaggcactgcattaaagacccttcaaattcaaattcaagtatcaacaaccgcctagccctagcccactacttgaaccataccagtatgtcaccatgactatcttagtgagcgttcagttcatggcggaattattccactaggaagaaagtaaatatgactacggtagctcggctctaataacatccacaagctcacaacatattttcctcactcaacctatgcaaaatcgcctacacaaagacaggcggttcctcatgtcaataacatattctaggtattaagcaaaacgatattaaaacgccattcaacttatataatatcataatgatcgcgcatcaactggctttttcagaatccgccctccggaccaccacaacgccagaacggaagtaacccctgtaatcacgcctatcgcttagggttagggttagggttagggttagggttagggttagggttagggttagggttagggttagggttagggttagggttagggttagggttagggttagggttagg

SEQ ID NO: 63 - DNA, 6980 bp, Emericella nidulans
ggggggttgactgcaccgcgtgctctaaagccatcgcaatgctatgttttaattagacagtctgattccccttgtccgtaccaggtctaaatgcgacgtaaaccctcccgccttacggacgaatcctgccaagggcgtccccacccctgtgctggagggctcccttgcttcattgtattcactcgtacaagagcctttctctgtcggtcagggtcaccaaaggccttgtctagtaccgcggagaattctgcccatagcacgggagtctcagatttctggcgagccaagagccatggtagtacacgctggctggcttttcctctcaggcggctgtaggcatagtaaacttgttcctcctctgtagggtagcaggcggcgtcgattgcaaacttcgtacaaaggttcatctggaaaggagggtagtccttagggtcttctccagtaaagggttcgacatccgggtgacaaggacggggatagcttcgttcgtagggggtgggcgttgcggatgtaactgtagtggtaactggtggatggtttctcagttgcgagttccgtacggcctgtagttccgcccgtaagctgttattctcttcttggaggctgttgtttctgagtccgcatctctgtacggagctcctggagctgctgtagcaacaatgcgacgctttcttcttccgttgtcatagtaaaaggtctcctcatactattattgagattggtgagcgattcctaatgttaagggacgtatttagatggatcttcctatctagacgtgccgtacgtacaagaaggaatcgctaaagaagaaatgagaaagaaggattgttgttgcaaggaagtcttgtaggtggctcaccgccttcaggacagcgcaggccttggccgagtcactaaggtctaaggtccttgtataggcaaaggacccataacaataggcctcagcctccttaatatatataccatactggcattaacagcagacaataaaccctagttcagggactttcacaaagataaaggggtctattatcaccaacaaggtgctgattcaggggaatcagagtaaaagtcagatttctggccagatcttaccagaatcctgcattatttgcttttcttatcctatatctataattaggatagtgtatacaactagtcccccatcaaaactacagaccttgacttacaaactttggctcagcaccacagcctgaactgacactggaaagctctaagatatttcctagttagaattaagtaccttatctatatcctgtaaatttctcagccttgttagtaactaaaagtgcaaagagatgctcaaccaaaaaaccaaggcaatgcaagacctgtttgccaagacttccctaacaacgagcaaagcgctgctcttcatatcttcacccccagtagattagggctggcgccgtcctggatagcttgaatggcggggacctggaccccccgaaatgtcatatctggtcggccagtcatgcgctgcagcgcctgctccatgtccatggcagccagctgctggcaccactgctcctggtagtcaacggcctgctcctcccataggttggtgcgcttgcctggtgctggggctgctggcaggtctgggaagcccaaaaactggtgctaatcagtgctcaacacccaaaaccgcaggcggcgcgtcgtcgtgctgccagcaaactcggtgctctcgcggccgtacaccatgccggccacatggggggtgtggccggcctgcttgtcagcaatgttgccaatgctctcctccttatccacctccatggcagccatttcctgctcctgctcagcttggatgttgttggggaatatgcttgatgggcgtaaaaactgacggctgatgccaacggcgatgtcttgatagttagtaatgtttaatgcatgctgggcgccaatgctggcctcactctcccgtttcagcacctcgcgcagccgctcgctgggccactcgcggccggtgccgacgtcaggtccccatacatacgggctgcggtggggggggctgggggcagggttcctggctcgggggttgctgggcctggcgttgctgggttgggggttgctggggctcgagctgctgggattgggattgctggccctagggctgggcctgggattgctgggcctgatctgaccccaggtcactgccagctggcgcacaaacagcagcaccagccacagataccacaccaccagctccccaacctccctgggcaggtatcagtaaatgattttgatgtcattgctggcatggaaccccttatggtacaccatcacaaacactaccatgccatccttaatgaagatgttgcgctgccagttgtttttggtgttgacatgctggatgctcagtagctctggcgcccgcactggcgcaccgcctgtcaggtgcatggccagcgccagcttctccttgaaccgcgccacctgctggaagtacttctgcagtttggttgggctgacggcgccctgggtggtgaaggcccgggccaccgccggctcgcccgcaatccggtcgaccagccaggtccccccagtgacgggccacggggtgcgggggtcctgcaggaagctccagccgggggtgcctttggtggggttgtcaaacagctggtgccatgggatggggggccattgctcctgattaggctgacacagcaggctggccatcagctcccgagcacctgccaccaccccatgtacaaagcttcaaaactggcccatggtgaagtccatttccttgtacagcagccgctcctgccccatccaggtgacatgcccgggggtggttgtattgtagtgaatcttcagcccaaacgtccgccaatccagcagcacctcgacgggaccatgctggccacggaccatgaacttctgcaccatccagtcaacaccagcctgaaacagcagctgggagcgcggcattcgagtaatagccctgccctggggcggggatgagggagtctcattactggatggcggactgggcgcgcttgcatacccttcatcctccatcaaccagcccagctcctggtcagcagcctccccagcccaggcgccctgctcgctggccgccacccacatcctgatgatctcccaatgttcggggtcaagccacagcgccttctggaccaccaggaaccgcgccaccttcagcacccgggatataatggggggatagctgtcggtgtcgcgccagccctgctccccccggcccaagaccgccatggcacacaccaacgggctctcatactcatggaccttgattttctggttcagcagctcgatgcagaactccaggcatgtcgtttccaacggggtcatgacaaacggctcgatgcggcggggatcaaggtcgggggccatcggatcggggctccagcgcgctgacagtccgtcagctctgtcagcaggctcagcaggcccacccagcccattggcaagcccatcagctggcccatcagcaagcccgtcagctggctcaggggctggcaggcaagccagctgccacagccgttgccaggtccgctgctgccgcgctgtcatgacataggagggcttcttctgcgccatggccagtccgtctgcgtgcgaatgataaacagcaggatctgctgccacggccgcacatgctcctggatgctcttctcgaccatgtacgcgcgcagcggctggtacggcgtctgattgggcatcgtactgaccgcggccatgcggatgccgttgccgcaatgctggacggtatgctggctgcgccgcgccagctacatcatggcgtcccacacgcgctgcgtggcctggctggcggggtctgcatcgtcagggtctgggggggtgacgacgtcgatcagatcggggaagtggacgccggccaggtaccgcgcccagcgcgtcatgcgcagccaggggttggcgtcatgcagggtctcgctgtcggcggtctcgcgcgcctgctgctcatcatcggcggcgcgcgctttgattttggccgtgatctgcgctcgatccggcgccggggtcgggggctcagcctgggcgtcgtacaattagatgtgcaccaggtgcgagttcctgcaggttgggaacacctgctgccaggctacctggcgaaataactattgcagctcctgcttgccctgtgctttgacctctgcaggcacatgcccctggtagggatgctgggtccagccatgcgcctgctgccaatgcttgcgcattgtattgatataggtcaccaggtactggcagtggctcggattgcgttggcacagcatgccattggtatgaactggcagcccaggcagcgggttttccagcatatgggggatatgcacagctgccgggtcctggatcaggtcctgccattgctcaatggcctgggcgatgggctggatgttaatatttatcagacaatgcttctggcgcagatgtatgtagacctcttttagatagaccatgtgttggcagtgttggtatactataatccccagtttagggatcttctggaatatggattactccattgtcaggcaggatgggaagcagagattgggaagaatcagaaacatcagatggcaggggcgtacgcagcttaaaacctgttgggggccaatatgactggggtcatgttgttttgtagggcttggctgccgcattgatcccccattaacattgcaaccacctatctttggctcaacaccatgaccgcaacagtggttgtatggccgtcagattcggctgtatacaaaataagcaaccccaaaagcacctgccaaaatttcagcccaatcgccctacaaaacatgcagtcagtcgcacttgaggagaccagtcagtcattcgcgcgctagccgctgcctccgccaatcagcatccaggcctgctaagaccctacaacagttgctctatgactttccgccgcctgtgggttaggctggatctgcaagctggtcatgaaatgcttctggtaaaggtgggtttccacctcaattaggtaaaccctgtgcttgcattggcggcagaccatgatctgcagctcagggattgtttcaaagagtaggtgagacatgctgagagttgtacctatggaggctcatacctaggagtacatatcaacatggagagattcaaaaccagggattgattctcctaactaaaatctgctgctgacagagtatttgcttttgtttttgatacaccaaccatctatacagccatatcgccgatctcccgtccaaccttgtatccaaccccaaccaacttcagctcaacgccatgctatgattcttggttgcctggacttgaaactgtgctctgttctagataagtggctgctgcatctacagtaaaatttccagccccctagccccctgcattctaatcccattgtactccagtttcatgcccaaaaaaatcccattgcactccaacccgcccatatattactttaaaaccctaatcccattgcactgcaatgttccacccccagtgggttaggttataggggtaggtcatgttgctttagcctttatatatgcatctctgtttagtgagccgtcctgaagtctatactgttttgtacaatccagctacttatccagagcttgtacttcctccaaagctgtggcagcttcccaggttggccgagcatagcctgaccattttactaggtattccagccagtgacctctcctgtatctcctgggacatttgtccaggattttctctactatgtattctttctcgccgttcataatgatgccagggggctgggtatcatcattcttctgggaaggaagtggatctgatgaagccagccgaagcaggtccacatggaagactggatggatccctgggggtgtattcagccgtacagcatggctgcccaccaggcctataacctcgtacttggcgttcttccagtccagtttcttgctgggtcggtccgtacagatgttcttcagacttagccagaccttatctcccacttggtagtttgtggccgggctcctgtgtttattagcctgattctctgcattctgttgggaataggccatggaggcttgagcccagtctagggcttccttaactttccgtacaatagcttcccctttctggataggactcttggctggttcttcggctagttgctctacctcctcggtagggctaaatgggctgaggttatacccatggcttaggtagaaggggctgacccctgttgctgttaatatacagccattaattactagctctgcaagtaggagtaacctgttccagtccctctggtcatagcaggtatagatgcagaggtaggtctctactgtactgttcatcctctctgttgatccatcagtctgggggtgataggctgtagatagtcggcggttaatccctgtcagggtacatatgcgagcctatgtattacttgtaaactggcttcctctgtccgaggtgatagcctttgggatcccatgtttgcttataagtactcgtacgagggcccaggccacgctctcagagtcaatctctgacattccttctagtatcacacctttggttaaccggtctgtgataaccatgatgtttgtacaaccttcactctctggtaggtctgtgatgaaatccattgaaacctcctgccagggatgatcaggcacagggaggggctttaatagtccctttctctggtccctccaagatttcgtccttccacatatatcacagttttggacaaatctcctgatgtcttgggatatgttaggccagaaatactcatagctaaccagcatatatatttgctcccggccaggatatcctgtcaatatagagtcgtgcgcagcttgaattatatttgtacagagctgttcactcccaggtacccacctccttctgcagaagaggatatagccttgggcgtctaattggcattccgaggttcctac

SEQ ID NO: 64 - DNA, 3304 bp, Emericella nidulans
ataccagatctaaaggcaacgttgcgtctaatctattccttgctacaccaagatttccacattggactaagtctaaacgcaaaacctgcaacgaatattgtcacctagtagaccaccaaccctgtggcttgacggaactgatcacgagtgaggggaagataggtgatgcattgacggtaacctaaccgcaaaggtctcagggcagaggagcatcggcactccgtagttagtagagcatggcagatctaagtcctccgtgccacctttggtgctctccaaaccgacgcggtttcggctcaccacggtactgcaataccagtcatcaatctcaaccatcaaatcatcaccaggtgcagtacaccttcataccggctggctccatctcgtgactcagatacgccggccaatggtctccgcggtaccctgcaatatgtgattcttcaagccgcttgttccccgttctgcatgcgcaacaagccaccgtaacccaactccctaccgacactgctcttttataccgtctagacgtcgaagtcatgtggattctcgtaaaaccgttccatttgtagataaataagctgttggagatgctcaaaagggaaagggcagaaggaagctgtatcagtttcttcatttgccgtacgggctcctcctctctggcggccggtatgtcctcttcgactcttatctctgccatttccatatgctctagccttgccgtggtccctccggtgactccatccctgagagtcctcgcgggaattgctctgctctcggttcttctctggagctgtacaatctcttgcaaaatgccccttcttgccgcaattgaagcatcttctttgctctgctcgattggctgatttgctgattacctctgctcgtctctctgctcgagtcgatatttctttctcctccaatcgagataatataactgcccgtttggtgtctccaatagacctaagaccatctgcataggcctcatattcgggcggcaatccacataggaaaagtaccatcaatgcatcctgatccaggtattccttttcccatacatctttgacttcctcatgtagcttttcaagatcctggatagcctccctaatcttcatcttaggatccatcttccatgtgaatagccgcatcagaaggttgaccttccttctagggttcacagcctcgtatttctccatgaggtagatccagatatctccactgatctcaaggttcttcactgcatttgcatcctcttccgagatataggctgttaaatatgtgacagcaagtaagttgtggtcaatataatcctcatcttgcattgcctgatggagaagctcggtcttcccatcaattctcatctttctggtattctcgaccaccttccagcatttctgaagccttaagaggccctcaattttcttcttccataacctgatgttcgacgcgtccagtacatcatatttgacacccactggcttgattcgatcacccttatcaagggggggaagtctctctgattgccttgacatccccgatgtcagttcttctatacttagtatcctgtatactggctctccttgtagctgcttgctaggatcgtcgatctcgatgctattagcgctttggattctctccggtacagttctctcgactgtcttgtctgtctcggctgtctcagtcggctctatatcgaccgtctcgctcgcccctggcgccgtctcggtctggtcaattttctctgttgatctgtcaaatgcccaggggaggctcatcccggctaagtctcccatattctctcggctcgatctcccagtccgttggtttcgtcttcgagccggcggcatccgccttattcgattctaggttcgtagtcaatagctcggtcggggatagataggcaggttgtatcaactacaaaagatagcctactagagattgtgcgccatataacaattgattttctatttgatgacgatatatttcttcttcaacgtaatacacacagcggtcaggtcaggggtgggggatcacgccaactatatcacgtggcacaagccatgaggcttaacctgttgtggatcaggtttggaaatatgaggccacgtgatcaccggtggattgaccggacatcgcctggttctagaaggttcccaccctctgtatgtatatatagcgggggaacagaaaagtaagaataaggaaataaaggaatctatcgtcaacaagatagatgatcaatcgtcatatgggatccgatccttagtaggctacgttggtgtagttgatacagtttcctcctgccctttcccctttgagcatattccacagtgtacacctggtgtacacgaggaatgtcacatgatatttccgtatcatgatcgcataacgctgcctggggaggataagctttaaacagaatattgattgttaaggcctggtgcaactggaggtttgtcgcactgatgcaattggtatccgcggggtcaaggtgttggaagtggcccgcatcgtacagggttgaaggttgaagtagcggagtatgcaggttggggagtgctgaatgaatcttcggcgtaaaaggctctgtaactttggttgcaggtgcaagggatcactgaatacatggtggttctgcgagctccatatttatcatgaaaaaggtttcatccaggaaaatatcgtgctttttcgttgcgtatctcgcctgctgtgttgggtacctcgtccaggaaagggcttcggttatctctttttcgaaggaaaaggccattttgacgtctgatgtgacggatgtcatcagatgagatgagttgagtctgctgtaacgatggagacgatgagagaatggagacgataaatttaataagggatgatggacggagctcagatgaggcgatgagtgggaagaaaagggaattgtatcagtgggcagctcagtgctcactgggcttaatgggatcaacttgcctgtgccagatcaaccacatctctcagcgtgctctacttcgacttatcaggatgatggacctttatcttgagaattaagcggccctggtcacttcagcgttataggtatcaaattgatatatttgcgcttgatctgttattggtgcggctgtcgttgaagtgataaagcgagactactgaagcctgttgcacacagctagaacaccagggcccccagaaccggaagccaaggtcagccatgcctgaatttcgctgagtatttgttcaagcctctccccagatgagaaccctcggcctttacctttatttgggcatctccattagcaacaacgtctat

SEQ ID NO: 65 - DNA, 8447 bp, Emericella nidulans
cgatcccggctgaagccatcgtattattacaggccctatccgctcatatcgagcgcccgtgccatgcgttcgcaggcaaacctgattggtgcgaattctctagtaaggctggcctaacagtggcacaacagctcggttgcgtcttgggtgcagatgcttgatataaacccttggaagcaatgcttgattatagagcatctcacagaaggcacttggtagcattgtttgcacttgttaccaacgagtcgaggttttttggtctatggtgttcttgagacacggactgttagcgatggactggtgcgacgagcattgaccaccatggagaattaattgcagctgttatacctactctggcgatcgtcctttggaggcatcaatcccgcaggaatcctccacgattacgatcgcgtgggtgcggagaccagcgaccccttttgttgttatcgcgattttggactaggagtcccctttgcagcgagcgtccactgttgacagtggaggggctcgcgaagaggccactcctactattctcagactacgcactacgcattcgagacaagtgctggtcctggatagcccaatcggccatacactgtccttcggttgtcggcaatccgtgtgcagtgcttcctttttcccggcttggtcataccccacgcggagaaagctcaaaagctcatacgaagtacggggtttgtaccagctgggagcagcaatacgaaagtacgggaggatctactccatactatctactccatacgatttagttactgaacggggtaccaccacatcactgttttgtggggtagctccatcgccgcaaccaactcagatgaagtcactccttcaaagctgaccttgaggaaactctttatcgacgatccattgcgaagctcaagtaaggctgcagtgtcagtgttacgaccagagtacctgacgacctgataactagccttactgttctacagagtttatacagagtaaccttgccaagtgccaagggcaataccaagtgcgccgctgaacgcggccaagagcagcagaaatgaggatggcctctgttgtccagaggtcatctatcctgtcttacgacagagtactattgccgctctggacgcaaatttgaccctgtaaagtcacgggatgagggagatgagggggatcgacagccagggtcccaagtctcatcggtgattgttgcactatactcctaaaagtatcgcatagtgcgatatattcgcattcagaatagtacaatgtgcttgtacacaaatcgatgtgccagatctactttgagtatttcgagcactttgtggtcaattgctaatggtcagagttctctgctccataagacgtcaccgcatagaaatccaccatccaaatccaccatccattcatccgggtctccgcctggatccttcagatttccaatgccgagtcccaccaccgacttgccgagactggggaggcaaatactcgggcccgaacgagaggatgtgcttcattcacgtctggagattctccgctatctgaaccggttattggaagcgggctctggggagttcgcagctgccacgagcgtgcagtcccacatgttccaatccttgggccactgcgcaccggtcggcggagcggagggcaacattgatttctttagtcgatatatgggttccagagcttggggcaaagtcccaattgctcttgaggcgtccatatccataacggtcatcgcttggctaattttttgggccaatagatctgttcgcacgagactaccggcgtcacagagagcaccgctattgatctccaagagcttggggctccacctttgttcttgcatcaaggaacgcaagtcgactaccgctccacgagtccatagtaatgaatagccccaaccttgtcgaggatatcgattagtcccattagcgttgcggagataatgcatggctaggctacgggatacattgtcggtacatcgtcttagtggtaagagccttctctacaagtgcataatgcgtcatatgattcgcaccgcccacctgggcttacctctttgtctattgacccgacaatacgacgatcatgacgatgtcgctctgatcctttggtccatctttccccccagtttgtgcttagccaagcctatgtggtgtgatcatcactcgtcaatccggggtcaagtactactgtcgaaaagttgctcaccaccaaaagctgcgacaatcacatgctgttgaactgacggtcgagcgcccggcgtatgctgctggttatcagttgaagatcaaactcgtcccatagggaaactcctgtcttgtcgtcttaatacctcaaacttgaagcatgggagaagatgagattggaaagcaaacaaaattgtgctgtaatagcgatcgcaaggatgcagtcaagttaagttttctgaatggaacctcctagaggctccttgcaaacactcacatagccaaggtacgtgtctctacaactatgttccgtaaaggaaaaggtacggcccatgcctcgcagcgctcatcgattatactgggcacacaaattccacttatccctaccgtcatgtccgcgaatactatatctatttactctagaatctcaacaataatgtggtgccagctctgcgcagtcctgccatgggcggctattgcagcctagtggatggtaagtataactgcaaggcggctacggacacaacgctgcaccagcttctacatatcccagttccagtgacccttcatctttgagtctgaagttgttgaaggcctttcggtaagtataatgaccggctgggaaagaccggcaaacaacaacgacatggactaatacgtaaatagaagactggcaagcatgatgcagcgctgagttacatgccagaatggggaaggaagtgcagcaggtgctgcgtctagcctgcaagttagctacagagttatcaagcttgcattgggtttcgtgtctccggaggtgcatcttccccggattaccagaaatacaagaaatatttctaggtgatggtgttatcaacgattctgcgatagaatttgactttggtaacgttttcaacgatattgctgtcaaggacatgctgaacagggcgagtcaagagatccgggctcttctagatagccttagggctgaggagcacagcgaacttcagaattggtaacgatatcttcacattcttcagcaaagagggtctagtcatgcctcaagtttgaatagtaccatttccgatgctctttgtttcacaaacgtcactgccatgcttttgctagctgcccttgttttacggctggctcagctgctgagatttctgaggcattagggacggaaatttgatgaggcggaaaggctgttggcagtaacattgaaagacggatactacaccctggttaaagaccattaacacggcacatcacttaatagcctaactgttggaacacgggttattctgctgtccatggattcccggtctacagagtctcgtaaccagcatctcagggatttagcctagctcctggtgtgcatccgtacgcctgagtaccaggttccttcatacttccaccctaatagttacctgccctggctcctcgccgcagcttggaaggatcttgacgcttctggcgccttgtatctccttgttttagtgccagcacgaagacttccagtggctgataaatcgtaggttttgagcctcgagacatcgttgcaaatgtgcgctgaactgaagctcagagtccaggataaagcagtttttcatcagaaggtgatctctgctctcacaacaggtatcatgacatggctctattctgttttgttgctctccttctagtttttgttcatgttatgctgctcatcttgttccatcatggttttaagcttccttccaagcttatcaactttggcaatggctcgctaatctcagcctcaatttttgtaggcttccaccattttggcagtttcggtcgtatagtataccaacattactatgcatgagcctttccacatatacatgtgttcctttagtgttggattcgatcgggctcgaattatcgctccggccaaggttgcaaatgccatgtttgaagttgtcggcttgaagccttcagtataggccagaaatgaccaataccgtctgagagcgtatgaaaaaagtcctgctcacatctcttgtcattgatcatctccgcttgcctttccgcagctgaatggatgagcgccactcatccgcgagcccaggatggcttggaccttcgtggcactctatgcagctgtcatattcgacgttcaatgtctcgatctcagcggaaatcatcgtgtcgttcgaccggtaggctccaagttgccagtgctctttcggttaacgctcaaccacttccgagcttgtctgtatagcttggtgaaggaacgagattagcttcagatatgacaagatacgcaatgatccgtattttagtttctgagcaatgtccacttataactatagtttggtttggtttggttttattatttaacgtcactcggcggatcacggggcccacgtgatctgcggcctcccagggggcatctggacgtgctacctaaacagaactgcctaggaactagctagatacaggtttgaagcagcaactatggacaatatatgttggaaatgagcggaagaagcacccggcgctgccctggccaggtcttcgagggcagatgcccgtttcgactacctatagattggggggaggggccggaccctttatccaggtagatgtgtggactgtcgcactatcaagcgctccggcgggcccagttcgggcatatatccttgaagaaggatgattcttgcacgatgcggctgaattcttcagccccggcagctgtacttaagagccagtctattgtttttgacgggccgtcccttatacatctccatctatctttccagcgctttctggtgtatgggcagaagaagaagtgcactggggtcttggtcctaccacaagagcagctctccaggtagtctgagtggttgaagcgctggtggtatgccgtaaagtctccgtggcctgtacgggcggcacttataactataggttattgagatggttaccatccgtcgtctttagtcatgtgattgatatgtgcaatgaacgtttgtattaaaggtcctgatctcctaaccacgatctctagatgctctcgatatcttagatagttctcatacgagcagttttaatctgccatataataatgtggtatatcgaatgattgggcgaacggagtgctggacactgatagtaaagggagctccagctgttgacattgccctaggtaccgggaacacgtgcttcaccatatatgtcggagcatgggttcctcccctgtccttggggtgcccggtctgcacagtcttagtcagcatctcattagtatatagcctagcttccatgtgcatccgcactgtcacagtcctatgtgctgtgatcatgagccaacacagattacagagctcatcgtgtacaccatgaatgattctgccatccgtgaccgcctaccgtatcaagctaagctccgtttcgcgaagacttccacaatcgatctctccatgtacataatcctcttctctatgcttaggattctgaatatgagcgccagaatggttgtttaaatgttctgattggcttgccgtcttacgcaccccctgaataccagactccttcatgcttccacaatatatgatatgtaggagcatactgctctcgagcttggatttgcttagtcattacttagtaaaataaatatatgttggcggccctaccgactacccagagaggacaacatcgatcgtcttttacaggtcatgagcctctacgctagagtattcggctttttgctagatatagatatgcagaattgattcatagatttctgagctataccgatttctgcgtcccaagcttgtacgagggaggcagcatcagtcttgtgtatcacccctggatcaggtttatagaggcatttttcgctggactgctaccaaaagcctcacgaggtgccaaagcaaatgacgcaccatttcaaataagaataagacattgaaaacacgagccggaaacacctatatctacggacaaccaagtatcgaacgattcgacaaatgaagaccaactggacgatccaaccatgatggaagatacgcgagccaaattacgtcgtcaactacgtgaggaactaggtcgggagatagttgaggaattgcgcgatgagatcaggcgtgagatacatgaggtacgcgcagaacaacaacatcaacaacttcaacatcagtctcctactcagcacttacaccgagaaaccaacaggatgcttcctacgatcgaaatatgaggattcaacagctagatcttttatatcgtgagcggaaacgcatttggaaactggccaaatcaaaatttcggacccgaagatcagtgattcttagtgaccgacataactatataacatggcgcgattccgtccttatggatgcctatataattgacgctaaggatatcttcgttcaaacaaagccacctaatggcagtaatgaaatcgatatcgcctgttgggatgcgaagaatgtcattatgcgtacaaggattcttcaatcaattgcatcgcacgtacgagaaaccatctgccggcaacgctctaccctagctgcggaactatgggctaggatagcatcaacatatgccccatcgacggccgaagagcgccttgtgaccgtcaaagccttgcttgatattaacccacagggtaactacccagcgatgatccgagattatcaacggataggggaaaagcttaggcgaatggatctatcctttgaagatcttatccatgacatctttatctgttctctaggtcaatggcagcaggactttgttcatacaaagctagacgagttctactcctgcggccgaggaccgatcaagaacctggatattacgacttttgcgggtcaattagttgctcgatcttctccctccagcaacaaatgcatcccccagcatccgccacgattcaagcttgaagcgagatatcgaataagccctacagaactaaaggattcacctcgaacgaagcagggttgtcagggtcagaagcccatgcgtacaaaggtgccttgtaaagcatgcggaaaaggataccataggccaaatgattgtcgggaactgcatccagaaaaggcctctgacgataagaaccaaccaaaaggccagaaactcgtcctacgaaaccatccgcaggccaactcgattgcaagcgaactagcccaagagcccaagcatgataacgaacccccctggctcttgagcactgctgcagactttcatatctcctatagggatcatgttttcagcaacctccgagatcatgaagcatcaataaaagacgccggtggccatgtacatcagattatcggaattggaactgcattagttcatggaatggagattcctgacgttcgatatgcacctgcaatgaagacgaacctgctgtccttcggcctattggataagcagaattttgatatatccctacatggcaatttcgagaagcacttccttataaaatcacctacaggagattctcttggcgcctaccttgagcaggaaacaggccgatatcatgttagaccagtttcggatggccagaaggatcatgaccatgctttaccaacggctaccatgtcagaatggcaccaacgcctatctcatgtccattttcgagctatactaaagttcgaacaacagaagattttgaagatcaaaggacgaaagactctagcattctgtgacatctgcagacaagcaaaacagaggagacagatctccaaggaacctgcttcgcgcgctacaaagatcttagcgcgaatccatattgttattgcaggaggtggagcaacattgaattgcaaggatgagcaagctccgcccggcatcgagaatactcgatatttcttgttaatcacggacgatgcaacacgatatcgatggttcttcactcttcggaccacagatgaagctatccctaccttccaatggtggattaagcatatcaagaaccaagggatttagcccaccagctttcgtctaaagcgatcgcgaattcttgaccgacatggtgaagaaactctgccaaatctgtggtttggtcttggagcccaccacagcagattctccatggcaagatggcgttagtgaacgcggaatccaaccacttctgcagtctacaagaccgatgatttccgattcaggattcccacgttggctatggccacaagccctggacacagctgtctatcatctgaaccgattaccgacacaagtccctcttgtacaatgaccgaaggtaatatggcgccaactatcgatagtcggtatagtagtcgt

SEQ ID NO: 66 - DNA, 6496 bp, Emericella nidulans
ctattaacattattattaatattatcataaagctctacgtctacctgctgttctggctcaaaaatacagctcctatactgcttctctaacatatgcttgctccgtattactagctctgtattaactagtaagctatcttcctcctcttcttcattatcacaaattagattaatattatcttatatctgctgtgcatgcttttcgtcttctacagtccacgcatatgtgtaaccactcgaagtctgaggcgcctccccgatagaggaccacgtccaatccgcattggctcatgtggaaaggggacggacaattgtcattattggatggccaacgtggccgtttaacgtaaatcccgggtgatccgtagttcccgggtgatccgtgattttccctccaaaacctatgcttgctcgactttgaagtactgtacatcaaccaaaagtgattcaaattaaaataaactaaattccataatgagtaggacagctggtcctcttgtggccctgaatattacattctgaacatgttggtggagtatgtttaggtatacctagagtttgaggcgcacctccgccagcacccccccatcttgcctctatttggttatttcttgatgaaattaggtccctggcttcctgaaatgaaagaccttctgtaagagtcatctggtgtttagaacaactctttttctgtctgttattctctatggctgagcggagatcacagttttcccttgctagtaagttgacattatagatagccaactcacacccttttaccaactcatctaggacttttttggtgggagttgggggacttttagaccttctctcaagcagctttttaactgaagagactttttgatgcacatggcgcatggtataaggcgtaccaagctcagaagaagggattgaagcaaccccatggcttagagggggggttggagtacccaggctgatatttaacttttcaagcactgccttaggattagaaggaagtatcccagttgctttgaatctgctttgaatattctctgtagtaaagacttcctggtgagctgctaggtaagctttcaagaaatctagcttgtcaatatagttatatcccaggcgccctttctcctcaataaacttgccgtatgccttctttaaaggtccaaaacaaccaacatccaaaggctgtaggaggtgagatgaatgggcaggcatgcaaagaggtatattattattctccttgcatgtacggtcaaactcaggcattaggtggcttccatgcccatctagaataagcagctgatatcccccccttgtacgcttatttgttactggaatgaagatattttgaagccagcagaggccaattgcatctgtagtctatctattggtgcttattttaatcctccaactgccagggatcatgcattcatcaaaccatccctctatatagacttttcctttaaagataatggtggagggtattggccaccccctagtattgatgtatattatagtggtaacccattcctgattccctggctgtataagccatggtttaccaggcatttctgccccgaaaaccacctttattgttgcaataagtcccatagcaaagccagtttcatcaaagttgtagatatccttatcctgaataccctactcatctttagttttctgcagctcattgaaccattggctaataatcctaggatcttcatacagtgctctttggtaattaatctttcatacaaacctagttttgatctccgggcgctgcttggtaaactctgtaacccagttttttccaataggtagatatggagttgatattgcagcatccaagattatttgcgccatttcttatacctggaagggcctaggggcggcaccacatatatccagggatactatccaagctattaaagcttcctcctgaagcagagatagcctgtggcccttcatccgatcacgtagggtttaaggaggcacattataaatgcggctagcttcctgaactgtgcgaatttttctgttttttaaattgtttatagcacattcaatcctaccctcttgctctctcagttcctggcgcgttttacgcgcctttcgtggcatgatagttgtttgaagatggaggctggttgacgcgttcgaaattttgggagtttcacggatcacccgggaactacggatcacccgggatttacgttatctacacctagcttactaaataatgactaaccgagctgcaacctgggcctgccataggacagtacgcccgaaaattaacacgtgaatatcctccacactcgcccacctcgtaccgattcaccagatgatcctccattatttccctgacaacaccgcaaccatccatcctgctaatgcaatcaatacttcttcttccccctctgccaataaaaacaacccacaaccccagcaacaagaagaaaccctccaccaagcccaatccccaagccgagtctcaaaaccgtcctctcgtccattccaccctcgtcctcggccacattcgtattcaaatcgtcgaccgcctccccggggacccagtaccggattgtctctgaggcgctgaggatagggggctgcggaaagaggagcgcgcggtcgctttctttccaggtgatgtaccagggcgcgtggagggctatgccggatgtgaagggggtagttgggccagtgccgtgggagagggttgctgttattgtcgatgatggggttgggtctaggaagatggtgcggatgcagggttgggtcatgtaggggaaagtgtaggctgggtagggttccagagtgtagccgctatatccatgtatccattagcatcaagtagtagcgtggtgacaagagaaatagtagacgcacgtatggcagcaccacgcagtagtgacagtctcgccttggagctcggttgttgcgatcgaccatgccagccagtcactgggacatacggatggactgtaggagaagcggctggatgaggggccgaggcccagttggagggttggcattctgtgaagcgcgggtctgcagggtcggagatgaggactgggactatttctgtggtggagtgcgaggttgttgtgattgtcgtaaggtcttggatactgcagtctggaggggggataaagggcgttgtgagtgacatggtaggctgtggtttgcatggggtgccactgtctcagtataacgcagaaaataacaagaccactagtgggagtcttgttccagtatccagttatttactttttattatccttggaggctgtgctacagggttggagtaggcatttatttccagtgctcccataggtggaatttgtataatgatcaaaccacaccgcaactagcatccttaacaaacttcttatcggggccctaaactaagctgaaatggcttttcaagttggattcatattactgccatttacctatgttccttgtaccacgactccgacatgcttacgtcctcagtgagaactgtcctgttagcaaacaggagtccattgcgcaggatacactcctttcaaggatcgtagttcgcagaaggattattggaagttgtactgatagtagacggggtgctcagaggacgtgctgtagagccaagttccaacgatacttcgatgaggaatttacgggccacatgtatactaatttgtgactgttaaagtcagtaagaattcccaggtattgacctcaagtaattagaaacgcaccgtattattgtagtcatctcaaaatcagggtcactgcaggcaagcaatcagcaccattttaaaagatatagaagaacacatactctatcatgtcgtcagcgacccagagtcatatattctcaaagtatcccggagccccagaagcgatgtgcagtatcggatctgcgcctggaatgaggtaggtttgttccattggtcagagcaggggactcgtccggtgccaactcagtcccagtcgcgcctccaatgggagcataaacatctattgcatgcaagtattaatgttcgtgaagaagacactgttcttactcataagaactaccccagctgtgtctctctttgttatcaatagctggtcctgcatgtcggctgttccctcatcccctcctcgcctttaaggctacttgtgggttgctgagattgtatcagcatagatccactttgacggacggaaggcgtaccttgtagtggagaaagcattaccatatgcagcaaattgtgaccaggcctcaccatgaaccttcacatctttagggattgtgaccgtttcagtcaggatgtaagtgctcgagttgacaaagataatcttcctgctggtgccgtggtcattgaatatctgctgaacggcggctgtgtcattggtgcttcccttgtctgtttctgtcagccataagtgacacataattgaccgtggagttgcattcctatctacatcgcgattggacctggagacataccttgtaatctgtattacctccccaaggtaaaatccccgacaagtgatgtctttcatccaaaaggttccgtctgcgtgcttcgccagcttagaagtcccattagccaagccggccgccataagagctcgcagcaggagcaatctctgtagtaatattcaacagtggaggaggagcgtcaatcatccagatccctcctagccagctttgtgccaggctttaacttgtatttgttacgcgcgggcttatacaggcgcgccctgctgagcttggtcatccaggcaatgacatctggacggtcccccagactttgtcgatgcttacatggccggagcaagcgtcgggtgcaggttgggcaatgtggcggatatagcgcatcagcttcttgagatgctacctcgagtcgttgcgtctgtgttccttgattgtatcagtataatagtgagagcaatgttcgggttcagcgcctgaaactttcagtatcttttctttttaggtgtccccgctccctccagaatacactgttgagagctagcacgttttaccttcgccaaatagttgccagcggttacggagtagaataaatgaaatagcggggtgaatggaacaaaaataggctgtgaaaaggacaaccactctcctgacaggttatttagttaaatattcctgctacagtatgtagatggtgcaatgtccccagccaagcacttggattgctggacctcactagataagttcgcaagattggttgacagtacggctcagcagttagattcgcataagtataaaaattgcttcaaaaaaaaatatcgccactttactatttacaactaatgcaaattaccaatccaaaagcatgtactactcaactaatttgaccctagtcggcaaccccagtgacggcttagccgtgacatccaaaacctgatacatgaatgtcccctcttcgtaaacaatctcaaaatcaaaggtcctcaccgtcatcactagggcaatcttgagttgcatcaaagccaacgtctggcccagacacatccgtggtcccttctcaaacggtctccacgcgtcacgcgggacaaagtatggatcagtgggatcattaacgaggtgcctctcgggataaaatctctctgcatccttgaagagatcttcccggcgcatggtggcacagttgttaacaaggaccgcgaaggggtatgtgggccattctttgccctctgcaaaaagggtttggtctggttggccgcggcgaaggctgatacctgttggaggccagagacgaagagcctctttgatgaccgcaagggtgtaggggaggttgttcacaaggttggggtcgtcgcggagaagatccgccgcggcggaagggtcagtgccgaagagggcgttatgttcctttcgaagggtgttgaggacttgcgggtgtttgcttatggccgcaaaggtatactgactattgttagcggtggacaagaaaagattgcgaaggactcacgcatagagtactggccgaggtgtcgtgaccagcgaagatgagggtcttgacggatgtgatgagcatgtcccgtgtatacttatccaaagaagaagtatgtggtatatttttgttcagggtgcggctggttgcaatagcatcgtcgatagcgtagtatttggtcttctggtctggattggcagcagggccgctgacgactcgttgatcaaccagacgaccaacataacgatctaaagcacgtccgttgctccacttcctatagtatcgacgggggctgacgtcgtaaagataccgagaccaaaagtcctgaggcgccaaggcggcctgtttccggaagagttcgagaaactcatcgtcatccctctgtgcgttgcatttgattcccctgtaccgtgtcagttgatgcttgacaacaataacggtctgcagcttacaagatcaccccagctgagatattaaatatcatcctggcaaccagatcttccattttaaagatatcattcgatataaaatgtatcattagaatcgtagtac

SEQ ID NO: 67 - DNA, 9419 bp, Emericella nidulans
tttccatatcacttatgaaatggcattgggccagtttcgacgtacacgactatgcctaggtatggtcaatatggcgtactctgggccgttgggcatgtaacgtatgcagcccgactctgtgagcgcctattgcaggcctgtggttggtgagtacaagcgccaggctacgaacataaaactgcttcagccccctaacttcagctctgcttacgtttccaccttcgggcattattatcaatactagcacagcaaaatctgcttaaaggtccgccctgaaccctctggtaacttatgctgcacttagcagacatgcgaccaacaaggcgagacgattttgcaatcgcgattatctgcgcccttcctctcgaggctgatgcggtcgaagccctgttcgatgaacattacgaccggctgggaaaatactacggcaaacagcaaggcgacgcgaatgcctacgttaatggaaggattggcaagcatgatgtggtcctgtgctacatgcccggaatgggcaaaggcagtgcatcaagtgttgcctccagcttacgagttagctatacaggcattgagcttgctttagtggttggtatctgcggaggggcgccaccaccaccaaaatatcaagaggtattccttggtgatgttattatcagtgattctgtgattgaatacgacttcggcaggcaatatcctggcgggtttcagcggaagactggtgtcagggacacactgggcaggccaaaccgggaaattcgggctcttctaaacggccttgttgctgagaatgcgcgccaggaacttcagaaccagacacagcaatatcttcacgtgctccaggaaacaaagactaaatggggccacccaagagtcaatgatattcttttcaaggcctcctatcttcacagacattctggtcatgcgttttctgccaaatgtacttgttttgagagtgacttacatggacaaatttgtgaggtggcgctagggaaggactgtgatgacctcggatgcgacaaaggccaagcaatccgatgccgagaggcctcgagtgctatccaaacttccttatatattggaactgttgcctctgctgacacagtaatgaaatctgcacagcaccgcgatgaaattgccagcaaagagggggttatcggctttgagatggaggcggcaggagtgtgggataacattccttgtatcattatcaagggtgtatgtgactatgctgacagccacaagaacaagtcatggcaagcgtatgcagcagcaactggagcctcggcggcaaaggcttttctagaatactggacgccttccactcgcaaaacacagggaacaggaggcctaatgtcgcctttccaaggaatatattctcctacgaattcccccattgctggtcggaatataggaaatgttaactacaacacatattaccttggaggcagttaaagaagtaatccggggtacgctgccggatattggacctttttacactatccaaaaaacgcaatcgtcttgactcgttcgaagccagtctggaacggcagagcatacctatacaacgtttcaaagacggtggcaggatctccaatggcagcggttgattactcgaaatatagcgttagtgttgacgcgggtacaggacagaacgtcatcaacctggaggacgatacagtattgaggaaaaatagtcatatcaaaatagattcagtgtgaaggccgtgaagatgcgccccatgtttgatatgattaaatagcctcgttccaccataagtaggtgattttgatagcaagcatcttggtcagaacttagctctccaaggagggtcagccctttctagctgagtgggaagctcaacagcttcattcaacttctcttcttcttgtgaaagcccggaaatctcatagttcgttattttacctcattagcatacccaagtgcagccctgaggttgataggacagctatctgacggcttatgcacattgcccagttttgggcgcagctttgttattaggtaatcagctgtactgatgctgatgtgaggctgctacaggaaaacatgaaaaatgttatcagaacatgggattagattcgattcataagaccatgaaacctaaaacgtagacaataacccttccctcgtagcatgactaagactctagaagattataggttgtcatactaacgtggactgtagtctactcagcagtatactcgtcagccagccttcctttacatattgtgggctatggaggtggttactggcgtcgaatgtggtcatgtatttgatatctgtaatgaataactgtattgaaggtcttgatctcctagctacgatatgtataggcaatttataatttttctaaggcctcaaaagaagattctcgatatctgtagatagttcattttatacgagcgaggtgctggatacggattgtaagggactttctccggctgacacatatgttcaggccgccggataatggcggctaaatcgcaattgcaaaatccttgctcttaatagacaaccaccaaagattaccggacacgttgcccccttagatcaaggattcatggcacgaggctagataatcgagttccaagtcaacagcaaaatggtgttcttttcccacctgcttgttcaactattcagtaatctctgttaatcatatcttccttaccgcgaggcttgcttgttatacgttcactgtaaatatgagcaacactcttactaattttcgaggtgtcgggcaatctattaggggcacaagaactcattatgaggtgaccgatgcttcgtgtcccacctgagcggctgaagactgaattgtatgaaaggacaaagttactcatactgcgaaaacccaaaacgcgtcagacgttcggcaagtgattcacagtcctaatgaaacaccagttgcgggtcgcgatattgcaaaaatatcttatggtacggctttcttgtttgcgccaatatgtatcaatatccactgataggacttatgctacaacaagccaactctacaccggaaggcaataaaggctcaactcaatcttctgagccagctaaagactctaggggggttgaggacagcagtctacctgcaaatcaaataataacttccccggtgcggtcacctgtcgctcggcgtgacataggcagcatcacttactgtgagttatttcgttattattggacatggaaatagaagctgctgcttacagctttgttcaactaggaacttgaaccgggaagagcttttgttgtgctttgaccatgcgtgggatttactgtaaatgcgagagtccgtatcactatagaacggaacgtaccttcctgttcagaagtccagtacatgcctttacagttggtcctggttattttcaagtctcgaagcccctgtcctgtatgtaaatcggaacgcagagtgcaatcactgggagggtgttgctgttaggacccgtttactcgtcttcttcccagatgagtgctgtatattatactcggcgtcatttgagggttgcttgtagttcaacagtcagagagtctttcgcagtatttggagacaacttgattgtcttcataggcaggcacgagacttgttgtgggactttgcatgtgctcaggggaaggagcgtagaatgaaaccggaccgactacacgtaggtacctatcgaacttcccacctagccaaaaagaggttaaccctccttggagagctgagttctgactaatgtacttgttgtcacatatcaaagtcgcaagtgctccgtcagtggaagccgcagcgtggtagaacagcgccgtgcacgccgcccttccgcaagtctattaaaatcctgccccaaaaacgtgacctagtatgtgaaaagcgagtctgttatttatgaggcctctcggggatgaagtccggtatcatcgtttccaataaacattgaggccaagcgtacaggacctcccaagtcccagaagctttcgccatgggacaaagcacttgggatagtcaaagcgcaaacacgtcacacagtgcggcacgtgttgtctctacccacgaagtaaatgcaggcgggagggacaacgcgttctactacgccccagtctgactcattaggtccttatggatttgaatccacctgatcatcccttctgagaaggttatagaaccgtctgttcttggctggcccgttcaaatgatatatgtcagtccttgcgctacccccttctccgggcggttactgcaggcctgtggttggtgagtaaggcgtgaggctgcgaaacccctcagtacggcagactgttcgccgtacctcagctctcccgtaacttcagcttttcttacacttcatggtcagatattattgtcaacactttggcacagcaggatctccttgaattttctattcttctgatactctgggttgcctttgcaaaatgcgtccgagtagccgcagcgactttaggtgtttcactcgcgaagcacatggaccaacaggccgaatgccgtcttctcaaggaatcttttcacctagaaactcccccattgcttggggaaatatagagaatatcaactacaacacatttaaccttggaagcaaccaaagagacgacccgtctagagcatatgccgcgaatcacaaaggtcagtgaaatgcttggtaggaggttttgtgatgtcacatgtcttactattgattatagatacggacagaagtcgtcattttatggttccctttggaaaaaatcgtcgtttcgtgggccgccaggaagaaatccgtgaattagaagatttgatttcgaagtctgacggaccaaaaacggtcgctatttttggattaggaggagtgggaaagactcaggtagctctggagctcgcatatcgcacacgagacaacaagcctgactgctcggtcttctgggtcccatgcaccagctacggagctattgagcaggcctgtttggagataactcggatagtggggttacaggatgtgaagccaacagaggcaatagagcatctcaaaacgtacttgagccaaactgacaagatgtggctcttgatttacgacagtgcagatgatgcagatatgtggactaaaggtagtaacaacactccaccattaagggacttcctgcctttcaacaaccagggtcatgtcatctttaccacccgcagcagagagttagctgtggatttggcatcctctgatatagtacatgttcgggaactggacgaaaagactggcatggaatttctggaaaagtctctttacaagggcctgtgttgtgattctcatgtgacatctgccctgcttagccagcttaccttcctaccactggctatcagtcaagctgctgcatatatcaacaagaaaggcattgcagtatctgattacttaaagcttctagagcaacaggaggcagacgtcgtggaactcctcagcaaggattttggtgataaccatcagtataaggattcacagaaccctgtcgccaagacatggattatctccttctatcaggtgcagaagcaggacccactggccgctgaatatctatcactgatggcatgtttcgatccacgcaatatcccgcagtctttacttccacagtccggatctagactgaggataacggattcgttagggcttttgagcgcgtattcttttattactctccacgatggaaatggcttgatcagtcttcatcggctggtgcatctggccactcgaaactggatgcgaaatgaggatcaattttcagcatatatccacaaagcagcatagcgattaagcaagatatttccaaatcatcaccctgacaaccggctgctttggagggaatatttgccccacgccctgtccttgttaagagagcgggagttccgcgagcagcaaaagaattatactgattgtgttcagagggtgggaaactgcctatacagcgacgggagatataatgaagctgaagagctgcaggcgcagataatggcaactcgaaaagaagtgctaggatcagagcaccctgacactttaactagcatgtccaaccttgcatccatatatcagaaccagggtcggttgaaggaagccgaagaactgcaggtgcaggtaatggcaacttttaaacaaatattagggccagggcatcctgataccctgacaagtatggccaaccttgcatccacataccggaaccaaggacagtggaaggaagccaaagagctgcaggagcaggtaatggcaactcgaaaagaagtgctagggtcagagcaccttgacactttaactagcatgtccaaccttgcatccatatacttgaatcaaggttgcttgaaagaagccgaagggctgggggcgcaggtatttgacacctttaaaaaagtcctagggccagaccatccctctactctgaccagtatgggcaaccttgcatccatatacttaagtcaaggtcggcggaaagaagccgaagagctgggggtgcaggtatttgacacctttaaaaaagtcctagggccagaccatccctcttctgtgaaagatatgggcaaccttgcatctatatacgggaaccaaggaaggtgaaaagaagccgaagacttgcaggagcaggtaatggcaatctctaaacaaaggctagggcaagaccatccctctactctgaccagtatgggcaacctcgcatccacatagctggaaccaaggacggttgaaggaagccgaagagctgcaggagcaggtaatcgcaacctctaaacaaaggctagggccagaccatccttctactctgaacagtatggccaacctcgcatccacatactggaatcaaggtcggtggcaggaagccgaagagctggtggtacaagtaatggcaacacagcaaggagtgctagggtcagagcatcctgacactctgaccagtatggccaaccttgcatccatatatcagatccagggacggtggaaggaaaccgaagagctggaggagcaggtaatggcaactcgaaaagaagtgctagggtcagagcatcatgaaactttggctagcatgtccaaccttgcatccatatatcagatccaaggacggtggaaggaagccgaagagctgcaggagcaggtaatagcaactcgaaaagaagtgctaggtgcagagcaccctgacactttaactagcatgttcaagctcgcatcaatatactggaaccaaggacggtggaaggaagcagaagagctgcaggagcaggtaatagcaactcgaaaagaagtgctaggtgcagagcaccctgacactttaactagcatgttcaagctcgcatcaatatactggaaccaaggacggtggaaggaagcagaagagctgcaggagcaggtattggcaacctctaaacaaaggctagggccagagcatccctttactctgactagcatgtgcaaccttgcatccatatacttgaatcaagagtcgattgaaggaagccgaagagctgcaggtacatgtaatggcaacacagaaagaagtgctagggtcagagcaatctgacactctaaccagtatggccaaccccgaatcaacatactggaaccaagaacagtggaaggaagccgaagagctgcaggagcagatattggcaaccttcaaacaaaggctagggccagagcatctctctactctgaccattatggctaacctcgcatccacataccggtaccaaggtcggtgggaggaagccgaggagctagaggtgcatgtacttgcaaccttcaaccaattgctagggccaaagaatccctctactctgaccattatggctaacctcgcaaccacataccgaaaccgaggtcggttgaaggaagccgaagggctagaattgcaagtattggcaactcgaaaagaagtacttggcctagaccatcatgacactctgactagcatgcacaatcttgcccacacttggaaacaactaggaaacactcagaacgctttagatctgatggaaaaatgtttacagctccgcattaaacttctgggctcagatcatcctcataccagatccgcctccaatactctcaggcgctgggagatacagactggcttatcatttaggatttttttgtcgatagtttgcattgtcttggtcctacgcgccgtgatcatgagcaatcatggaaatgaatgatctcatgatggctttggcggactctacgttcaatggcgtccaggaactgttaatttgacagttccgcaggagactctatcaaggagcctaaaccgctcgaatactaccgccccaagccgctgcgcttgtggtgttcaaccccagcgaaatgcagagtttggtttgccgtccagtttatcaggaggcggaagcatgcttgcagaccgaaaggggtctactgaaaacgatccccaaggtgcgccataagcatcgatgtcacttcttttcatttctctcatttcctgcgcggcattaactagatctcccattaatatggggatcggattcctcagtttatgcaaaagcagtgctatcacctctgtcccacttccttcattacctgctgtgattttgaagcacatcctcagtaacaccctcagcagtcgcgtttcggtattcatggcttcctctactcctgctattctcttctgcagctttgtccttatcctgctgtgagctcgagcacgtcccatatctacgtatataaatgtaatcaaaatacagtatgatacctatttaggtgtgtcttggcaacccggcgggttgctccgccgggctttggcgcagccaaaagtatcccaaacccaatgggattattagaaggtctaacccaacccaatccttggcgggtcggggcgggtttcgcgggtttcgcgggttgggtttaacaagtctgatcgagatctcaatgctagtagaatcaaaccaagttactctttttatgctctgggctatagggtttttgaggtaggttatagctccactgacctaatctaaccagatatagttagttttatgcttggcggggtttatgggttatctactgatccgctccaaaccccgccgggcggatcagggtatgccgaaaaccgacccaacccatagtttaacaagtctagtcacagcagatactcaaaatatatttgaatctaaatgttacctatgtgtaatatgtataaatctaagataaaagtgaccctatatcaatataatcttcagctggattttattgtcaaaactagattaaaactggtaaatcgaacagaatcgtattcttacgtacttcatttttaaagaactacagctaaatagaagttctcagtacctaagaacatttaattcgtgaaacagggcataattaattatgaactagccaggtgtggatgttgaatctaagaacctcaggcaaggccgaggttc

SEQ ID NO: 68 - DNA, 7129 bp, Emericella nidulans
gcgtgatatcactgcctattaccgccgtagaaatcacattgtgggtcaccgactgcgtcaaagtgcaggctgccaccacatggagggatcattgacgcagagtcggccgctagtctctgcatcgggcgcagtagctgaacccagattaggcaacatttggatatgatctagttgatatctttctgggtgcacaatgagttatttgatgaagcaggaatagcgccggccgctagcctgttggtgctatatccgtgcaactatactgcctagcccatgcgatgaagcgcaagtcaatctacaggatttttgagagcataagaggacacaattttcccgcgcagacgaggatgtttccataatactctctcctcccattcactgtcattacttgcaatcgatatgcctacttcgaggacgcttctagtacttggctctggccccggaattggtgtagccgtggcatcccgttttgcccaagagcatttcgattgcgttgcaatttttgcccggacaggatcacagctccagctggaccaagacgccatccacaccgccgtacaaaaggtcaggcgcgaggtggttgtcaaagcatggcaggtggatatcagtaacattgatcagctcaaggccgcattgaagcaggtcgagtctttcggcacagttgaatgtgtgtatttcaacccagctcgagttggtgggagcaatttctttgattttccgacggaggaaatgaaaagtgactttcaggtatgtccaccgttcatatctgctagccaaacttcaatgagtaactgggaccgagatttctgtcattgcgttatatgtgacggcgcagtgggcagtgcccctactgctcaagaacaaggagaagaaccctggactagactataagccgtccatccttgtgacaagcagtctccttcccgtcgacccgataccagagctgttctcgttgtcattggtgaaggctgcacaggcaaatatggtcaagtcactagagaagatgttcagggctcgaggtatacatattgggatggtaattgttggaggaatggtttcaccggatgcgacgactctaaatccgacaaacattgctcagagagcttgggagttatttcagcgagacgaactgtctgatgtgactattttataggtatgagtcaatttacagacatcaatcatttattgaatgccgaagtgctctttgaagaactggaccatctcaatgaagtggtaccaattgccccttgtatggaatatgaaccggaatggaccttgagaacagtgaacctctgaaaatactagaaatttatcacgaatctcctggtaatgactttgaagagagttttctacacaaaccccagtaaaataggaactgttgtgaatgctcagaggggatggggcagaaagaaactgtatcaagtatcaactacatgaatgtagcctaacccattggggcagaactatgcagagcatcacttcgaaggttagtagggaagtcttggcaaactggttttgcatcattctgcacttctccttttgcattgctctgtggttttggtggccaatcaggcttaaaaatttactgtaggctaggacaacactttattgtaacagagccagatttcagctgttttggacatcagctctggctatagtgttgagccaaagttggccagtactggtacttagttttgatgggtgatctaaaatactagctatacagaggctagataggttaacagtataagtaaataacaggagattctggtcagacctggctgaaaaacatgatctcagctctgattcttccctgcaaccagactgtcgagtaagcatggacccctttattttggtaaaagttcctgaagtaggtattattgtgtgctgtcagtgcctgcatggtatttgtcctactaaggcagaggctcatctttgcaagaagcatcaccttcaaagtactgtgacctggcagattgtgcagacagttaaacaatagcatgatgttggcctggacccaaccaggtatatattatatataagcttgacatcccagttcctctgatcccagtacaccatagtcgaaaatgtgcctacgacaatgaggcaccccggttctgatgcggctcagctcggcatactcatatattactatatggtctatcatactatgcagtgtaaatcttcgtagcttatctggttatgtgtagatagtgtaagggggcaatatgcttgttctaagctatatactgctgtatatacaaggaggtttgctaagaaagagaaaaggaaatatctggtatgtagtgtgaaatagggaacctgttaagcgagtatccgcttgtacaaggcctttgggtacaggtataaaaaaagagagattattaatacgcaaggcagcacgttgctttgatatgcctaaatttatactgtatacgtagacttgtttaaaccacgggttggggttggttttcaggccctagctgatccgcccacgcggtttttggggtgggttacctgaacagtaaaccgcccatgggtttagcaaataattctaacccaacccaaataacccaaaataacccagttatgcatatcattactttaataagcggtaatctacccagctaatgtaatactgtatttaaatactgtattataaaccatctaagtgtaatgggacgtatttagatggatcttcctcttcctatctagacgtgccgtacgtacaagaaggaatcgctgaagaagaaaggagaaagaagggcgacgagtcggccaaatacccagcagggcagcttgtgctcgcgggagcgactttcttttgtatagggtctgatatccagggccttgtaggtttcaggcgccttactagcatatgctgtgtacggagccactgttttgcctcccgtcgtaggtacgctggggaagggggtatgtcggtgctgtatataaaagacctagcttagccagcttgtctgccagctcattccatttattccagagtggcctggaatccagcggacctgaagcgtttgcttccgttgcatcgttagggttgaagtggtttctgttatgggttactcgtacgaagtaaccctcttcgggactcggttaatcaaaggcgtcgtacaagcggatactcacttagcgggtctccctatttcaacccacacgctggatattgcatatacggcagcatatagcttagaacaagcatattaccccctttcaattagctcccgttttgattgacgtgcttttggtgatatcatgggtggtcaaagatacattcttttcataagtatgctgattacctgaatatttagtttataaatcatgtttgtactgttaacccgctcaggcgctggccatgagtatgggactgcattggaagcgatctgggaagaaaggaagaaatggtagactgaagacttgttggacagttgaagagcagagtgagggctgttaagtagagatgcagccttgcagtcagcatggctgtaggtagggtttctgaagcctatctgacattgaggattcttatttgatctgctctattctacaaggccctagacaaagtctccattcttgccgcattcgacttgtagccacgccaaaacactccagtctgtaagctctggctccctcaggtcggcgttcaataaaggctcgtcatcgtcagtgccatccgagcggcctgcttggacgctaactgcacagtacggctcgtagaagaaaggaatagattcaacgttgaggtagacatattcaccgttactttcagaatgttcctcctcactctctttactcttatcctcactctcgtcgcactcgccatcttcgtcactttcatcattttcatcactctcactatcttcagtatcttccccatcgttagtatcatcagtatcatcggcatcatcactatcatcagtgtcagcagtatcttcactctcgtcactctcattgtctggccagccgttctgctggtcatcgtggacctttcgcagtatcccgttagcatagtcgagtatgcttggggcgaaatgcgacaggctccgatcgacgagactccagtcagcgccgtgcttcatcaagagcttgcagatatgcttatttctcagcaacgcagcggcatggagggcatttctacagaagccagccgtcacattcacttctgcccctcgctcaagcagaagctgaacaagctcgtagttgcccgcaacgcaggcggcttggagcgcagtcccatacttcccccctttggcgttgatatcggcgccgtatcgcagcaacaagaggaccaatggtatggagtccaggcccttgactgcagccgcctgcagtggatatccgtataccccgccgcggacattcacatcggcacccttcttcagaaggacttcgacagtaaagaggtcacatttcaagatgcaggctgtcaatgcagagccctgctttccacccctccgatggatgtctgcgccacgacggttgaggtaccttactgtgacaccggatccgctgatggcagcagcctggagcgcggcgccatatctccccttgatagacaggcccaaatccgctccgtgtctaagaagatagcggatcattggcagtcgagccagactgcaagcgtattctagaggcgatccgtggaacgagtttgccatgttgacgttggcgcccctctccaccagaagcttcaagatgtccattctctcggctttaatggcgccatggacggcagtaggatagtacaagttgccttccacgttgacgtcggcgccgtgatccagcatatattccgcaatcttgtactcgtttgtggcagctgccgcgatcaatggggaccctctgacaccactgcgacagttgacgtcaaccccagctttaagaaggatcaaccaggcatcgtcaccatcacctctctcggcaatacaggcttgcagcgcggaaccgtgctttccgacgggacaattagggtccacgccatggcgccgcaaaagctcgtcaaccaacgtctcgcaggacccatcaatagccgctcctaatggcgttccaaactcaccaccctggagactgggggaagcgccgtacctatataacaggtcaagaattccatagtatccgccgctatacgcagccgccaccgcagtgccatacctcccagcaacgatatttgggtcggcgcctcgctccagcaaaatctcgcagatatcagattcgagtccataagacgcggcaattaaagccgttccgtacatgcccccccgggcgttgacatccgcccctgcgtcgagcaaggatcgtacaatgtttggataaccgcggtacgctgcagcatgaagtggaaagcagtcgggcttgtggcctatcgcattgacatctgccccatgctcgatcaacagccgcaccatgtgcttccagccagtgcagcatgctgccatcagtgcagttcccatggtgccgacttgaccacgattgatatcggcacccgcctcgaggagaacctgggctgctccgtcggacccctcaacggcggcagcttgcaggcttgttccgtgtagaccacctacttcatccacttcacttcctgcatcgatcaggattcgcacgaccctaccgtggtctcgaaaactggcgacctggagtgcagacttgtacttggcgcctttgagctcgtcggagatattcgctccgaggctgactaggctcctcgtcatgtcctcacgaccgtaccacgcggctacctggagcgcagtcaagacgccgctgtcgtccgggtcgtcactcggatcaattgccaggttgatgtcagcaccgtggtctataagcaggctcatcatgctctcatccccgttcgtaattgcaacttgcagtggggtatagtaccagtcgttcgtgatattgacatctgcacccctgcgaatcatgtccacacatagatcatagcgccctttgaggactgcggccccaagaggagtgccaccgccagcagcggcaccgttcgtagcggcgttgatacccgctcctgcgtccagcagggtcttcacaacctctgcatactccctgtcgctgaaaatagcggcaatcagtggacaaccgtataggccattggtcacgcgtttaacgtccgcccctagttcgagaaggcgccagacggtctcaagatgagactttcctgcggccgcttcgagtgccgtgcattttgggtaggttgccattttactaacactgtcgatgtcggcccccatcttcacgaggagctcgaccgttgccgtgtgtcccttgcgggcagccaccatgagcgcatctgtcgtctcagtggtatcgcctgaggggactcctaactcgaactgtttcggtgtggccgtgttgggcggcacacagcagtgccgtccctcgatcgcctgcaggcgcgttcacatccacgcccacttcagccaaatgcggatcacagcatcatgtccagccacagccgccgcctgtatgctattaccgtaatgctcatcaaagtaatccacgtctgctccggcagttaggagacatcgcacaatctccgcattacctgtggagctggcagcatttagcgcattacggtgtcggcccccctttgcattcacgtcggctcccagttcaagcagcagctcgacggcgtccagtctctccgctatacaggcggaatagaggctgtcaggcctcttgtcgctttcatcgttgaccttagcgccacatgcaaccagggatcgaatcaagtccagcattcccagtgatgctgcagccatcaaaggacacccataccgtccaccaagagcattcaggtccgctccccgctcgataagcaactcaacaagctgcacgttcttgcttacaatggccgatgtcagtgggtgtccgaaccaaccacctcgcttatccacatgagctccgtgactgaggagctgctggacgatttgcatatgcgacttctcggccgccgcggccaatggggacccgtatcttcggcaggtaatattcatgtctgccccatgctgcaggagggtcgaaaccacttgttgccggccttcaatagcagcaacctagaagcggtgaaaatgtttccgctgggcgcgttgatatccac

SEQ ID NO: 69 - DNA, 3232 bp, Emericella nidulans
aggggatgttataattagtgactctgtggtacaatacgactttggcaggcagtatcctggtggctttgaaaagaaactgggcgtcagggacacgcttggacgaccaaaccgagctatccgttcaatactggcaagtctccaggcaaggcgatcgtgcaaagaccttcaagataagctgctacagcatctacaagctattcagaaatcaccatctgattggcaattcccctctattgatgacatcctctttgaagcttcataccaacataagcactatggctttacttcacccgcgtgtccttgtcttgatagcatgtctaaagatacctgcaagacagctgtcgaatcaccttgtacttctctaggctgtgatatggaccgggtatgtcgacgtcggcctagcacagaacactacagcccaagagtacatattgggacagttgcatccgctgataccgtgatgaaatcaggcgaacaccgtgattgtttggtccagtcagaaggtgttgttggtttcgagatggagggtgcaggggtgtgggacaacatatcatgcatcattataaaaggggtgtgtgactatgcagatagccacaagaataaagcatggcaagtgtatgcagcggcaactggagctgcggctgccaaagctttcttggagtattgggagcccactgctcgagaaggttagcaaataaacccgagatcagtgtagctgtatgctaaatattcaattttttttagacagcaacaaatttcgcatcccgctagatctttcagcggttcctgcgattgaggagttcattggacgagaagaagaactaaactgtctatgggattatctacaaccagctagttcacagacacgaaaggtggctgtcctccatggtctgggtgggattggcaaaacacaactagcaattcactttgcacgaaaacacaagaatgaatttacagccatattctggctgaacggcaaggaccaatctgccttggtttcctctttaagttcttgcctctctcagatacaaggacagcctatagaggatcaggcagtcaacgaaggggaagctgtgcaaagggcaaatcaagtactacagtggctagcgaggccaggcaatactagatggctcatcatctttgacaacattgaccagtattctctaatccaaggccgtggtcactgtggatacgatgtctacaaattctttccaaaggctgatcatggatctatcatgatcacttcccgactccaggggctcactgaacttgggaagtcatttccagttcagaacctttatacaaagatgctacacagctattgttgcaaagcagcggctttttagctaaagacattgcacggatgggagctgaacaaggtactgtactattagctagatttgaagaccatgactaacgtcaacagaccttataaatctttccagcttgcttgatgggctctcgctggcaattgtcatagctggggccttcgtacgtcaaacaggaacaacttttagagagtatttggagctctaccggacttcctggttcgacctgcagtctcagtcggcacccacacgccagtaccggcaaggaaatattgtacaaacttggattatcacctataaagagatccaggaacgtgatcccactgccgcgaaactcttgcttttactcgcattttttgataaccaggatatctggtatgaactaattcaaaaggggttgcaccacttgaacccgccccaatggtttgagacagcagtgtcaaaaaaagaaaagtaattcaaaacttcaaatctaataaggtttatattactgtatttagattatattttcttacttagatgatttataatacagtatttaaatacagtattttattagttacgtagatcactgcttattagagtaatgatatgcataaatgggttattttgggttatttgggttgggttcgaattatttgctaaacccatgccaccccaaaacccgcgtgggcggatcagctaggcctgaaaacccgccccaacccgtggtttaacaagtctagcaaatataataaattacatttaatttcttcagctgctataacctggcaaggaaaagagaaaatttcccatgaaaataataagttctagctagttttttttttttttttttttttttttttttagccgactaagtatgtctggagcggcgcccctatagaacacatgtctagtatagaagcatctaaatcaaccctattaacacagcccccgcaaccgcaggcaatacacaaggtgctgcagtcctcatagctgcccacccatccgacgtctccgtagcaatcgtctctgttggtgcgggcgtatacgccgtaactgtctcagggaaatccccaacaccaccaggaaactgcggtgcctcggtcccaatttctaatatttcatcttgcggggaattccggttaatcggcgcgattccgatcatcatactattgtagtcgacggcaaggtacaattgactcagcagtgtactccccaaagtccccgcgaagagcggatcttcctcgtatggaggctggatatagaagtagcagatcccttgactgggaatgttggagggatgcaggaatgcggtccaggggatatcgaacgctgcggagccgattaagaaggttagtgtgtggttctcggttttgcgactgcaagggatttccggggcagtatagtatccgtcgtctcggcggttggttgttaggttgagcgcattgtagatgatcattgctgtttcaagaggtacatatgtggaaacatatctggtttgcaggtcgaagagtgtttccttgaaggtggagtttataaggacttctgtgctagagaaatttgcagtagatggcaggccggctgcaggatcgacgtgaatctggacgccatgcacgggaagggtcatggaaggaagggagtccctgaaggaaaaggcgtggagaggcccaatgaatttggcagcgttgatgccgccgaataatatactgccgggactgtggtttgggtgttgttctaggtctgggtctgcgtcttgaacagcatcccgccacgcactgaatgatggggtattgataaggccgcggtctaccagctggtaggggaagctggtattggatggaccgatcccgatggaactgtctgcaatacttcagtcacagttacgtcagggcgggtagcatggtagtactcacagctagaga

SEQ ID NO: 70 - DNA, 6004 bp, Emericella nidulans
atgctcgaatcaagacttcgggcgagctcgtcacagagagagaggtccagatattgattggatgctaggggactacagtcatgtcgcagcaatagctacacttttactttggttgtgattgctcctaaagagcaatagggaaaatcaatttaaatacccagttgtttatgattacttatattgctaatcaggatagtctatcaggcgatcagaaataactcggcaattagtttcagccccagtgtgcacaatctgggtcagcattgcacagccctctcagcttccctactgatacctcctcacctattagaagaaaggacgataaacaagtataatctttcgctcgctaggaaactaggcgaccttgttggttgcgtaaaaagaaaaggtaaaaaaggaaattgaaggcccgaaccgcgattcgaacgcgggacctctcccatttctgatacatgttattatgtaccgggcgctgcccccgaagggagaatcataccactagaccatccgggcttctgttgtaatatgcggttttggactgttctgtattcctttctgtcattttctgtccttttcgtattgcattttaatttactttagtattgatttttgttgccgtatccgtcatatctgctggcccatcccaggcagagctcatcctgggcaccgtactggctcctgcctgatccagaagaggaaagcggttgggcgtcgggcagaataataaatgatatcattagcgatagcttcaaaacaacacaacaatcaatcatacttcatacaatcaatcagactctttgcagaattgcaacaattttggtgtcgaaacgcattctctaagtgtactggtacagatgtcttactttaggccgattactaaatcagaattgtcaagcccacaaatgtatgacctttgctcaaggagcttcgttatgcctaaactgccaaatctgcagaaatgctgcctagaaactgttgagagagagctgatgaggaatgaccatacgcgcaaccgttcatcacttggctagtacaggcggcgggtatgcccctaagcaagaagcatcgtggtggatgtagtagagccacatgctctcatcaattgcatctcattagaaaacttaacgttctcgttgacttttcaggcaggcaagcgaatatctatcgtgtgagggctttgtcgatcagtccgatcttgccggtacagtctcactttcgtccgtcagtcaggtaacgggctgctagatagcagtattgtggagtaagcaatttttttttttacactttttctgtgaaaggcttatatgaggtgggatgaatgctccagtcgcatcgtgcgatttcagtattctattttactggaggaacccgcgacgtgggaagtaaaccgatctccaggtcctacaccgtatacctaaactgcggattctacaaacgttaggcagaaccctagccagcccggtagagtgaacttaccgtcttatccgtcaaatcatcctcataagcatgctcaaaaccctccagaatgcccgtcttgtcccgtcgtcgattatcccgtaaacataccacccgatagacgaagaccaaaaccccagcaacaaaggttgtaaccacggtgaccacgaatcccggaacgtaccgcgggtaatcctgctctcgaaaacagagcggaccaacgaaattgcctagacagtacccgatatacaagcccgacgaagaaagagaccgtttcgtgtagccggcgatatttgcgatttggagacccattagcaccgcatatccggcacccattgtgggcataatgtagcatgcgaagagaagtccgcctgtttcgttcagcggaaggcgcagaaggagtaatgaggcgaccatggtgaccagctgacaggcgatcaccagccaggaccggatgcctttgttcgcaaacttgtaggaaaggtatggtaagatgagcatcatggtacctgcgtagaaaccggacggtatgacgaggagaagactctctagagtactaaatccaaatgagttgatgatgattggggtaaaggtcgagatcggggcattggctatcatagccaggaacgcggtaaagaagatcagccagaacttggggtcgaggagcagctcgacaacctggcccattttgaagtgcgtgttgcggacgcctgagttgttagtcctcagacgcgcgacggagatgtaccgctcgcgttcggtaaacccccgggccgagactgggtctgggggaaggacaaagtcgaggatgagaccccaggtgattgtgagggcaccggcgaagagatacatgtacttccaagaggacagcgagccttggatatggccgaggccgtagttgacgagaggagagaagatgctgacgtatccggtgcaactataccagactgtgctagagtattagcagtgccgctcaagaagcaattggaatagagagagagacgtatcccatccggagagcctgttcgtctttcttataccagccaccctagacgatcagtaccttgtcgggcgctggatcatgagacgaaccacgatcatcatgaacattggactgattccactttccaacacacccaaaaagaatcgctgagcgtacagagaccgatagttgtggcatagaggggtgaggatcaggcatatgccccagatcgtgacggtgccagcggctacgtggcggatagggtatctttgagcaaggaacatggtcggatatgcgccgacaatgaaacctaggtagaagatggctgcagacattgcatatcggttaccgatgagcagattcaagtcctcacgaagtccaaacagagcctggcgtgtcaggtcggtcagtacagcacagtatccagtacctgagttagggttcgccggcttaccgcctgggagagcatagccttgtcgtagtactgcaatccgtaggtgaggcatagcaagggcagcaatcgccagtcaaccttgcggacaaggcgtttctcatcactcggctgccatgactcgtccccagtgtagcgagccagcactttcatggcctcatcggtgtgagtggtgtcgatcgcagggggttgttccatagtattctcgatatggtcgactttcccattgcccttgtcggacagactgtcctgtgtaaacgtgtccatcctggcgcgttgactgggagcagattaggtatagatatttggtttataaaaaagcagtagccgggctggggataggtgacctattttatatacaaggacgtgaagccgtgacagccaaggccggaacagctggagaccgctggcttaatgactaaatggagtacgagagacctacgtacaaagcacaggaatccagaggggaaagctaaggaattccggggaaagctaaggagcgggacccgtcagtagctagtatgagactattccaatacctctttagggtttcggctgctgtatcgctgacggtattcatgcttactgccggtatagcactagcctgcccctcctaggcttgaacttttctcctccacaatggcggggtgttgaggatagccgagctgccgtctctcttttaaggtatactgaccggtttaccaggtagctgaacatcagcttatcattctctggactacgcaccaatatgtctcgcaaccgccttcagatacccccaggggccagcataactgttagactcatcaaccccgtcaattttggccctagccggctagagcggttcatggcgcccaaggtcccgggactcgagggccatgcacaaactccagcgctctcattcctacttgaacacagctccggtcgcaagctggtttttgacctgggcatccgcaaggattaccagaactacgcgcccaagattgcggagtatatcccgacgacggggtacaagatcgaagtggagaagaatgtggtggatacgctgaaggagcatggagtggctgtagaggatattgagggggtggtttggaggtatgcgcaggcccatgtcatgcccccttctggagactagatagctgaaggcgctgaggtagtcactggcattgggaccatataggggacccatctacgttccctccaagtactgacttgattgtcgggcctggattcaaggacgctatgctcccgggctacccagcgaaccctgactcacccatccttgagagcgattatacgtgcgtccgccttcccagttccccttttctgctaaacgggacgcgacagtgctgactcagaagtttaatgctagcgggcgcaccctccgcgagatcaccttcgacgcgcaaatgttacgaatcggccaattcggagctatagactacttcgacgatggatccttctacctccttgatagtccgggtcatgcgattgggcatctctgcggactcgcacgtacaacagtgaacccagacacgttcatccttctcggtggtgatattgcgcactacgcagggatattccgaccatccgtgcatctgcctctaccgagcactataccactttgtcctggcccattgcatacagtagaggcaggattctgtcccggggctgcttgggaagaactccaatcaagccgaggccgaaagacgacggacagtctgtttgacccgacgtttgggtatgacgtcccgctggcgatggagacgatcagaaagttacaagaagttgattgcgacgaggacgtgtttgtgatcattgcacatgacggtgctgttagagacggagtgcctcatttcccggcggccctgaaccagtggaaggagaatgggtgggcgagaagtcttagatgggcgttcctaaaagaccttgaaggatattggaggcagaagggattgatagagtaaagtgaattagtctagtcgatactcgcaggaatgaacgttggtcaagtcgattccggcaaatatctgtaccaatcatcacttctttgttctcaaccgaggctggagccgtgtctcggcagtccgttataggatagccggcggcactaactgaaaggcgcccaggcaggcgaagtgcaggtgctctcatgcggcggtccaatggactgccgattgtgggggatctggggatatagaatagctcatcctgggctgcggtacaactaatctgtcctctcactccccgttcgacgcaattttgatcctaatattactcacaaggaaaaacagcgctgtctcacgaaatactctattagcacaaaagcaaatacacccctaaacctatcaatcatgggcagcatcggacacccgccactagagcaaaacggcttcctcgactatgacgtcctcataatcggagccgggctcagcgggatctactccctccaccagatgcgtgcacttggtctccgtgtaaaggtcctagaggccggtggagggcccggtggaacatggtactggaatcggtatccgggggcgagattgtacgtctcaacaatgttcagcggactcaaatagacagaaaggctaactctggctttgaattacgtgcagtgactccgaatcctactcctacggctttagctggtcgcaagaagtccttgatgaatggtcctggtcggaacattttgccggacagtcagaaacactccggactgcaagtccctgatttgaaattcatctggcacgggatatgcagttaacacgcggggaaacaggcccttatcaggggaaagtggagctggtttttatgacaccaaagaatacaattcgtccggggctggaactgctgggatccgataaatccactccgactcccgggacatgatttaggtagggatcaacgggcgcgccatagccgtacgtgaggaaaagtgattatgactggcccgaacagcatcaggatgtgaaggtgacccagtttcaggctcatggggccctaaaggcctttccgagggaaacccaggtcgtctaaaggggttttgttttaaaaccccttttattgagagatttccttacagggggggtttttattaaaggggtctttttaaaagg

SEQ ID NO: 71 - DNA, 6944 bp, Emericella nidulans
atccaccaccaatcttcagactccggaacagggtgcagaagcgtcgaagaaggaccgccagtacgccccatatcgattagcaatcaattcgaaatatctgttgaatgttctcgaatcgttcacggaaaccctcttcaccgaagagcagaatgtccttgtgcgcccgttcaagtacctggtcgagttcgagtccgacatcaaaaacctgctggaaagtaccgagtcttggtgcaaggaagcagaaggcgagatgattccatcgactaaaatagaggatatcgagcggactagagcaatggctgcacagctcaggcgagaacgagatgacgtccgctgcctcgttgagttcatggaccacgatatgagagacatttttgagatcaagcgcgcaatacaggcgaacacattgagagagatcgcgtttgagcacctctggcaactgtacaaaccgggagatgtcgtctaccgcacagttcaggacgacgatagtcggcgacaggcgtttcgagtgctccacgtcaccggcggacgagtctgctttgataccaagaaactgtcgtatttcgacccggttaactacagggtgtgggactcagaatctgaggacgaaaggaggtgccgtgacgccgtgaggcgttccagtgcgcagatgaccaatttcatcatcgactgcttctatctagagtcggacggggttcgcctggcgccgcgaccaaaacgattcgccatcaccccgtactcggggaaaagacccatagcttcactccctctgcggccgcttcaatttgatccgcagaaggaggtgttagagaagcaactcgttgcgagaggcgctcgctttatggaggtggcacagggaaagcatatggagtaccatgggaataccatcgaagagtccaagaacagccaatataggcaccggaatcatcgtattgaagcattcgaggtagctcccctctcccccaaaccatgatcctgaagcacaaatgaattctctgaccaaacgtcaggttcacggcgaggtggttgttgaccaggaagccggagtgacgcatttccaggacacactaccggccttcagcctgggaacaggtggcggcattgtccttacgcacaccgagccagactcaagagaagtatcggacttcttcccacaaaagagcgatggggactgggtgacggatgtcttcaacgacgctgcgttcgaggagtatcgacatagcgagtattttactacgacggatcttctgaccagccgacctgttaaagacattcagctgtctgatgatcagcttcttttacttcctccacgagtgtatggatactctcttctagatcgccgatgggtggccttgaacgtcagcttactgcaagaaatctcgatccacgacaaacaggcgcgatctaaactggaggaattagtcctaccgactgagcacaagagggttttgcaagcgctgataaccaaccaagtcagactgccgcatggaggctccaatcatgtgcaggaacagttatcaatggacgtcgtgtccgccaaaggcaaggggctgatcatcctgctgcatggagcgcctggggtgggaaagacatcaacggcagagtgcattgccattgagctgaaccgccccttgctatcaataacatgcggccatattggcaccgtcgcagaggaggcggaaaagaacctggactcgttttgtaaactagcccatcgctggaggtgtgtgctcctgttagacgaagcggacgtattcctggccaagcgagagcggggggacattgccaggaacagtctggtatctggtaataatgcttctccatcgaaagtggtttataccaagcgttgaccgactgacagtctttctccgggttcttgaatacttctccggggtcatcattctcaccaccaaccgtgtgggtgagttcgacgaagctttccgttctcgaatccacgtctgtctctactatcccaaacttgaagagcggcagacgaaagagatctgggagaagaacatccaacgtgttaaggagagtaacctcaacctggatatggaggagaagaagatacgacgttttgcagatcagcactggcaacggaatctggaccggccgacacgacgctggaatggccgccagatcaagaatgcttttcagacggccattgcccttgccaactgggaattctacgatgagaagaatgtcgcaaagctcgagagaccactgttgaaggcaaaacattttcaatatgtcgcaaagatcacggctcattttgacgactacattagcgacatttatggtacttttgatgaagatacctattcgttcttggctgctagggatgcgttgcgagtggacgaggcatccgccatgtttgcttcacggagcacgacgcaggagaattctcgtgcctcaaaatcgggcattgttcgccggggaaccgattttcgtagtcctccggctaacccaggcaagccgcaaggatcaaattttggccggtactctagtgacgacgacgaaagcacggatgaagaagaatcggaggagagtgaggccgacaatgaagaggatgaccaggcggatgaggtcaaaaagctagagcttcagcttcagttggcgaacgtaaagaataagaaggcttcgtcgagaggcagcaagaggtgacaatgacaatctatgggaagtgatggatggttgttcttttgggtggccggaaaggcagcctatctaaataactagcttactaaatgatgactaatcgaggtcgaaccctaggggcaggcggtaccggagggcagtatgccccgacaccccccctcgagcgagattgtcatcaccagcgggcctaattacatgaaaatattaatcatcgttgcggagacctaataaacgaatgaaatgggagtgagcttcagatcccagaggcttcgtacagccatctgcaaccatttcggcggtagggatctgcttgatatggatgatgccttggtcgaccatatcacgggtgtaatggtagcggatgtcaatgtgctttgatcttttggtttgtatgtcggacattgtaagatcaatagctcctttgttgtccatatgtaatgggataccaggtgcatgttggtcatcaaataatcgaagatccttcataatttcgcgtatccaataggcttcgcgcgaggcttcggatgcagcaatatattcagcttcattagagctggttgctacgcaggtttggcgctttgattgccaagcaattggtcctccggcaagtttgaaaacatatccgccaactgaccgacgtgcttttgtatgaggtccaccccaatcagaatcactaaaggctttagggggctcgatattggctgcaggatcatgttaatatctgattcctagactgcgggtgccttttaggtatttgataacatgcataagagctgcccagcatttggctgtaggcgctgtattaaattcagcaagaaagcaggcggctcggctgatatctggcctagtttttgtagctagatactgcaagctgccagtaccgcgctggtattctttgatattgatttttagatctggagcatcatcgataactgttccaggatcaaggggtgatttggtaggatgggcatcatgaagcccaaaagagttgataatgtcatcaatttgatcctcctgtgacaggtggatgcctgtaggcgttgttttgatattcatgcctagatatcgcttgaattccggcgcttctttaatttcaaatcgggatttcaagctttcgagcgcttgtacggcgttttgggccttttcaccaacaatcatgaagtcatcaacatgggtggtgatatagagcttttctgtaacatgtacgaataggcctgggtcatgcggggaaaccttaaatcctatagattcaagatatgctcgtagatcatcgtaccataggcgcgcggacggggttaggccatatagtgattggcggagcaggcaaactagggtccctggctccccttcagcgaatccaagtggttgatgcatataaatcggttggccttttaactttgcatttagaaacgctagaactgcatctgcctgaataatatgccagcctttttgggcgctgacaccaaacaagattcgtgaagtaatcaggtcgacaactggggcgtacgttgctccttcaaattccgatttatcaagaagattccccctgattacccatcatgctttgtaacggatggagttgtcaggattaagcttctttttataaacccatcttcctggtatggcgcgtgcgagcaggcatgtcagattttcggatcaaatcccaacattgtttccgtttcaaggtattaatctcttcttgcattgctgcatgccattgagctgattcagggcctttgatagcctcattgtacgatttgggctcaggtagaggtgattcgacagatttttggatagcaaatcctttggcaggtcggtatagctcttctctggaggtaatatctgatatatcctgtataagaaggtctttattggtttttggttctgcagcttcggcagtttcgccaggtttgacagcttcggcagttttgacagtgtcagccgttttgacagtttcggcaggtttgacagtttcgagagctttagcagcttcgggagctttggcagcttcgtacggcttgctctgtggcgggttaaactcctccttgatggagatatcactggtatcgcgtagttggttgatttcagggtcccaaataacatagatatggcggcctctatacccaacgacatggaccttcttggcttttgggtcaatcttactggttggcttgccagcatattttgatgctccatgtaggtgcatccaagcaggtgacccaaatttgacaagatgcttgatatcagtgtcaccattggtccaggcggaatagggcgtaaaatgggcacatggctggatttccggatcgctggttggtgccataggccgtcgatcattgtacaagggaattcttgtaggtaaccggttcatgtgatagacagctgtttgtagagcctgtggccatagccatcgtggtaatctggagtcatataacattgcccttgtatattgtaaaaccgtctgtattccgcgctcactgacgccatcttgccatggggagtctgcagcggttggctcccaaattaggccataggtttggcagagcttcttgacgtgttcagttagaaattcgcgatcacttcgtacgaaagctggtgggctgtatccttggtttttgatatgctcaagccatccctggaaggtgggaatagcctcatctctggttcggagggtataaacccatcgatatcgagttgcatcatcagtaatcaacaagaaatatcgaatatttctaatgccgggaggggcttgttcatccttgcagtccaatgttgctcctcctcctgcaatatcaatatggattcgcgccaggatctttgtggcgcgcgaggctggctccttggagctctttctcctctccttagcctgtcgacagatatcgcagaaagccaaggtttttgggcctttgattttgatgattttctgttgtgccattttcaatatggctcgtagatggacatgggataggcgctgatgccattcctccatagttgctgtaggtattatgtcatttgtatctttttgggtgtcctttgcgtgtagagttggctgtattgcgtatgcaactggtttgacttgatataggcgtgtattttgctctttgaaggcattaagagaagctcctgtgggtgatgtaatatagaagtgcttcttgttgacagtgccttgtgtggatacatcaaaatcctggtcatccaattggctgaatgacagtaggtctgctgttgttgttggcgcatatcggacgtctggaatctctaccccataaactaatgcggttccgattccaataatctgatgcgtacgaccaccggcgtcatttatatatgctttgtggcctcggagattgatgaaaacatgatatttattggatatatggaaggctgcagcagtatccaagagccattggggctcctcattattttccggctctttggctggtacgattgcaatcgagttggcttgcagatggttccgtagaacaagctcctgtcctgttggttgttggtttttattattattggaggttccagatgcgtggtttgcatggcgtttaggcgccttttcgggatgcaatgtccaacaatcatcgggcttatgatatcctttgccacaagcttgacagagggttttcgtacgtgccggcttttggtcttgaccgtcgcgcttcgtccgggaagagtcctttgtttctgtaaggattatccgatatctgggctcgagtttgaattcttgtggttcctgggggatatatttgttgttggaagatgatgatcgagcaaccaattgatccgcaaatgtatcaatatctaggtttttgattggtcctcggccgcaggaatagaactcgtctaattttgtacgtacgaagttctgctgccattggcctagagaacagataaaaatgtcatggataacatcatccagggatagtttcatttctttaatctttgcagctattctttgaaaatcccgtaccatcgctgggtaattgccttgtgggttgatatcaagtagggctttgatagtcataaggcgctcctcggccattgataggccatatgttgatgttattctagcccatagctcggatgcaagtgtagagcctttccagctgattgtttgttgtacgtgccttgctgttgactggagaatccttgtatgtaaaacctcattctttgtttcccagcaggcgatgtcgatttcattgctgccatcgggtggcttggtttcatcagaggatgtcctttgcttcaatcatataggcatccataagtatagaatc

SEQ ID NO: 72 - DNA, 4355 bp, Emericella nidulans
tctcagcagggagagagagcagttccggcatttctgacatccgaaacgacgatatgagcctggcacgatgctgaatttataacagttgttgaaataggcagcgggcaggcttggcgagttctgcctgggtggcctgggtacacgccaggtaagtaggcactgcagggctcagatttagtatgagccactagtctgattagggctaaagacttgaacgctaatagaaacattagagctaattacagaggctaagcgtcggcctcttagctataaagagccaagacaagaaagcagaaacggttccagcagctttccactgtatgcagtccgttgttgatggtgtgcttcttgtctgttttagccagtgccaaagcacaagatttattttcgaataggatttctttgggcccattccattgctgggtagataaatttcattcgacaaacaccaagagacttcataactgttgtgggatacgcgttatattcaaagacaggaaactgtatcactatacgagcgtagtctattaaggatgatatttgtgggctcttgaggtggttactagcgtcatatggtcatgtgattaatatctgaagcgaaaattgtatttgaaggtctttttctcctaactacgatttctataggcaatttataacatttcgagagcttcagatcttggtatctgaaggcacctcatcctatatggatagttgtaatccgtttatggcggtgtaatcgtatcaaatgatcgagcaagaaagctgccggatattgattaataaggaggagcgttcgccggctgataatatggaaatgtcatatgacgctcattgtgtacaccatgacaggtgtacaggatgaatcaggataaaccaagatgaacccctgcgacaaccagtatattagtcagaacttagctctccaaggagggttagccctttttggctgagtgggaagtttgataccctggctggcttttcccacgtgatatagtggttatgtgggaagagatcgatgcttctcgtgttctcgtggttgcagctcgcttagacccgtttttaggtcgcgcgacccaaggtgccggaatggcctgcttatctaaacaactagcttactaaataatgactaattgaggtcgaaaccccaggggcaggcggtactgaagggcagttatgccccgacaggaggccgcagctcacgtgggccacgtgatccgccgagtgacgttaaataatgtggattattggggtggttatgtaatcaatatccgtagtgaacgatttcattgaaggtcttgatctcctaactacgatctgtataggcaatttataccttttccaagacttcaaaaagaagattttcgcttatgcaggagatatccttgccatacagacagtatgaggcatcaaacagatatccctgcatacaaacggtgtaaagcatcaaacagacaggcaaacgaacgaggtgctgaacattgattagtaaggaggaacctcctccggttgacacgtgcttaatcagatgacgcccgtccccacgtgacgcacgatttttgtatacaccgacttttgaaacaacgatttcaaatgcctgtatctcacccaatgtagtctcaatggaactcgcactggcagaattagaatctttggcgcctggagagaaatttagctttgctagaattgccaaaaagtatggtgtgagctgtttgacgttgtctagaaggcatcaaggtgtccagggctcaaaaaagcagcaatatgaaaatatgcagtttctcaatgctcaacagacagaagagattatagactacatcaataaacaggcaaagagaggcttattctgctctaatgagatggtcaagaatattgccgaagagattgctggaaaaaggcagggaaaaactgggtttcgcgctggcgaaagaagcacgatgacaagcttgtgagcgcctatacaactggcattgattaatcgcgcaagaaggctgattctgccttcaagtactcgctatatttcaatgcattaaaggagaagatggaggaatatgatgtccagccagaggatatcacaacatagataagaaaggtttccttattgggatcctctctgaatgcaaaaggatcttctccaaggagtcctatatagctgaggggactaagcagcgccttaaggatagaaatcgtgaatggataactactattgcttttatttgcgctgatagaaccttactccccccaggcctggtatatcaatctgctgtaaacaaactacaagatacctggcttcaagactttcaagagaaggcccacagctgcttctctacctcttcagcttctgggtagaccaatgatgagataggactggcatggctttgagatatctttgacagggagacaaaggctgtaacgggcgtaggcagtattattttcaactggctgtcctgtataaacgagtatcacaagcttaaagaaggaaacaaaagatagaagcgcagatatcttcctcctccctttatcaacctttctgacttcccagacctgtatgccgacggatcccttttcaaaagttatgaggacggatctcctttcctaagcttcgaggccgcaatttccgaagctgtacactgatgttgcagagaccttatttagaaccaggttgaatccatggccgacaaccaagatccaggccatagcctgtgacaaaggcaaaggcaaggaggcattggaggctcttatttctagatggccatggctcacatgttactatgaagtttcttaactactgtgaagcaaataagatcctcctggctacataccctccttattcaacatatacattgcaacctcttgatgttgggatcttttcgcctctgtctaaagcctatagtgacgaacaagaagcatttctgtatgcttctcaaggtctcagtgctattacgaaacaagacctcttcaggcagttctgaaaggcctggaataaggctgtatctccagctcatatcaagaactcatggagagcaactggattagtgccctgggatcctgaggtcatcctgtcttattttcaggaggatacagcatagcagccttcctctagtaatcttcacggtctatactgcaagcagaggactggagaaagattgagaggcttcttaaaaaggtggtaatggatttgaatgacaaaaataccaagaagttaagcttgacaatgcatcacctctctacagagaatatcctgcttaaggcacgctgtgaaggcctcgaggaggcactagttaatgaaaggaagagacggaagcgtggaaagcctcttatatttcagttgcaggcaccagaggcaggcaatgcagtcttttattctcctaggaggatccagcaagcacgcgacctccagaaagagaaagatgaggcgatacagcaagctaaagctgctaaaaaagaggccaaactataccggcagcaggagaaggaagagaagcagcggaatactgagaaaagaagaagaatcaaggctctagaacggcaaattcgattacaggaagcagagaagaagaagcttgaaaaagagcaacagaaagaggaggctcgtatagccaaggaggctgtgatacagcttcaaaataatatcagaactgctagacagagcaagtctaagcttccggcaactccaaaggctccagagaagcagaaaccatcatgcccagcacctgaagctatcccagggacctctaccactatcaatcgccgaggacggcagatccggctcccacgccgctttcgcaactcttgaaagacctgtatagcttcatcatgatgtctactgttatctgataaaatatcatagtattatattatctgtatgtggtttaaaagcttcattttctctacttgcggtagttgtcaaaaacgtgcgtcacgtggggatgggcgtcatctgattaagcacggtagagggcctgtacatttccttccatacgaaacattgagaatacatttccttccgtgcgaaacgttgagaattcattgtacgtttgtaccgcgtatcgtatacctcaaccctataatgtatccccggcccagcatacacacaacatccgctgtttactgacctaaaagatattcattgcaaagaaatttgatatactaattgataaactatgtacccttcaggttttgtacctgggatttccagggctcaaatcattacgaaattttgtttcacaagtcttaaggtttgtaggcgtgatcacgagaaaaatgcaaaagctacgatttgcgcaaaatgctatacaggatatctcttttacgtgggcgttctttaagtggccccaagggtgtcaccccagtatgtg

SEQ ID NO: 73 - DNA, 4381 bp, Emericella nidulans
accgcaatctaccgcctattctcaccccagggccgggtcgctttctgtgaaagacagcttgcttaatcaccttaccccgtccactgtgcttaggtacctcacttgtttctcaagtatataccccgtcactgtatgactttattttcctaccccacgacgaccctttctcatgaccccgttgcttttgatataataccccctgcgcaaacttgatatgagcactttgacttataaataaataatccttttgaaacgcaatcgctttcaaagtctagatgagcatgtcaatggccgaacgtataatacagtgcgattagatgtccaccgtcgcaacaaatatcggaacataccgggggtgtgcaccaaaaaagtcttcgccgcactagtgacatttgatgtcaagtcctgtaatacaaatacaggtcattagacaagtagctttaacttaagttgagatatagatctcccaaagcaaacaacataacttttcctcactttcgaggcttcccccagatggctatcacaaatcaaacatttgtttatcgttctaagcgctttttcttccacatttgcctctctgcttctacttctgcctccgaaccgtgtgcgccctttcctgtctgcgatatctacatgccagcgccttatccaaacgagcttcgagttcaaatcctttcctactaggttggatctagtcaacagatatagccaagatgcttcaagtcaacatttgaacaacacgagacatattccagaagggtcaagatcgtggctacaatcctgctcaatgcagagggttaaacttgaatatgtggaggatggcaagtgactgggcgtccaaaggagactcctaaagatacagaaccataaggcatatacaggagaattatacgacataatggggacaatatgtacagatggccgtgagcgctatcttgcttgaaactggatgggcggacagatgaagggccagctttctgcgcgtgaacacctattcccagagccctgaaaacctctggatagcttcatttctgctagttttggcgtttttattgtattctcttttctcgccttttcaataccaccaaagccttatgccaaacattcgttgccgtagtaatttcttagaaaaagcaataagctgttacagtggcagtactgcattagcgcgatatcaacgcagcgaagacttcctgtgtacataaatgggaacacccaagctgcagcaagccagtccaacttcacccattttcgcagtcagtcagaaaacagaataacgaaattattcacagattctgtgctgccattcttgtgtatggtattctagtcatccgcaagacagaaagctctcgaactcgtcgaagacgtaatatcaaaccgccttttgggcactaatttgctatatattcaatccaaactcaactatcaaggcatacacatgacatttggaataggagactcgtctaccctttcgcaatcgaaattggccactaacgatgcaagcgttacctcctgcaacgctgttcttttcccttgctccatcaaggcacatctttggaggtttccaagaggaatgcggcacaactcacgagcagatcctcgtggacaatgtagagcttctttcgcatatcacagtggtcgtagactaaagtagagactgtctctactccatgtagagacagaacgaaggtcgtacttgccaggagttccccctcctttcccgcgtcgcatattctggctggcccagatgttctcgctttcttcttttccggttccgtccaattatcaattcactgacgagctgcatagctcttatgtaggacgactttgccgagactcacttttgggtttggctgtccattctaggagacgaataatcattctgtcattctctaagtcatggtaaataatactagcgctagtcgcggtgagagtgaaagctgaatgccactggtacgtatccaagccctaatcccaagcctgagaatatcggtcaagtacagctgaagaattctggtttgtacaatatggatctttctacttttaaattccagcacatacgaccatagggtgtggaaaacagggcttcccgtccgctcagccgtacttaagccacacgccggctggttagtagtatggtgggtgaccacatgcgaaccccagctgttgtatgtttgtttttttctttgctttttcctcctgtgggaagatatatggttgtaataatgcgagctatctgatatccgcatatatgccgcagtctattactaacccaccccagtatctgcgcgggcagtttagcaaaggtgaaaaaaaacgcttgcaccccggatgactttagaccaagtagagatgtatagtaaatattgaaagctgtgtgttgccatatcccaaagcctggctcgcaggatgatagcccgtgacccaggcggtcggtcgtcgggcagaataagaaatgatatcactagcgatagcttcaaaacaacacaacaatcaatcatacttcatacatcaattgaacttcgcagaattgcaacaaagtgtattggcaatcagaaaataggccactatgaaagacgcagccgtcaacacgggacgcttatcaacctcaacttgtttgaagtggaaaagatgaagagcaacgcccgtgagactggccgttgccagagttgtggacgtgagcggctgctggactgccgccattattgttcgagagaccgacagcatcaacaaataaagtttgtgggttggatcgaaggagaagggagattaggggcccgtctattcctgtcggaaattcagaggatcgtgcgttgcttagcaggtatattattattcttagcactatatgaagacctagtataacggcatgtactcaaataccgctaagcaaaaagtccggtaccttgtacgaggaacgtgtaagggcgctcggaacagcgttatatggtcagctactggcgagtgcctagtctgtaggaaggatcatgacaggtaggacagaactcgcttggagtgctagtagcttactatctgtgaatctatatatgtggtggccggcgggagagatcaggtcagctgaggtcgatatttcggtcagttgggctggtgtggggtaatcagcatctcggcggttatcacaacttgacaagagtataatcaatatctttcaacctaacttaccctctttaaagtgcttacaagccactaatctctctaatgtggctctatctttaaaggatatacatcatatctaatcccagccagttctgaaactttattctcgtgttccagttgctgattggcttgttagaaatagtattaccagtacctttaccaggcagaggaaggagtattggagctccctgcttatagacttatagggctactaactacttactagatagttaatagctacttaacttattgtacaataaaactggccatattataatatattatagccagaatttctgttaaagaatactcatgaagttttgtaagcaaccatataatagttaacttagcttttaacagcttactaaccacttaataattaccaaggaatgttagagtgggaactgagcaatagactgcaactatcttcctttaaaatggcactgggtgctgagttccagggtactccctggcactctctgttggaatataatctactgtccaagaattgtggtacacttttaataggcagtctctctcctactgataaaagaagttgcggcttctacattcactaatattgtatagagctacaagaatggattcggcttcatgatcgttctcaggctccctcatctggggtttgtgaacctatgcgcacttggtactgcgatagatacatataatctcaatacaaaacgaccagccgaggacctaggtcccccgagcgtaaccattgattacggctttgcaaaaggctggccggaatctgtctaaggcaaaggccggaagtctcccaaaattgggtctggacgagcaatctgatattcaacaacacggtccgatcgctctcccccggccaactttggaaaattgcaaaagatgcatggaacgagatgaaccatgatttggtattctatcggatcagcaggagctaatataagccccaagccatgagggtcctggcttacggcaatgaactcatcctagcgtcttccaaacggggggaattccgttgggtatgagtttgcaaaaaccagggttgtcctactatactctctgatgctccctgaatcctcccccgtctgacttcggtcagcttctccggcacgccctcgggccaccctccttggtcaagggcttcatggctattgggactggctacagaaatcgacagtgtaacgattcaactactaccaccccg

SEQ ID NO: 74 - DNA, 5608 bp, Emericella nidulans
cttatggtaaatctttgcgaatgtctttgagaacgcagaaacgatatcgagaaggcaccagtaaactttttagcatttaaattcagggtatctagatatagaacagcccggtcgggtggcatttgcctggaaacagccatcaagccaaagtacagtgattgaataattatgccaaatgagggctataactagcgagcgctataactagtaaaggcaatgtcagttactgctctttaagaagataaactagggtgaagaagcctacgtcctttcatacccaccacgaagaatgtgaactatatgaccgtctattagactgtaaagcgagacctgtggattccctccagctagttttgcgcttttatcactgctcgctggcctcttaagtatatatgaactgcgttgctgttctgcctctctttcttctttccccttattctccctcccatatctgcactgaccagtcactgcctgttatcttactttaaggacacctactgtcacaggctatggcctggatcttggttgtcggccatgccctcgacctggttctagataaggtgtctgcaacatcagtgtacagcttcggaaattgcggcctcgaagcttaggaaaggagatccgtcgtcataactttggaaaagggatccgtcgggatacaggtccggaaagtcagaaaggttgataaagggaggagagatatctgcgcttctatcttttgtttctttctctaagcttgtgatactcgtttatacaggacagccagttgaaaataatactgcctacgcccgttacacctacctgctttaccaccttttcccctcagaaattgcagttgcactgtgtttcttattacctctagtcccagattctgtccatcctgcccgttctgcctttagcttagactagcttgttagctaaacttcttcactctcttttttctaaattatccagcatatatatttatatcctttattgtctagctgctgttatgggataaaccgcaggataagtgctcaggcatggcctcgctgctatataggcgctagatgcaacttataattctgatcagttgtcttgtacctttctagtcaagcggtctggccgtaccagcgcatagaatccagcccgttacatagcctagaccaggtcttgagcacattagttcggtatctataataagagctagaagggaaggtcctgccatccatcattaagtacaaggcatccatagattctccctttcctatatcaggctgggcttcaagacatgaatcttgacaagatagtttactcgcagaaagttgaactgcctgatattgtgtattactatataatagtggcagtaatatcctaaatattttttataaaatccatgcaggcctagaaacttggctaaatatattagcaaactatttttctttctctatatatctctatttactatataatagcccttcaactatctaccacttgccgtgtctctttcggctgccttgatctccgagtggagagagtgtgcggtgcatgtaagagcgccagtaaaacttgcgctagtcgagcaggactgtttcttcgattggagtgaggagcatgtccgaagctgtgttcgggcgttggtgaagggtgctagggtcaatgggaaatttgttcgtggtgcgccgcatagtctggagctgagcattgggcgcagagatggtatgcgagttgttttgggcttgcattggagtgtgctgtctttactgtacgtgcataggctgagatcttttaccataatagtcagtataccaatactccacggaaagcgctggaataatctgatattaaggaggtaaacatttatcaagtaatgagcaaagcaaggcgtgtgggtgtccatgagggccttgtagttaccatacctccattgctagctgttaaataagtatagacgagtgtaatccattgtaagcggtatatatgcctcaggttatctttgaagccctaatcaaccacctatgcatactccaagcacaattaagatgaaactgtgcgatagatcatagtggctagtccccgtcaccatatgtactccaccagaacaagacctcgaagtatcatctggcaggtatgctaccaggccatctttgttgaccccaacttcttagcaggatataatccttcatcgcctcattctgctttctcagtccaatttctcagcacagacgtgtcagtcggaccactacatcacaatcattagtattatgccgtaaaggaggttctggacggatacactcacggacaaaccgcattaatctgagcaagctctcaaccgagtagtccagggtatccaaaagtgtccagtccagagttaactgactgctgacttagttaagtgaatctataagagtccagagccctgaaattctgaaagaagaagcagacgctgccgagtctctactaaccctgtcctaataattaaccgactagccctaagactcgacgcaagccagagacaccgttcttgccatgatatgagtaagaaatagctgccataaattagaagaacgacagcccaacttgagcaccaacgtcgggtaatgccataagaccacgtctaatcttctcccaagcaagggtattttatcaaaaaccgtcatccggatcacttagtgatgtgttgccagattatggcgcaggtccacaaagcaggaagttgaaagtcaccgggggcattgagggctaggggcttcgcgggggccctatctgagccacaaacattaagccagtcatctgtacattgtatgaagtcattattgtatagtgataaaagggactgcataagagacatacctcagaacaaggtacaatcgaaaccttaacttagagttgacagaatacttaatttcaccaatatattgaataacagcaagaccttctacggtcttgggcttgaagttcagggcttaaatagtcagaaatagttgttgagaactaggctggagcctaaataactggtttcagaattgaatcaagattatcaagcatgtgaaagggagggtgaacagagaaacaaagaagaggcagggaaaaggtagcattttataagagtacttgaccaggctggtcagatcccaagcagctggattgggttgcaaaggaggcctttatggtgtcaattagtcatgagttaagatgaactgaagcttactgtggtcaagtactattcaagaccagtcagaggtggggactagaatacctggcagtgcatagtggtgcgagtgcatataacaatgttaagatggtttcttgctgtttacagttaagagcggaaattttggctgtttatggcctcagtagaggtcattttcagcgtcgattctacaggtcctcacattctacttgtaaatcgactcccatgatgtgtcctcccagaggacaaacctagatgcctgcaggtgtagttctaccgagtagacctgccgtatgtcaaatccccttattggcatcgctggcgcaaacctcaggacatgatcccgtcacgaggcagagcaacggcgcagtgcgttgaggattgaacgtccagggaacgaaggaaggtcaagttttggactgaagataggcacggcttgaggaaactatgcgtgatctgtgcagcttcaactagatgatcgttatctcacactggactcgatccatgctgatgacgatttgcgcttctcttaaaccgtggctgatcggctagatttatactcagggctagggtacacttcattagatgcaaagaagatacaaaaagaacaaaaagactggtccagactaccctagaactcagactagtacctccccgtgctccccagcatatccatacacttctccacggccttttgcatctcgtccgttgcctcctccagcagctgcgtaagcggcaccctcccggccttctctctttgtaccttcacatactcattgttcaagaccttgttgatgttgaccttggacacgccgcactcgatacatttccggaagatctcctcggtgaacggatccgccccgtgcagcacaagtctgacgcggtcgcccactttctcattgatgctcttcagccgctcatactccagctggatacctcgcgggccatactcgccatggacgttgccaaacgcgggcgcgagccagtcgatccccgtgtcgacaaactcctcgctctcctctggcgtcgtcagcagcccctcgagctccgccgtatcagcgactccatcctcgccgccttcgatccggccaggctcggcctcggtggcgatcccgcgctcgtggcagtacgcgaccagttcgcgcgttagccgcagattttcctccttctcgtagtggctcatgtcaaccatgatactgtcgaaaccaccaatatccgcggcgcgccggatgatctctggtgtctgcgcatggtccatggacacggtgacaggcacctcagcgctcttcgcggcctcggcggcggcatgtacgagaaggccgtcggcgtagtgcagggcccacgggaagagctggatcatggcgggcgagcgcttcttgttggctgcgcggaccgtcgcaaggatgccttcgacgttgtagacgcacattgcagggacggcatagttgtttttcgaagcatggtcgaggatcgacagagcggggttgggtttgttaggggcattttggcgtttcttttctttttcctttgagtttgatagatgaccagtgatggccaagattatcgaatggcctaataatgaaggggaagagggaggagggaggagaagataatagtgctgttaaggtagaggcgacaagggtgttttataacaccccgcgctgtgcaggcagagtatacccacctgggcaggccgtcgcacggagttagtccgaccgacgacagacgatcgtgggggactcagtggacttgccgtggtggatgccgagtgcaacatggcctttcatgtggagctccacttgatctcgctgtttgtgcgatattacgttgttttcctgaatcgagaaaggtgagctgtgcgggtgatacacggcctctgacttccgagtactatcgagtcgctcagagttcctactgagtatcccactgagtatcctactgaatatctaccgactatactatagagtatcgcgtaaagtatcgctagagtatggctagagtctcgcagagtgtccatataaagctccagattatcattctcattttactcccatatactatgcgtactgtctacagcgaagaaagcgaagaaagcgaagaaagtgaagaatgtgaagagaagaattacattgtacatcactactggccatatacccgaatcacactcgtactgctctggtcaccccatccatgccgctgcgccatgaaaagcaggttcaacgcctcgttccccagatgcagcggacagtgcagatcccgcgccttctgtacagcggactccagcttcgtcgcgacctggtcgacggtcggtgaccccgcgggagccttgtcgccaatgcgcccttcgatcatctccaacccctgctcgatgaagatcttgctggctccggccgcttgactgacaaggacatggaacatcgagaggtcgacattgag

SEQ ID NO: 75 - DNA, 5801 bp, Emericella nidulans
acatcgagtgcacatgtgacaccgatatcttacggtttctataggtacaatcccgtcatgcagtgcccttatggcattacctccgggaatggtactgctggtaggaaaagattgcgagtaatatggttgagaagcattgtttctagacagatgtgttcgtttgagttgacagtatatgtcaagatctatttaacaattactttggaaacatggtcgacgaggttagattcaaccgttgtgatgcaattctcttttaggccatcaacggataaggtgatataaatcagggtgggaaaaaaggtaatgcaccagccgggagtcgaacccgggccgttcgcttggaaggcgaatatcctaccgttggaccactagtgccacttgatgattaatggttcatcaaaagaatatatcagccatactttacgagtaatgacaataaaatactgcttcgattgtgtcaactctattcccagctatgtagatgtactcatatatcccgctgtaataacggctcttccacggggggctatataataaccggatgtctttccggactcctacgcaaacaggcttctggaaggggtacggtatgcgtcgtattcaagatagtagacacacattaggacactagtcattggaccgcaaagaattaattcgaccatggaaggcagacataatataatcctaccattttccgactcgcttccttcttatttctaggcatgaccagcgcaattgctctgcgatttcaagcaatatttgtataatattggggctgtatttttgcaacatatctctgcaggataaggttctctacgaagctcaaccgtaggagcgacttttcttatgcttaattttaacagaagaaaacatagcgaaaacgatgaattatcttatctgccctatccagagtggtgcagtatattacagcgcaatgtagccaactattttcgcgaaaggagccaataaacatttgcctgcaaataggtagggtcgtaacacattgatcaagatggtcaaccaccggggtctgtctcaaccaccaaatgtgacgagattagagaccaccagggccggggttaatcccgtacgtgtgcatgtcgttgtagacatcgaggaggaagccagccgagtcatcttcaaattgaggttgctgtgtctctccatattgcaacccttgtgtcggcatggtgaaatcaccgtagccaaagtcattgaacatgttgtggttgttgatgaaatcagggtaatccatgtctccgccaggaaacaacaaaccgtcactagccttcatttccgggaatatatcctgaatagaaaaggctgtattctcttgcgcaagatcgaacggttcagacggagagttgatggtccctgtagttggggtgacggcatccaatgttccggtcactgagccaggcatggcagtcatgggagcttgataggtgttgaacaaatccggagtctccggagagggggcaaggtcccagccattcggctcctgccggtagtcaggcgcttcggaaggaggtgtcatgctccagacggagggagcctgcttgggctgaaccgagctgctggacggcgaggtagtctgttgctgagaagacgccttacttcttccgttgttcttagatcgcatgtacacccaaccatgagtcttctccatgtgttgcttgcagttgctttctctcttagacttgtaggagcaggactcaaattgacaagcaaagaggcgcggtgcatcagagtgcttgtcattgtagtgacgctctgattctttctcagtggcccagcccttgatatggtacttgcaggaagtaacagggcatttgaagggacgactgtgagatttttcgtgctttgtcaggtcgcatggccgagcaaagaccttgtcacagtccttgcacttcttgttgatgttcataggaggcgcattcttcttgcgacgggccatggaacgctgaactccttcgtcggtagaagccgcgctgagagatcgcttcatcgaaggaataggctgaccttcataaggtttgcctgtacgcagggaaatagcctcgccgtcctgctcaacgaccatttcaagaaggcgtccggtttgggagagtccaccctcgagtctaagttgcggagccctatggtagacggttagtaactgttggaatacgatgcaaaaggagattacatacttgaccttgccgtcagcctcgtgccttctcttccattcgtcacggattctcttgaattgagaaacctggtctaagaggtccacgaagtaaccgttgttgtactgcttatcagtcggcaggcacaggtcccggccattgaggaatgagaccgtctggccgaggcacaggatggtatactggcagaatcgaacataggcagcatcatttgtcttcacctccggagcgagcgagaatactgttttttcaaggtcacgcaggcaggagatacgttcatcgtcaatttgctgacggacatcttcaagaatagggtggaacggcttcgatttctcatcctctagaagagggccgatgacgtgcttttcgatctcggctcgaccctcagagctgagtttgtgtcgctgagtgctttgggcatccatggcactgatggagcgggtaatggcggactgggaacgggaggttgggaggttgctacgagacaattgtcccgctttcactgtgaaattgttagctcatgcttaccaaagagctgtccatgaccatgtacctttgttagacgacacggattgagcactgctgatagaggagccaattccactatcagaagcatgacaatggactctctgagccttccgagaatgttccttgggcatcgggctaggttggcgcgaatgcggttcaacggtgccctctctccgtgcttgagtttgtaaatgaagccgaagtaaacccttagggacggggaggtcgtcgttttcatcggaggtggacgtggtacccgagttcaagtcaaggcgctccaagatgtcggccatacgctgttgtccagcggcgatagcttccagagcgccagggcatgtgggagatcggcgtggcagcgacggtacaaggtggtcacggtcggaagagcgaagaatagatggattaaatgtttcacctttgcgtagacgaagtggaggtagtgacggtgattgctcttcagctgggacaagcgagggccgggctgccctgaagggccggcgcctcgggtgggcctttatagactcagagtcttgtgctggactcatgatggacggtccctaatgtccgaaaaggtgttagcaaggacaggccggcagagtgatgcaggtaaatgactcactgatcgtgaccaaatccaacggaagcttctgattagatggggaagtggtgcagccagtcaacgattggcaggtctgccgacttgacgattgttagaatgtacacaagagcaaggttgggaatatatcgactcttcgtagacggtcgggcgacggggcgttgatgaaatacatacagaggtcggactctctgtcaacagcaggtgacgccctgagcgctgacgggagaacaacagactgacggtgggaaaggtgaaaaggggagggtggaaagttgggttcgatgtgtatgaatataaaaaaatgctggaacctagagggtccaaacaaaacacgactcttggacgtgaacgatggagacttgggaaaagagacggaatgggatgggataagatcagggtcgggaagagcgggtgatgccttcttgatgatggattgaggctgaggcgtcttggacgtctgcctgatagacgagatgtgctaatccctaaaaggaaagaccaaggggccgtattaccggatacacgacgggtctctggggcagtgttttttgtattttacttcggatttaggccattattacgacgcccatacacggaacccgtgttcatccgtggtcggcacgcttttcctcgtattcatagccccgcaggtctcaggtataaccaatgactgcaagctttgaagacaccgtggtaaagaaaaaggtacgaaaatagcaatcaatttcctaatttacggcttttctccggatggcagatcatcggcccaactgcaactccaccatcatggcggtgttcgagacgcaccgatcatcgatccattataaaccctcaagaccgcagtcgattgcatcaaagtatgcttactgggattactctcagaatttgaagatgctgaactgcgagcataataaatacatgaggtgaggagaggacgggacagagaggtcttgaagccgacgtcagacacagcatcgccttgtcgtcacagccacaaacgttcgataacgatggcagtgtttctattggacgagaatgcatacgcgccgctcacaatgctggccatcgcatatcaaatgggctcgtttcttgataatggaatatcgcagatttgtgttgcctgaacaatcccgcactatgatccgccctctcaatggcgctctcagtaatgcttggacctcagctagcctgaccgttctctcatgtcagaatgccatgtcatcggccacagccctgctgtgagaggctttctgctggccaagctgtctcactgcaggcaatctggggccgccgaagatcctcatccgcggcagtagtctcgctgggccgactggcattctggctcactgcagtgggtatcggccatcgggtcaagcctccagtgcgcagagatgttcgcgggccagctctcagggtcgccagacaggtgagtttgttatcattcgaagctgactggtgaagcagcaggaatgtccctatggcttacgacggcagaaccagtgaaacagccaacacagccaaaactggagtgcagagactgtgtccgattaagatcgactctgaaattatgcttgggtatgtttgggattcttgcacagctacactacgatgccacctaggatgatccagaatgtctttggcaaatccaccgggcgttttgagttggcctctaagtcggtgcggcatttttcaaacggtcggccgttgcatacattactttgcaaggatggatagtcagtatttacgcctctctggagagcactcttcccgtcgcccaactcgggcctctgtcgcgcacgaggagcgctcgctgcaaatcagcattgacgcgccccaaaatcggtgatgatgcttgcatagtatatatcagctgaaaggccggggaataatgcgagatgccagacagctccagaccgacagagatacattttctctgcgtcggggcaacacagtaaagctactttgcttgccctagataattgtcagagaggtccgggcgcatcttgatctttcacctcggaggcatgagcttcctagacttgttttgaatgaactgatctagttgtgcctggcccgataacacaagagtcgcgaaatatcataaagacgctatcctttgcccgtattcactgagaggcatgggaacgagcagtaccctcaatagcgtatagacccaaccgacagaccaattgaccatttacctatagatagcatttgcagaacatgaacagccctaacgactatggacattcactcttctatctgattctgatccaagtcatcttccgagactggcactgcccgacagctgataagatgttccctttccatcctccgtcagagggtgatctgttgcttctttcaccagctcctgtcgaggcaacacagcaatgaaacagggccctagagggtactgcagtatccagcgtcggaaaaccctgtgcctgtatcccaacgccctggtgctt

SEQ ID NO: 76 - DNA, 5833 bp, Emericella nidulans
tttcagctggtctgccctctcttccagctccccaccataccgtctgcggagtccctgacgattgcagtgaacgaactggcgtggcgtgccctgtataaaagccttgtgcgccaaagattgatagtgtcctcttctttcagtcgtggaacacgcccgcgaccagcgacgcaggaatcctacttggcggaatcaacacggccaagtaccacgggccccttcactgtttccccatggcctgcgcctcgcgagactggggccccaggtgatcctacccgtcagcggaatcgaggtccagctcggaaacggcccctctgtaagcgacacgccactcagctacgacttccccgaaggcccctttagcgtccgcaccgcggacaagaggaacaccgtaacctcggtcccgcgcgatgtcatcatgcagctataccaggatctggagattgaatgggatagtttctatagccggactctgatcccctgctcgcgacggacggagaaccacatcctcacattcgccattggaaacacgactatctccacgccctgggcggcgttcatctccgacgccgacttcagctcggacccgagcgatatgtgctcgtttgacatccaccccatggacgaagaaaacagtgacaacttgaccggcgagctaggcttgaacatcgtccaacatatgtaccttgtcgtcgaccacgacacggaaatggcgtgcgtcgccccgctgaatccgaatcctggaccagatgagattctggaaattggaccgcagcttcgtgttccagatgctgttggcgagtttccgagcactgtaacgaggtacgcgcctccgactccgttggttactacggtggattcaatgcaaggtgctgtcaggacggctgttccagctgtggctgtggctggcattgcagggttggcatttgtgctgtgatgtttcgtgaagtgtattgatacggaaatgtgaggccacgtgatctctggtagattgaccggacatcgcctgtttctagaaggttcctaccctctgtatatatatagtgggggagagaggaatacacacaaaggcagcaatgaaggaatctattgtcaacaagataggtgtcaatcgtcatatggcatccgatccttagtaggctacgttggtgtagttgatgcagtttcctcctgccctttctcctctgagcatattccacaacatgtatagtatcaaagaaaatgtccacgcaactaatcatattgatacggaaacatcatgtgaccttcatcatgtacaccaggtgtacacgatgagctgtggaagcatgaaggagtctggtattcaggggtgcggatgcacggtgactagggatgtcaacccgcactggctgcagtgcggtgcgggttgggaaagctagacttattaaaccacgggttggtgtaatgggacgtatttagatgtatcttcctatctagacgtgccgacgtacaagaaggaatcgctggaaaggagaaaggaaaaaagggattgctgtcatgaggaagtagggttgtcaacctgcaccgcaacccacagcagtgcagtgcagtgagtgttgcaaaattggcagtccgcgcgggttgcgggttctaataggggaatccgtgcggtttgcgggccaccgctgtcaaggtgcaggctcaggaatatattcagaccggaataacggagtagatacaacaggcaggctacagagtcaggctatcagacaggtgcatagacaagacaagacgtagctcgaggttccgatttggatcagagtcggagctccagaaatctcagctagtcggcggtcagcagcggcagaatcaaggctcaggatgaggttcgggctggcccgtgacaaccgcgcgggttagaaaataaataaaaatgtcggggcatactgtccaatagcatcgcctgccccgaggggttgagtttgcttagtcataatttattaagccagatattcaaaggcggccacgtcggccatccaataataacaatggtccgtcccattccgcaaaaaatacataaaaatgcgggttgtacccaacccccaccgagtacatccctattaggaagcctacaggtggctcaccgccttcaaaacaacgttggccttggccgagtcactaggtctaaggttcttgtatgggcaaggacccataacagttggggcgggtttttagggtaggtaacttgaacaataaaccgcccatggatttagcaaataatttcaacccaacccaaataactcaaaataacccagttatgcaaatcactgcttgagtaggcaatggtcataatatctaaataaaatactgtattagaatactgtattatattttatctaagtaaacaaatataatctcaatacagtaatatacctattcagatatctcggcaacccagcgggttgctccgccgggttttggggcagccaaaaatatccataacccaatggattattagaaggtctaacccaacccaattcttggcgggtcggggcgagttttgcgggttgtgtttaacaagtctaggaacaagtggctattcgtcaatcgctcttaagagccaagatttaagggatgtggagtggacttggctagtacgaccgcagcccgaagatagctcttggctagtatcgtatccatggctgcatataaattccaacagaccagtagttataaattattgttacgaatacctcggtacttgtcttctggaattgtaatctctgtcccacagatctgcttgccaatgtctcgacggggccgctgggtattattgactgggtgactgcgggctacgttcctattaaatggggtcaaacaatgttccgactttcatgttcgatgaattcaacttaggagatcaggggtattgtggggggtatgtgttcagatgatcttgaggtgttgaaccatttggtatccggaactgcgttcagtctggggattaacggtttattaactcacaccccgtcttatgaaagatgatccaacggacttcctaaggcaggtatatttttcgaagagcctgggtctctgaaggacgggaatgccagcgcatttgtggacgtgccatggggcacacggaagctaccaaagtgaatctttaatccctctacacttgatccaagactcacaccatccgagaaggattgcctctaggacccaaagtccattttctccaacgggcacaaaatctcttggacttcgaaccagtgcgggacttgccaagaccaatacgagaaaccacgagcactggacatctcatttgctatcaaactagacttgggttgctctccaattgcttgccgagatgtttagcgccttgacatagtctgggcgggtagtgtgtggcatggtagcaacaaacagggtctaatgaggttgaggcagaagtgcggcttataatggtagagtctcacagagtcactacccaacccctaattcatcatacgctgtagctggcgggcagtctagcatggctatagacctgacggtcggacaggtatctggtatcatcgctgcgggagcggtagtcggtacgttggatggtgctacactgtgtgattcactcactcatactcaggcctgcagcgaacgtcgttctacccaacttatatgttttcctcttcattgggaccctccaagagcagaacaatgtggccactactaccgctatttcgtggacgtccatcaatcgactactccactcctcccactggcctaccatcataggcagcgactccggtgctttaagtggagttccctttcgtgtcctattctttcgatataccggccttctgagtactatactcatctccattgcggccattgtcacccctctcggcttgtacgaaatcgttgtccctggtgatccggtagcagagcagtttcaccacattccggacgggggtatatttggggcgggaacatcgagacggaatgatagcgtcagttggagtcgcgtttgcggtggattgagagagccatttacctgcccggatctaacgagagcgccacccgcaagtaatcgctccattgacagacgcataccacaggggacagtagatctctttacaggtggactttcagccgacagcagctctatatcgagtatatttgatatccaatggcgctcttggtcgtggatgaggttacttcctagcgatcagggcaatgccagcaactcctcactgccacgggaccggtcatacaacgaacaatatcctatcgggacataccgacaggtgtcgacactcatactcgaagatagttatcaagtcatcgagggacttatagtcgacacaaaaaatggaggtgttggttttcgaaaccacagcgctccatctttgaccacgtatggaagtacatggacagaagaccttttatttatccaacctgtctcggcctgcatcgacacgaacctaacattggattatcggattccggagaacgacagacgctcgttaaatagtcgcacgcccataactgtcaccgatagaggcgggttttccgagctgaacacaacttacccggaatggaatctggcggatgtgcaatcgaatccccaattatgggagcgtgcgtatcaagccgcctggttgtccaacgtttttgccatgggcaagttcaatatcagcaatgtcaccctggggagtactccagatcaaccgctcgttttgcacatgggaatctcggtagaagggaatcggacatatcagctctctcaaacggatcccaatgattgttggatcgaccgccaaaatccagccactattgcacctaactcgtttggatgctatgctgtgaacagcactgggggactgcctgatgaggatacgtttgaagctgctccacggttaatcagtacgttccccatcccttttttttccgtcaggttaaagtgtgcgagctccgattctagaaaccttgtgtgaaggaggtgactttgaatccagtcgtggaaccatcggaaatattgccacatattgtacactcgtgctggggtcgtcgttgcggtctgatggggctgaagagaactggcccttccacaccgccgactcagcctggtccaagccaatgtattcgtgcgccatggccgtggaggcgactatcaagaccgccaccttcagctacaatacaactgacgaccttgcgggacttagagtcgtgaatatcacagataagttctaccagagtgagacggattaccccgtctggggcgtcgagaatttgtcggagataggtgatttctggatgatgccattgtggggaattatgtcctctgattctgcggcaaactactcgcccaatgacctcaaaacagtgcacaaaccctctctttatctgccacgtataggcagttttccccgttcaagtggcgtcaccacggaaagtcattaaaatctgccgggcgccgagtttgctgacaacgggcttaacgccgtaagttctatggcaagccacaccttgggtttggatggactttcaggtgaaagaaattctggctttgcgccactgtggagtatactttaaggatccccgacttaaggctttgggtttgaatttagtctgaagaataccccgtaactccgcctttgtaacaagggatccaagaaaggtcctgaattgaatacttcgccttgaatattcccggtggggtacttccatctaggtttcacccgtgtataagttctggagtttatttctcatcattccgtttcttttttgttggtcttttatcccccttactaatctttcttaatatccttgcttaatttatcctatacttttccattttcgaacattctatcttatt

SEQ ID NO: 77 - DNA, 5774 bp, Emericella nidulans
gccaacccaactgggaattaacaaccaaggtactttgatgctattatccaacctagttaatcatctacacagcaagtatatctgagtataatatcatgctatccaggactttatcaagcatggagatatcaagccaatctatatccctacctcagaaatggtggcagatggtctaacaaaggcaataaaagctgataacttcaagagagcactttaattactgcagctgaagtcaaaataaggttctataatataatatcaagatcctcagattaataagataaaggcgttcaacaccccttcattatttctgttttatttcctttttcggaagcttgtatagcttcattccattcatttcggggtattgaacgaaggggagtgatacggaaatataaggccatgtgatctccggtagattgaccggacatcgcctgtttctagaaggttcccaccctctgtatatatatagtgggggagagaggaatacacaaaaaaaaggcaatgaaggaatctatcgtcaacaagataggtgtcaatcgtcatatggtatccgatccttagtaggctacgttggtgtagttgatgcagtttcctcctgccctttcccctttgagcatatcacacaacaaaagggattgctgtcatgaagaagtcttacaggtggctcaccgccttcaagacaacgtaggccttggccgagttacaaaggtctaaggttcttgtatgggcatggaccataacagtatcccaattcgggagcgtggctcgcaggatgacggcccgacccatgagccagacgatcggccgttgcgcggaatagtgaaatatatcattaatagtagcttcagagaacaatccagcaatcagtcctacttcatgatttggtcgaacattgcattatcgcatgaagtacataaatgtcagagctgctatcctgagatcttgcatcgatagaggcagcaagtagagtagctacttaacatctattcccaccaagatgcacccatcaatacggtaccggatcggtgcagcgctgagacctagggtaagcttgtctcaggccgccatgaaaaactcccaggttgcatccggagcaagcgagcttccaacaccaagcggcgccccatcatgcccgccatcatatgcaataaacgaaaccgggtgagagcagccactgaagtccgttcgaacggacccgccactgccagacgcaggctgaccgatatccgtgggctggcaaccattattcgacacaaaggtatttgcaagcgtcacacctccgtcaagcggaagaacaggatcattgattccgtggatccccaaatatgcaatggggtcgttgcccccgtcacatccgctgatcaagccaccgctcagtacgctcacggctctgaactcagcagcccgcgcgcaagcgagggcatagctcatacctccgccccaggagaaccctgtcgcgaagcgagaggcctggtccacgcagagatcgtcttcaacctgctccatgatggcgtcgatgaaggccacgtcctcgccgttggtgttggcccagccagcattcagaccgttgggggctacaaagatcgcgctcccttgcgcgcgggcctcgaggccgtaccatggctggatgctgtcgccgttcacgacattgtacatgttcccgccgcgccagtgaaggccgaagatgagatgatgtggcttgcttgggtcgtagccatcgggaattttgagaacgtactcgcggccgtttatttggttgacgccattggtgagggtcggctgtttaccgcagcctggcgaattggcgccatggacgggggtgaaggcgccgaaggccagaagagtagggaggaggacggctcgaagcattgtcactgaaatgataccgcggatgattccagagttcttgtttaaggtaaaatgtcaaggcactggtaagttgagaagtatcagcagtcccatggcagatattgtgcatttatattgcggtcaagagttaaccgccaggattcccgcgcagatcattgctaggttagcaacggagccctgcatggagggtctgattgacgagacgccctccatatgtacgatcttcatcatttttccagtgcaggtttgcagggctgcagatcttgccggcaaagctcatttgggattttagcctgcttcacgtctagtatgtggtggcactacataggaaccgcggcaatgtccaaagctgccgcagagtgaaacaggtctacattacgaaaagacaagatttggcccgtttcaacgcatggtctggtgttgtcaggtctccacaaagagtatctccccacgatgtgcagccgtcttggacaacgtgtagaagccgggtgaaagaggaggaaccaaaataggctatttacattctctcggccaacacgctctgcatcaattgctccgacctgataggtggtgagttttttgactttgccaggaccttccagagctgcgatttgcatgggtggcaagtcgacttgacgtttcagaatataactcagaggagtgccaagatgccatcggctatgggagcatcagttgaactgccgaacacgaacattagacccctgtcgtcgatgcaaaatccgtcttgtttcaggttcggccgtcgacaagacctcagagtactctttgtggggcctctccataggcttgtctattggcctgtcggtgggcgtcgatggggccagtctgtccgggcaaggactagtaagggtcttggaatctagctatttcagggggtgggtactgtagggctcaggctaccccgcagcacctcatttcaactgttgagtagtgccagttcaatatttatgctcgggctttgctattagagccagttatgtagcgtatcctgcgtttacggcacctgaagcaggtattcagcacatactgcaagctatcacgccaagggcacggcgagctgacagttcccgggttggatagcgccaaccgcacagtcttttcgctctgcggaaccaggctgcctggtgccaaactcttcgggctagtggccgttcgacaggaactctccgagcttgacgtcgaccgtcacgccagagtgagacatggtggatatggggcgtgtattgatggtctcggcatgttttgattatatagaccgcctgttacgagccttgtcttacccccctatcctaagcaccgtgcttaagatgagcctatatgtacgtatctcattgtctgttgctgtacgattctgggaggcttgatatggttggttatgtagaaaaattagtcagccaggatccgaccccaaacaaatacatgcgctccaacacctggcccgcgaagtacgaccccactgaatgtgttgacacctacgacatgaatcaccaacatgcccgacttccgatgcaacaagggctcattcaacttcgcccacagtaaggaacggcggaagtcgggcctagctctaagcttgcaataaaagttggtgtggcttctatcttgcagcaccctagcccttgcatggtatattgccaaaggcgcctagtacaggtaaccagtataatggcggcggggactggttcaagatccgcaaggatgggttctacgaatattagcaaggacatcaagactgatgcctggtatacctgggataaggaccaccttaagctcacaacttgcagacctattaggtagaaagtatcttatccaatcatagtacataggtatgccgtaatatcaagagagaagcacgaaaaccaacaagcatccattatatgatgttcaaagagtaagagttctgctacaagtaagttactctcacacttgtttttaatccacattaaataaggatactaatagggttccagattccctcaggtaaaggtcactgacggtggcaatggaactccgcatgatactatcaagctataaggttgttataaagatgactccttgtccaattccaatatctgggatggcgtgaagtgtcacaggctatggcctgcatcttggttgtcggccatgccctcaacctggttctaaataaggtttctgaaacatcagtgtacagcttcggaaattgcggcctcgaagcttaggaaaggagatccgtcctcataactttggaaaagggatccgtcggcatacaggtccgggaagtcagaaaggttgataaagggaggaggaagatatctgcgcttctatcttttgtttctttctctaagcttgtgatactcgtttatacaggacagccagttgaaaataatactgcctacgcccgttacatgaaggactttttgatgcatggcccagctgtctggactgggagctcagcatctagctctgccactaattagtggaaggcagattatatgacagcaagccaatcagaacatttaaacaactactctggcgttcgtgatcagaatcgtaagcatggagaagagaattatctatatgaaaaaatcaattgtgaggatgtcttcgcaaaacgaaccttaacttgatttggtagatggtcgggatagcataagtcatttcatcgtgtacactggtgtacacgatgaagctggctaattgcgcgacgctcatcccaggcacaggtgccaacagtgagctatataatctatgctggctcgtgatcacagcacgtagggccatgacagatgactccaatgcctgttcatactacaaggatttccacacttgcaatctgttacggatcatgctgggattcgatatcgagggttgggagccttaggcagacagcgatggaagcttggttacgatcgagagctacggaccttcgcttcgttctcgaagacatcccacaattgacctcttcatgtacataattctcttctctatgcttaggataccgaatataagcaccaggatggtcgtttagatattctgattggcttgccgtttcaaaatataggaactaatatagctcttgccccctagtggtgggggttattccaaaaactgccactctagcgtcttgtcacgggctagctagctacataggtgcaattcgagcagattagaccatgaggtctgatcacagtaacctttctgttttagtgggagtatgcttgcccggacatgtgctcttacacaacggccatgtatccgcacaagcgcacgcttgggtttcttggcatggcttcctacaggtcacagcttaggggccattccagtcagtttttgctttggtcagtttcaagacagttccccagggtccgacggagccatctagggcatcgattgctgcctgagcttgtgaggcactggcgaaatcgacataggcgtagtggggagcagtcggtgcagctctcccttggtaatgcggacaaatcgttttgcttattgcttgtctgtcaagcaagtaatgtggtcagtaatactttgacaagcgcataggaaactactcacatgtcaaagttttggaagaactcggctagtttctcgttcatgtgagcctgagacgacggcttaggcagaccttggacaatcaagcggcattccctcgcagcatagcccttgaaatgctgggctgcatcattcctctgccaccgatcaaacacatatcccgaattctggccactgcctttgcgttgttcctttggaatgcatggtttcaccttgaccggccgcccgaggaattcgcggccattcagttcgcccactgcccggtccgctttgtcctttgtatcgaagtcaatgaagcaatacgaagggtttctgccgctgaaaggatcaatagagatgtgctg

SEQ ID NO: 78 - DNA, 5583 bp, Emericella nidulans
cgtagaggtgggatgttgggacataccggtgaatggtttgattctttgtgagctagcgctataccagcggggtcgggaccaccctggaatactaaatcccgcacctgaaagtctttactgtatgcattagtctcctgttgtgtgacctgggcaggcaccttccaatctcataggtaagatctcatcaggctcggctcggctcggctcggctcggacaatcgggtgagcggacccttaatgcatgtaagaaaccaacagaacaattctttagaaacacactaggatgcaaagcgcaaggcagccgtcagtgcattctgacagttcccctcaaccgccgtctggttatcgacaaggattcctagaacaaactggataagactaggctgcggcataaccgcaaccgcggctatgagatcgataaccatcaccatcaccgcaaattcgaggttaaccggcggtgaaaccgcggttaacctcactgtggccgcactagcataactcttgcttaattatcagttttgagcgccctgcatggtagttatgaagcttataaatacttattaatatctgttttaaacacatgttcgagtttttccaatacagacatcttatttgaagacaattgcactgtaaatataggaaattagaataaaatataaaaaggagtctctaacccactggtccctgggaacggcagaatggtgtaagacgctcggagtaacgttatataaacagctatcggagcgtctgggggcagccaccggcaaggtgcctagtcaagacaatagagcaagccttatttgttaggagattacaaggtaataggtaggacagagcagaacgaatcgcttggagagctaggcagctaatggtctttggtgcatctatatatgtatggcagtccgccgtcgggcctctgttggttacggttagctgccctgtcgggccgttcgcccaaccagtccaatatcttccttcatcgggattaatgcctgaggggtcaggtgtccatcatgacaactatcctcccccaattccagcaaactgtctcagtttgctctagctactttgagtaatacaataattaatagtattctgataatagaagaataatagggtttcaggcttgaatagagccattaatcaaggctttaataaaggaatttctgtcttcagcttagttagacttgttaaacccaacccacgaaacccgccccaacccgccccgacccgccaagaaacgggttgggttagaccttctaattatctattgggttttggatatttttggctgccccaaagcccggcggagcaacccgctgggttgccaagatatctgaataggtatattactgtatttagattatattttcttacttagatggtttataatacaatatttaaatacagtattttattaactatgtaaatcactccttattagagtaatgatatgcataactaggttattttgggttatttaggttgggttagaattatttgctaaacccatgggccgtttactgttgaggtaacccaccccaaaaaccgcgtgggcagatcagctaggcctgaaaacccgtcccaacccgtggtttaacaagtctaaatagaagaagaaagtattatattattgctacagcagctccaggagctctgtacagagatatagactcagaaataacagctctaagaagagaataacagcttataggtagaactataggctgtacagaactcgcaactaagaaactatctactagttactactacagttatatctgcaatacctacctgtcacgggcgagccagctggcgacgacctggcctaccggtgcctatccgccagtaggaatatgagggatcgccagagccgtaccggtccgccagtaggaatatgagggatcgccagagccgtaccggtccgccagtaggaatatgggatcgccagagccgtaccggtccgccagtaggaactcaagggacgagccgtactgggatcaacccatatattgttgcagtgggatgcggtggtatacgcaatcaccaatgcgtcactgtaatggtattgcttggagatgccgaactaaccacactggaggttatatgaagggcctcctgatgccatgtacatagagatctccaagcaatcctttcaatattcttcagtaccaattaagctccctccattggataattattgttgatagtcatcgcttcgttgtagctagagaaccccgacgttagaccacgtcttacactgagcctcttgtggatgactgtttaacagcagtacttgggcgactctaacatgccagagcggcgtctgctgaaagttatgaattctggcagcaatgaagatattgcgagcttggctatgatacagttgcatatccaagggcaggatttctggaaagttggtatttttagaggtgtagtatgccaccatgttgctgtagaatattaacagaggcagaaagattaaagggaatctgttatcagcttttatctcaggtgagcctaaccagtgtcgacactagtctgctattatataggagaagagaattgtgaaagggcctgttgtgctagctatgctcaaggtacaagtattttcttcaaaaagttgctttgtttccaggaggagccattgaagggacatctctgcccggctgttcacaagtaagtggtctgtcatgtcaagccaaaagtgggcaagtacctggatggattcctctggaaagaaacagtactcctgatggcgcctggctatatatacttctgcaagccagtctctgtaggcttccttgctgaataggttgttaacaagggcagagatttctctatagagcttccctgttttttcaggacctacttgtatgaaatataatagcaggaaaccttccccatagttcttgagtttcgccaaccatctaaaagtaggggtgcactcggtgcgggttgggtacaacccgcagggttagaaaccaacccgcgtgggtttgcgggttctagataactaacctgcacctagacttgttaaacccaacccacgaaacccgatccaacccgccccgacccgccaagaaatgggttgggttagaccttctaattatccattgggtttggatatttttggctgccccaaagcccggcggacgaacccgctgggttgccaagatatctgaataggtatattactgtatttagattatattttcttacttagatgttataatacagtatttaaatacagtatttaaatacagtattttattaactatgtagatcactgcttattagagtaatgatatgcataactaagttattttgggttattttaggttatttaggttaggttagaattatttgctaaacccataggcagtttactatgaaggtaacccaccccaaaacccgcgtaggcgcatcagctaggcctgaaaacccgccccaacccgtagtttaacaagtctagtcgccgcccttaagggcgcaactgtgaccccatctcttgccaactcccgtcacggtccactggctcgttaggagcattcgataccacgatggcttcgcacggcaacccggagcggctaatgactacccgcgctctcagcgtgcgcgtcataatgtgcaacagggtacccttgatgacttaggaccatctggtaaaatttatatggactggactacgagaggtaacccctcgtgctcggaatggctaccgcaacctaggcgggagccgctagcaactacttagtacttgtagttagttagtagctgccgagttgactaatggacatggaaatggtcacacgttcagggccttagactcctggtattattaaggcagctttgcccttctctttctccgccatccaactcgattcttcccatcgtgatatacccactgatggcccctcctgagctcccctcgtgggccagaatgtaccagcctccaaatcaccatttcctccccctcaatttacggatcataaactaatacactctgttgtaaaagcattctcatcgtcctcacaaccctctctttcctcccgcaactgcacaagctgatcgcttcgagtgacagctccggcatatcgccctactacgtcctatcaaacctgcttctcgcgacgaatcacttcacgatataccttgcgctctgtgtcaatgatacctccggcggtggtgtcgtcgtccataacccgccaagcatagcggaccttctcaacctcacccatgtgtttgtggtttggctactattctccctggtgtaggtctatctaaatccaacctaccatcgcaaagaatatttggcttgccttgctaaatagcgcgcactgatgttgtattccagattcgtcctcacgctcacctatctaccttccgatggccggcccgcgaaacgccccgtggtatccatctacatcgccttcctgctgatctccttaatcccacaagtttatgatatcatcgccgggttcaatggcctcgcgcactccgatcgggaatggctcctcgtattctttgtcgcaggccatctagcaattgtgaaccccgtgcttacaatcctcgctatcgtctcggctaggatccaggtccgtaaaataaaacgaggtacagctgtcactgcattcagtacactgggccttgtggcgcagattatcacttttgcagtggtggctgtctcatggatctggcgtgtgctatatggagatgcaccgcgcttcgtggagaatgctgcgctggattggtatactaagttcggatggcctgttgtgggtaatgcggtgtttgctaatgtacattttgtgatactgtgggtgattgctcggcgggagcggggtggcatggattcagttcaagggagcgagggagagacggaacctttgctatcttagatcgcgggtagtgtattgattgtggtttatactgtgatgctctacttgctatatagaggcttgtgtttagtcctgctcctcgtagactagctcgatagcgtcggaagcaggtaccaccagcttcggccgccccccaatgtccttgggatacgccaccagagtctcgttgatagaagggaatgaggtaagggcggcagccaaatcctcagagccgccccagttccaccagccaaccacacaccccctgtgctgaagacggaagatatcaccgattgctacatccggcgggaactcccaggggtctccatcgcaagcctccattgttgcctcccaactctcaccagggtgaagactcacaaacgagcttggatgggcgtgggtgaatccccgcggaacatcgattgggtacacaccgactccgcaggggaagacaggctggcagcgctcccaggaagcctcgccgcggcgtcggtctagcaggaaatgcgactcgtatattattgtggcgttcgcgaagaagattatcggactgggggttgggttgcccagcacgccgtgataggtgactttggtcattaatttcagttcgacgtcccactcgcgaccggtgattttgccatcgcccacggagagtgtaattgttaacaccggggcgcccgaactacatgggaaattagatttc

SEQ ID NO: 79 - DNA, 1849 bp, Emericella nidulans
gttcatgagcgtaacctgtccgtcccgatgctaatgacgaggtctggccgtgtgcatccgggccagatgatctcgccctcgcgaatagcggcctgagcggacaattggcgctgatacccccatcttgaaatgtcccaatatttggaagatgcttggttgtgaaatacctgtgagtttgttttgcatcaatgaatggtctactggctaggcagaatactgagttcataccatagcgcggccacgcagcatcatgcactgtctcattatcagcaatgtatatcttgagagctatccagggcaagagcaggaggaggaagcagctgctctgtctctgtacatgataagtgtattctaacatatctgctcttgccttcgcatctcagataaagaaacagtcgctgcgggcttgtcatgagtacttatacatcccaaagctgtggttcttcacctggtatcaatactttgtatgctgattgagcatgtatgcgccctactccacggtaattcgagaagaggcagagtgatccatcctcatcaacctgactagctgttagcgccacgcgaatacctgacaagagtggcggcgtggtatcaaacagccggcgcagggtactgaaagcctcttggagagcgtcgtcaaggacttccgagtcatggcggctgtcagtcagccaacttctcagaaagtcccatgactgcccgacaagagtgtgtacaagtggccgagttcggaatatccgccgcgccaaggtgatgaaccttgcccgggcctcgtctacgctctctccacagacaaccacgtccgataatatcagcccaccttcaagacgtccgacgttaagccagctgtccaaacctctacattggagcaatagtcattacgggagcacctacctgcactggtccctacattgagatcaaacgcctcccgcaagcctcccacgccgacaacctgactctctagggctttgaggaagcctagggtaatgatcccgcggataccgccgccgtcgagaacaagaatagtgggccgtttcgttggtgggaggagtcggactgtcaatgaaaagcacttcagacataaaggacagctggtcatttcaaaatggtactctgctccctgagcgcgaccgccaaatatgcaggtacatgtgtcacagatggcgtgtccacacggcaagacatgttcaggcgggcgacagaggcagagtagacagatatgcattgtcttgacatccgcccacaccgacatgtcctggcgcagggagtctcggcgaatttgacctgaagggacggctgatgacatcatacttgagacgaatatatcatgttgagctgtcggagcatgggttcctcccctgtccttggggtgcccggtctgcacagtcttagtcagcatctcattagtatttagcctagcttccttgtgcatccgcacccctgaataccagactccttcatgcttccacatgagcctcatgtcacgtgccacgtgatctgtatggcatgatgtttggtttggtttggtttggttttattatttgggttcacaggtcggcgtgggtcaggattctgccatcaaattcagccagtttctgaaccacgctggcatctgcagtaaacctgatttctgaaccacgttcacctcgcccaggtataaggcgccatgcttttatttgattggttacccaccagttgtatcctctcgtacccaatattcagtccagtgtctagtaactatactgtccaagatgacagactccgagccccaagaccggattattcgcctggttaatgacttacctattatcaaggtaaagtttacctactgttcaactactgttcaggc

SEQ ID NO: 80 - DNA, 3496 bp, Emericella nidulans
  unsure (1)..(3496): unsure at all n locations
agacgatctcagcccgctggcctaaaactcgcggtggcctgactagggtattatttagggccttcgtcgtgcccactgcccagcgcccagtggtgcgtctgtaggtacactcgagctcccccaagccgctcccgctgcagtaagatggctatagcgcctctttcttccttggtcgcacgctagcagaccgcacacgtcatcccttgtattgtcattggggttctcggagaattattcttttatttttttatttttttcttcttccctatttttttggttgggtacaatactgcctagactacggtcaacatctggggtcgatcctgaggaaggacacagccatgaaattgtcagggatcgtcatcgtgcgccaatcacgtccaggcctttcaggcaagcctatgccctatagagcataaggagtacagtccgaatgccgaaattcgcctaaaagttctcacagagcctctagcgccaatgctaggcgcctcgctagcagcgagctcgagatccccatcctccttcctcaatctggttaccttccgtgccctggcgccttagcaggcgcacttgattttgcaacagcacagccagggatgggccaaggaggggagtccggggctgcgcttctagcggcgaatacgaagtacttgagagcaccgtttccctgttgatccatcctgtccgacttttttctcttgcgggacagccgtcggactcgggctgacaggatgttattacctcgacatttccggcgactagtcgccgttgcgatcatgctcacaatcctcatcaactggcatctactgcggaagacacatggaccggctgtggctgatgcgcgggcgcaatatccacggatcgcaaagtacatagagggtgggaaggggagcggcggtggtgagtcctctgtcggatctcttgtttctcttgagaagcagcgtggctgacctactctcatgcaatagcctggcatctcccgtcaacatggactgaaaccccgaacacgcccgtcaacgatgtcgtcgcagcggcgcaactggctctaaaccgctcgagcaacgacccttccggccaccttccgcactccaacatcccccggatcatccatcaaacatggagagataccaggttcgagaaatggcgaccaaagtaccaggcgagcgtggagaaatggctgcgcgtggtcgaagaggaggatatcccgtacctattttgggatgatgccggagtcgctcaattcatgcgaacctttgagccgaatcttgaggcggaattctacggcctgccgagtccggttgagcgctcggatgtatttcgcgtgctggtttgcaagtggatcggtggtgttgtaagccctccagctctctttgccttttttctctgacttgctgacaagctgcatctgtagtacgttgacatggacaccgagcccatccggtcgcctactgaatggatcatgcccaccgacctaattccctggaccgaccagaagacaagcaaactttatcactctacgcaagctgtcaacgccatcgtcggcatcgaagcagacacaaaccctgacactgacacctactggcgcatgggctacttcttccccatccaactcacccagtgggcattcgcattcgcgccgcaccaccccgtcctacaaatcttcatcgaccggcttcacgagaccatccgactcgtcacaagggatcagcagctgctgcccgaatccgagcagagcgccgcggcctggactgggtcgaccctgtgaacctgaccggcccgattgcattcaccgacagtgtgcgcacgtatctgggccggaaggctgatctgcgttggaacgcgctcaccggactgcatgacgacggtaagacaaagctggtcgaggacgtgcttgtccttccgatcaccggcttcagccctggcagcgcgcgcttccgtaatatgggctcgaagcctgtcactgatccctcggcacgactctaccatcacgccgagggttcgtggcggcattggagtctgagagtcgagatgggcaagttttgccgcacagcgtttgggctctgtaaagactggtcgaaggtgtcgaatggggacggttggattttctgatgcgatgtgatatgcgcttttacgacctctatacccttgatgtttgtttatattaggacgatatttaatcatgtatagacgctcgatgcacgaatgaatagaatgacttctacctgcagctccaggtcgtgagcctttgctcaaactttcaagagccggaggcgccagtcgggacacctgccgcaagctccttgactcttccaggcttatgatggacgaggctataaacggcccccatgtagcatcgctacgcgccagcagctatacgcaaccgctggtgcgactaaccagtatgtagaaagttgctgccttcatgggagcggcacatggcttactgtaaggctccaacagcgcacattggctggtctggactctgatgggaactcaaggcatggtcatattcccaatttaagcttacagtacgtagaaaccttgctcgtatcagctaaccaatactgagcaaatcttatggatctgtctcgaccgggccctggtactcggtaactgggagctaagctcagcacaatgacgaaatttgatccacctgtttgccagataccggccgcgtcccaagaagaaatatcaagccagcagagcgactgctggggctgttgctaagctagtccactggtcccattcaagggaaagccgtgggaatcaggcaacggtgcgagtactcgacgctttccaacaacgcctgactgaacggacggaatttttgttgccaactggttgtgatggcatgggatagagtctgtcaacttgtctggtttggttaccagaaagacatccaacagcccctcacaatcgtgccatctcatctgtcttacagattcccaatccaacgaagcttggtatttcggtagagagctcccaacgacggatacactttgcaaggcactctgctcttccgtcctgcgacacatctgttccttgattcctcccctatgttcactttcatcgttgacttgagccatgcatgagttctaggtacatgcctcagggtaaactcagcagaggttgcattagagtattccttccgtaacattcccaatcccgcactcgacactatcctaccatgcacagtactttacctaggagctgttctactacatagatgtcagagcccgggctgtgtgagaatgctgggaccaacagaccactgcaaatgagagcacatcctgctttcaaagagaacgggcaaagtatgctcagcgggaccctcagcaggctcgtcgtgggctccttgtcgacccaatcaacaagcgaaaatcaatacggaatgccatagttcatcatagttcatcatagtccataataacttgattgactctcatgagcgtgtcngattngcagcttccaacgtatttaggtcatcccttataac

SEQ ID NO: 81 - DNA, 3194 bp, Emericella nidulans
ccgaactctacgcgctagcgacgaacctgcatttggtgccaaaacttgcaaaaactcgcaatccagagacgttaagcagaccacacccgcccgcgagccgcgatggaggtcgaggcagctagtgtaatgggcgtgctgcgttattttgaccgaagatttgccgacaaatagactcctggcctgtcttttcccgcagctctcgtccgtttcttctctctctcttttatttatttatttatttttttccacgttatgatacccaaacctgactcattcacgtctgagtttgtattatacgaatcttcactccatggatgaacctgaagccaatcatctccaaacagggacaggcggccctgttcgagttatccggtctttagaataggacctgggatggcaaaaaaaaaaattcatcccacatagaagggatacgaccaggattggggttactgcacactcggctaggcgagtctggattggttatgttgttacgctacacatgcgtatccggttgatttactcacctggagtggtatattatgattagacgggtgaatgacggcgttcgtgtgcttttcgtgctctttctcttttcttcaggcatggtcgggttggtactttacaagtctgcctacgtactccagccatgtaccctacataacgcatctagtacacagacttaaaattgcacagagcaaagaaaaattctatcttaacaattccctaacgagctaaacgtgcttcgttacctgtaatctataaccatttcgaagcataaaagattggcgcctctccctttaagaattatatatagcaagctattattagtgccattgtatttcaataagataatatttgttatatgccagatagccttattaagcgtgtataggcccttatagactttgttaacaggttgaggagcagtttgttgtccaggcagtcctccaacctgccaagctagtcggaacttgagtatcaacacctttcactcctatcctccagcatgcctgacgacgcgagtgagggagctcagatgactcttgaccaagcaccgatttgaccaatgatcccctctaaatctatgaacaatgcattgccgctctcgagggaacacgagtcccagatgatcccagctcttccaatgcacgatatgtggtctaccaggatgtatgctactcctacgactctgcgacaagcccagaaatcatcgacctgcgcgggcgcttgccacagtatcccgagttccttggggcacgcaacaaacggctcattatgagcaatgtcattcctgaaggtctagatatctcaaggtccagccctattgtatgtgaagccctgattttgctgaagaagatacttatgccaagttgctcagtggtaacccgctacgcgctatcaggttggctggcagggctctagtattggccttacatggtagcggtatccttacctggttaacaggctgatctgccctgacaaaatagttcctaacactctattaaacatataaccagtcatgtcactgatatatcagcttttttcttaagcaacgtgcttagttttatcttacgaacatctgtttacatgatctccaattccattaactgtcattatcctgtaacatcgtaggcagagcatcctttgtcacgacatacaatgagacaagtagaatcttagctatatatatgtatatcttctggaggcactccctgttactatagcaatggaatcaattatacaagctattcttctttactttaggttagtttattgttattggcatgcatttctgcgtgagatgtagggaatttaaattatgataaaattgcacatgacattataaacccatgctgctttatatatattgcgagtttcctaatactctaaagctaaaatggcaagtgaaggcgtcccctcctgttaagcagaatatgattatcaaaaagcttagggaggcatagtaggttgttttagtaggtgagtgctgagctcttcaactgcagtcaaaacgcacaaggcgaccagcctgtatacatagcccatttgcttccaggactttagctagagtatctgactatgtggcacgctttaggactcagtttagaagaaaaataagcctcttacccctcgttcagcgagccgttctctgcaacgaaaatcttcctcagcttcctcagcgattcgctttacccgtgctgcaccgtctatctatagcagccaacctgacaggaatccccaaacaagaagtcttcgaactacgtcttgaggggtggcaatccgacccgccagacagtatttcaagctgtcgacgctggactactgtgttgcgcaggtctctagaagatcaggtccgacttccccttggcaatcaccgtggcataccttctgataactagacagctgctaagccagctgctacctcgtcctcccagccccacgagtgtctaaagaagttactgtcagagctacggtgactgtggccctccttaagagcaggcttcaatcagtcatatcttcgtgatctagtcagacggtcaccgacttgtcttccacttcgctctctggtatcagggcacttatatgctgcttattcggcgacgccctgctagaaaataccggtagcttatctgacactactcgtaaggttcttcatgatgtcaaggatcttagtgcttatggtatgtagtctgctcctagctctgcgctcgacaagccgagcggctgtcactcacgttgtccactcagagcttgaagacgtttatcctcatagaaagttccagcctgacagcgttcgaagaagttatgagtcgtcatgtcatcagtgaaggaaatttgctagcgagaaagttcaaggaccgttaagaacagagctatgcagctctcaaacctaggcgctcgacgctgtacgagaagcgattgactaagccacttgtggctggctgggcctcgtgctgttgccctgtacaagtctgcaggagatgtgagtactctgcttcctacagtggtgaagcgctcagagcctgtcaccaatacgggggatggtgtgggacggcttggtatagcagccatatcatcataggaggacgacttgcttattgatcggagtccgatcagttggacaccaacgaagagaccaatggtctggtatgctttgtcggagtagatgtttcggctttacactccagctgagg

SEQ ID NO: 82 - DNA, 3059 bp, Emericella nidulans
ccaaaccaccgatgccgttaactccttatgctaatccttaccagacaactgttgttcccttcagggatttttggtcttccactctttcggcggaggtactggctctggtttcggcgctcttctcctcgaacgtctgtccacagaatacggcaagaagtccaagctggagttcgcagtgtatccttctccccgtgtttccaccgctgtcgttgagccttacaacgctgttctgtccacacacagcacaattgagaactccgactgcacgttcctcgttgataacgaggctgtttatgatatctgccgccggaacttggatattcctcgccccagctttgagcaccttaaccgtctgattgcccaagttgtcagctctatcacctccagtcttaggtttgatggtgctctcaatgtggatctgaatgaattccagaccaaccttgtgccgttcccacgtattcactaccccttgatctcgtacgcgcccgttatttcaagcaaccgcagctctcacgagagcttcaaggtccaggatctcactctccagtgtatgttttcactttggctgctaacgtattccgtcgcctacatcacagaaatataataactgatcttgcatctaggtgccgagcctaacaaccagatggtcgtttgtgatccccgtaacggcaagtacatggccgtagccctcctgtatcgtggagactgcgtgccccgtgactgcacccaagccatcgcgtcgctcaaggccaaggcttccttcaacctagttgaatggtgtcctactggtttcaaggtgggaattaactaccagaaacccgcgcgtgtccccggaagcgaactcgcccctgtcgaccgctcagtcagcatgctttccaacacaaccgccatttccgaggcatggagtcgtctcgaccacaagttcgaccttatgtactccaagcgggcgttcgtgcattggtacgtgggtgagggtatggaagaaggtgaattctccgaagcccgtgaagacttggctgcccttgagaaggattacgaggaggttgctggggacagccttgatatggagggcgaagaagccgagtactaatcaagggacgctccttgccttaccatggctggtttaattcttggtatgcccgacgtctcttgccaaagtccaatgtgtattctgttaatctgtttgcgacaccccctttctttcgtgtagcgttcgttgatttgtttgcccctttttaaattcttccaatggccttaccgcttaattttcggcggaggacccataaagtacaaataaatataatttctaagattatgctaatcaagaccacaccgaaccgtagtatatatattagtctaagaaaatgtccagaatatctatacatctatgtgactcctactcgtcacgaccagcagctatctcatgttcccggagaagcttcagagctctttcgtacgtccacatggtgaccgcgcttgccggggcagctttgaccaagctcacagtcaaaccgcggtacaggccacgtaggccttgcgtcctgaatattaagcccatggtgttgaagaccccgcgatactcgggtatattgcgatgtacgtataacgcgcgcgtcggaccctgaacctgtaaccgtttccgcaccaaatcaagcgggaacacacccgtcttcgcgagaacactggcgacaatgccggccgccgcgtccccagacccaggcggtaagggaatcggcgatagttcaggcgcagtcgccataaccggtctcagcgcctcataggtcgcaaagaataatcccatatacggcacaatttgtccgacggcggcactgcacccccgaaagaaccccacagtcccctcagtcttcgcaatatccctaagagacgcaaaaagcgactcgtagacgcgattgtcgccagatccctgtgccgcaaaccgcgttctcaatagatcaagagggtacgtggccgccgtagcgatcccgccgcccaaggcgccggatatgaacgactcaatcggctgcgggagtcggtgcggatcgagctgcgcgagaagctgtgttgttgtgcggtatgtcgtaaactggataccgccgtaacagacgtacagtagttctgcgggtatgttgcccttccatagtcctgtgaggccctcttcgcgaaggatggtcttgattgtagaaagggtgcccttgtagactggccccgtgatgtgggcgtgcgaggttgggtcggagagagaatggatttgtagttgcaggcggattttcacgacgtctagtggggcgatgcagaatctgaagttgtgtaagacgacaccgttagctgggtgttctggggttggtcaagaggatgaagttgcttaccgggatataaggccagctatcccgcccgcgaggacgacttgtcgccgtgtgccctggtgttgttagattgatgacctgtattttgtgaatgcgaagggacaggagatttgtacttcatccttcaggtgctctcccccggcagacatgcatgtgatgaatgtggatagcttgggagcggagtttctcgggataatggagtgattaagggatgcacgcagttgcctcggtcatcgggaagttatgggtagacagttcttctgcttttcctcaattgaaatgtggtgccagattaatatgtgggtggaaaaattacgtatttgatgataaactagaacttcaagaccggactaagagaccacgttgtccacctgtaaagggaggggttccgtatccaccacaagttttctttggcctcattcctacaacggttaccctccttgattgtgtatttttaattgggatcctatagaggttcgtcgttttacatcccttttgtcccctttaattcctaattccggcctgtggctaccccccacattattaagtgcatgtttgtaattctttcctccaatttccccggtgttttctattggaatactttctctcaggaatatttttccttggttattactataattttcctaaaaatcttttaacacatttttgtcttctctcttgtctctttcttgttcc

SEQ ID NO: 83 - DNA, 577 bp, Emericella nidulans
gagagacctctactcgtcatactataaatatatataattattcttaaataaactagaaaaaccagggcgatacttttaaaataaaagggggtacctctaaatatcaaaagataaaatatcaacgctctataaaattcacttggaaagggaattaaaatagacctagaaaaaataaaactcattaagaaataagaaattcttattattataaaacatatctaaaaatttctagactttgttaatatttactaaagatttattttttactttttagggattatatactcattaaataatttaataaaaaaagaaatatttctatagactaggaagtactagaataatcttaacttaaaaaaaaaaaaaattactactagacttatcctagcaacctttaatcttatttattatataacaactaaaactaatttcttagataataatatctgaagagttctgtcctaatataataaaaaaaatcatttctatatatctactgttctaaagaaatcccctacctaaattaattataaaatttatcataacaattcataatcactatttaatacctcaagtc

SEQ ID NO: 84 - DNA, 674 bp, Emericella nidulans
  unsure (1)..(674): unsure at all n locations
gaataaccctactaaagggatcaggccgttgagcacttcggatacctggatatagtctcatctaacgcgggaattgtctcgttcgggcatgtcaaggacgttacgccagatgtatgcgtcccatctccttacgaaagtcctgtagagctctgacctcagcaggaattcgaccgagtatttcgggtcaacacgcgcggacagtttttcgtcgcccgcgaggcgtatcgccatctgcgtgaaggcggacgcatcatcctcacaagttccaacacagccagcgtcaaaggcgtccccaggcacgctgtgtactcgggctctaagggggcgattgacacctttgtgcggtgcctagctatcgactgcggcgacaagaagatcacggtcaacgcggtcgctcccggcgccatcaagaccgatatgtttctatccgtgtcgcgagagtatatccccaatggggagacttttactgatgagcaggtggatgaggtacgtttgtctttgtgtctagtatctacggcggctgctaactggacagtgtgccgcgtggctgtcgccgctaaatcgggtcggattaccggttgacgtggccccggttgtcagctttctagcttcagatgcngccgnattgatcagtggaaagattattggcgttgatggggggcctttagataagc

SEQ ID NO: 85 - DNA, 767 bp, Emericella nidulans
aaagtggtcgtaaacgaccagagggcactgtcgaatcgatgcccggcggaatcgcgcatgttacgtgggtagaacggcgacttaagcaggtagagtttgccaaggaagagcctactgtcctcgttttgggtgccggtcagtctggtctaaatatcagcgcgcgcctgcagagtatgggcatctcatgccttgccattgaccagaacaagcgcgtgggcgacagctggaggaatcgctaccggactctggtagcgcacgatcacttcaatgtcacccatctggcctatctcccatttccgaaaacctggcccaagtactcctccaaggacaagctggcagactggttcgaagcgtatgcgacgatcatggagctgaacatctggctggagtccactgtccagtcggcggagtacgatgagggccagcagtgctggacagtcaccatccggcgtaaggaccagcagcgcgtcgtccggccctcgcatgttatctggtgtggtggccaatttggagtcgaaaaggtgcccagcctgccaacactttctgtctttcggggaaccgtctaccacagcaagtaccaccgagatgcgggcctattatctcccagcggaaagaaggtgattgtcgtttggacccgaaacagtggtcacgacatcgtgcaagactttcacgagcatggagcagaagtcactttgctccaacgcggaggacatatgtacttcggcagcagggctcccgctgtgcagaaatgcattcgtgacatgagt

SEQ ID NO: 86 - DNA, 573 bp, Emericella nidulans
ataaataaatatatagctagttctttttctatcctgcttacttaagttacttaactggtccagatataataaaaaatataatatatactaattatttctttataattagtatagctaagtaattatcttttaatatagttattttagacctataacttatttaagtaagttaatatatataataattctaattaaaataattaactactaagtagtagatactatcaagcagtagatttttaccctgactaccttaagtattattgaacctattatttctttatacatttatataaaatacctcttttataagagtcttgccttcaaatagccatgtaagcctataaagattttaaaattaaactaattttaaagactactatagaatatagagtgcctgaaaaggccttatatatatattttaaaaaaaacccacgcgcagagatatatataaataattataaattagatttaaagaggaattgcttttaaaagcaattaatagatatagatatacaaggatttctaattcaacctaaatttctaatgaggataatataataaaactccaga

SEQ ID NO: 87 - DNA, 1020 bp, Emericella nidulans
caggtcgactctagaggatcccccaagctgaaccagctaggtgagctggacaagctaggatgaactagctagctaagctaggtgagctaaaccagctggaagactagctagctaagctagatgagctgaccgacagctcgactgagctcggtgagctgatcgtgtactgacccagttgggtggtctggtcagctgacactcgagctggtggactgtggtagctcacgggtgaaaaggtgtctcggccaaaaggtgtaaggtcgagcgggtaccaacgaacggttgtgaccttttggaaggaacggatgtgacctttcgaaaggatgcaaagaacggatgtgacctttcggaagggtgcaaggaccggatgtgatgcttcgggaagcatccattcgccccctatataagggaggacgcccaagcaatctcacatcatctcacaacatccaaaacatcataaaacattcttaaaggagtcccaacacatcctagagttgttggtcggaaagggggtgcggctcggcgagtataactcaatcgaactgatgcgcatgctaccttccggtccaacgattcgatggagtgtagaggatggagagggtagaccgttcgtcttagagacgaatcggatctggtagacagatcgttggataggatcggtcagaccgatcgtcagacggatcagatcggccagacggatgggacagaccgatcgtcggacgggtcggatgggacaagccgatcgtctgacggaacgggtcagacagaccaatcgtcggatgggatggatcgagaaaagtgttcgaggaagcacaaggataagtgcatccgaacacacccaagggtcgcccatggatgcaatcttaccgataaagggagaaagcaccaagaatgggtaaggaacgtgattcaccatataggatcaacatcgcggccgccttcatgtatctatctccttagccatggtgaaccgatcagagatcgtaagtcaaagggtgactcgcggataccaacgggaaa

SEQ ID NO: 88 - DNA, 2374 bp, Emericella nidulans
aagaaaggaaaaacacaaaagaaagaatggagcgagtaacacgatggctggtcttccggtcatggggaaggaccttttatgcaccggaatgtttcgcagagcttggaagctgattgcctgggaccccatctagatctgcagaagctggagcaggctctactggctattgttagcctgtagctggcgtggaacggttggctaccagcaaagatgtagtggcgcgcgtcaaggctcgatcgaggtgttgcagaaactcattggcgctgaagttggcggcgccaatttgaaacgccaaacgtacagaattagagaacaatggaactaggatgtttgtcaataacgcatattattaagatcgagtcctgctaaaagctcgcatggacatcattatcgtcacaatcacctcgctcatgcgatgctcaaacaacgaccgtaaagggctcgtcaacaccctcgaatgcttcaattcgcccattgaggcccttagcatctccgtaataatggaatcggtagactccagcttgcacaggccgaggactacccacggcgtagtagtcgtcctctatctcccattgcagagtcacctcactgtgccctaagacggtattggtcctcttccaccgatacacaagactccagtcgctgtcagtccgcactgtttcccaatgcccgtcgtctgtctgtcgctcaacagctgcaaaagttgattctagccgcaagttgttccttggattggcaccgatgaaagtggcgcttgctacatcgcccggtgcatatctggtattcccagcggacgtgataatatccccgtacgctttaccaatcggatgaccgtcgtacacgacggaaggaatgaaactcagagatttttcggtgttgattggcggctcaatccccgatggctcaggatattgacccgctgccgcggactcatcaagatagggtaggtaagtcagcgtcaggttaacgtatgctgccagagtgttgggtccgtaaagtgtcgaggctccctcatagcgctgccggctatactcctcctcggtagtcacatagtgcgcataactgttcgccggagaccctaagactaccagagggtcaaatattgagagaatgtctcttgccgactttgcaattgcctctctccaccgccgtccggccatcgtcgtaacttcgctcgtggaggtcacgataatcagctgcccaatacggaggagatgtatgtctactatattcggagtccaagcataaggaagactcatctctcccacatccagcaagacgtctttaggttcttggcatttcctttgctcaggcgtcggagtgtgaagaaatccacgagctatataccagagagggttacgctctgcaggtgtggtgtcattctgagtaaagtcgaaatatccaggccagtcagtcgtccccgcagcgaaggagaatcccagagcagctgagcatgtggtcagagtgctggaattgaagggtgattgaaaagtgtagcccttcaagtcctcaaatagatgaaacgagctgacctgggagcttttacgaatctgaatggcgttggtctccatctggctatacaattccttggcagccgagtattgacggcgtccaatctcaaagcagctcttcgcgccgtaactgtcctcacggaagaatggcccgcgcccatggcatgtggtgctttgtcctccgcatgtgctgtcagagtatcggcattcttcaccggatccatcgtcacaccatgccccgaggatattcggagacgtatcgccaacattcgattgagagaagccagccacgaagtcattggcaaatcttgaatcatcctgtacgcttctctcaaaaagccacgcagcaactcccttgttgtctccactggcgagagtgttgttgccgtaaagggacgtgccatgcacagggaagaacgtcaagacagccattgttttgttgtcattttctctgtcgaatctcagaagttctagcgtcttgtcaacattgtgagggtaccgcgccttctcctcttcagggttggcatcgtaagagtatgggcttctgttgatgttcgcgtcttcgacgtctattgtgccgaaagtaaggcgcccaggcgcaagactctcatgggctctccggatggataacagtacgccgtcaactatggcattgtagctctgtctatcaaagcctttatttgggatttgaggcagtaaataattataccaagcgcccgggcccgaatgggagtgtgttcctgtgagagcaagattgtggtccccatacctggagtagtcacttcccagttcggcgagaccttttaaaacccgtctcgaaccccagtgtcttccggtcagggtgtcaaggactatatagatca

SEQ ID NO: 89 - DNA, 528 bp, Emericella nidulans
ttatcaggatcaagtgcagccttttcacgatcggagagcgccgctggaccttctggttgaagaggtttacagcgcatccgacgcttccattgtcttctagcatccttctgcggcatgtcgaaaattcttgggctgattgagagagccgtcttctgcatggacagagtacagagtaccgagtacaagtacacagcaagccgctcgggaattaagatgcaagaaaggttccacatgatgtcaacgacgagtatagactggcaaaaatacctgatgacaataatactctgtaatatggcgattaatataatgatacagctgttaggcgtggcaggaatcacatgcgaaacggtaattctagaaacgttctggaaagaagacgagggattcaactgcattgagaactccaagcgcggattgggctgttattttccttctgccgtgtttcctctctcaagagtcctttttttgcccttttcatcatttagccgcagttgttcgacttcggaccagaaccacgccatgagttag

SEQ ID NO: 90 - DNA, 857 bp, Emericella nidulans
tggggcagccctcggcaggcctcttgctcaaggaactcgcgatccaagccccactgtacggtggccgtctgctgccggatagtggggtgctggtattgtgctggtgtcatgccatctgctgggactgtcgaaacagctgcaggaggcgccagtgccttgaatgagggtgctactgctgcagatcgcggcacttgggacaggattgatacagctgaggtttcggacatggatcgagatcaacaatcgagcagaacgggcctattttgtgcattggggggatcgttgggccggttactcatgtcgacgttgcattctgctgctgatgctgctggcgacagtgatggcgatggcgttggggttcgctcgtcctgcctatccggccggcaggcatcgcatggcagcttgtcgggatcctgatcctggcactggtggcgcgtgtatccgacgaccgtccccgccagatactggtcgaggacttacccaccactccccaccccttgacgaccttcaattccccctggtatggcttaaacttgggtccgacacccgtcaacccacgatttagggtcgtccagccttggggtgccaatactggctttttttcaagcttttagccttgcgtccttttttggtttattcacacattccggccccccaatgtaccccccgttttgggattcattccttccaaggtcttcaaaaaatctgtattttttagaactctttaccccttggtaaaaaattggtcctttacctttcatatgttaatcttttgttgtacaaactgctacaccttggtctttggtaaccacatgttaaattgtggtgagtctggatacacacttataattcctttc

SEQ ID NO: 91 - DNA, 452 bp, Emericella nidulans
atatgccgcaaagagggcagtgatggcattgtattgtatttagctatcacctaaccaacagattctaacacatctcgtgattcgcccggtgaatttctacgttcgggccattcggcggacggaatggccggctcgttctccctgaggctgcctacatttttctcgactgtaagtagatctacgttgcggctaggttctggtcttgatattttcagcacctcgcacaaataaacacaattattacagattaaaataacagtacattgtagtagccaatattgatccattggcaatatcaccttgaaaagaacatttcttaaggttatcaaggatgtaaccacaagctaaaaatccacacccagacaccacaatatgcgtttaagccgagctagttcagtccgcacccatcgaaattttactacaggatttgcaagaatgcagcagaccgttaa

SEQ ID NO: 92 - DNA, 794 bp, Emericella nidulans
tggttaccaggggttgatagcgttgccttccataactcaatctatggatccctcaccgggttcttgggcctcgacggaattcttgctgctggttacgataccccgattgacggaccagaagcctggaatgtaatggtgatgaccaatgacatgataaacgcgaataccggtaaatttgacccgcgacacatgtttggtgccacgaaccaggatgtttttcgttggccagccatcaaacagggtatcgaacgccaactcctggcgatgttcattacaacacttcacctcccgggtattccaatattgttgtggggtgaagagcaaggtttctatatcttggacgccactgcagacaactatgtctacggccgccaggcgatgtcaccagccacagcttggaaaacccatggatgcttccaattgacagcagatcagtaccacaactggcctatcagcaaaggacgtgaaggctgtcatgacgagacagtaacctatgaccaccgcgacccgtctcatccgctccgaaatatcatcaaacatatgtaccagttgcgacaagattaccaggttttgaacgacggatattctgtccagaaactctccaatcaaacccgccagattttctatccaggctcgaacggaacggctacggagaccggaatgtggtctgtcttacgagactcagtttacaagatccaggagctacacaacgagcaaccggtttggcttgtataccagaatgacaacaagacggtggaatacaattttgactgcagtgataatgacacggcgtg

SEQ ID NO: 93 - DNA, 582 bp, Emericella nidulans
taccaagaacaccttatacttttaagcaactagaaaagcaagcaactactattaaaagacttcttagggggtatatatgcagtcctttaacctctaccaaagctgctttaaatcagcttataaaagactataagttagctataaatagtactactcttctagcccaggaaaactataaactgtatactatatataaaaagaaggcttaaaagaggaagtaatctaatagatagatagctgctatagagggcctttctatttataaaggctagaaccttctacagagctataactaagctagaaaagctatatctactatactagtagaaataatagctgtagcaaaacagcacctactatatactctactaaggtatactaattactatattatagggtatattagaacaagatgtcctaaaccaattactagttagattttatttttaaatacaaatttgggctgacaatatggaattaaaatcttgattctggccaagattatgagatgtggccgaatcgcttacgtggccgactcgcttactgaatatgttataagttataagtatgcagaaacccgtc

SEQ ID NO: 94 - DNA, 548 bp, Emericella nidulans
atgatttaatcaaaacatatattctaaactagggttaaataataacctattcttataaaataacatatatttttttaactgataataacctgttataggggcttgcctatacaagtattataggatgctcctataacaagcactgcatagcatatacagctgtggtcacatggctccctatctatctctaatctctgatctgtccagtcctgctttctcttcttcagcaattccttcttatatatacagcacaattagataggaatacatcccataacaacaaggacctagacctgagtaacttggccaaggtctatattatcttagaagttggtaagctacctgtaagacttcgttataataaataataatcttttttcttttctcctttctagtgattccttatatatatgtcttaacttgagcagggatctggctgtaggtatatagaagaaaaataaagtacctagtagtataaataggtacagttctgattatatttagcttggattagactaaaataaatctaatctataataagtatacta

SEQ ID NO: 95 - DNA, 130 bp, Emericella nidulans
cgagccttgcgagcttcgtctctctgggctcttcaagttcaatgcccaatgcattcaggcttatccatgctattgaggactcaatacttcgtctttagcatgctcagcacctcgatctgcatatcacgtt

SEQ ID NO: 96 - DNA, 492 bp, Emericella nidulans
ataattattatagtaaatatatctagataggccctactactatatattatcctagctataaagaattattaatcttaatagtataataatataccaagaaactatcaactcagtatcagtaaaaataggtagataactaataaattaggtttagactagctttaaatttattttaatatttatatacctttataaatagttagatattatttattaattctagatagttatagtaattatgctactataggatttaataagttctatataaaaagaataattatttctttatatatatctccttatttattttattatctttaactacttaatataacctgcttcttacctttaaagtatttttataataaataaactataaaaataatagacaatatggtcttcttaattaagaaggaagatttcttatatatcgcccttctatttttaaatatactatatttttatctaatatctaacataattttgtag

SEQ ID NO: 97 - DNA, 3202 bp, Emericella nidulans
ggcacattcaccaaacccaccgacgtcgagattggacgtgccctctcctcctaccaagacactatccaaccccggatttaaggcatcagcgccttctcctatcgcgtgtcccgcgtgcattcgcttgaaatccccttaatcgcacaacttatgctccgctacacgatccacattaccgcccgcctagcgaattacagaaacaccatggaatatgaaggcggcatggtcctggagtatctgcctctacctgagcgtgaccgtctgtgtgcaactaaacgggcagtaacgctggcggagtggaaagcttttttccagatcctgcagtttcgctgtggcgtcctcttgctggtgctgatgctggctactaatgtttttctttatccggggtcgattgatgccgtcgtcggcagtgttccactcggtttcaggggtgggctgaatcgggtttttggtgtataagctgaccaatcatgcagcgagatcataacgtatgtggagttttaacagataccgataccaattaccagggttttgcttattttcgggcaagccaaggctcataagcgtccacgtagagtatctcattctactcaatacactgcgagaatggaatacatgatacagtgctgtaatcttcgagactgactccagatgcggcgtttgagtccgcggtgaacttcttgaaagcagagtacacagtatatgtgatgcgatgctggccacttgttatactggctaccggcattcctgatttgtgagcgccggccggggattttggtagctctataaatgtggtgctcctctgatcctaagattaacggagttctatgtcgctgaagaatgcaataggcataatctttgttcctagcatgtctcctctaacagagcatctatcacctacccggcctatgtaggtgggtcctttttagggctctactgctgcaattgttcggcagagtgcatgatagcgatcgatactatatatgatgtctaacactttgtactcgttgccatatcgaccgccaagagtacatccgttagaggacattgctgcctttaaggctggccattggagtcgaagttctatacagttgactgaaatcgattgaacggcgttgccgtccataacatgggtatgctctactgtgctatcaccgctccaatacatgtatagcagggtggagcgcgggtgtggattcacccgtttgagtgggctaaagtgggtaggaatcctcgtccctaacttgttttggaatccaggcaagaattttacgcatctccattttttaggccgaagataaggaacgtctgagtgatttatcttctgcacctcaagttggggccaggagtgatacggagcatttagcatacaggcagactggctttatggctctacatagcatcctctacctacgccaagtcgatatattaggttcaaactgagcaaagccctaagccaagccttaaggtcacaaaagcgtcccttaggagcacaatgtcgccgccaacagacacaaccataactacgcctattccttcacccaccctgaatcccaagtcccttagcaccgcaagaaaatgcctcatccttttcattgtcagctggaacactttggtggtcactttcctcagcacatcactcctcatcgcgacgcccgagatcgcatccgacctagaaaccacatctgagatcctcaacatcactaatgccgctgtgctaatcgcgatgggctgttcctcactaatctggtctccactagccgagatcttcagtcgaaaacgtagctacgatgctgcgacggcggtcatgctgcttgcctctattgggaccgcgctggcaccgaacatggctgttttcacaagtatgcgcgtgatctcgggctttacgggaacgtactttatggttgccggtcagacggtcattgcagacatttttgtgccgacagtgagagggcgtgcagtgggctgtctacaggtggggagtgtggcggggagtgccttaggtgcgtatcaggtcttggtcagaaactgaaggactactgtacttataaaacaccaactataggcccctgcattagcggggtgatcgtaacattcgcccactggcgcgatatctactggctgcaagtcgccatggcagggctgggctctgcactatccgtgtttgcaatccccaacattcaaagcgaagtgaagcagctgtacgaggaaaaagcagagctagactcgggatcagacactatcccgcaaagagttttccaagccctcgcccgcttcaaccccacgaaggtgttaaaactatacctccttccgcaaatcctcctctccgatctcatctgcggctttctggcaatcacgcagtacggcactttgacttcggttaggcacgtcatcaatccgcgctttgggtttacaacgccgctcgtcagtgggctcttctatcttgccccggggacaggattcatcgtggggagtttagtgggcgggcggttatcagaccatacggtgaaacggtatatcagaaagcgaaatggcctgcgtctacccaaggatcgattgaacagcggaatcgtctatttctttgcggtattgccgatctcaatggttctttatgggtggtctctacagaagcagtttggagggttggccttgccgatcatactggctttcttgattggtgctgggttaatgggagcgtggaacgggttgaatacgtattctgctggtgagttctgtctctttcttcttttttctttcatcccattcattctattctattcaatattctttctatattgcttatttattgattttcaatactaattggatacccgtaacagaagtaattccctctcaacgcgccgaagctgtctgcagcaaatatatcctgcaatatatgtttggcgctacggctaccgcggcagtggtgccgctgatagatgctattgggattgggtggtcttttacgatatgtgagttttgtcttctacttttctatctgacagagccctggctaagcggatcggtgcagttgcttttctcaaactaattggtggaagcttacttcttgtcattgcgcgtttggcgcccgataaggggatatgggtatatggtagatagagtaggttgcctctgtgggtagagttcctattaaatgaaatgtaaactgcccatatagttccttgcccgtacttgctggttt

SEQ ID NO: 98 - DNA, 519 bp, Emericella nidulans
tatttatccctgttcagactaggttatattttaataaggttgaagtatacttgctctagcagagcagtagtagttattattagtctccaagagatttgctgaggcatatttactaacttgtaatctttatatggttgcttagaatcatagtttatatctagattattaatcttaatacctgtaactgcttcaggaagatactacagagtattaatataagtataagctatcctttaatgctaaatatctatatttttttttagaagtagtagttttgctgattattaattatctatagttgtaaaagtatatatattattactttgttactctacaacctagagacctgataggtaatctctgatcttgaagataatattattttctttcttaataatattattgtcaaaatcctagctatatctggcttgtttaagtcttctagctctaataatactggtataaagacctggtatataggctatattagtcaaggtaataataatatttcctgattct

SEQ ID NO: 99 - DNA, 6659 bp, Emericella nidulans
ccgcatggagtacggagtacatgggcagaatatataaatgacattgttgatcagatcttcgacgccctgtcccgtaccgacattaaatcaactcccaagtctggccactcgcagataccctcacgtcttcttaatgtcaaattcccaactaccgcattccactctaattgctgatgctcaagggggaagtcgggtgaggtcagagatcatgttgttttttgcgtcgaattcatgtgacttttgaccacactccaccaaggaggatcagtgatcacggacctttcgacaggaaccaacatatgctgtttagtgcacccagttgtctgccaactatatgggaaaaagttatttcctgctgccagcgtggctcgtagacatgctaggagcaagtctattgttacgctacagcaatagtcggctgccaggtttggttagagtgaagacttggaaatcacacgttgggcattagtctaggcagatactccctacagaacgagctatgacactggcaaatagcccaaagacaaccccaactggatccacgccggagccccaaagcggcctagtgcattatagcgctgggtaacttggattgccaagaagccttacgggtaattgaatgaaggtattccaaccctattcatattgacacagttaacagggtcagtatctatcaaagcgttaagagagtcctttcaacgctatagagaggcctctgactaggtgattttctgaacgggcataaccatatggtctaccgtatggtttaaaggcagaatttcccggagaacgcttctgcaagatgcttcccagtttcatctgcctttcctcgcaaattaccataggcaaggcaaatgactatttagactgctgatgagcaggaaatgcgcatagttgagagtcaaagttgcttattaattgtcaagcgagcaagctagttagaaacatcacttttgaccctctataacaacctctgtcccagtgaatcccccagtcccagttggaatttgtgcactcagaagcgcatcaacttagtaggtgcagacacagacgctagaaagcccagttagtatacattgtcggcagtatgctaaaataccctacctctcctcgttgcagtagccaccgtggtaggttccgtccttgaggcactgtttctctattagtaaaaagttcaagagcttcccattgtaggaaacatacagaagcgctgcaggcagcatcgccagcaccccagatgtcaccgatctggcaggaggcgcgggccacgaggtcctcggagggagcggcaaaggccatggagccgaagagggcaacggcgctgaggatgatggaggagaactgcattttgatggtgtggttcgtggttggaatagattgatggattgttgtcttaattgattccgtcgatgtgatgatgagtgagagatcagagggcattgagggggtatttatattatcccttcgagacaatggaatctgtatgaatgtcaaacttcaaagagcatcttcgcatgaatagtcttcctatgttccgtttttactacgagggtatagatcatcggtgttcaggctttataaatgtcgatccgacgacaatcttcgtattcgagaagaccaaacagagtcgagtttgatccgtcgtgatctccatatcttgtcttaagttgtacataaatcgatacccttgccatctcaatgttctccaaaacgtagatcgaagctggaagaagcaaacctgcgcgagatatggggctagttttatttcggtatacgagggctgcggctgggaatgtgcggagggaggctacgcggcggctcgtataaggcccactgccaagataggtacagcacatgagatgcggattagttttgcttggggtcggttataagaatcactgtctatcacttctgcacaaggtaactgtatatccgcacttcgtgttgctgtcacgagtattgcttctcaatggaggactcccttatagaagtgggctttctgggcccctaaagacagtccagacaaaaataccaagggatactgggtcagttcagcttcagatctatcgcgctcgtccaacaatttcgcccatgttccacccaccacccgagatcctaggagagacaagtagcctccatctcgaaagcgcatgcctatcatgctcttcacggacattgcaatggcgatcgaaatccaactttctcgtatctgttgaagcttcggaaggcgatgtccgaggcgagtcgaaggagactgagcgagtgtcttcagcaaatcatcttccgtacacattaacgattctgggatgacgaggcagtccgactacttgattatcatttgaacctcagtcttgtcttaatggctgattccgctaagaatacgtcctttgcggcggaatcacggactctgtggaacttcctgatatgacgaagtgttttggcgcggaggatgccctactgctgtaacgggcgtaggcagtattattttcaactggctgtcctgtataaacgagtatcacaagcttagagaaagaaacaaaagatagaagcgcagatatctctcctccctttatcaacctttctgacttcccggacctgtatgccgacggatccattttccaaagttatgaggacggatctcctttcgtaagcttcgaggccgcaatttccgaagctgtacactgatgttgcagaaaccttatttagaatcaggttgagggcatggccgacaaccaagatccaggccatagcctgtgacaactgcaaagcaaacgtcctgagattcggtgtggtggttccagcttgcccctgaaagtgacattgttggaatgcacagaaccagcaatagcacagggccttaaaatactggccatcgggtggcacaagcataagtcgaggatgatagtcgactcgtcaagaacttcaaaacaaccagaagtcccagaagttggcgcagaacacttttacggcatttcgacagccaccataactctggtctgctaaccaaaaatgaggtggctaacacgtctgatatactctgcggagagtcctcacttggtataattggtctaaccctcgatgtccctactatcaggagctgaaagaataaagctaatccaagccgtataatccccttacagccaatgctgctcgatctctataaaagcactagcttggacacatgcgattgtcctcgcctgattgagacagcgcataatggcgttcaaatctgaatctctttgtaggtgataatggtgtgctgtcccgcgaggaaaagcaggtagtggttgcatagcacctaaaggatatctcgaccagcgagtcatataacatgtcaaaagctgcccgaatcgtggggtcttatgaattttctcaagggaatcttcaactcttttccaggcaatacgctgtaaatctttggttgtagttacttagatttttcaatcttaaataagatcttgcttgctcgaaaagcaagcggtatttccataattgcaatgaattgccattacgttatgctttattcctagaagatttcaacctctgaccccgcgctttgaatttagcctctgtctagtaattgatattttgaactgggatatacagggaataaggattaggagatgagaagacgtaactaacagaacatggccattaatcacaggaagcaagaacagtgcgatttcagaatatcaagaataccattaccaacaacttacaactctttcatacgccatcatacacgatcttctatgtctggccagctgagtgatgaaaagatggtcattcattgcgagcgctctgcggtagctgtggaaatatattttcaatgaggttcaagtctgactggatccacaggatagggttgttttgtgcctatcggttatattctgtagccagctgtagcttccccatccacttagtctccaaaccacagcagattttctggatggtatgaggagacaatcattgtttgatggccggctaacctccatactacagaagaaggaaacaccagtttggaaacttgacttcttgactgaatctctcccgcgcacaaatcgctagacaagggaaatatcttgttagccgtgaatataatactatagccgtaataggaaagtggctagattatcagtggtagcctcatttctggaatctgaataccaggaatccaaagtaattttcacgttcaagctactatattatgaatttataacttgatttgatttatagaacaagatattcagggcgcccgtagtttcacctggaggaatatgaagatcgggggcaaatcgacggcagaacaggtcctgggattggtgagtaccgacatttacataatgttgctgttgcagaaaagttctaacccctttttatcgtggtcctggtttggattaactattgaaggtcaggccattttgccctaattccttccgccaagggggttataaatctgcagtctcaagaatattacagcagaattctatccttgaaggcagatttgagcctttcagaggctcttgtcacacacacaagggttttccgcgcatatatgatgcagcatgcttccagtgtcgccctttctatattctacacagtatggctattgaggtcgaaacgaggtttatggcacaaatgatgagaagcattgttcttagtaaaaacagtcaccgccattatgaactggctcatgatgcagacagcctaggcccaggcaagtaggccgcagcctggatgttactttgtccatgcctcagacacatagagaagcgctttcccaatcgggaagttctagcgagtgctagccccttctgttttttttttttctttttcttttctattttctgtttcctcgagctaagcctgtgacagctcagatttagatattcaacgttggagccatgcccagtttaagtgagaaaattgaatcctgagaagtggtagattcgatgtcggacagattcgataacttgctctgacagggcaagtataacttgtcatctgcagtcgctgtcaagctcttggacgaatcctattgagtctagccgaaatgaccttataattattgttgactccggtacttctgagggtgaccaatttagtgacgccttctgtaggaaaggaaatgccgtaatgaagagttttgatagcaatgttctaggtatttatagcaaccctgtaacagcaatctaaactcgctatagcctctgttcaatagttctctgagctgaacatgcatctaggcccggatcacttttctctatgcagtccttaatcaagcggcaactggataaatgcccacctcacgtcgccgccacgcttaaagcgctgcccccggattgtcattggtgatttacagctatcactggactgagcctaacctgaaatgctcacaaagcggtttagtatatgcaggaagtaaaagaaaacggagcaaattggattatatttctgacctgttcttcccagtgtccacatctaaccagccttcgcttctcttacaactccattctctatacttcccattcgtacgctgacattgcgggcactatccacagatcccccagaggctccattactacaaatgggcgctcacccacttacccaaacgcgtcaccaactccatggctcatcggcggccagaatggacgcgcctagaatcagccatccaagaaatcacctttaggccggcatttcttgcgcccaaacagccgacgacaacctcttcatggcccatgcgctcatatccctctcagtgaaaagctcatattccgcagtaaactgcgctcgtgcgcccgtaggtttccgcgcgcgacatcttctgttacgatataagcgaccaaagtcgtcacgtccgcatatggccgcctcgggatgctcaaatgcgtgtacgcgtccgtggcggctatgggttatagctttggcacaagccttctgcttttgcgcaagttggactgccaaggatgggttcgagattcgtcctatttataccatagtcttgacatcaccgtgtttgatgtattgaaaacctatggcgctaattcctgggaaagctgggctgtgccttaacatatcaacagtgtctgtctagtgtatattccacacgtggaggggacactaatgccgaggagaaatgtatccgttgcctatcttttgcaaagggattgtacagctttgagacagagttaccgacaaagaaaggtaacggtgttaatcccattgagatcaacagcagcaaggctgttgtagaatactgtattaataagatcgccttcttttgtctattcattcacgcatttctgccattggcttttggactgctcgaacagctcatcatttgtgagcatttcccagccaaccaacccgagggtcttgcccaccaccagcgcctcttcgtgagcttcgtctgtccctgcagccgaggcaaacgacggatggtgaaggaacgatccattcgttgctgggatggcaaatatagcgtggagtgtgggcatgatgtagctgacgtttcctgatagcttattagctgccgtttgttctaacagatacaaatcgcgcataccgatgtcagacgagcctgtgaggatcttctcatgcctcttgaggacatttcgtccgtaggtggccatgtgcgtctggtacaaggcgcagagtgt

SEQ ID NO: 100 - DNA, 427 bp, Emericella nidulans
aagaacttttaatcttaatactaattctttatatagactatcaaagccttatggcgaaatcttggggaggatgagaatgatctcttattgatgttaggtggggagcttttaaccccgctatctgactaagattattacataactatatcaagccttccgcaatcgtacaacaggcaataatatatgtacatataggctcattccgtaccatggaggtggtaacacataacatagactctttttttaaatataatatatagaggaagtacctaactagttaagttaatatatttaataaaaataacctattcttaattatctagttatataagacagggcttttttataataattagctctaataattatttaaatagtaattactaggcctatagcaaagctagtcttattaaaaattataaatatt

SEQ ID NO: 101 - DNA, 521 bp, Emericella nidulans
taactttaagcataccagtattacaaagaatattatataatagttataagctatctagaatacaggacaagatattagtataatagatctagctattttaaatagttgtagagtatctctaatatatacttaggttaagaagaaaatgatctgcttcctgaaggggctaatcctactaaatatatactagtaagcggccccttatcagggatatctgtataaaaagctagaaatttatagtatatagaaataagagtcagactaattaagtaggtatttattcaagttttctattatataagatatactctactaacctgcttagaatataatttttaatgttatactagaataggacatcctatatatcatagtaaagaaactagtagaatatacttactctagttattaagtatagctttaaaatacctagaaattatatagttgcttatactgcatgacttgcttatatatatatatattacctataggttatactaaattagatatgtattaagatc

SEQ ID NO: 102 - DNA, 525 bp, Emericella nidulans
aaaggccgctagcattccaatacgtaccagtgccacaggggatgacggcaagcatgtcgacctgcgagttaccgtgtcatatcgtacccgacacgctttggttttgtacactgtacccttcggccctggaagtacggatacattgggctttcaggtgttgtactcagtatgtttatgtatggctagcgaactttgagtagaggaaaagtaaaggatattgcaggctttttatggtttttatctactaggtgtctaggaagtcattggaacaagaagcaacgtttttctggaagaagacttagctcgacattgaccgccttcctcaccacccgagcttcattcgcagagcgttgattcacggcaaacatctccttccaagttaaccaaagacagaaatgccaaaaacaaaaagaaaaataggcccaggcgattaaggacaccaagcaagaaaaattcgtattctgttcctttggaaaccgagcaagctgaacaaaatgagggcgctctagggcaaagtatgaaaag

SEQ ID NO: 103 - DNA, 676 bp, Emericella nidulans
cccccccgtaccgagctatagtagacaagctaggaggtggttgttcattacccaaaggacactggcaacccagagcgtagggcttcaaatatacaacgagttctgctgagatcagaatatcttgacaacaaaaatggcgattgcatatgataaagacagcgccacgaagatccaagccatcctgagcttgcgggatgactggcgcgcatagtttcaagtcattaaagaccatgcaaacaagcaagaagtataggaatattttgatcctgatgctgatgacaaaacaaggcctaagctgccaaccaaaccaacaattctatcagcaaataaggccttggaaaatatatattaatattatcaaataatgttgcaggaatggaaggatacgcgaaatataatctaatcaataaataaagctatttacagcttagtagctctacagataagagagcttatagcagataaagaaatatacaaaatattgcaaatactgaaacagcaatacaccccaagtgattaagaggcagatttcgaagctttgaagaactataacaatgtcagatcttgatcaatttgacaaggaaagatttctgcatggcttaataagtttaataatacttatttagcaatcaaacgccacaatctcctagaaagtaataacaagcatgtaaaacgc

SEQ ID NO: 104 - DNA, 484 bp, Emericella nidulans
agatgactgcagatttcgtacgttcagcagagatccattccgtccgcgtcacccagtcatgatcgaccaagacatagctaagcactcggctgccaatgacacgggtccaaaggcaaacaactctcactagatttgccttactgaggacttaccagatcactctgccgatcagagccccatccagatcacgggaaataatgcctgaatgattcaagaagccagttgctattgatgcacacgtcagtcgcttacgaatacgcttgcagggactcagtgttcaaacagtgcatgccgtgtttatattgatcttcaagtgcccagagtttttgatggggctcggattcgaggaatactctatcgaaagcgtatcgtcaattttaagttatagtaggcatggctggttctcggcagcaagcagctgaaaaggctctgcacgatcaaacgaacattctccctcggggtaggcttctcgttgtctttgctg

SEQ ID NO: 105 - DNA, 1205 bp, Emericella nidulans
ggggggcgacggggtgttaaaccggtggacggggagggtgataagaaaaaacacgggttcccgatacttcttttttttccacagagaaatttatacagtttaagggacaccaaatgtgtcggatggggtcctaagccaaggacataggatgaatcctcaatgttaaaggaataatatgtattaggggaaaacatatatttaaatataggcttttgcaaaatagggtaaaaggtaactgcaggttaacccggacaagaaactgtggattatttcaacaaagttacatccaccccaatagaacagacatagtatttggcagcttctggatcactgcctaagctggtatgttaacattcctagtccctgttccccaagctagtgcataaaagcagtaccagctcaggtacatccaacaagctcgcctactttgcaaggcaggtaccagtagatgatcttgacatcattgcttgtataaaaccccttatagtatgccgtcacgaacacgacaaggccatccttaataaagatattgcgacgccagttgttattagtattaatatactagatgctcagcagctcaggcatgtatactggcaccctgctagtaaggtgcatggccactgccagcttctctttaaattatacaacctgctgaaagtacttctgtaccttgtttgtactaacagcaccctaggtaataaaggctcaagcaacagccagttcagtactgatctagttaactagctatatcttccctgctacaggctatagtatacaagcatcctgcaggaagctctagcctgcaatacctttagttagattattaaataggtgatcctataggatggctggctattactggtaatcaggctggcacaacaggcctgccatcagctctcgcgcagctgcaaccatgctatgtacaaaaactataaaactggcctatagtaaagtccatctgcttgttcagcattccatcctggcccatctatgtcatataccctggactggggtgttgagtgcattttaacctaatatgtgccagtaagcacacttttacgggttatcttgcatagacataattgtgacctcaataaaccagttaaacacctgacaaacagtttttgcgcctggattaaaaaggtttgcctaaaatttaaggacaggcttataccttgtaaaaaatatgagttctgtgttttaaa

SEQ ID NO: 106 - DNA, 2694 bp, Emericella nidulans
cgcagataggtggtataccacagacattatcctgccacctgttaagtatactcaacctttaagcttaatctttattaatctaatctctaaccttatctagagagtacatgcgcctatatttatcctgcggcagttcaatcgtacaagcactttatagaagtataccttctaaaagagctaagttcgtacgagccacaggagtcagatacccttcaacttgcctttcaggtacagggaataaacccagtctatcttcctgactcgtacgacaggcctcagtcaaccaacgatatcctgcagcactttgaagggaaaaatagcaagggaatctttgttattattaccagaactgtctctgacccctctgctgcacctgatgcagaaccaaaggcaaaacagacaaaaagaacaaccaagcgtcaatcctccgtacgagtatctaaggtcaagcaggagcctgagatcaagcaagaacctgaggtaaagcaggagcttgaacaggatataactgtacaagataaaaatcttaaagtggttcctgggcctgctatacggaagaaacgctcattttcggttgcattaaaagagaagaaggagcctgatagtgatactcaggagaaggatacagagcaggaatcattagagttgctatttgtccctgaggagaaggatggagtggcttatcgtacaagaaagcgccatatcctccagcaggaggatattgagcgctctgcagagtttggcattccagtttagatgcagagatatgatgctttaacagctgttggtgaggtaggcattcaacatggccatgcatgtaatttgtacaaaggtatttagtaacacagcttgaagtttaaaatctctactgttttgcttctttcctctcctcttccttcattcctcatctttctttccacaacaaccatcaccatggcgtacgagacttctgttccctattccctatcattaaaagcatctgctgaccatttatttgctccgtacgagtatactgctacctctgtagcttgtatcttgtacgaagcagacaaagatagcctccaagctcctcgtacacccaaccgcgccccctccttccctgccaaccggcctctcagccgagaagagtgcctgagcctctttgcctttattaatagacgagccggacgagcaccaactgctgtgcttccacttgggggtcaagagctatctgggtatattcatacagatatacagaggcgtgtgctggcccttcctgggcgggaagttaagtttattcgcggcagaataaactggcatcagttatggcaacaccggccctcgtacatcaatgccatgcttatacagtctcgggggactcgtctgacccagccttgtaaaggatgccgctccgtacaaggaagaccagtcttccctgaatgccgccatgtacctggggcattcgacggatgctgcgccaactgtaaatggcgtgaccatgggtatcgctgctccgtacgagacgagcactggcagtggatgcttggtggtggacttggtctaccccagggagcttcaaaccagctggttatcaatcttgatccagtggaaggtgaggctgaaaatcctatctaccttgatttccctgaaggggatgaggacaatccgattgtctttaaggtacgtacgagttttcattattcttcctgtacaaacacctgcactgcctaggggtacgggctgtgtacctcacctgagcatagcttgcacctttacgtggtgcttaggataagtagccagtcggtgaaactaagcaagctatcctgcatatgtaatcaaatttctgctggcagaatctggactggtacaaactcattacgtgctaaatacgtttttgcccttttgttcgaacagtatgccgtattccggtattgcgcttccggtcatgcttcaggtgtctgcgccgaaagggtcagatcacgcaccgttgggaaagggcggagcactgtacgaagagtcaagtagatggccctggatgagatttccagaatcagaaaatgaaattgaatgactcgtgatccagaggttactactgtcgttgggtattatgcagatcagcgccccattttcaataaagcgcgccggtcgcattcccgcctgccagtgcctcaagaccacgctccatggaattgtattgtgcggtttctcgactaatttatcggaaacaaacagctttgggtacaaaccgggctcttgctacgtagttctagatattttttgtctctactggtgatggcgtcgaatctttctaaacggaagcaagaacttacgaatggtataaatctctaacctcagaggacattataaagggggccgaatataccacacaaccatgaccaagttgctaaaacatgaagcagtacagcgtttttgctccctagaacgtgcaggccggccgcgaagcaccatgctatcgatgctagaagctcttgtagctttttgcgtgagtatccctatctttatatggatgatttggtatcctatccccagagaaaatacaagccgagttgtgagtcgatcggtgaaacaatcggtgaagcaattggtgaaacaatacactgggaccatgcatattcaaaggttctgtcgcttggaagaatcaagacaccagcctgcgaaactcccgaggaataggcgttggggatcgattgacgg

SEQ ID NO: 107 - DNA, 883 bp, Emericella nidulans
ttttatatatagtatttattttttaaacttaaaaaactgtactacctggaaattactcaggattactaagtttttataattctaggtaaattataataattataaatataatatagctattcatgcaggcaagacaaaagctattataaattttataataattctataataattttactaagtttctagctaattttttttttctaaatttccggcaaaatttagctattatgatctatttcttttttattctttactaagattaataatctaatataatttcctactgagctgtgcagaccaccaagctgtatagttaaatatagaaaaactatatttagaaatataaataagaagtgtatggctttagataatataaatattataatttcctacttaaataaaacagcactatctatttatatataataatttatcatatcctatctagttatagttgctatagattagtagcctatattatcttagtacctattagataagctctttatagtcttaagctttttattatcttttactacctgttatactactactagtctagataaaatatcttaatatcttctacttctcttttttttatatttttatatctatataaagttactagatgtcttactatactagaatagtattctatataataatctctatacttttaataattttatctactatctgcgctattatactaggagatataaattaatagctttaaatttactttttttatctttctaattattatagatttgctggagtcttgcatatactaaataatagttacttttagatatagtagtattaggattttaggctttattagtaggcttaataagggtttcttggataatagtagaat

SEQ ID NO: 108 - DNA, 1395 bp, Emericella nidulans
  unsure (1)..(1395): unsure at all n locations
gacgcatgagtccagctgatctcggatgcaatacaacgcccgtcctatttgtttctatcatggtctgagggggtcgagcctatgacgtgaatgataggaactatgaatagatctagattcccgacatggccagaatccatgctgcgttgacgccactcgggatctctatcgcaaactatagcgcacanatcatggacgtactcaggcttcgggtctcgcgatcagctaccgagccgaaatctgaagcaagttgaattgataagatccctcggaatgagaagcctagtgcgcggaagatgtacctggtctttaccgaatcaagaccgatttcccggatgaggccgctgttactttcgtagccatttcaagagacaccagacagggagccgtacatacccgctgtgaaactaccttagcagacgttgcaaagtcatatcagatgtatgacatgcatgaattattcctcattctaccctagttccgctactatttgctactaccaccggcaaactgggacgcgataggtgttctacctctcaggctgaggttcacgcctctctccgccggaaagaaaattgtgtaaaggcggttatatacgatttcattcttgcctcgcccgcacttccacatattcaggggtctttgaaggttagaccggtgaagttttccgatgaggcgggtgtggaagggcgtgagtgagggtttgctttcgtgatggcattcaaaagcgaaacgcactgttggttccaatcttggaagcatatcccttacagggtttcctgacaaattggaggcgtgcagccgtttcctgaagctggtagcgtcgcggcactgcctgtcagacaaccgcaaaatcgtttatctccatcaaaccttgccgttggccaagattagacccccgttacggcggccttcatcagtagggtaaaactaaccgatctcacgattatccaagccttgctcacgtttccctttagtggcaatcaaacgcttgccgttggtgcaggtagccggaagacccctcaattgcgtcccgtctctatcctctgccagaatcgagttccctggtagattcctttcacctctgtctaatgcctgcactgaacgaactttgaatttttagttagggtacgtagagtatgcggcaaggatagcccgtccgaggacgaataacccatgctcttggttcctaaccatatatccataccattcgatgctggtcaagagagcattgtaactctcctgctctatgctatataccgaaaaggccaacgcgcattctacgctaccaagctaaaccaaacctaaaatttatataatgtccatgttgttcactgactgggtttgcgtatcactaatactcgaaagtcggtgccagcattcttcctatgacgt

SEQ ID NO: 109 - DNA, 831 bp, Emericella nidulans
attataaatttagtagatagctatattatataactaaatatatttttataaaaattcatgcaattttttatagtaaaaagggatatataatagataaaatcatagacaaactagtatcattcatggttaacagacattgcggtcgccatattgtgttgttgcctaatgtcgtcattgtgttgtggttgcctaattcgcttaatgttaccgccttcgagcggggtaatgatcttttagctcctggtggcctaaccaccaacaagaacaagaggaacacatcatgagatcagaatcataaaaccatattgtgttttacacaaatattatatataatatatacttagctaatctaaaaagtcataatagctctggataatataaattttagataaataattaaattatataaaatattatagccattaggatagcttactaaatagaaatatattataaagactaagataatataatttactcctatacccctatactttatttatgaagaaagaagagggatactattataggccgttatttatataagaacctagacctaagtatcttagccaaggcctatattattctgaagatagtaagctacctaaaagactttcttataagagtaatccttttttccattctcttttctagtaattccttcttgtatgtacagcatgtctaatacaaagatctatataaacatgtccgtcccattactccgtacacctatagaatttttaaatatagtaacaaataataatcttaataatttttttttattaatcctattatactactttattattcaaattaagtaataccttagga

SEQ ID NO: 110 - DNA, 878 bp, Emericella nidulans
tctctctgcttgcctgattctgatcttcttggagcaattcaaggagataattagcttggtaagtcctctctttcttgttctgcagattctgactgttcttctgcttctgtaaaggctcctggcatctaattcaagccagaattgcctgagttcagtattctatcaggtataggtaatagcagaggtgaagacagtgtagtttttctggcagaatacctatatttctctgtatcttccttttgtggttccttaataccagcttctcctatctcagtcaatttttcgtcatttccaatgctctgcttattgggagattcgcttgcattgtactaggtattatgtatatggagagctcaatatctgtattaattgcttccctattagccctgccaggtaatatctgtatctctactggtagtataggtaagctaacacttaactcatcctctataaaaggatctgatggattgtatagccttgttttatcaaacttgacatctcttgctgtctcaactcgctgcttctttaggttccatataaaccatatattagaggctacatagcctactagaacaccttggtaagctcttggagctatttttacacctttttcttgctgctaatatatataagatatgcaactaatcaggtagaaattagctagatttggcttctttcctgtaagcatctcctatggtgttttctatcctatcactcttgtaggtgttctgttaataatatttgcaactaaagtaataatccagggcaaaggtcttgcagtaagcaggcgcctattagacctgcctgcctttgaataagagatatctgattatctgcagcttatctgattagtatgcacactgatactggtagcatgc

SEQ ID NO: 111 - DNA, 1440 bp, Emericella nidulans
gttcaaacgacatgcaggattaattgacgagcatacccttcgtggagtagttgcatacaatgccggtcacaataccgagaacaacactagcccagggaggaaggaaaccggaagcaggagtagcagcgacaagaccggagattgtaccggaacaccaaccgaccatcgaccacttgcgagccaggcgccaatcgagaataacccaagtgatcgcgccaaagcagcggtcaagtttgtgttccagcatgccatcgtagcgcgcatgtttgcaccgaatgacgagccaccgttgaatccaagccatccgaaccagagaaagacggtaccgagcagaatgagggaaacattgtgggggcggaagttgagcatcatgcgctcctggcgacgaccgaggaccatagagtatgcgagcgccgaaagaccggagcagatttcgacggggccaccaccagcataatccagcacgccatagttgaaggcccagccgttgacattccatacccagcaagcgatggggcagtacacgattgtggcccagacgaaagtaaagaccatggcaggaagaagacgcccacgttcggcaaccgctcccataatgatagcagcagttacggcacagaattgcatctaggactgtcagccaaggggaaaaccagtgcaaggcctctggtggtgaatacctggtagaaggcgtagaggaggttaggaaccagaggagaccctgggctggggtccgccagaaccttcatcagaccgaaattgcgcaggtttccaatgtatccatttgtagcggtgggagagaaagcaagcgagtaaccccagaagtaccattggaatgttacaacgcacatcgagcccatacaagcccagatcatgctgagggctgacttgcggcgagcgagaccggagtaaaggaatccgaggccaggcaccatgagcatgaccatggccgaagcaacgatgatgtaggcttggtcacccgactggtaccatttgttcaagttttccacccctagaagcacggctgttagaacgctgcaacgacagaaccgacagaaccgacagaaccgacagattcgacagaaacacaggaacaacaatagcagccgacgcgtcacgtacttgagtttccgcccagctcgttggtggccaggctggaatagtctgagggagcgcctgtccagttgtacgaggcatactcgggagtgaagggagccatgccttcagaggccatggctgcggcggtagtggtagcggttgcggtagagaaacgacggataaaatgctgatattgaagtcagacgtctctgggccctcgatcaacgtgggcaggcgagatattaagcaagaggagtcctggttgtggagaaaacgccacggcggagggcagagtcgtataagagaagagcccagaacggagcagagatcagaaagatagtg

SEQ ID NO: 112 - DNA, 578 bp, Emericella nidulans
attgcatatgtccaccgtggcattgcaggagccccattgctctcgacatactccgccgagcgacagccgtcggccacgggattgtaacgcgcgccaaccaggcgttcagggatcatcaccagatctgggccgcgctcgggatgctcggcgcatctctcgaggagcgacacgcgcgcttgaagagttgaccgagcccactgccgccgggcgcgacggcgtcagaccctccaaaaggctgttgcgcatacagcgcacgagtttcacggcttaggcatcgagatgaaccagcgatacgagggtccagggatctacgacgcagacgaggccgatccttttgtgctccctggccgcgcggccgaagaccctgttctgtactatgagccgaatacctatcctggttgccgattgccgcatgtatggctgaaccgggccattcccgggcagccagtgtccacgatcgatctggcaggacacggcgctttcacactgttcactggtattggaggtggccgtggaaacaggcagcggagagggtaggtggcaggcttggagtcacggtatgcacgtattcgataggg

SEQ ID NO: 113 - DNA, 4818 bp, Emericella nidulans
cccggtaaaaaatgtgatatcaggagtctcggcgatgtggacggtcttagcatcaaggtcggcggcaccgtagatccaattccccagatttcgttctgtggcttgctcggaggcgcctgtgatgtcattcagtaagttcattattcccatctaccggggggctatggctaatatggcatagtggcttcgagttctggaatgcgactttctccatgccggcaaatacctcggatgtaccgcggattgaatttcagttcgagcttacgatgtagcaacaggagcaggtcaattcaggcttctagcaactggttgtcattgcatttttgttttgtgtctctgtataaacaagacagagaatatctacaagtataggtcatcaaacgtgatatatagcggggtggagtacatccagatgaacgatggggtatatataatgcttcattcttctagagcttagaccgagccccagccctgactgctcatccgactaacgcggcgtccttgattcgtcttgttctcggcctcgagcgcctgggcaaacttgctgctcgcgcggatttggggacccttccagtagaacacgtagattggaatgaccaccagacaggatagacaggcaagcacagttgatgcgtactccacgtgccacttatcaccgatattggtatacatgggcgtcgcatacatggctgagataccggcgagaaggtcacgggcaaacgcattaccgccagtggcagaggctgagtagacaccatacgccgcgaccatgtagtcgacagtcgagagataaatggcataattggcgacccccacgcaagtcgagaagatcatggacgctatccacgggataccgcgctctctgccaaaggaggtccaagcaaacccgaacaggccgatgggctccaatggagcaagccacagcagccatttcaagcgccgttccggtggcatatcgtccccttcgatctttgtgcgcagatatctgtcgcgccagaagaacggaaggtagctgaagtaggccaggaagtacgccaggttgatagggatcacagcccaggcctgcccgaggatgccgaaaccccatccttgctcgtacacaatggcaaaactctcgagaaaagtgaatatgagggcgtcggagaagccagacaacagagagaggcaaaagacgatgggctcagtcaacagcatatggaacggacggatccagatatgaaaggcttccttgagcgagacgcgaggtttcttcagctcgttgggcccatagacgttcggatcctcgccagacttgcgcatgcgcttggcttccttgtccatgataatggttgaacggctctcaggcataaagaagataattgcttgcgtgacaccgccgaagatgagctggatccagaagaaccatttccaatgcaggactagggctagttagtcgagcacgcggggagatgatctgggattaactttacagcgctggattgggccgccgatgacaccaccgatactagtgccaatacacgaggagagaacgatgaacgcgagcgggaactgctgcgtttccttctcgtacagatcggcaattaaaccaagcgtcacactgcctccagcggtcgagacaccaccctgtttcggttagctgacagaaggccggcagaaaggagtgaactggggcttctagaaaacataccagagcacggcagacaacgatagtcccccagtttggtgccaatgcacacgggatttgccagatgttgatgaggaacatggacagctgcagaatgggccatcgaccaaactcctcactccacggcgcccacagctcacagccaatggaatatgtcaccaggtacgccatttgggcagtcctcgcatgctgctcgctgatattgaaagcctcagagagtggcttgacggcattggggaagacagaggtgttgaagttcatggacacttgtacgaaggcgaccgcgacgagataggtccatttcttccacgtcggccagcagtatcccagtttctcataacattcgtattccttgagctcgcgtttcccgtcggaacgaacgctctccttctcgatagcggcatgttccctctcggccctctcaattctcgtgtcggggatgataggggcatccggcgtgccaccatagtctgggttcccctccttctccgagggcgcccggtagtgattctcaagtgcctgctggatctcgcggtctgacattggtggccgtggatgtggaaaggttagaccgaagggaggtcggagcggtggtagccatcttcatatacgcccaacgtgacaccacgatcccttcttatctttttccaagactctaggcacagttgcgtcagtagagaaggtgtagagtagattttagcgggtacaagcaatggcctcaagcggacaaccggattcctccagcgagacccgtcgcactaacagataccccactgtggaatcccagaccctctgcgcccggtagccatacgtcatttttaaacagggcaggaatctagagtacacgctttgaatcggtttatcgagtaatttgccgggcacatgtaatgcatgattgctcttagcctagggaccgtatctgataaactcggcatcccgagatggccaacgcttgccgatgacagttaacgagcaaggagccactccgcgtcggtttgtgcatggcataagcttaccaaaatttggcataacttggcattctcgggcttgcgggtacagctaccgactttgagccgtacagagtagtcagagccgggctggatgcgtcaaaagaagggccgtttcctcggtatcaggtgtctccgttatctactccgagcatgatatcatatttaagatattatcataccttgcgctattgtcagatgcaggcccgtgaatcattcttccgtgctataagtatgacccacgaatgtgagccaataatgaacgctatacaattctgactaccgcggacattaccgcggttcgtcggcgagtcaagagcagctattgttgtccggtccatgatgtcactgtgtgctgctgaggtgacccgccgcctgtagtgcaactgcgcatctgcggaataggctacaagctaaaattctcttcgtggtctcggctgctggggtcaactcaactccatgccagtagcagataaaaagacaccaatatagctgtgcaaatggaccgttagacatggtccaatttgttgggagagtcgaaaggctgctatattggaagcactccggttaataatagataagggatttactagggaactaactagagtgccctggctgacttaatggagcagacatgattatgcatttgtggatgtatattcttgcaggatcatcaactttgatggtttccagatcctgacaccttcgacgcattcgtctactccaataaagccgacttgcgaagttgcaagtcctacaggacttaagctcgacagtcgtggagatgaacagatgttcaacatccagtagcatgaacgttagcaccgttatgcgttggatagcccagaacaagatccagatttatgcattcttgagcactcaaccgggaccaaggaatcataaaaagaccaaataaggcttcctgaaatattctcttcaattatttatttaattttgttttgcctacggccccatagaacgtcctgactaggtacgtcggaggcaccatacatgtctggccgatttacctcaaatccattgtcagccagcgggcctttgcaggcagggtaaacgaggatgtcagaacagagcccagtatatttaaccaaaataaactctagggttggctctcaggctggcaattggctccttattgatgggaagggagactctaggcgaacgtcctcttgatagccttagtgaggttggagattcaacacctgccgatccactctaggagcggcgatggtcaagcgcaatgcccgaatatagttgcaagcgatattcacaggtcggtgcaacccgctacgcaggtccaagaatacccctgtcagctcacaatagccggacgcactggaaatcgttgcggtaccgcgacagtccacagagtggcaggcattgcccagctgctggatatctaccttgcaagggagacaacacaaacatgtcaccaaggaagacggcgttcggtggtagttgcgtcgccctggactcccgaaccttcgatcacagaactatttgggaatgcagggataaagatctgggcgaggcgggaaaagactactgcatgcagtcacccggggcctcgcttgagcattaagagattagaacatgagcaaccttccgccttcaactttttaccattcgatcaatacaagttggcaggttctcccttgagctcgggaatgtggccgttaagggacgggaatgggcagaccccctggctgttgagttggaaggatgagagaaactcaaaactcatctagaatcttgatagtggcctcacaatttggtgcagcttaattgaaagatattcagtagccgcatgctacatcgtgctctgaaagggataggcgaggcataatctatacgttcaagcctttcctaaacacgattgaccgtacctgtgtcattcccattcctgcctgctacccggtgccaccaacgatatagtggtgtgtaccattcttgaggggctaatacccggccttatttggctacggtgcattagattgctgcccgatattttgtagaacttgcgacggcttgtacgcgttgctcctggcctgtcgctaatggtatccctttatggatgaagcagtagccgacaaggggcatagtccttgt

SEQ ID NO: 114 - DNA, 795 bp, Emericella nidulans
ctaagatccggttcgtcgactgccccgtctccggaggcgcgctgcgcgcggccaacgggacgctatctatcatggccggcgcgtcagacgaagcccttgcggcggcgcgcgatctcctgcaggaaatgtccgacgagaacaagttatacctggtccctggtggcgtcggggctgggagcaatatgaagatggtgcatcaggtcctggccgcgatccacatcctcggggctagcgaagcccagggcttcgcggcgcagcttggtcttgatgcccgcgccacggcagagaagatccagtcctcggacgcatggacatggatgcacgagaaccgcttcccccgaatggtggaagaggactggaatcctggcgtcagtgccttgaccattatcttgaaagatgctgtacgttcccccaccggctattgtatgtccctcccctggtcgagagtcgctaatcagcctgcagggaatcatcaccacaacagcccgccaacagcgcttccccagccctctctgctccactgcagagcagacgtacatctccgctctgctccatggttggggccctaaagacgactcggccatggtccgacagtactatgccaagccgctctcagacgtaaccccctgcaccgacgctgaagcggcgacccgagctggtcttggattacatgcgaggtgttaacctcgttgctgctgcaaaagccgttgcattcgcacggtacctcaatgtcgacctctcgatgtttcatgttccttgcaatcaagcggccgggaccagcaagatcttattcga

SEQ ID NO: 115 - DNA, 575 bp, Emericella nidulans
tagacgattaaccgttacagttgtgcctgcattccgtggcggcatggcaatgtggggagaattggcgtctgcgttgctctgcgctggggtgctgtgccccacaaaacaacgtatgctctgaagatcaatatgaacagctgctgaaatatagacttttctcgtatagctatctgagctttgtgaggtcacctcgactggaaagcctatgttacttcaagcccacggtgccttcctgcatctccccgcagttcggccggctcagcatctgttgagactggccggcatattatttcccagaaaaggttgcaaaatcgataaggttaagggtgttaggctttcaagaagagttttgtttttgcgagacacatgaacaaagtcattgaacagaaagaatcgcttaattacattgctgactccgtcacaccacttgtccaaacgccgggggtagtaatacaggtaccatcaaaacagcccgtcaccgtgtcatccaattgcccactgtttcttcaaaccaaccgacacgtttttcgcgccgtttgtcttgagcctcattgggagagccgaatactggaaac

SEQ ID NO: 116 - DNA, 1198 bp, Emericella nidulans
cggtatatcaaaaaaatttatagatagcatgatcttgtaataataaagaatacatgcctgttaaatcttagaaatatatatataccctcttagaattaccaagctacagccttcgaagtaatcagactctaatatattagaatttaataagaattctatattcttggctgaaatattcaacttaataactatagcctgccattaaaaatagctataagaagcaataaatagtttaagattattagaattcaaactaatatactatactggcgactggatagcagtagtatctattacttctctagaactagtttgagactacagtatactacatagtagtctagtagtatatatatattttttttcctactctagattagtagatcaaaactacccagagttaaactgatacaattagaaaataattttttctaaaacttctataggctgtattagtctgcctcactaaataaagaggatcagctaatctacccatgggttgattcagattatgtaatcacaactcctactaatcagaactctatccttttctaaaataatatcaagatctttattcacaatctttttggtcaaccatttactatggttcgaaaatagcgggcaaatcctataaattcagctatgggtagactatataatgaaatccaatctctaaggcctttatctattatctcctattaattcttctatattttaatctttcctttctttatatcccagtttttcattatcgcaccctgttgtcaaaaatcaaggtttttcatcccttccccttttctctaaaatctcttatgctgctttggcctctagagtctaagttactaggtctacccataggtggatttctaagtatctactctcaatcctattatctacttagcaccctgattattggctaacccagcatctacatggtactgtgatggtaggaaaataaaaagtctccggtccctgcctcgtccccttcccattctacgaaatcctacctgcttccctgcatttgccttgttcttcgcctaccctcctgccccttcccttcttccttcctgacttttctccctctcttttacttctctcctatctactctctttttatttcttttccccttcttcatcccccctcctctcccccatcctcttcccttctccatttttattctctcattctctcactctt

SEQ ID NO: 117 - DNA, 880 bp, Emericella nidulans
  unsure (1)..(880): unsure at all n locations
acaactagaaatccattgattgcttgatcacaatataggcagaggtcatttttctggcggtaagaacggcgggatgcggacgaggttgaagaagcagataatgaaggtgaaacagatcaggctgactggacaggttggacagcagaaatcctgataggatctatgtccatttggtctatattatggttcagggttggttgggatttggaggctggtttctgggcgggccggtagcaccggtcggcgcgctgaacaagttcaatatattcattatatgagaggtcaaagatagagtcgttcaaactttccaatatctggtagagattgggccggagcccccgatggagcgtggacacacacaaaatatctggccatgagtttgtattggcctcgtacaagagcctttcaaaacgagcaaggtaagccacaagcaattcatcatccctttaagagatagtggagaatcgctgtatggcttcttggtgttcccgtgggttgtgacagaggcattggaagaaggagaagataacctcaggatcctattgttggttatcttctgcagactggcagaggtgtaggaccgaagcctgctatggctgttctaattagtcctatacatagtcaaaggcatcagctctggtgagctgatcagatcagagttttgctctgatagatggaagccatgtacaaggtatgtatagtttgccattgaagcaaggcaggtcaggtagatgggctctgggtgctgtngcagtctggagctgggtacaagctgttgatctcagtacagagggatcaaggtctatcaagttgctgaattcaagcattgctctggagctgttgaagtcacatgtggctctgagttcttgctgagctgctg

SEQ ID NO: 118 - DNA, 597 bp, Emericella nidulans
ggtcaccaggcacatattatcataccagagcttgatcctacccaatcaagagatatcaggatgaatactcctacagaacttcgggttctgtcaaggctcgatcagagttaggaatcatcaggtacaggtcaggtggcactcaggaatcatactttgtcggggcatactgtcctatggcaccgcctgcccctaggggtcgagctcgcttagtcattatttagtaagctaggtatggataggcggccacgttggccatccaatactgataattgtccgtcccttccacatgtggttacaggtcagccggggtacaggtttgtggtttgtggtttggctcgctcgagacgaaatggcttatgtaatggccttttgcccatgtgacgctcgagcgagcttgtggaaaatttcgtctcgagccaggtcttcgcttccgattaccagcaaccaaaacaagctgcgtgatggcctctctctctaacaacgtaagttaattattcagaaagtacttaataattgtttgcacagcggcttctatcattaaattcgcttttttacagcccaattactaatatgccggttttagaagtggtaccagtg

SEQ ID NO: 119 - DNA, 1035 bp, Emericella nidulans
gcttctgactaattttggcagcatggcatagaagcttatttaaaggcattattctttaaaccttaactctaataaagaagtacaagcaagctatgtaagtcgcaactagtttaactagctcattagctaatatttggcagtccaaagcccaaaatctcagtactaagagagtcaagaagtcatgagtatctctcctatctaattagtaaaatactagtcactaattactttgcagtaataagggtaaagctggaaataactgggataatagcaagggcctgtaagtataactgttaaataaaaactagctaccaactaatcgatgatcagttcaagcaatccgcacgccgtgcataccccatggtcagtgataatatgaccaagccagtcttgccatgtaataagaaggaaaaggtaagatctatcaacccttctgcctaggattagtaactaactagtcacctatagctactttacatgcagaaccactgtgagggtagcaaggcaggctaaaggctgctgggcaagaaaggaacccatacccctgcaaggttctgtcgcaaatgcaaggggcaaagggaaggttattggttagctcccccaccctcgaaatgggaccccggtcggtgagggcaaatgggggcccagatacatttggggccgtgtcagggggacccacccttttgggggaaagaaaggattccgttactagcatctattcggtggagccttcttgttggaaaagtttggattttttttgcggctcggttttatgacacttttcttaatgcacttctcgtcgaactcatcctagcgtgcaactgttctctggactagtccttgcaactgttttagcttctcgaggaacagccccacctctcattctagtcctgtctttttcattcggactcccccgaataatttgtggcataaaaccccctccttgtgttctaacactatctaatttgggatggtcttttttgctcttctcaaattcccactcatgcatatcctctgttgtattattctcttttt

SEQ ID NO: 120 - DNA, 233 bp, Emericella nidulans
  unsure (1)..(233): unsure at all n locations
atggtgattataagttctcgcgaaggcgaaacgagatggacacgattgcaaattactgctataagggatcgctancaccgaacgcacaatagtgtgtcgtacaggctgcgcgaccatgagtgttgccctcgatgtgtcaactcgtagtctctattttggccagcgcgcgaagtagtatgtcatgcataggatggtgctgcagacaacctatgtatcttggccggacaatgtag

SEQ ID NO: 121 - DNA, 241 bp, Emericella nidulans
ctggtagtgcactcgtctttgctgctaatccgtatacttctggacggctagatcgagcggtagattcggcatcataagtgcatcattagggcgacgctctgcataatcgagcgatggcgctcgaccatctggagtaattaacgtcgttgcctgagcagtctgctcaggtaaaagatggagacgaatcggtgtcgatggctatgattcgtatgacgattgccttccagtgttgcgttgcctg

SEQ ID NO: 122 - DNA, 294 bp, Emericella nidulans
ggtgtgcatgctgaccatgatctgctctgtatctgtgcgcataagaatcattgcatcgcccacctgcagctgcgaactcctcagcacaagtgtgtgatccaatatcatggtgagtaggcctgatcagcgtcaccgttgcgaggctgcgcggcttggtagcggtcgtagaggtcccctgaggatgccaggatcgagtgacaaattgcgtgagaatcgagcaccgcttgcccgtacctcttgtgctccgtagctagtggctcctagtcgtatgtgattgttgcagcaatcagaaac

SEQ ID NO: 123 - DNA, 749 bp, Emericella nidulans
caagctggagccaagagctattgaaggcatatttataggatataagtcaaggcagaattattatatgatcatggccaagcaagattataagatctatcaagttacaaatcctatgttcctggaaaataagcaaggctttattagcaaagaaccaggagttcaagatcttggggaagaacctgtattttaaaggatatttagagttcctgaagcaagctcaggaactaggggaggcattatagaggctctaggagctaataatacaggagatagagatgacagtatagatactgcaggtactggaggcattggaggcgctggaggtgctgaagatgatgctggagataatgctgaagataatactggtaatatcaagaataatgttagtattgagaataaagctgaagccaaagacagcaatattactagccaaagcagtcagaattctggattgaccaatcagaggctagaggtggctatcccaacacatagaacaccaagcctgggagagactatatctaaccctttgagaacagcttcagagcaattattatcaccattaccaatccctatcctgatagaaccctctggaagaccaagctgaaattaaaagctaatataagcagtaatcaagtctaagcagacagaggctatatatgggcaaaagccacgagcccagagacacagagaagagagggaggtactaaaagatccttctctgcacctatctgttgagcagcagtgaatta

SEQ ID NO: 124 - DNA, 961 bp, Emericella nidulans
cttggttggtcgacgtcacacttcggcttacccaaagagttttcgttcaagatcgtgactctgcaaggttgacaaaaaatattatcagccgcagaatgaatcaccactgactcacccgcaaagctcctggatttccatcagcccttgctcgcgaccctagaaatcttcaaaattaagcttaacctgaaccgcatcttctcccatcacctcctccatcttccgcgacgagttctccgagataattttaaccccgcacaacccctgcacacactacgcccaccacaaccacccataatgccgaactcgggtccatccgcggaaaagaggaaagaaggaggagggaaaggaggaggaaaaggaaggtccagggcgatagctcaaatcgcttcaccgcttaagtcacggccttcaaagactctagcttactacttagatagctcgtggaggcaaagactttatgtttctttccactggctatgccaatttcccgtccccgctatgctttcttcacacctcacatgccaatatttatcaacacgacccttccacatcactactctcatccgcttcttacaataatctatcatctaactcctatttttattctccttcttccacctatacccattcgctcccctacttcctcttctatattaatcttctctttccctataaccatttcattcattctgttatcactcttattcttccttgttcctccttacttacaatcctatccttcctcttcttcactcctcctctcctattctcatatccattactttcttctactaccatcactactctctattctctctccttcctctttcacacaaacccttcccctctctgttattacttattcctcctcccctctcattccactatccccctattcttcctattcctacttcttctatctcctcacatttttatctcttttctcataactcttctctac

SEQ ID NO: 125 - DNA, 882 bp, Emericella nidulans
atctccggagcaagccattactatattgcttgtatcaatgcctcatcagatatatttcagcagcattttacctatagcctttctcacagggcttctaaccttgacatttcattattggaagatctattttcaaggccgctagaggtagctaatgaagcctgtgaaatgattgatcaacaaacaactcagagagcaaactgtggtaaggacctgtctattctatctttgaataactagttactaactagtccttgtaaggtgttgaccatccacaagggccaggaaagattaacaaattcagatgcagtacaatatttactttctttataccattaaatattgcagaatgcccttatatagtctttgtatcacatagtattcattcacatcctcctcctcctccaaataagcctccgcagcttatactagatgagattttggaccttatttgaaagatgcagagtcctgacttgacccctagtaagtacagctagttcacaactagttgagcatgtgctaaactagtttaggtttatttctacagagtccggcactgaaacagttttgccaaaaatataatggccagactctttcacaaatccataatagctttgtaaatcaagaccgatttgcagctattatagcaaaggaaaaggctttactatatcctaaaggccgtggccttgcaggtgtacactgcgagttggatcggcatccagaatatcaagtatataaactagttcataactagttctctgctaatcatacttaggaatatgttcgcagaatctatacagaccatgatattgtcatgattatttgtggatttaataagcaaatccagctccttgaatcccttggattcattgaaggtgatatggc

SEQ ID NO: 126 - DNA, 482 bp, Emericella nidulans
atacggacgttgacgcacgatttggccaccatgtgactagactagtcaactcagggagaaccacaataaacttgcattacctagggatacgatataaatgaaacccgaagcagtccctatgcaaccaaggcatgacgtttgggtgacacgacgcgtctcaccgtcttaggttgttcacaattctagtgcagaacgagaaaaaaaaaaaaaaaaagtaaacgactttcaaaattttcgtaggatagaatggtcagtatggttgagcacaaagcatgacccaaaaaagaattccgatacggggaatcgaaccccgagctgctgtgcacatgcaatgagagacagcgatgttaaccattacaccatatcggatgttatatttttattctcctcaaataaatgtatataactataggaatggattcaatagaatctcccaggtcagtgtacttactccggaccctcttaaatatgtcgccagagtg

SEQ ID NO: 127 - DNA, 561 bp, Emericella nidulans
aatactgcggcagtaagaccttgtaggcttaggggtttaggtgggtgtgtaatagtgttatataggcatgtcttagttgtacatagatatagtcagtttcttttaggctctagcctgccatcatggcgcttgagccaggggttgccgaggataaggtcatatcctagtagatatggtaggacataaaggtatgacccctctttactatgacctctaatatccagtcgtgctcgtacgatcctggttatgaccaggtctccaccaataccatctactgggagcagcttgataggaatagttggtatcttgttctattgtacaaattcttgactaatagctctataagcaagacagcctgtatctaccagtgtacaagccagcttgatatggttcacaatggcctctagtttaaaaggttgggagtgcatgtaagagcgtttaaagtctttccatagtcttagttaagtagctctacctgggtacccctgtccatgactttgtacaggggttatttattttccgactcctctggttcctcttccatgttgttaaccatttgtg

SEQ ID NO: 128 - DNA, 553 bp, Emericella nidulans
gtccaggaacgcgcatagaatgtattaaacatacattgtcatgatggcatgcaaccaaaagcttctcgccccaccaacctccaaaccgagcatcaacgaatcatcggttctgcataccgactggcaatttggagggacgcatgtcatggagacaagacgagagattaagcagttaaaaataaaatgaaaaaacgacacctgtgagattcgaactcacgctcccgaaggaaatgcctcgcttgtatcttaagatactatagcagggcatcgcgttaaccactccgccaaagtgcctttgacgagatagaaaaggtaatatgtggaatatgtgctaatgttgtacaaatccaacaccccttgcctcctacttttcaagtcttggaccaattttctcgcaacttgcttgcttgcttagagcactgcgcagtagacttgcacttttccgtgatgcggaaaacgcaagccgtagcacacaagctcggtcaaccgccatggcgttaccgaaagatcagaaaagacaagcctaataggatagaaaagaaagaacgcgggt

SEQ ID NO: 129 - DNA, 710 bp, Emericella nidulans
  unsure (1)..(710): unsure at all n locations
tggccatggctgaagtcacagagtccttccaggggcgtccggtcctgatcaagcacaaatcgtttgcgttcttccacccggctgcattctgtatagcgcagattgccgcagacatacctgttcttatttttcaagtcaccatctttgcgctccctgtgtacttcatggtcggccttgagatggatgcgggtgtgttcttcacgtattggattctggtatttgcgacaacaatggtaggtcaacttacgctatgtcattattcccgtatgttaacgtccggcaggcgatgactgctgtcttccgagcttgtggtgccgctttcaagacgttcgatgacgcatccaaggtttcgggtttccttatctcagctctcatcatgtacactggttacatgatccgaaagccggaaatgcacccctggtttgtttggatctactggattgaccctctggcgtacggcttcgacgctttgctatctaacgagtttcacggtaagatcattccctgcgtgggcaccaaccttgtgcccgccggaccaggatacgaaaatgccactactcagtcgtgtactggcgttggaggttccatccccggtcggaattatgtcaccggtgatgactaccttcgcaattctttcggataggcacggccacctntggcgtactttcggattcttttggcttgggggctctatttggtgggtggcacta

SEQ ID NO: 130 - DNA, 1048 bp, Emericella nidulans
cgcggaataccgagcgtgacgttctttgcggagtgtccagctaagtgaaacgtgttcagtgtcatttgagttgacggttcaccgattgactgtccagccataattccaacagcctcgccgggttcgataactgagttcatatacttcatattcatcaaagagttgaatgcccgcttggtcaagctggtttcgatgcctttcttcttatctttaaggagtttgctcttattttcatcctcaaactgttgacaaaaacctattagtctatgtggaacaataagttggtaggggcgaaacataccttcttgagggcttgggcgaacgactcggatgtgctaccgaggttacccccaggatggtaaagagcaagaaccggatccatagcatccagctttccagtcttgcgaaccttcttcattgcatctttgtgccagttcgccaccgcctctttctccagattattgtggtgtttcttcaagtttacttgctccattatggagacgtggttcgacgccaaaaattcgaagtcctgcagatggacctgtttcgtgatatcaagaccatcctctccatacaggaactggacaatagacccatccgaagattcacgtactgaggagtcgtactcggctcgtaagccttccatacccttgatcaagcaacgctgcaggtaaccagatcgggaagtcttgaccgcagtatcaatcagaccctcacgaccggccatggcgtgaaaatagtattcttggggtttaataccggtcaagaatcgaccatagacatatccaccagccatcggatttgtgtcaaaagccctaaagcaaggaagagtcttaccactgatcataacgggcacacgtcgaccttccagaacttgctgacccagattgcaagaaatcaaatttgcgttcactgcggaacctttggctccggtgatggtcattgactgcatctgattccaggggaaagggtttgccagacccttaggaagacaagccttggtgatctcggtcgagagctgcgccgacgtgcgtttgaacactatcgg

SEQ ID NO: 131 - DNA, 1110 bp, Emericella nidulans
gggcagaaatgacccttcaatggctcctcctggaaacaaagcaactttttgaggaaaatgcccacacctcgagcatagctagtgcagcaggcccttttatagttcttttctcctacatagcaatatactggtactgacactggttaggcttacctgagatggaagctgatgacagattacctttagttattctacaactgttgatattctacaacaacatgttggcatattacacctctgagaatattaactctcgtgaaaacacgcctatggatatgcaactgtaccatagccaagtttacaaaatttttgctgctgctgagatttataagtttcagcagacgctgctctggcatgttagagtcgcccaagcactgctgttgaatggtcatctacaagaggctcagggacaatttcagattgcattggaagagcacaagagtgctcccacttcgaccagctctagctatttattatttacagggacatggcgcgtgcatgcagtgatattagaaggcatggagaggcactggaacaccatgaactatcagagcaacttgagtcactgttgggtaatattgaatttcctcccctgggacacaataataacatagataaactattagatacagctcaattgcaacataatgcaaggaggacagccgacgccgtcaaaacagccaacgaggcatagagattggtggatatactagaagataacgagcagctcgatttcccactattcttcaacatttttctcaaactctaccagccccagcgtctacgcctggtatttgatcatgctttggaatactacgacaacgcgggagggcctgatgattttaagagtttccttttggaaacattttccttcttacccagcagcatcatatcgggttcttctcacatgtgctcacttcggaccattatgagcatcgtgcacatgctttagcagtcataaagaggctcagcagtggcaatgagtacagccacccttttgttacgcgtcacacagcatagagctaacacaaatctatgatctcctttaaagggttgaggttagtcttggccgtccgccaccttggtgcccgggtagtatgttactcgcgc

SEQ ID NO: 132 - DNA, 770 bp, Emericella nidulans
ctacaacttggagcaatcctgcttgcgaaggacactggcctgaaaacttctaggtagtttagatgagtaagcgctttggcatttgcatatttcaataccaggttcatctagcgcgaggtggaagtctagacaggatctcgtccatcaatcacggctgcaagacaaaaggggatgtcgctatcactaaaatcttctccgtcttcggtgacagatgggctcgcgcaggtcaagctctgccaaactcaccacatccgcaaagcggcactatgaatattatttcagaaccgagctggaaagacctaagctctattggtcaatagggctagaactaagtgggcgttgtgaataagcgctatatataacatgggcttggaaggtagaagaagagatgagtggtatatatatacttagcccattgggaaaggtaagctaggtgtagatgcaggacagcttggtactaccgagacaatatgtacagattcacacaagagaggcctctactctaatccaaccaatgacccattgctgttgcagaatacgttgttgaaaaagaaaaaaaaaaaaaaaaaaaagaaaaaagaagaaagtaaaaaagcatcagaaatggtcccggagggactcgaaccctcagccttggcgtatacttcgtattagcaccacgcgctaaccaattgcgccacggaacccggttgttgagattccaaaattattggccattattaagcaaaatattagcacaaaaacacaggttcattagattcctgatttgg

SEQ ID NO: 133 - DNA, 1281 bp, Emericella nidulans
ccttttaattcctaagatccgtggccgcaattaaccctcactaaagggatcacagtagcgacggatgagtactcgacacagaccagcatcacgcaggcataaaagtacacccagcccctgagccgttagcgttgacgtacaccgatagggtgtgcaggagagaggtctcacatagcaaaggaaaaggcagggtcgacgtatcgagcggccagttcgaatatcgatccggggatgggcaggtatgcacacatctcgcccacacacaagtagcacggccagatgaacaagagtccgtaaaggaggtatccgaggacaacagagagcgggccagattcacgcagatactggccaatgcctacgaaaagacccgttccaattgagcccccgatggccatgagctgcagatgacgcgaggacagaccgcgcttggttgtgttgtgagggactatagtgccctcggcactggcgacggggtcgtctttgaccgaggggaactttttctccatgttgcggtctatagtctgatagattgatgggaaagagggtatcaggcgtgagatgagctgcgccttataagctgtactacccttgacgccctgtacgtgccctgatcaatcgatatcaccttactccataccataaggcggtggtgatagggagcaggccggacgacgagttgaacttaaccgcaaaaggaaagagatggcgatgctggtgacgatgccaagtcgccaagtgataccctcgatagcttatcatcatcacagggttgatgtttataaaattgcttgacagctgctctgacagctgccgccgaccattatcgttcctgctgactggctctgtctctggactgacgatccatttctctaggtttctcccgaaattacccctcctggattagtctcgccaggtgtgctcggttcctatgcatgcaggatctcgtaaaaagaatagctgaagtcgacgatcgcgctattttccgtctaaatccccagattctgctcttcggcccagatacgttagcaatatcccaataatagaggaacggatgcggctccgaacccacgcgataccccatactctaccggacgcgatcgggaccgaccaaactgcagctggttggagcattctggaatggcgataccggcgaggataggtaactggctacgtatagatatatcgtcacgtgttctccttccggtgttgagcaacgaagaggcaggctttggccttagtccgtctcacccaaactagagctgcgataggagttctagccct

SEQ ID NO: 134 - DNA, 857 bp, Emericella nidulans
ggtataggcctgctttttttaatttattaaaattatttatatatatttctagtactagtagaggtctctattaatataaataagtatattattaaaatataaaataaactttatctagatattcctagagggtctagttaatatatttttagaatatacttagtatattagctaatttaaaaaaagtaactagctatttaaagagtatatattttatataaaaaatagttatttattcctaatttttagttatatagattttatagaaggtagtaaatatatctaacttagtaaactatctagcttatttaatttagtttagtattttataaatcaggagtaataaataatagtcttttttaataataatatttaagatataataattaatatagaactacagccctttttttaatttttatataaaaaatactagggctatagttaggaaatagcttatataaataaaatttttttataataatttaaaaaatattttctaaaggactattattttttctagattatattataaaaaaggttctaagagaccttaggatcttttctactttttttttatataaacttaattttataattaatcttatttttctaatatagtagtagttctttagctttatcttatttaaagagtcttagatatttctagtattatcttagatagctttatatagaagttagtatatctcttaagactagtactttttatatatttactaataagactataaatatcttaatatcttggctatagtatctttatttttatataaatgtttttataattatagctaatatttatactatatctagctttagtaagagcctttttatag

SEQ ID NO: 135 - DNA, 376 bp, Emericella nidulans
actttcacgtgctgctgagagtcaactgataggtactctatgaccgactccctcgccagtggggcgtcagacacaatcgctggtgcagacagactggccagcgtcattccggctccgcttgagtggagttcttgccaagcagacatgcgaccgaatcctgtctgtactggatgccatgtgccaggactaaggggtatattagctcgatgaggcagccgcacggcaggacgggattgcttggtgagaggcgacattaacagcgactaagatggacgggctatggttcacgagcgtgcatgcgattacctaaacatgcccgatcggatgacccggactatgcaggccgtggcaagaatcattgccaaccgaatctcta

SEQ ID NO: 136 - DNA, 1417 bp, Emericella nidulans
cttctttacttacctatacacgaatgtaataccggaagaagagcgcagaacaggctcggttttctctcaagtttgcgatttctcgtcgtggaagagcaaagacacagccatggatatagtcgataacctgcagaatatctgattgatacgtttttcatgccgcgtgagttgatggcggcggtgggcttaatttatcctgggatgggctaactttatgacttgttgtgattagggcgtcacaatggaaacacgtcagcctacacctgtagggttatctgcaaatcaaaatgcaccggctggaaccaaagctgtttgtctaggttatgacaagagtgcctcaaatgtgataactattgctgtgttgtctcccgaagttcgatagagctgaagcgaaaaagcggcttgagcagaatgaggatagcaaagatgatgatggagtgctcttaagaaatcaaaggagtgaccagcttgaatctctaggaagtgacacatataatttctcattctcttgcaacggtagaagagtcagaattggtaggtggccctattgggtgagtaggtgcatagatcctttcttattataaccatagagtgagccaaaggaaaaagctgctttgtaaattctggacatgttctacccggaaatagggcctcttaacgcaggcccagattgatagcccctacaatgctttgaagctagcctacaattactgtcggctgtttgaagagttttgagatatatttcgaacagacagaccccagtattgagcgcacatttgtcatcaaccctcctgaacaaggaccgttattgcgcgatcctctatttccagtcatcagggaacttcatctcactcctgagcttactattgatccacccgctactaagctccttagggttcactgtgcaattacacatattctgaaactcagcggtacaggagggtatatagagagaacacttcaggagataactcaaatctgcgtcagagcggatggctctataaatctaggacgccttataaaattgcgactgggaaactggtcaaatgcattagctttctcctagctcgattgccctggtactgtacctaggttgtatgatgtagcaaacagacctcaatttatcgtcttcatatctttcaatgattatgccagcatgtcgaaagtgaccttcagcgctgccctttcgcaccaagagtatagacacatgcttgcggcaaattatcgaagccctgatcgggccaagtttcgtagtatctcccaatctcgcttgatataactcttcaattcagcaaagaatccctcaataggttcatgtctggtgagtatggcggcaggaacagtaaaaaagcctcagagcgcatgtgcttgattctctcgggtgctggaaagatgaattatccataaatagcacaga

SEQ ID NO: 137 - DNA, 474 bp, Emericella nidulans
actaaaatttattcaataaaaggtttctactaaaactagatataatatagatattagctataatttaaaaagatttttttttaaaaagtaaaagaggtgctatagctaataaattaatatatttataatcttattattaggtatatgaaaaaatactggtcttagaaagatatattaacttctatataaagttttttagataatactagaaatatctaaggctttttgaataaaataaagaaaattattattatattaaaaagataggattaattataatattaagcttatattaaaaatagaaagaatcttaaagtcttctagggtcttttttataatataattaagagaaataataatttttctggaaaatattttttatgctactataaaaaagttttatttttatataagctattttctagctatagccctagtatttcttatataataattagaagatagactatagtt

SEQ ID NO: 138 - DNA, 1999 bp, Emericella nidulans
agatcgaggaactcctcaacgcacactgacaccacctttccgtcgggaatcgcctggcagcgcccaaaaatgatcttgagcaggagtcgcgcttccttcaagggcaaaatatccaggatgcctttgattccttgcgcaccgccgaggaagtcccatcctcgctctttccagtgactgctcaggaaaagacggcgggcacaatgtctagctgcaaggcgaactccgcgcgatggctttgtgagtgcggcgacggtaaatagcggagtgtaccggcacgccaacgacagccagacttcgtatacggaagagggaattgcctctgtatggatctgatcgaggacgcacctgtcgatgaacgtaaggttttccattgatgaatctgcggctataagagtgcggaagtgtgaggcgaggtcgcgcggaggagccagaagggcctgggctgcagagcctcggggatcatgttgtttagtgttgtcagtgaatcgtgagtagatcgtgagtagatcgtcagtagatccgatgatggtgacctgggcttcttccttgggaaccacgtggtttaagtaattcctgcatagaacgtggcgtttgcttcactgagcactgagtcactaccctccaaatgttagcctcctcggttaccacagcggaagacacccgatgtgaccttagaaatggcactttcaggccctctacaggttagcgcaagggtccgaccaataagtgtgagggctaggctgttcgaaaggcgccactaagaaaagaccccatatttcaggaaaagggcatccacaatgccgtacaaaacaggaggaattgagaagtatgtcaaaatagcgggatatccagcgctttcacggttacaacctcctccaaaaatcgtccttctaccaatgtcaccagtacgggcacgcgacagtatacctcgtgtggaatagaaattttcctgtctactgaaacccaagggcaataatgcccagaggtagcaatgagagtaggcactgcgtgcagaactggctacaacaataagctaagtagccgaagaagcttgagggggccgttgggactatcaacgcatcaaaagaatatcccttcccttcgaatttgaatagttctcctagctgaacgtcgtggtctcatgccgggttagagtcacggtattctatgtacacgagcattcgaaaatcttgctcagcacataaatggactcgcgttgctcctatggttcgaagatcgggcgacggatttcaagactctcatagcctaagtaaacggctattagcatagaaaaagcaacgataaacttgtgatgtgacctacgaacgacatgaaaggacggtagtagactatattctgaagagtgtaaggagttagggctcagtgcgggccgattcaggaagtggtgcaggcggatcgcattcagggccatcggaagaacctctgttctgctcctattgtttgcttggcggaaatgtcttctccagcacttgataatcgcccagacaccgatgagagaggttgggatcgtgatgaggagcgtaattaatgctaggtgttttctgtcgaccagctcatgccttgggttcaggtaatgtctgtgtattgggactctgttgggagatcactgggagacaggcataatataccccgcgaaaggcatgattcaagcacgagaggagccccccgttacgctagcggtattggtaaagttactagccccgcgctagagcctattgaataatccgttcattggggaaaaagacagacaattgtcattattggatggccgactgcctatctatatctagtttactaaatgatgacagcgagcccgatccctaggggcaagcgataccagagggcaagtgcgccctgacaattatttttcgatcctaaattgatcttttactttctaccaacgaccattttgagtggcaacctttatgcatgaggattctttccagaatcctttcccaacctttgtttttggccattg

SEQ ID NO: 139 - DNA, 1118 bp, Emericella nidulans
tcctgcttgtctctggaacggcgtatgactagtatgtcctggcagtgtacgtgctctgtgctggttctttcacttttcttgcattgcaatgacctggcaggatgccttcccgggctcttgccaggcgcagagcccctgatgccctggcgtagcgcctcgggcatgactttgccaactccctcctagctcttccccagcgccatgctggccatgggcatgtgctgacttgctaccagccctgtgcgggctttccttgagcttcttcctggcacatgtctagctccatgctggcttaatgctgaatccttgctggcaccccctgatttgattttgataattggctggccttcctggtccccggcgctgtgctggtgacatgccttcttggtctatgtgctggtactggctccagcttgatcctggccctgtatgggtgctgatggtttgctgtggccccttgcaggtgtttgcttgtgctatgggcggtatatatatttagggtgactgacaggctgaaccctggcccttccccggcctgtgctggcagcacgctgcagcagcctctggagggcctctatcagttactggcctagcagctccagcagccttggtaccagttcctacaagttctggccggctttggatgggttcctggagggcgctgcatcagtactgtgctagctgggaccttgtcaagtactagctctgtacaggctgggcatgtactgcagcagttatatctactttatatcagcctctattcactgtgtgggctctgctattatgataatatggtgctgttattataccagtgctctggctagcagaaggatggcagggtagctggtcctgatcaatatcagagtagatcattgtgcggctaatcatactacaactacttgccagctggcaacaactggtcacctacctctctatggcagcacaactccctttgcattaatataatccctaatattgtatcaaagtctcctaacaacagtgtatagtatttgtaataatccaaggatggctttactaacctggtaatattaggtggtgatatatatatccttatgcagcatgtatctgttacctttggtctaaagctgagagcacat

SEQ ID NO: 140 - DNA, 1072 bp, Emericella nidulans
gaaacatagtggtgaaaagtagtccaagtaaagcgaagttacacagtccacctgtgaaatgtcagtttagggtaaccaagaacgagagaagcacgtactgttgcatcatctgaagcgaggtgcccaggatggtacggcgcaggttgctgttcggggaccaaatacttccgcgtaagcagttgaaccaagtggcaaagtaaccaccctgagggataaggctcatttcgtactcgttgttggcgacgatctcagcaagctcctccttgacatagtccgactcaacgtcctggtcacggacgcgagcaagcactttggcggcgctagacacatcgcccttgcgcacatagtaacgaggcgactcgggaaggaggaagagaccaacagcaaggatgatagcccagagcagctggagaccaattggaatacggtacgagccggaatcggtgcggttctcggtaccgtagtccacgcaggaagccagcatcagaccaacggtgacgcagaactggtagccggaaacaatggcaccacggaccttgcggggcgcgatttccgacatgtacagaatcaggatggcagagacaaacccgacaccgaatccagcaatcaaacggccgacaaccagcaaggcaacagtggtggaggcagtctgcagggcgacaccaaccatgaagattccacatccgctgatgatcgttgttcgacggccgaaccaatcggccaggtcaccggcaatgatggcaccgaagaaggtacccgcagagagaatcgaggtgataagggacttgttggaggaggagatcacatagccgctcaggttatcggcggcttcatactcggctttgacctagaaccagtcagttctgctagcatccaaccagccgtagccaacctgacaagcgggagagaactgcgagcagcgaactgcgtacctttcctgaaaactcgtgaatgaagtagtccattgccataacaccgttgatataaccagaatcataaccaaaaaagatacaccaaaggcggcaaacggcacatgaggtaggtcttcaggtgacgggggctcaaccgggta

SEQ ID NO: 141 - DNA, 171 bp, Emericella nidulans
  unsure (1)..(171): unsure at all n locations
agtagccagcggtgtcaagaatctgaataccgcccnnnnnnnnnnnnnnnnnnnnnnnnnnnnnnnnnnnnnnnnnnnnnnnnnnnnctgcagcaacggaatggttgtcgaaattattactatagatcgagccagcacgccaggcaccgccgctaagccagacaagtacgt

SEQ ID NO: 142 - DNA, 2742 bp, Emericella nidulans
tagacagtggtccaacagattcgtctagttgctaaagagacagagactccgtccgtaatgatggctgggggaggttttcatggaagatcggtcgagaatagtttctcgctacaaactttgagcatgtacatttgaaattgttatgggtgactttaaaggagtgtatagaacaataccacaacataatctattgcatgacatatagtgcatgtcggagtactctgtcatggtatacattgtaaaaaggtaatccccaaacacgaccgtacttcctccattgaccaagtgtctctgcctcttctgatgcatgctagatcgcggaacaaccttaatctgagtgtccttgttgaaaaagtgggtaacgtctctcccgtgctaatttatcaccacagcccggggaaacgatgttgcagcggactttctatgggcgcgaaaagacaggcgggggccatacacagccacttacttcacgcttataaaggttacggcatcgcatagatggagtatagaaatttgaatcactatgtacagctcattaaacacccttgcgtctttctggcgtacaacaagatatctaagtcttccaagacgcttctcaagtctcacctactatcaatctcccaccatgccctccatcaccaccgatcagtggctcgaagccgccgcctaccgtcgcagtgtccgtgccttggaggggacctccaaggtctcagatgaacgagttcatgagattgtcgccaaggtgctttcctttgctccctcgtcttacaatactcagccagttcgcatctcgcttgcttttgggaagaagcacaaggagctctggagtattattctcagggaggctgaaccgatcctcaagtcaattaatccggatctctggcagaagttgggccccctttacgaaggccataaagctgcatatggatcagtatgctacctctttgtcacttgtcactcagaccacttaagataagcaggtactcttctgggagcgcggtgggacgacgaaagaggctgctgagacgcacaaagcaaccgagcatatgtttggcgaatggggagagcatactcagggcatccaccaaatccttgtctggactgccttggaacttgagggagtcggagccaatctgcaacacatgaacgccattccacccattgagatggccatcaaaaaattcgcgggggtccctgatgattacaaactaaaggcccacttgaactatggcgatgagcagggttctcgtcccgagagcccgccgaaactgccaattaccgagacgctcacaattctatgataaaatttagtacggctgaggggaaacctagtaacatgattttgcaggctactatgtagatagcgatagacctgatctcgctacggtctctaatactctttaggactgccctgagcatagtagggctggtagttttgacaagcctatctagtaagcctctcgcttcgcatttgcgtgaaagaattgccattctgggtgtctgagtatgtctccttggaaagtccctggccacctcatatatacccatgttgacttggtagatacttctcacttccattttttttcactaaccagagactataaatcatgcattatttgctgaatcaactttgaataggtctttattcctttccagatacgcattaactctaagaagcccctattcttatatgaacagcgtttacttatgccttacgatattacaagatttacccgttcaacatgtttaactttcaggacaaagggaactgatagaaaccttcataaattctagctacagagacccttatgctgctgaggtttgaacgttttcgacggtttgggtttaccccatattttgaataccaattgaccacccacaattcaacctgctctcgctgcagtagactgctaatagaggcttggcaggcgcacttgtcctgaaccatactaacggcgctctaggtcccaatcaaagacatacgtctattttctaaccctaatcacatgattgcctcaagcggccgcgtaatttaatggatgcacccaacccatcaaaaggactctgaagatgtaagacaaacatgtcggtttcactacgctaaagcaactgcaagttccctgggagtttctggttgagactatgcagacttcgttgaaagtacggctatacctagggctaacccaccagatgattgtcttcagggtgatgaaaatgctgcgtgaccccggaggggatctgttctaggtgtttccgggttgctggttttgtcatgataattagtcattggtcatttaggacttttaaatgctttggggttgtaatgcttggctcaatggtaccgcccgaacgtcgtataagtgaacttgtgagaacggcagaaattgcgaacgggccaagtaccttctttgacatacaagggcaagagctggcaaacaaggtctaactggttgttaaagcaaatttttgagtttttaggggcccttggtccaggaatttgggcgcccatgccaaatccgccaaaaaatgatgagaaatggggggttgaaaacggcttgccaaaatggggcgggttggcaaaataaatggggtttagggcgggggggtgcccttgtgaacacaaatcctattttggtcgctctgtcaattattaatatatatttcatcctttgtactcgggttaatttttacttatcttaattctattatattatctactctacctttttataatacataaca

SEQ ID NO: 143 - DNA, 2106 bp, Emericella nidulans
gaagcgatcccagcgtcatgggggttttgacacatttccaggtcgatgcgccggaagaggaggggcggtctcctgtaagtcctgctgctcctattcctgtggcagtagggctattatcactgcttcctgtacccacacctgcagcaatagcaccgtcaacaagaccataagctgtacaagcagcctgacagatttccagaatcgaatccgctagcgggacgagccctgtggggctgtaaccatttgcagtcgcagaggtctgtctcgcaccttcgatgcatttcgagaggtcctctaacggtcgagtgagtgttggcaggaggctgaactcgtatggcccgcgcggaggtagcagcgatgatacctgcgtcagttcggttgcacaggggccttctgcctaggtgccgggcgtcgttagtcgagagcttacaattgaaaacaaaaaagaaaagaagatgggccagatgatggaaagagttacttacccgccgggtacttgagaacattggtctctgctgattggagagctgttggaggtcgttgtctatgctgcctcgactgcaaggtaagttctgtggtggtgtgatggaaagctgagaattgcggctaactgcccagtagtcgacccctcactgcactacattcatgaacccctccttttgcacacagccctgcttaactcaacaaatcaagcatctcaatcatttacctagtcaagactagttttggcacctggcaattgaccatggtctgctagtttaaactcttctataacaatcccattcttggccaatgtccagagagtcaggatcgtactctgcctgctccttgacttaggagatgcctttatttagtaacttcctgacagatccttgaggtggacaccgtaggccctcacgtgttcgatgtaactatcgctttccacttttccaaccaagcagaagagatttagggatggacgaagccgtgtacgtattactgatatttctcttttcttttcctctcttttttttttattcgccccctctttattacttttcttatatgagactgattcttgatagagaaaacaggtttgcttgccttttcagagcgagggaatctcggtaactctaactcttgtgagtgttcgagacgatggcgcgagaactcaacgttacaaagatggatagttgatgatgatatctccgacatagataaaggtatctctttaagccaacgttctgagcaggtggggtggttgaagtgtgactatgcagaggctgagagtgctctaagaggttaatgttcagattaagggtttactataattatacccatagcggtagataaaccttattatactggatcccacggtaccggccgcttgttcccgcacttccgtccgtgcgacccatactatcccgctccggctcgtcgggccacctgtttcgcaagaaatccacgggacactgcgctcggaggaccaaacccgccgcgcgagcatggatcagggacgtgtaaggcgcgtgggacaacgcttatgcggacagccgtcttaacgccaggggcagctattggcgagatgcacagtcggtataacagagcaggtccatttacaatggagatacagagaaaaggtaagtcatgcaaattgaatggtttaaatgataagggatctactctgtcaggatagattagcctgttagccaggtaaggactcgaacaccacctataatcaacgataggagaacgaatactcggggtaatcagaactgaacctggggggatcttcccaggccaggggacctccccccgtcgtaaatacatttataaagctatacgcatgtaacctggtagcaacaccatgacaaggccttgcccgaaaacagcggctgatcccgacaattccgccaacgtagcatctcccagagaaggatacctacatcttgattgtaccagaacttccatgattatctgcctgaggcgccagacccttgatattgaatccgaacaggatccgtaacagaagcttgccgaccatatgctcggtggctgcatggcacgggcccctgaccgatcaagttccgtttgagattaggacccgatcgttagttcgccagacga

SEQ ID NO: 144 - DNA, 1485 bp, Emericella nidulans
  unsure (1)..(1485): unsure at all n locations
ggaaagcatcatcttggctgatagtggtggaggatatattctaccccgtaattttttctataagcctatcacgttaacacctcttaccaacctgtcacttcggccaagtccactctccatccgtttcttgcgccgttgaagcttgaagagggtgatggctgcacgcagcactgtctttatacctggccattgcatttgtctctttactatccaaaatttcctgcgcgtatctcccagaattacaggccctgcttctaaacagatagtctcagccgtgacagctggtcctatccgttgtctgagaaatacgggccagggtgccctccgccgattttatatggcaatccaagcactaaacgattcgatgcaattgatgaaactcctcgcagagcctacacctcaacgtcgaggtgatataactgcccgtgcaggtagcgcattagggctttgtacatgctacgcgcaacgcaaaactcaaatcatgtttttacgcctgagaccatcggtatagtgttatcttctaaagggacgtacctaccagcgtttctgacaactattttattatagcggtaactttgcagatatagtctttatgaaggttttcgcaaagtatgagccgtcaatttcgccaggatatcttgggccactgggggtgagattgttggccacgtgatataaatggcctgatctccaacccctgacgaactgacccctcaatataccgtattgagagacacagaagaagagatttatcgccaacgagatagatagtcaatcgtcatatggcatccgctccttagcaagctacatccgtgtagttgatacagtttccttctgccctttcccctttgagcgtacatgcgtatctacaacaatgcgattattaccaaaaacaagtcaggtccaaataggccttaaaacgccgcagttcatctaattgagcaatggaactaggggtcctcgaagcgggctcggctgctcccgtaacgcctgagtccaatccccgcccgcccccgctcaaatcactcctataactctcaaaattttccacgtacctgggaatctctcagatttttccaattggcgctccgcccaccgctcacttttccttccaggcgaaaagacagctagcatgtcatctgaaaccatccctcagaagcagaagcacccgcaaggacagggcgccaagagctcccgatggcgtaacgcgcttggcagggactgggctttggtatcccttttcaccggcttaatgaccgcagtaatcggttggtggcttggaatcctgaatgcagaaatggcgttggaagcgccttttggatttttccagcgtatcgatatagacagccattgggaggagcaccgaaaagaggtgaaagacactttcatggccagctggcacgcctacgccaaacatgcctggggtaagangatcatcagcttcaaattcggcttcttttctatttttattattattttgtgttt

SEQ ID NO: 145 - DNA, 830 bp, Emericella nidulans
acaggttcgcatcatgcagtatattgctctcagccatccggcaggccgcctgctgcttgttgtcagtcacacacactttgatcttggcagcaatctgcttgtaatcagtcaacaggggtcggggctcatcaggcttggggtcgcacgatcagatgtgcacaaggtgcgagttcttgcaggtcggaaacacctgctgccaggcaactatttgatatgactgctcaaactcctctttgccttgtctctgctgtgctgcacgaactcgcccgccatgggtctgctggctccatctatgggcctgctgccaatgctgccgcatcttcttaatatttatactgatatagtagtaatagttcagattatactgacactgcatgttattagtataaagagggataataggcagcaggttcttgagctcttgcaggatgtggacagcatcagggtcttggatcaggttggtctattgctgtataactgcaataacaggctggatctgtaatatagtcatacaatgcttcttgtgcaggtgggtttggaccttaattaggtaaacagcatacttatattgccggcagatcatgatctacagctcagggattggctgaaagagaatctagaagctcgaggaattgctcaagtccatgcgtctctggacgactgcatgcatacaagaaacctcgacatagtgcagcgactcccagaatcgtagtcgaggaaagggacctccataaaagagacggactttcgccggtggcaccagaatccgtaggctgcgacatggtgtcggttctatcggatatccatatgagttattaagggaggaatat

SEQ ID NO: 146 - DNA, 456 bp, Emericella nidulans
agaatagtccttataagtataaacttatcaatatcttatatacaatacaagttcactaaaatactagactaaataaaagttaagtatttttaatattagtcggagagaataattttgttatcttatttagaccgataattgataaatagatatattattttattttttttcagaaataaaaaagaataacagcccttgtaacttaaaatatagtttaattattcttagaaagtaataattcttgtaggtagttatctactaggaactagagattatctacgtgaatatggcaatattaggttaagaatataatatagaagaagtagttacaggctattataggctattataagttatataagattataatatgtaccctctgaggaaaaataaatatccttattaatacgtatttttcctagtttttatattagtatattcggtttagtcataata

SEQ ID NO: 147 - DNA, 1635 bp, Emericella nidulans
gcttaggactcgacaattgtcttactcactttcccctagtgcctccttatctggtactcatcccacagatccttagttggcgcgattcaatggtcagtacccttgccttctctgttcttggaggcgggatcttcctctctgcacaggcaggatcgaggccaccagccgcccctggttatagccggcataagcgccgttggctcctgtgcttggtttcagactggttctgactcccttagctagtctgtctactccagcgttgattggacgtccgcgtgcaggaggctattttttgcaacttctctttgaaagatgaatgtcgccggcaaggacaacaacatcgcaattatacctgcaggactgtcacgagctagagtcgttgatactaacaggtagtattagactagaagaattcgctagagaattagaacacagtgaccgtcgagctttctatatgtgtcacggaccgacgttggtgccaaacttgattcgtcattccggaagtcagcaacaatcatacgagaactggcctgtacagggcttatcccggaccagagattcaatcggcagttggttcctagtggaccggctcgtcgcaattcgggcaatgctcgaatcaagacttcgggcgtagctcgtctcaaagacttacggcaaaacttgggttgacaaggtcatagtaaaagcagctgctgttcaccctgctgaggacatcaaaatcatctataagattgatgaattacaactgaaacacagcacagaggccaaatacagcttgttcatgtagcagatgcgcgacgacgtgatcaacggccacactcccaccaacagaacaaccatgttgtattcgcgttcagttactctgtcgctgacctggtatcctatatattagaaagggtgacatgatcggatatacgcgtacccgcgcattgagggtccaaatatgggaagaggacaacctacgtactaccgccagagtaatgagcggagagtttattacagaggtctcgaatttgcctacgcacacctggaggcaaggaacttgatacacagctagggtgcactgtttaatgtagttgctatggtaaattcttcgcatcagcgtacactcaagtgttcagtggcttaattgtcggggagttgggaattattgcatcataccatgtatctaattatttcttttatactgcaaactttactggatgtaacaactaatcttccgtttcatgtgctcctccccagtgacatgatccagcacctgccccttgtgaactctggcgctattataaacttgataaaaaacttgatgaagagcttatcaacattgttcgaagctatcatgtatcatgaggtaaaatagtacatgctattatgccgcgccagcattcttgtctcaagcccagactaggggacatcccctttcaagtggtgacgcagaggccatcctgtcggccttgtacctctcgaagacccctttcacagcctgaggcttgggttatcattagggttagcttgagcggctccccgaaggctattgaacaggacgacgacatcctggattctgtagttgagaaacagcctgaaatgggtggtcattttgtggcaagaatcactgacaaggataatacggccaag

SEQ ID NO: 148 - DNA, 822 bp, Emericella nidulans
gccgggtacgggaaaaggataaccaacgtatgggatatcagcctcgaggagttcgagtacatgttaaacatcaatcttcgggcttcgttcgtcctggtcaaaggagtggtggaacatatgaaggcgcagcgatggggccgtattgttttcatgtcttcgatcgctgcctctggaggcgggatcaatggatgccgtgcgtttttctgactcggtcatacttgcacttacttatcagcttagattacgctgcgtctaaaggcggactgactggcatgatgaagaacctctctacgcgtttggctgagtacaatatcagcgtcaacgacgtcgcgcccgctatgataggcgatactggcatggttccatcggccacggctattccgggaattgcatcgaatatcccgctgggtcgattgggaacaccggaggaaacggcaaatgtggtgacgatgctggtgaacacgggatatatgacggggcagagtctgttgctagctgggggattgaagtagaaacaacttggatgagctgtagattacctgaccaatagatcggctggctgtcattcgtgagatcatccggcttctcccacctcccgctcacttaccccaactcggactccaagtcgattcaatccatcaccgtcaaaatgccaaagtccgtaagccgaagatctggtctatttgaaatgcgagctgtaagtttcctgctggtaatgcaccggctggctgacgagcgaagtgtgcagaatgccgggtaagagagcgcccacttaaaacacgtgcggctaactaatgcagcctagaaacggaaaagcaaagt

SEQ ID NO: 149 - DNA, 608 bp, Emericella nidulans
  unsure (1)..(608): unsure at all n locations
ctagaactaagaactagggatcaattacaggaagattcggacaaagaatagatggctaactacgatctatgccaactatttcgaggctaaaggagtgtaatcaaagaaacgaataggtgcaactatggctgctatggccccaggggtgggaagaatcaggcaagccctagatcacctgcacgtccacccagaagcgggtgtcgtcagactgatatttcgaatcactctcaatctgctgctgagtccatgccatagcgtcgatgtatcctctagaagaatatcagtgaagaccccccaaaatcacaatcgttggatggcgagatactcgcccttgatgtcctcggtgagggngattgttcacaccagactcgcatttgcggtggccgctgaaccagatctcatatcaaaatggttttcaccttcgtagcgagcttgaatatccttggccaagtcggagcttgcatccatcgggtcaatagagagacagaggccggcgagcttgacccggaagaagagcccttatttgagaatggagccggtatcgccctggtcgatgggcctgcctagacactttgacgcccaatgacccagaatgaacaattctggtt

SEQ ID NO: 150 - DNA, 1870 bp, Emericella nidulans
agaggaaggcaccaaaacatatctaaacaaaacaggataaggaaaacaatagtagaagtgaattcaaaaataatagaatacaacaaagggacataaaagataggaaataggtacccagaattaagaagggacaattgtataaaaaaactgataaaaataatatttaaaacctattggacaagcaaacctaacatatatgacatcgttaataagagatgttgacaggttgaaggaacacaaacagacaaggcattgaatcccccacaccaaagacagaatctcatgttagttcgaatccacccgacgcactttggatcagaaggatatccgctcccccaaccatcgcccactcctccattttccttgagaacttcataacaaacatcaagcgcaacatctcttgtaaccttcgccaccacacttgctgcgctaacgcaaggataaagcgagtccgccttctttgcgacggtgatcctcagcgatgggaacaccatctccagtttcttctggtaacttgctggatttcctatcgtatcgatatagacctcgcgcacgttcagttttctctcttccacaacacccctaatcagctcaatcgttgcatccattgcttgcgcattcaggttgtacactcccgctgcaggtcgcatcatgcccgatgatatatcccgtgcggaaagaagctttgtcgcccatccgcacgactcgtgcagcggtgagccttgtgtacaaaggatgcgcatgagatttgctcgtactcccgcagtgagaactttactgtcgttgaagctgtactcttccgacagcagcgagtggtgcagagagctgggaaggtaaaaggcactgtaaaccattggcccaaggacggggccgcgaccggcttcatcaatgcctagaattagatagtcatgttctggatttgtggctattgtctgtgtcgaaatcgctggtggagcgggcgagaagtgtgcgtaggattcgcctgccaggagccggggtttgtcaatgcttgggggtaaaaaggtggatatatcgacagccacgggttcggtatttgggaatgggctggtaggtatctcttcatccatcctgagtaattgagttgtttttgtccttgatgagcgttgattgaggcgttggtggatggacgaatctagaaaatggtaaattgaagttcaatatggagacgcgtctcttagatgcgaagcgcgttccacttaaatttggctggttcgaaaagacaaactcgtacaatggtgcatgcatgtgacgagactgaattagaagcaagaataacaatgtttcttcactgtatcagccatcgaaggcggacgataagtacaaaatggagtgttaaaagtgaatactgcgtataagtcaaagtaatactcaaccttggccaacagtttgagttaccaaactatgggtggctgctacgatagactaaaatttagctaagacggcgcgacttcagctctgcgtcagcttcataataaaacttccagtacattttcgttacctggagtgctaaaaggtaaataactattataaaaataaattagggccgaccgcgactcgaacgcaggacctagcggaaacacgaagctgcagccgcttgctctaccaaactgagctatcgacccttgaatacatagttacttttgcataaagtaacacatagagcaaacaactagtaacaggataaaagtgcggaacagagtaccttcacttaggattagatcatgacaggccacacttgaactttgttactgctcaccaacctagagcctgataagcaagcaagtagcttgtagcacacagttatcactactgcacagctaccctagcttgtggctgcaacccaatattc

SEQ ID NO: 151 - DNA, 1510 bp, Emericella nidulans
ggagaaactgcgccccccgtaacgtttagcccgcacctggtaggttctttagcatgagcaatgatttgggcagatcatacttactgtgaaaaaaggtccagagagtcgtcgatataaaagctcgtgcctcgacgccaaaggcgtccgtttcttggcgcgggatactctatagggcggctaatcaagacgttccacctcatataaccccacgatctatatcttccatcacttcaatatctattaccgacactcaaaaatcaattttctcattctcggcctgcgcggcagaggtctaggttttgcccatgagcttggtgtgatgctgcaagcatttacgggccatttcggtagcatgatgcttaggtagtcatggtgtggggagtaaagtcgatcggttgcttgcctttaaatttttgctgatcagcgatatcaccttggccacgatagcataatatatatcctcactggggacacaggcgtctacgagatgtttttatactgttgatagagctgttcagcattgcgtactccgtaaattgcactacactagctcagaaccgccgatgacgcggcatgtgtcccgctctggcctatatgaagccgtcgtcgcctactcttagagatcgtcctcgatcttatctgataacaactgttgacaatgccacctctctttccatccagcccatcagggctgctttgccttgcaacactcatcaccaccaccgtctcgtcttcattccctccgaatgccaaccacatctttaacgccatccactcctctatgcggcaatggggttcctccttgaaccacaacggcatgtccttcttcctagcaacggtccctgaaggaacacagctctaccacggtgactggcggtccgacccagttcaaggccccgaatggctggctttcgaggccgagcacgctctggtgttcactcacccgatgcctcataatcctccgccggaagatgggagccttagaggtcccggccggcgggctcacagtccaatgcagcttgactcgcagcgggtcattggccagcctcagccggcccaggcagcagatggattcctccacacatttgctgccgccaaagacctgcgtttgctgtatgtcgatggcatgtctgccggcaagacagataacggtaccatggactcccaggatcggatcgtgtttcgggacggcctgggagacggcgaaggtatgagggacgagaaaaaacgcgccgagctcttttgtcagatggttaaagactggtgggtcggacgcttggatgggatgctccgcatggaagcaggatttgagatcatcctgtgcgacttttccgatcttgaggtccttcaagtggctcgcgtacggccgagcgagcagggaatgcccggtgacgatattgggaagcacgccggacaaatgtggcttccagcagtggcgtaacgataaacggtcatcgggggtgacagagtggctttaaactacgaccgttttgtaactgcatcgacaatg

SEQ ID NO: 152 - DNA, 1981 bp, Emericella nidulans
tatattgtccttggcaatgaattgaatgttgaagggtccagtcacgttcagagcgttcccaatcttgcgggtggcttcttcaattcgtcgaacggtctcagggtccaagtcctggggtggcaggatcagagtcgcgtcaccagagtggacaccagcgttttccacgtgctcggagatgaaatggccaaccatgacaccattacgagcgactgcatccatctcgatctccttggcattttcaatatacttggtgatgacaacaggatgttcacgggagacgtccgcagcttggttgagatagctggcaagatcatgttcagagtagacagtgttcatggccgcacctgacaacacatatgaaggccgaacaagcacggggtagccgaccttgtcacagaactcacgggcctcttcgatgctggtgagctccttccaagcaggttggtcgacgccaatacggtcaagcatgcgggagaacttgtaacggttctcggctccgtcaatcatttcaggcgaagtaccaagaatacgaacattgaggcggtgcaacggaagagcgatattgttaggagtctgaccacccatggacatgatcacaccgctggaggactccagctggtaaatatcgagcaccgtttccagattgatattctcgaaatacaagcgatcagcctcgtcgtagtcggtactaacagtctcagggttgtagttaaccatgacagtcttgtgtccctgctcacggagagttcgaattgtcctcacagagcaccaatcgaactcgactgaagatccgatacggtagacaccagaacccagtaccataataccattgtcgtcaaacctaacatcatgttcggaagcgttgtaagtgagatacagataattggtcaccgaagggaactcggcagcgactgtatcgatctgcttgacaattggaatgatgccagcctccacacgcaaccgtctgatagccaactcgttggagctcaagaactttgcaagttggcggtcagagaaaccaagctgcttagcctgacgaagaagaggtgccgttacggtgctagcattgtaattggtcatgagcttgccaaagtcactaagacccttgagtctagtgaggaaccacttgtcaatgttggtgagcttccagatgtcatcgacgctgtagccagcggccatagcgtttgcgatggcgaaaagacgctggtcggaaggagtttgcaactcagtcttgatagacatgagggcgttggtctcgttgaacccaaggttgtggaagtccacagaccgaatggctttctgaattgcttcttcgaaagttctgccaatggccataacctcaccaacactcttcatggaggaaccgagctgtgtggagacgcgggtaaacttcttcaaatcccagcgagggatcttcacaacacagtaatcgagggagggttcgaagcaggcacaggtaaccttggtgacagagttcttgatttcattgagcgggatgttcaatccaagcttagcagcaatgaaggcaagagggtatccggtagccttggaagcgagcgcagaagatcgagagagacgagcattgacctcgataatgcagtattccttcgagtaggggttgagggcgtattgaatattgcattctccgacaacaccaagatgacggatgacgttaacggccgttgtgcgcagcatattgtagtcctcgtcagatagagtctgagatggggcgacaacgatggagtcaccggtatgaataccgagcgggtcaaaattctccatgttacagacagtgatacagttgtccctggcatcacggacgacctcgtattcgatttccttccagaccttcatactcctttcgatcaggacttggggactggctgcgaaagccttggcacacaggtcttttagttcattcaagttatcagggaaaccactttcaagaccaccaatcgcgtaggcagcttgaacgatgacc

SEQ ID NO: 153 - DNA, 807 bp, Emericella nidulans
tagtttatataattattttttttaagttatttagtatgtatataatccctgaaaatttaggaaaatatttagtaaaaattaataaagcctaagaatttttagatactaaaatactaagtttcttatttctctattatttgtattttctctagatatattttaatcctctttcctacttatattataaagctgacgtacttagttttttaatatttaaatttatattctctaatatctgattataggcctgccttaaaatatttataatattttcaatactagcagaggtctttattagtatatataagtatattattaatattggctaagtaggatttatctggatatttttagaagatacttagtatattagcttacctcgaaaaaaaataactagctatttaaagcgcttatatcttatataaaaataattatttatatttaacttttagttatttagattttatagaaaatagtaagtatatctagcttagtaaactaccgagcttgtttagtttagtttagtatttataaattaagtataatagataatagtcctccttagtaataatatttagagaataacaatttttatagaactaatctttttttttatatgaagagtactggggctgcagctagaaaataatttatataaataaaatctttttcatagcagattagaaagtactctctagaaaattatttatttttcctaaattatattataaaggggccccaggggactttaaggtcttttttatcttttttatataagcttaatcttataattaatcctgtattctt

SEQ ID NO: 154 - DNA, 2081 bp, Emericella nidulans
  unsure (1)..(2081): unsure at all n locations
tgcctcggatactcgaaagagtaacatgtcggtgtgcagcagcggcgagagaacccaaccgttcctcttttgatacatgtctcccagttgaggatacaggtaaccaggtaatcaacaacttggatgatactgcctgatggcctcgtgaagctcgacagggccgccgttggacataaaaagatcaatatcccgcagttgagggatcttatgaatgaggtcacttaccctggcgttgaggttcgttgaacaaccctcgactttgggagtgcttcgaactcccaagttctcagcttgaagcgcagaccggaggccgctgtaggcacgaagcactggtgcgcgtcgtgggccgctaatcggataccatgggacgatgatactgagtcgttttgcgtgaacgagcacacggctggcttctggctgccggagaaacttaagaggcattatccttgagtctacgtatgatgatatgctcgtacaagagcgacctggtaaccctgtttcactcttggtccacctcatcacgtatctgcagacacggtaagatataccaccattgaaaaagggttaacgtacttgtctcggaatcagacatttaaactctgatggcagtccgtccatgttttggtagaggggttggatggtgtgcggagggttttaaaagaaatgctagcttggggaacatggctttcttttataatcattctacccagagcttacctaacagcacagaatagcctacttcctgcctagcggaaaacatatctagacctagatagatctcctgctctgatcctccccctctagccgcacctaaacccaacaacaccctagacatcagtcttcccacactaattcttgtagaaactgacgatctcggtgttccccttttccgcatcgtacggtgggagcccgtaaacgtgccagtttttctcactgcagagtggcttcctccaatttggcaggtagttattgaggcagctcagcctcccgaaattgactttatcctttgagagtatctgttatgaatgctcaaaggggaaagggtagaaggaagctgcatcaactacacgaacgtagcctactaaggataggatgccataagacgattgattctctatcttgatgacgatagttctcacttcttcaatgtacaactcctcgagggatcaggccaggggccagagatcatgccatacagatcacgtggcacgtgacacgaggctcaacatgatatattcgtatcagtatcctatgtgataagtctgttcttcctcgtccaaaaatcaccaacagtattaatcgataaatgatgtgctcggtagtatgttagatatataacctcacttctataactatagatttgggatacaggtacagaaccatgtcttgctatgtaggttcataagccagtgtcataacttaattcaattttcttgccaagagactgacaaacattgtgtatcattgcgtcttttaagtacggcatactgttcgaacaaaagggcaaaaacgtatttaacacgtaacgagtttgtaccagctcagattctgccagcagaaatttgattacatatgcaggatagcttgcttagtttcaccgactggttactcatcctaagcaccacgtaaaggtgcaagctatgctcaggtgaggtacacagcccgtacccctaggcagtgctggtgttcgtacaggaaaatcaagaaagctcgtacggaccttataagacaatcggattgtcctcatccccttcagggaaatcaaggtagataggattttcagcctcaccttccactggatcaagattgataaccagctggtttgcagccccctggggtagaccaagcccatcaccaagcataccctgccagtgctcgtctcgtacggagcagcaatgcccatggtcacgccatttacaattggcgcagcatccgttgaatgccccaggcacatggcggcattcagggaagactggtctttcttgacggagcggcatcctttacagggctggtcagacgagtcccccagactgtatagcattgcattgatgtcnangggccggtgttgcataattgatgca

SEQ ID NO: 155 - DNA, 1346 bp, Emericella nidulans
agaaagaaagtccgcttaataaaccggccgttaattctgtccggggtttgaatgcccattttgactgcgataaaagaagctgggatggaaaaggtgatcaaggtcaggtatctcgaaggtaagaagatggacgaaggcgtgaaaggcactccatttccccggaaaaggcgccgccgttaaccgccccgctccgcataatgccgaggctgttgtcacatgatggtggcggcagccctaaagtcctataccagagcacagtaatgcgttttttttttctcccctcaggaagttcttcctgatggattctacatggttagacaaaaggcaatacttcagttggtcagcggcccgtcccggcagtcaaaccactgtcctcgacgagtgtcatgtcctttatctacagcatatagttgatagtcgcttaccgaatcgtagtgataaccggcagctgttgcgtgcttgataaagggaatgctaccaggtgctaccaggcggatggccgggggtctacgtataggaacaaaatagaccatggcctttatcagaaaaatcatcggagtgtcggatctccatcaatctccatcggacctccgacatactgctccacccagtcttggatcgccattatgactgcagatttcgtacgttcagccagagatccattccgtccgcgtcacccagtcatgatcgaccaagacatagctaagcactcggctgccaatgacagggtccatatttataccacggaggacgatttgcgtcggcactttatccgaagtactcgcttcagccgtcaggatgtagaataaatcaggaaaaaattccgcaccatgtcatgaaaaatgttgccattgatgcagtcgcaagtcgcttacgaatacgcttgaagggactcagtgttcaaacagtgcatgccgtgtttatattgatcttcaagtgcccagagtttttgatggggctcggattcgaggaatactctatcgaaagcgtatcgtcaattttaagttatagtaggcatggctggttctcggcagcaagcagctgaaaaggctctgcacgatcaaacgaacattctccctcggggtaggcttctcgttgtctttgctgggcttgcaatctcgctgttcatctcgtttgtcgaccaaaatggcatcaccgtgacgctgcccactgtcgcagaggatctgaacgggaagaacaccatcttatgggcgggaacatcctcgctgattgccaatccaatgttaagtgtcctttacgggcggctggctgacattttcggacgaaagatcgggtatctggggcccctgggttctgcttttgcgtggagacttgctctggcggtt

SEQ ID NO: 156 - DNA, 1341 bp, Emericella nidulans
gatggatttaagaaccagggttgtatttattataggttatggccaagcaggcaggcagcatatgtgtcagcagcagagcccataccaagccaggcggatatacagccaggcagagccatatataggccagcagagcatgcagcaggcattagttattgtcaactggcaaccaagccccatggttgcatggtcagggtttaaattaatgcatatacagggcagcaggcaagcccataccaagccaagccagccagagcccatttattcatatggtcagggtttggattgttgcagtcatggccaggcagagcccgtcagagctgagccaggcagcgcaggcccgttaataccaggccagacccagacccagacccaaagcccgttaaaccccgtaagcattagcaagccaaagccagagccgtcaactatgtcggcagcacaggccagcgccagcccaggccagcgccagcccagagccagccccaagccaggacacagcagagcccgccaaagccgtacagagccaggcagggccaggccgccaaagcccggaagcgtacgccagccagggtcagagcccaacatcccagaggccgtacagcccggacagagccagccaaagcccatcagatcccagcagagcccccaaagcgtgtaagtattcgcgagccagagccagagccgcccaatgtgtcggcagcccaggcccaagccaggcgaggcccagccagagtccggtagggcccgtgcgagcaagccaggccagccaatcctgtcagtgccagagcaagcccaagccggagcccagcgagcccgccaaagccatacgcgccatggagccagacaagcccggagggtcaggccaagtggagatcgagagccttagatgtagaggtagcctagacccggtcagcgccaattaggcgtacaggcacaacagagggccagcgcccaatgacagcccagatatcagcagccaggtcgggaatgccatggtcagggttcagattgttgcagttattgccagaggagccaatacagggccaatctgggtcagccagagcccgtgtagattcaagcagttatccagtatttggcaagtagttgatattaggggattatagatattataaccagagccagattgagcctataccagccagagccagacccagatcaggaccagagccagagagttgcagttcaagcaagcaactgtatcaggcccaaagcagtattatggttggccaggcacgcgtgggagccagtaaatcatggttagggttaatattatacagtcatagccagacaggcagatatagtaccagatatgcaccaaag

SEQ ID NO: 157 - DNA, 1007 bp, Emericella nidulans
tatattcataaccttacatgagaagctaaaggctatgatcggaaaagtgaaaaaaaaatggtgctttctagcagccccttgaaggctatagcctgggataacctgggtgttaactgacccatatttctcatacctcaaccctaccgcctgatattttatatattaccacctttgagagccatgcagtgtctcaaggccagcaaggccagcaacatccttacctgtcagttctagtgtatcgttctaggtgcaggagtctctggttgcttctcccgggtgcgctgtctgagcttcttcaggggtctaacagttgttgaatgggttggcaaggaggccaatacttgccaagtaggaccggtagatgtccgaatagcgtgatatgccggaatggtaaatgatatctccaagtcttgcaggacgatggatggagagcctcactgctaccaacagacggtactctcagaggagaacagtctggaccaccggcttgagatgagcttcctgcaaaaaaggtcccctgcatcgggctgtctcggacgatattctcttttcccaccctgtcttcccaagccaagagcatccgtcgctcgaatacgagccgccgcgggcggtgattcgccgcggtgggcacgggcagagattttttacctaatttctgactcggaccctgaacccgttgctcatctgatgatctgataagattgggtgatgtgggttgtggccattccaacgcgtcaaggcaggccaagctattaatcaaccctgttcatgtaatctgccttcattccggttatctcaacctcgtcccatcttttttttttctttgctatttttttcccctgttcgatatctactcaggcttcaatcaactcgaatttgccaggatggccgcggcttgggagaacaagggagcgcaggaggcctctacagcagcgccggagcccccgcccggctacacagaggctaaccgtgccactcaccttcctcagtcggacttggacgcccgg

SEQ ID NO: 158 - DNA, 528 bp, Emericella nidulans
gaattttttatatctaattattcctagtaaaaaatttgtgaagattttattatatacctactagaaagtaatgatcaataaatattataaacattatgaactagttaactgaaggtatgatattagaagaaatattagaaattaacttcaataggtcttatataaatattgataaataatatataggcttatatatataatcaaacaagaattactttaattatttataattagactagtaaattgataaagaaaataaataatataatagaatttttatttcatttatagagttaataattgataattatatattaataataataaagataaactctttttttatttaggttatacatataatcttagtctatttagtcttactaagaagatagggtaactagctaaagactagctaagaattttatttagaccaagaaagctattatatagaaaattaagaaagtcctagactagctaaagtctttataacttacattctaataaaatatagaaaattagactaat

SEQ ID NO: 159 - DNA, 778 bp, Emericella nidulans
ctggaattagtccctcgttgctagattataaatataatttttaactattaaaaattaaatagataaaagagcttttatatttaaagaatctagcctatattcctaaaaaataagaagaatatattactttaaaattaaaaaaaattttatatatagctatcttagaacttactactatataataatattaagaagaatacttaaattattactataatattatcttaaaatataaagttaactagaaagtttagctagaactttaaaaaatataaattaattatttaaaaaagcttaaatggtaaatatacttaatttactattatagaaattataaaattttatactaaacaattaaatatacccttaggaattttataatatcttctattatatccctactttgggctatattttagggacccttttttaagccaaagttatcctgactcccagcccctggcggttttcttaattgaaaccttgagtgggcagtaaaagaattggtggttaggttttgaaggctacttggacctggatattgcaccaagggcctgggacatatgctcggccaaagggaattgactggggacccccagagaaactttgaaaaacccagaccctaaaattgttccacagggggttttgacttaaaaatttttagaaaaaaaacatggcccgcggttttctttttgccggcacccctggggccacctttttttttcgagaggaacaattttttaaacggccccgggtttccccccaagtttatcttttt

SEQ ID NO: 160 - DNA, 508 bp, Emericella nidulans
acttataagtaaatataagatcctaaagactattatcttagataaagaaaactagtttataaataatttataagcccatatttatactttaatagagattaactactagctatttataacctattattcttagattaataaattaataaagagaataaatagtatagtagaaacctatctctatatatatacctactataactagaaggactagaatagactatttttacttataaaattagtaattaatagctatatattaatagtaataaggattaaccttttttatctaagctataaatataatcttagcttatttatttttattaaggtagagcaactagttaaagaactaactaggaatcttatctagaaaagagaagctattatatagaaaattaagaaagtcctagactaggcttaagctctataatctatttctaataaaatacagagaattaggctgataaatatagaagtctagctataaattattaagtagaaaata

SEQ ID NO: 161 - DNA, 952 bp, Emericella nidulans
gacctatcctcatttagtacccaagtgaagaattgaagtataatttttgtattaatagtaaaaagaatgaatagtaagttaaataaaccgatatcctatatttaggcaagataggcaagataggaatagattaaaactaagaatattatacataagtggtgtgttttagagaccaagaaatttagattataccacaggtttctctgcgttctgatcgatgttagcagaatcccgaaccaactacctacgaactggtagaggcagagctacaaaagggtttagttactacgtgagatgtagactcattggtaccggcttactgtatcctcaacagaagacacttgcttggggcaggttttgcgtccgagacatctggctttatcatctaacggcaggactacaaatccgctctactctaaagcctggataggttattgccttccgctgaatcagtaagaacagcccttcatcgatctggagcgtttcgcctagccgctcctggaagtacgcggttgcttcgcgacgagatattcccggatgtaagccaagcttttttctcgctagaataggtaggcactcactgtcccaaaaggttccggctttcttgagacagccagtgattaacaagaaagaagcaaaatgatactgacactctccatttgcctcggaaggggtccagggcaagacggcgtttcctaaacggattgtctattttttccgtgacgaaacaaagccttataacagcaatttctattattcggtggggttgtcatacaaggttagcatcttccctttccatcctcctagtattcttagtattgcgcagtgataaactggcctgcttgtaggaatggacgccgataagactgcacctattgacaagcatttcccagctgctggaacaggcacatcacttactggaactgccttacttgactctgaacaatagggg

SEQ ID NO: 162 - DNA, 3604 bp, Emericella nidulans
ttccctatcactgataagtgccatccaagagatataatgtttagatcctgtattataatgaagcatctttgtttataacacagtattgctatttaccaatcaaatagctgaacgagcacaaacacacatcaagcgactcatacatccgtactgtggttggcccgtacattgccactttaaatcgctgctcagcagtaagtctttgtgagcggacaagatagctttatccccattgttcttaatcacagcggcacatgtagtagccgcacattgcgtgtaccggtgtcaagccaatgagcattggtatatgacggcacctcaggcagcgatgcaggaactatgcacaatgcaggctgggactagcccgattctgcaccaatacgaccttggcaatgcccaggccgcttctcagacccgctgctgttcagctctttgagtgtgatttgacggccagtggctgtgtcttccatctagacatatatatatacaccaccgttcagctcgccccaaatcctccacgtccccatcccgcccaaggtaaagacgccaataatgccagatctaacaactcagggctttagggccctcacaaggagcagtgtctctctcattttagaccagagcagtattcatccaagcgacaagtctgaagagctgccagtggagatacattttcgatctttcaaagacaccggttctccagggaacctcaaaatgcataccagcgaggaaataaaggcggccatggagaagtggtgtcgcgatgcatttgcgtttgtggaccccggcagcggccatgatctgaactcccatcttgcccaactagatgctcacctgtcaacacttttggtctgtaacttccagacgtacaagcaggatatgggtgaggcggcaattgtcgataatgcttgcgcgttgcttggcagactgccatcgaacccgccggaattgccctatcagtacgacgggcggaaggcacaggacgcacaggaaaaggacaaacaagaattgtggccggcggcatactttgtggaaaactctaaagagacagctgaagaccctgaagaaagcaataattggggccggcgatatgactgggccagcctgcaggtcctttcgcgcccaaacacaaacacgattcggctggtcctcttcaaggttatggatcgcgcagaccctcaaggatgtcccagcgggtattctgaaaccctgggtagcctccttgatattgttacgggactgcttggagagagttccacagaggaagaagcaaaagcctggttcgtcctgcaagccttcctgtgggcagcgtggcagcacacgataatgatccacctctggtacgacgcaaagaggcagatgtacaactacaagttctacaatcataacgatatagtcgcgcaccagatccccgcggtaatgccgccgcgagaaattattgaacggtcccgaccgaattatatgtgcaaatgggcattcgagctgctccgatctgatctgagctgtgtgacgcaggattttcgaaaattttttgagatctatgaagagcactttgggggccgtggtccgcggtgtaatctacttcctcctgggcacgaggccaatattgcgcaaccgagaagaatctgcgatggcaaagcgcctggaaactgcgagcgatttgaatccgagagtgttcaaatccagggcgcgcacgacttcggctgccctggtcccggccctgactctccttgccatttcctcgtctgggacgaggcatcgtatttgaacacccgcggtgcgcgggctgtttccatcgaggacactgatgacacccacattcgctacactcccgtaaccagggataccatggccgtctcgcatgtctggagccatgggcagggcggacgcccggaaaccggcttcaatagttgcttgcaccgtcgatatgtgactctggcccggtttctcggctgcacctcgtactggatggacacgccgtgtgtgccgactgaccgtacgctacgttcggaatgtctgggccaaattaatgcaaactttgagtctagcaaggttaccttgctcgtggaccgcgatatcatggagattgatatccacccccgaactctggccgcagaagaagccattctggccgcgctggtcgtgtgtgactggaacgtccgcgcgtggaccctgctggagggcatgcgtggccgggtgcggctccatctcctttgcaagaataaccatgtgatttcactagccgacgtgctgaacgatgtgctctccaacagctgcttgtcgttggtctcactctgccttgccgtacaacattatatccctatcccagagcctccaggcggcatagacctggaccccgtcagcatcgagcaagcgacctgcctgctcaatcaccgccatgccactaaagaccgggatgtccccatgatctgggccctggtagcgggctcaccgaaggtaattaaagcctctgaggagttctggctctccaaagtaggtaagttcctcaacacgggaaacctgatttccagcgctccacgaattcccgggcgacgcgggatcggatgggcgccggctcgtccaaatttgctcccgccgaacgcgactaccgaagagaaacgatatccagcgtacgacggtcagaacagcgttccagggaagataacggctgagggctttgaggctgaatggctcgctgtgattctgcgtcggcgggggatgggtcttcctgcatggatgttcagcatctatcggtttccacgggagagcgagtgggacgagtattaccatgtctataacaagggcgggagcgcccgcatcgacctgaaaatgcggcagaggatcggggcgctgattgcgccgctgttccagcggttccgctacgttgcgttcttgctcccgttgttgcgatacaaggggacgaacggcgctgtgattcctccacagccgtttcagtaccagggcgaggcagaggggccggttatggtggttgtgggttcaaacaaccagaaggagtgggagtggcagttcctgtatgagtggaaggaagaacagctgccggagttttggcagacccagcttttactggtgtaacaggtcgctctagcaccaggcagctgcggttcaaagtttatgtagagctgaatctcaagattagcgactgttatgcggtttattctagcttgttcattctcttggggagatagttaatatcgtcctcccaggaaggaagccgaacccgggattgcatgcgccactgtcataagcgagcaactttataggggcaatcctggtagattgggctaagggcttgataatagtgaaatggtcttatacctaggcagcctgccccaacctgcagttttacaagtccactatagaggcctgacaacgcgactgatgtgcgtgtattgcatagaatatgtcaaaaatgtcctttacgtacagataatcagttttgtcagttcattgatatagatatactagtgactgcgtgtgaatgctttccatactgaaataacagggtaacgtatatacctctgtcaatgcgcgcagtgtcggagtgaggggcgaaacaaatctgagcatgcctcatggatcgggg

SEQ ID NO: 163 - DNA, 561 bp, Emericella nidulans
gacgcttatatgggctaagcgttagatactgaatgcagaactactactatggatatggctctgccagttttcacaggcgagggaaccctaactcacgatactggatgcgtgagcagtactgaccgaactgacacgccaggctagtgttggactgagcgaggactagaatatgatcatcggttaccgatatgcattgtgtgcatgcatgttgtacgcgtacgaatgaatctgtcggcatcatatacccagcatgaattcttgctcaaaggactaccctatatcgagacgtatcctgctgttaatgtatcgatatggggaatatgcctgatcctatcgcttatgcacaactatagcaatgtgtacgcacagcgattgttagtgtgtgatttggacagataactcagaccaatgatgatgataatcaaggttcgactcatgaaacaaggcccgacatggtactgatactctaagcacgctgggataagaaagacacacaggctgtgcgtatgaaagactgttcattatatattgacatggcttaatgagcagcactgctgatac

SEQ ID NO: 164 - DNA, 1228 bp, Emericella nidulans
tacccgaagtaatcatcacatgcgggacaggtaccatatacatatataaatacataaaccctcttatgtactcctcatcgttcgttggcactccctagatcgtaatacaaacacgaacccgttctgaagttgtagatgaaagcattcccgggataatcggcgctatccccatggctttcactcgcaaattcagcaagcagatcgtagacttgttgcaggtacttgcgctcggtgagaggcgcgttttgtatgaccgcgcgccagctgtccgggtcagacaggcgggtatcccttatggcttcaagcaaatcgtctcgagtatcgatggctgcaattggaccgttcaaagcattttcgacaacctctcgcgcgcgggtaagagctggagtctggttagcccagtatttggggtacgctgaggtaacgcttaccttgctcgacaatattcctccggtttgtctttttgcttctatgttgtgatacgagaatgcgcacatcattggatcgatcgtttgcaggcgtgttcacttcagactgacttgggagccgagcaaaccgcggattctctggagctccctcccgttggttccgcgcacgtatctcgcttcgaagccaaggtataagctcagagccgcgtatatctaattcttccttcggcacaagacacctgactttgaaacctcgctctttgctgtcctgctttgcaatgacaatccagctatgattgtgttctttgtacttcgtaagaagctcttctaaagaggatgcatccactgccaattcggcactaatactgttggaccagagatcttgagtcaactgcacacccatctcgcgtaggattgttgggtcaaagctagccacaagtacatcacactagaaatatcgttaaacacggtacagtaggatgttcgtcggtacccactcacccttctcgtcttccagaacgccccaacgtcggtttccggatgcttaagggatgccttagtcggagctttgacgtagtcgatcatcgcagaactgagcctgtcccaacttagattaaagcctactgcatgaggctgaacacggtttgtcgtgacgcctgagcggaaatcctgcaccaaggagtcataacgaccaccggctgcaaagacatcgcgtcgtttgccgtcaaatatgcattggaagagtatgctccctcgaaagaacttttcgttcaaactacttagaggacagataaagaatt

SEQ ID NO: 165 - DNA, 3232 bp, Emericella nidulans
ggcggtttgcagatgccgtaccgccgtgccctcgctagttgttaccccttttatataggcagcgaagagcctgttaaactctctagaccgcgtgataaacgcaaaggcagatatggacgtcttcatggccaggttgaccactgtctcggtaggctgctctgactccccccatttttccgttgcttcggccctctccgaggacaccggcatatagaaatcggttataaagcggacccaaccaaggtaggcgagcgtagtaacaaactgccgggaggctctgttgtgggcgacttttcccagctctggcttgcatagacagctgctggtgatggccatgcgggtcacgctctgcagttgacgctccggcaccgcgcagatgctggctagctgggagtagggaacagcgccggtcaagggcactgcggcaaagacttgggagtgcgcgagccatttgatgcacgcaatatattgatactgtcaccctcttgatatcagcatttggtctagggttaataagggtttaatgagctcctctggtctgttccggagaatgacaggggagaaagctgtgctggaacctacttgaatgccaacattgggagatactcgctgggctctgcggcaatctgcagaacctctttggccgcggagagaagctgctggcgcgcctctcgtacatatgcgggcgccgtttgaggcagcgccactgaggggctgtccgggcccgatgacgggtgtgggattctatccagggtgcagtacccgctaacgattttcgcagttgcactgatagtctcagcaagcgtctccagagggctaagcgtgctcatgatgggcgtgaatatacgtcggcgggcaagcactgcctgtccttgtgggggcgtctggtggcctttgtattatgagcagcccgctccgcgaacaacagagaaaaggaccattctgcaggctaataaccacgaggcctcaaatgcattcaggttcgctgaccgaagctttttaaagggagtgccatgcaaatgcaggaccgaatcgagcgggaatgtgccctgagttccatacttatatatacctatatctttggaaaccgactctaaacccgcgccctgttactacttttaattgactatgagattcctctgtctccatggtgcagggactagtggtgccatcttccgcgcgcagaccagtatgcctgcttgtctgtcaatctgtctgatatggactgttccaacatgggactgttcaagatcttcataaaagagcaaagggtctaaggatttcgacgaggctaatcagacgcttactctctagcggcctttcgtgagaaactgggtcctagccgacacacctttgagtttgtagacgctcgctccgcacccatcgccggcgggcccgggaatatctcctttcttcattctggtgttccatggaccctagagaggtggctcagacatatcagtggctgctctcgtatctgaatgggcaaccctaactgtatgatgcgctgctctgtttctcccaaggctgcagcgttgctgcctcgctgatccttgatcaccagaacgagcaacctcaatgtcccctacctttttgtgcattgatcttcatctgtggcgggctgcctctacccattctcgccagctggggcctacccatctcagccgctgcttgggaggtccacgaacgcactgcgcatgagctctgggagcaagcaggagcggtagagagcattctgacagcttgccaggctagactcgacgcagtgcaagcttggcctacggcgaacaggctgttcgccgatccagaaagcaaaaatctctgcaccccggccgccattgacccgcacaacgtctttagactgggcctgacttgatttctggagagctgcaagctaaatttacccaccctgcatataattggatcccaggatcctcgctgtctgagcatgatccagctagcactcctgtcggcggctgaccaacggcttgtctatgataatggcggtggccatgagatcccgcggaccacctgtgtgtctgaagctatcgcagcggcggtcggttggctagaggcttgtctggatgcttgtctaaataatttcaatggttgatgtggcgccacttgattgtttgatccttccttatcctgacaaatacgcgctgcggcgcatatgaaccaatgtactagtataggggcgggatctatttgtagtaatccaatatgtacaattcccaaagcgatcttgagctgatgcagtcttcatgaattatgttatactttttaccacgtgttgtaaaagaatttcatatttgaccaatcagactactaaattgttatcatgattcgaccagcatattcgttcctggttcaaccaagtaccacgcctctcccaatcccaagattgcgtactagatatgcaagtattccagtagtaaattggaaggatctgactgtcatctgcacatcgcctaattaggttactaaagatataattgaactcattaatggtaaggctgtttttataattataaattaatactaagtataggagtaatggtctcaattacataaagaagttactataatatcttgattagttttattttcactttcctttattataaggcaccacttcaaatcccagcgtatatcccttttttgtctagtaatcaaatccacggactggggtccgggtaactgaagccatttccgtgtctatatatctactacagagtacagagagtaggacgattttaacagctctagggagagagctgacgtggcctccataccgtccacctgtaatatcacctctcgatgagctctataagtcatggacaagcgccttcaaatgcttctgtatttgcaaaagtcaaactgggcatgtaacaagccagccagttcatattatcatcgccctgttctatgtctcaaaaatcaggccacctctgcatagcaggtcagcattacaatcgtgcccgggtcttttaagagtaattagactcagttacctccaaataaaagtgccgttactctagtacagatttcgacaatcacgaagctgaaattctactaataaaccatcttcgcatgactaccatggccttgtgctaagcccgccctgaagtttctgctgaagcctaacatctgtgattgctgttccatctaggccggggcgctcctcatcatggggaaccaccaccccccaagactgataaacaatttcccg

SEQ ID NO: 166 - DNA, 173 bp, Emericella nidulans
  unsure (1)..(173): unsure at all n locations
taaagggatctagaatcgtgattatgagtttgataagggaaagcacatggaatacattggaaattagtgctataaggcatcgctangacagaaggcagaatactgtgttgtataggttccgagagaatgactgttgagtcgatgtgttcattagtggtttccattttagtcag

SEQ ID NO: 167 - DNA, 6430 bp, Emericella nidulans
tcgcggcctagtgaacccattgttttggcccccaaggccaattgtgggatcctggacaggtgcaaagatacagcttatttcctgaagaatggctgacctgccttctcgttgcataacggcctattcaaagttcctttagccatagatctatgatcatggccagaatgcgataatctaccataaagataaacaacaacccagattcacctcttcggtgttgaacccgcattccgtatccgccaccgccgcctccagagtctagatttcaaccggggccagccgcacgaatggggtcagggtccatgcccaaatcagttcaagtcacaaaatctcaagggcctcaaaacgtcctagtcactcctgcagaatcgagtcacagccaatcactagatggtgcttctgctttctggctgggaaagcggatcggattgcatcgctggtcccttatatatttctcatttccctctcgaggagagccccttttttcgatgatttaaattcttgagaggtctcactcttcctttcgtcagtcgctcttttcgattcctgacccggatcaccgatccattacgttcgtttatcaagcattcaattcgaagcctttgttttacattgattgtccctctttcaactgatcgtcacccctgatctccgcaattgatcaacatgcgtccgcaaaccgtccgatctctcgcgcttctcggtggcttctctttcgcagcagccaatgatattgtctctctcatccttcccgcggcagatgagcaagagcttgtcggcgaagttatcggcagcgtgcgttctttactcaccttgtcaaattcgtcatttaatgtgtccttgaagactaatattgtcttcaggccggaccaaccaccacctaccggatttcctgccccgatactgtcgacgaagatgagtgtggcatgcctacgagcggcttaactgtcgccgcggcgcctacagcattcgtctatgaatattcgtacgaagactagtaaggacccacttgcattagtcttggctcaactgcaactaacatatcctcctatctagctacctcagagaaagctgcaagcacagcggcaccacttggttctcctgcctggtgacgaacacgcagtctgacttctcctttgtcacaagcaccaccattgacgaggtcctgccttacatggctgtcactatcacctcaactgctgcaggcgcagacgcagaggccaccagttcagcaacctctacttccacaaaggcttcggacgctgacgtgacgccgaaactaagactaactcggaatctctatcaactaccctctctggatccgcttctgtcaccgcggcttcctccgagtccccgtcaagagcacagtgcggccgatcctgaggaaactacctccgataatgcagccatgcctcaagtcactggatctgctgcccagtggattgtcagtggtgccggtatggcgttggctttggctctggcgtaagcccagcctaggcacatctagaaactggtaataattaccttgatcatgtctataactaccatcttgcatgggagatatcttggatgaatgtgatatgtatccttctgatgtcaacttcacccaacatattgcctcgtaggtaccaaatcgcatgtctcatgaatgatttccatgcttataattttcagctattggaaaatccttccctaggccaactgcttccttcgttagttggtcagcggctccattgcctgggtccccgcagtctcccgggacccattgtagtgaggacccatatttgtatttaaactatatttatataatcgataacacccaggacttaccccctggaggccgatgccccagtagaggacgaagggtcacgtgtttagacggtgaacaacggccgtaaatgataacaatcaaccaacctccttttgtgagtatccttttaattaccgttcaatctgtcaaaatgtctgtctttccccccatacttgcttgagactccgtccacaaggtcttgaacatctctgcttgagcaaggaagatcgagagatgaaatgcgtagagagacatagacgatgttgactatcttaagctattctgaggataaggcacaagtaacaatctagttacattgtaggtgaatagccttgagtactcagtgatcatggagctttgccacaaacactttggtctttgtcgtaacagaagttgctatgattactgtaatcaacccttggcatcatgtcagtatcttggtgctgccatgattagattgaacttctattctctgtgggagttcccgctctctgaggtggcccagcaggttatcagaggggtcaattagttggttgtcatatcttgccctgttatacagggaacaatgcctaattactgctaagccacaagagaatcaactgagactgccaggagactagacgcagcagatgtcggctttggtgcgttgagaagtttgcagatctcccttgtgagcttcaagagcgcatgaccaaagtcaagcttgttaatatagtaaaaatctccccggctacaatagatgctgctgggggcttaggagctgttgtctgagtacctaccttaagtaagcagatcctgaggtttatggctaggcaagataagcaggtcgctcgaggcaagtaaggcacctgagctaaaggtgagaatctcaccctcttctcgcccaggccgcgcgacggtaaagcggcctgacgctaatcccgtctgggcgacacccacccaacttctatccgcgttgaagccaccattatcaacgcggatgaaagtgcaaagagccctgagtgccttgccgcttcaaagtaagagacaatatgtttaggataagaaggtgagaaaacttaggccaattctataagtcgctcaagcttaagataagtagcaagggctctaccaagttttaatcaatactttttcaacggtatgatagatacttttaccttgccttacttatttgcctgtctatagtgctcacataacctaataacctggttttaccagatctaagatacaggaaaatcataccattttcaaggttaacagaatgaaatgagttcacaaaacgactaacagaacctgggccatggcagttggaagtcagggtagactggagatacgggcaaggcagctggaaggcaagcatattgggacagacgattggattgacaacttatactcgtagtgaatagttatcgttcgctgcctcgacgaagtccgcaaccatcatattctgtcgagtcgccgggtcgtccatgagtttcttctacgatggtaggtgtgaggccacggagtcctgcagatatttagattccaaagcttgtccgattcctttggagatatccccacaactgcatccgccgatagtgcccgttaagttgctatggcgttggtctagggcctaacagatgaagctctgttgacaaagccatactcatcagccttcacccagttctcttgcccctcgagtgtcgcaaactaatctggtggccacgttccgcaagggcccggccaatttccaaataagaactattgtgcgtttttattttttcaggtctatcctacccagcgcgggcgtgttccggaccgcgcacctaccggcatgtgtgagctctcccgtggtagccaccagcaagatgcttcgagatggatgcacctggcttgactcatcatgagaacattgaattgtttttcgagattaccgtagaaatgtcgcagaattggccctcaggatacattccgattaccctcaaaccaccacggagctcggcctttttcacgtatttgattgcccgtctgggggaagttggaatctagactgtctttggttgcgcaccagtcatagtctatctacttatatgattatccacatatgtaaccgaattagggtctccaaagagtgagagggtagattccgcgagccgaaccggcgccgacttggatctctccaccgggatgcaccaatcctgagactggacatcacagtaactcagattgcggcgtgtgaggtagaaatacacagttctgctctcgctggagtccaaagacaccttctcgaagccaccaagcacacgaattgggtctcatcgggaacgctatatcatacaggtgcctgctgatgaccaactagcgttcttacgcctaatgtaaagcgttacagaaaatcattgcgagatccgcagtgtaaacgggttttgatgctctcacttcatttacatctgagttctaggtagtgtcgcaagggtactaaaaagcatcatataatcgtaacaggttcatgcagccaaacgtagtatccgacggactggcttcagacttattgcttcatccccgtcgcccggagcaagttcccaatagcactatggcccttcttccctctctcctccagtttcgtacggcggtcttctcctaacggacgcacctctaaaccagcacggataatattcgaccgtagcagccgaagatgtgcttccctaacgtagttatctagactgtcgaggactgcttcttgcacttctatgcgcttatcgccttgggtggaaacgaggacatgcttctcaaggtcgatacgagcgtccaacgtgccgtcttggatgaggctgatcaattcctggacaaaggctgactttgagtcgctttgactggactggcttgtggggtttccgagaacgaagatcttggccatagattcgagtgagacacggttgaagggaataagatattgttgaatagactttgttcggattcggttgtatagaacttgaacatggcgctggaggtggatgtcgagcaggtagtcagctcggtatgcttcgaggatttcgagacatggtcggaatttggagttgcaaaagaatgaaatagcgcggcggatgtgaggctccaactctaggaagttgcggaacgaactattgtccaggacacggcgctgaagctcgttgcggtccatggaggctagggcacagagaccgccgtataccgcgacgtcgttcgaggtcagaacttcattaaacgtgtcccctaagctggggtccgtcgcaatgaagctgtttgcggcttctaagtatgacccggaatgtagctgtgatagccccatggctgctgaaatcttaggctggtgtttggcttgttcttcaggcttccccccctgactccggagccgatgcacattggattgtacgttcagccagtccccgcgctcaatcgccacatttatgatcttgaacaacatcgacgcgatgtgactgggggttgtgcagaagtctctcatacgggaataagccttgaatgcagaagtcaggtcgccgatccgatggtaatgctggccgagctcctcatttcccatctatgaaaatgtcaattatgaaaccagttaacgacgaagcgattacgcatacccggatactctctttaatcaagttatttttatatcccctaagctcatgctctaatcggtccgtctcggctttgacaaccttctgtgacctttccacccagtccgagtcaatggtagcctcgggctcatttggtgcaacatccgcaagtgcttgaactgcgcgcaggtaccgagcaacgtctttaccagacttggcctccgcaattgcagctttgagggcatcaacagcaaggtacgaggagcaggtcccgataaggtataatcgattgaaccgagtccggcctttttgcgaaggtatcagccaggagtttgctgtagaagaacggagttccagcactcaccggtataatttgcgatgtaggattccagctcgaatttaggtgcttctattaggtgttagctaatatcaccacgctcgcaagcggcaaatataccttccactctgactaacggcgccgcagaagtagatacaaggccagtaattggatccggatctactcccatagagcccgaggcctggggtgcatatgaactcaatagggctgcttcgccggcttctggtaacatgggctccattgcgtctatgctggacagctcgtccacaaatatcaaaaggcaaagcaataccaacgaaacagggatgcgtctcaagagatatagtgagagggggagatctgaagacttcccacagccctcttagtcggcaacaatgagacacaatcgataagtcacttcagtgggaaggcaactgagggatgtctggctcgagcgcggtccgctgtccgctgttgggatcttccacgaatccaagggcaactatttcggagacaaagcttcagcgtggaatattcggggatcttgaaagagaaaaggaggggtgatggtttctgcttgtcttcagcggaaacatcatccttgtatggtgacctagataagtcggtcataatcccaccgcccagtccaccgcttatggtcaatgttgagaaggtgctctctccatttccgtccgt

SEQ ID NO: 168 - DNA, 5049 bp, Emericella nidulans
gacatggtggcagcgatgaggacattccctctgcaacaaaagatgactcccgattgaattcgcccgcatcagaagacgacgaggatgcacatagcctcgtcctaggccactacaccacatccacatccgaattaggcatcaacctcagcgacagccactatgtctccctctccggatcgttcatcagtcatctcattgaccaatacccgcgggggaaaatctttcacattgaagaggatgggtccatatcccttagctacgagggcttggccgatgagatgcaacaccccggggaaggcggccggggtgcgccgaccagcgacccggacgtaatcaacgtcaagcaggagacttcagacatccagcagctcatgaaagtcctgccagacgctcggtgcgtagccatctatcctatctgggactttcagcgcggcaggtacttcacaatcaatctggtgtgggccaatgaccccggccgggtgctatcggagccaaaagacctgacgtacctggctgccttcagcaacaccgtcatggctgaggtatcccgattagatctggaggcagcggatcgcgcaaaaggggactttatctcctccatctcgcatgaattgcggtcaccactgcatgggctcttagggaccgtagagctcctgcaggagatggtgagcggctacgctcaacattcactaattgagactgtatacagctgcggccggaccctgctagatacattgaaccatctcctcgattacgccaaaatcaacacccttagccaacccaagcaattggaaaatctcgggcaaaaagctctctctgaagcgcggcccgccgtgcctgggtcgctgcaagatgaggatctaggcgttttggtgcaggaggtggtggaaggcatcctcgcaggtgttgagtaccagcgccgcggagttgatggcggcagtggtggacgacgaggaccatatggcaatgccaactccaggcttattacgatcgtggatattgaatggaatgatagctggcgttacagcgtgtatgctggcgcctggaggcgtgttgtcatgaaccttttcgggaacgccctcaagtacactcagaccggctacatccgactctttatgaggaacgacacattaaagcgcgacggacagaacgccgatccggcaataagaatgacctttagtgattcaggacggggcatgtccaaggacttcattgccaaccacctctacactgctttccaccaggaagacacaacttcgcctggcctgggcgtgggactacatctcgtccaccagatcgtcaaatccctaaacgggacaattgattttgccagcgagcttgggaagggaacagacgtcgacgtcgtcctcccaatcaacccaccagaagatccagcgcctgcagcgcccctctatgactcactgaaagagaaattacaaggcaagacaatttccctattcacgcagagctcaaagctgggcaatctaggtatggatactagggtcttcaacaacatgctcatcagcctcggccgcatgacgacgggctggtttggcttgcgggtcctcactctggaagaatatgaccgcggggaggcggactttgcaatcgtcacggagcacgagtataaaacctactaccacaaggggtcaagcatgccgaaagaacaagggtccggtgaaatccagccaatgtacccgcttattgtgctcagtgagcgggcgagcagctggagaacgattggcgagagcatggacgaggtaatcttcctgacgcagccgtaagtttggtccttcaacacaagagaaaggaaaaaagaacgcagctgataagcctagggtgagcccgaaaacactggcgacggcgttcgagcactgcctggctgcctctaccactgcactcgatcgcgctgaagattcggatcttatgcccatgccggagaagcgcaagcagtcttcgcctgttgtggatggcgatagtccgaacaagaagacggttactgagacaatggtcgatggagagacggatatcaaaacggggcctgctactgacggaaaaatagccggcgcaacagcgggagcagtgaacggagcatcatgcgccaacgataaccccgccagacaccgaattcttcttgtggaagacaaccaagtaaacctgaaagtgatcgaaatgtgcgttaaaaccgcagggttcacttacgaaaccgccacgaacggcctcgaagctctcgagaggttcaaggacacgcagttcgatgttgtgatcatggacgtttccatgcccgtgatggacggactcactgccacgcgcgagatgcgcaagtttgagcgccgctgccggagtaactgcgagcagaaccaggatcgcaagcgtgctacaatcattgcgctcacggctgtgctttccgcgtcaacgcagcatgaggcgacagttagcggggttgatttgtttctcaccaagcctgcgccgttgaagcaattgaaggaaattttggaagacttgagggagggaaaggagattggccaggagtgagttggatgtatttgaattcgaatctgaattcaactccgtttgggtcggacttgcacattagccaaaagttgttccttgtattttgccagcgagtagatgtacgatactaatgatcatgatagacgaataatgctgacaatgacatgacatgacctttctttgaaccttagttgttggtcctctagggcccgctaggcgtcctatgcttgtggtagaaatcaccggtaaagcctgccggtctcctgtcaaatggcactgcccggatgcaacagtaccagtcagcctctagtcagaccgtatagtaaacaacacaggctatcataggtcaaacattgcaagccagagtctatgataaaatgagtctgtctatgtctgtgaagccggctctgcaacgaccgcccgaacaaattcaactgatgatgagttgtcgcttactctggactcatgcggccgcccgactgtactaagcggtctgcttggttcccaatgaactcagcaaggaacaccgtacctaagccttcgatatgtgcattactataaccacccggaccattcagttagtgctggccttcgtcggaatcaacaaccccgcggtagacagcatcatccggagcgtcaatggcgggcctttgccaatggacgcactagcaaagtacataggagtagtagggagcatttgcgccagattgtccttggtagcgtggctcgattttgcttacgtcgaacccctcaaacaactcggccaactcctcgttcaagtattggtagccggttccggcagatccctaacgacatagcggcatcctcgcgcgacgtagctctgggaagctgcgccgcgtcagttcccgccgtatcgatcaaacgtagaaccagaccagaatctgactacttggtataagggatctcagcgccgaacggtcgatggagatgttgagtctggtcttaaaaagccaagttagtaaataacacagtgaggagaaggggttaatgttggcaaacaagacgtaccactcatagcctgcatatttgagaaaccccgcgacccgtgctcgtttgcgagtatgacagagtaccagatgccgacgtggatacgccctgcctctgctattgcctctgctacaactgaaagtttgctgtttcaagttgatgtctcgtcccttcacagtgagctttggcttcgggctacctttgtcggcaagaggatgagtggcatcagcatcagtgtcattttcagcggtgatggctcaacggtgttaatgggccagttgagggattgaatccaagcttggtaccggttcagttgcaactaatcctgttctgtctcaagcgtagtggagtgttagtcggtatttcgttctagaaaacgcaacgagtcgtgcctgcacctaccgctgcttcactaagactgagggccagagagcatgataagttcccagcaagcctgttaagggaataatatgaagagtaaaggaagtgagaggggaagaactcggtatcacgttctccacagactagaccgtataaaggctatcgactcagctccctacaggatacgtactctgaactgattctggaacacatacggtataaaatcatgaatagagaattaatgtatgctattaagcatcatgaaagatttcttgtcaagtgagtatgagtaatagaagcgaccagaatctcctttcatctctaaagtcgaacgatatctaggtagactaggcgaacccgctgtggcaacacccactaagagaaaaccctccaaacaacacacttaccaggaaagtggcgccagcacgccccaggatggctgtcccagacaaatagccatcttgtctgctatattctccatattcgagttttttcttagacggccattatactgaaagaaacgaggaggctcataaggatcaacgtcgatctcgggaccacccggtcaatcgcccaaacactgcaaatcgtacgataatcttgatacccgtgttgaatcattactaaaacttgagcaagggtccggcagtcgggtataccggatgattcaggggctcaaatgctaattgcaagtcagaccttgtgagaattcggggatttccgaagaccgttgagaaccaggcacagacacagcaacaacgctcgactcaaaacaaggcgctaagccaaggagatgtaaccaattccagcccaacagacgacagccctaggctactacagtgtactacggccagctagaccctttgaggctctcgaacagctgttaagtgggccgacggacttgcctcctagggatctggtccctgccaaggtctctaagcgagattgtctcgaccgtcgtatggactagtcctgccagaatggcgcagaggtctggtgccatctaaaatggctataagtgcgagtgcctggcccagtgtaccagggggctctggagcatagagcgagatttcagcgagattcctttagtattttcagggaagcacctcggtcctcaagatgaatggcatgaacacctccgtctct

SEQ ID NO: 169 - DNA, 1056 bp, Emericella nidulans
ttctctctccggcctttggtagaaacacatatagacagcctacaaaagcagcagcgaggagcaaaggtagtgagttcatattctgctaagtcaaggatgagtgtgcagatggagtaaaatcaacggagaagctggacaccctctggaatagcgaatataagtatccacttacacagtctggggcagccagctctccgcatactccataccccagccggggtgtcctggagcaacttcgggtaactctctccgcatagctgatctgcaatctgttcctccgaacctaggtctaatagtccgctcagcctttttccggacaaactttctaatcgggtctacaaagttgtctagctaactttgggcaatgtttttgctcgtggcaagagggggtgtcttgttcgcggagatgctaatgtaccccagctgtgcctgatatgctggcaataaacattacatgaagaaaatgaaaaatggccatttagacattcaaagtttcctattaaactatagctattatcaacacttcgttatcccacactgtctgtttcttaggctttgactgagggtttgccacggacaaaaccatatcaaggtgtttcacgctagaaaaccctctggcagatcaggacctagaaacatgaattagcaccaggaccagtatctcgtacggacatggaagaataagaaggacccaccccaaacatgcaggttatccggcgaagcaagtgagcgatgggtagggtacgtctcatccaccagatccccatccacataatgctccagaataaaccgagacggatcaaacctggcacaagaacgtcagtcagtcacctcatacctctaactcctaaaattccttgctacggcaagcggggaaaggtgtactaaccagtaatcaaaaatctgactccccatgatatgcctccccaccccccaacaattcgtgtatccttctcccttaaccaatggtggccagcaactgcgtatcaaaatcatgtgttcaaaagacgagtgatgcacatgccacttgggccttcgaaaatgaagaacagtggt

SEQ ID NO: 170 - DNA, 3506 bp, Emericella nidulans
aagggccatgaatctgtggtcagattactcctggatcatggtgctcaagcagactctaagcatggcaatggtcggacacctctttcagacgcggcatcaagaggctatgattctgtggtcaggctactcctagagcatggcgcccgagaagactgagactaatcctggtcgggcaccccgttctttatgcggcatcagatggccatcgatttgtgattaagccactcttggaggatggtgtttgatgatgctctgagaacatgctgaccagccaccatgatgtagctgggtcatcctttgttctaactatgtacggtgagatatatccttctttgaaagcattttgcctcctgttgagctggtgctccttcaatcccagctttcaggcgtatccaaccccggtattgtctgggatgtgtagctgctaaagatattaagtttgaggtggtgcctctgttaaataaattgccccaatcaaagctccctctatcgactctccaataatagctgtactcctaatttgctaatcatggacaggttctatattaccaagggtacaagggtaatttttatcaaccagacctgtttacttctggaatacctgcaagcttagctctctcaactttatattaaaattccttgagaacttgcttggtcccagaaccgattatactctaacagacttgttaaccccaccgctgagcggttctgaggtaggttgcctaggcaaaccgccgcccatggggtaacagggcagagtttacaagcctgaagtctatatgatagtgccctatcatgtgtaagttaatagacgctttcaagaagtctatatatatataacaaatatatagctaacttatatgtcctagtgtgcctaacataccagtaaagcgtttggaaacgagtctggcggacaggccctattgactggtcactgtctgtgaaaggcaaccgcaataaacacccagtgtgggaatgaagatggcaaaacaatgaagacataaagtgtgggcgctactgaggtcagcctacttactttgcctagcctgagcagttaacaatgttgcctatcatccacgaaaggcacgcccgccgatattcattcccaactcataaatagcccggactctagctccatgaaacaacacgtcttcccctcttgcaagttccaagcagatagtccgtaatactggcggttgagtggccaaccagcggtcgctgtctgtctgacaagcatcttggctgccgagcaagaacacagccctgctgacctggtaaggggcggctgggaatctgtttcagggattctcgtggtaggcattggctacgttgcaaagacgtgaagaaaagaagaaacgggtgagctccagcttccagggggtatttaactgagccagggtcgttctttgttgctactaggtctaccaattccaacgagctctctgtttcaaaatccccacctattaattcaactcttcttccgcttctgagctctcaattattcatattcgttgaagatgctttttcaaaatcctgcccagtgcctccctaggcctggctgttttcactgcagcctgcgcccaaaacatcagcacaaacgcccctattgtcacagacaacgagcccgtatctgcgcaccacgcttcccttctgccaaaagataacacgaccgtgtacggcggtatcacaatcacctcgcggttgagttcgcctgctcttgcggtggacgtgtatattggtggaatcccggagggccagtatctgagtacgtcctcacgctgctgacatcgaagagcggcctgatttgacggggtcgggtcgagaactaacgcgctttgttcctttcgatagactatcatatccaccgcgcccccgtcccggccgacgggaactgctacttgactggcgggcatttggacccctatggccgcggtcagcagcccccctgcaacatgacggcgccgaatacctgcgaggttggcgatttgagcggaaagcatggcgttgcgtgggcgccaagaggagaggtgttccgggcaagttacagtgatttcttcctcgcaaatacacccggggcggaggcgtacttcggtgatttgtcctgggtcgtgcatgcgcctaatggtgatcgcttgacctgcggaaattttgaagtactggttgctgctgggggggcgggggactatgaggatgatgacgaggagcttgaaaggcgatggaaggcgtaaagaggatgtgcagttgaaatataatatagactgagttgaaacatcgttgcgagcagagtagatgataaattgacgatcatggatatctagaatcaagacaaggtcgtatgggtatatgttcatatcatttcaatcatgatccatcacataatagcggctcggtagttgcccaatttggaatccggcacagtaaggtctgatgacagcacagggcccagaattgccctttcagcttatcaattcaacggttgttccgcatgtactttcggcgaggaaggttggccgcttttagaattgtatgacgatgttacttgccaatattgaggatgtacctcatgatggtgaagtattcgatacgagtccgaagggaccgacccaaggagttgccagtggcattcgtagctttgtgctaccacaagcgtggcccaatactcacatcggctgcccatccaaattctcaagtcgagtccgcatagcgctctggtcatactcctccccttgttcctcctctttgtattcttgtaaaatgaccgtcctcataagccgtcgaggagcacgacatccggtaaaaagctcaaactgagcaaacccctgctcgggaagaacgtcaagcccatcaagagccgcccagccgctggtgcgagagcgagcggatctgacgcatgagcggagtgttcaatggtttgtaggcgaggtctacaaccaccccacctgttgggctctcgatccactgaggagggagctggaagttcggcgccggctggtcaccgatcctatgtgctggaatacccgagacgacgatagtcggctgtttgtagttggccggccagctttcttggagggacttcaagacatggattgtatacgaggctgatccgcttccaccgagagtgcagaggttcaagcgcatataatgctgggcaagcttctcagcatttgcaacggtgcggttccagatgaagatattttgtacacctagatgaatcattgcgtatatccccgcgcgcgccattccgcccgctccaatgataaggccggttgtggatggacgtatggcgttcgctggcgacaggcctcgccgtatgcatataccgatcccaatccagtccgtgttgtctccatgcaagccttttattggtcctgctcggttcttttccaagtctagggcgttgtcggtgctgccttccaggttccggatcggtattaaggtgtttacagccccaattgcacgggcgtgaggagacatcgagtggagtaagggaattactccgttttgta

SEQ ID NO: 171 - DNA, 1128 bp, Emericella nidulans
acatccttagcacttgctcagaggttcactgtatttgcagtagctgctaggaccagaagacttcttcttaggctccttgctgttgttgttggtaccctcatactcaacacaaatctccttaacactggtcgcgcagcctttgatggaagcggtatcaccgtagttggagttgatgccgacaagggccttgccgctagaagccttgacaccgctgatcttcacagtgcgcttgaactgcttcttgcagttgccgcaggcccggtagagcttaccgaagttctgcacagtgaagtcctggatgatcaccttgccgccagagttgtgctggatgaccttgtcgtcagcattgcgggcaccaccaccaatgatcttgtgggtgccactgccgctgcccttgagggatagggcatctaggattaaagtcagcgggggattgcggttatgcagtcggaaacagggaactaaccttcacagacatccgtccaccagacgttctcgatagtgcaggagccctcacagtggacaccctcaatttgatcggcgccgatgatggcgttcttaagagtggcaccgtccttgagaatgaagacggcgtcctcgtcaccaccttcgtcttgaccggtacacttgacgccacggccataggtcttcatgcctccatcaaaagtgccgctgatggtcttgggcgaagagaaggtcacgttgcccttcgaggaaggtatggggaaggatgcccgcttctccagggagtggtgaatgtggggatcgtgggggttggcaaaagccgaagttaggaggaggggaaggagaagcagaggctggtacattgtcgctggttgaaggtctatgaattcctgtgtctggaagttgttcgatgagtacagcaacgagagtcagagttggtggtgaaggagcggattttatatctctcgggatagatgtcaggtacttcgcgatagagcaagaaccctgatctgccaatcttggtatatctcactgcaacacttggtcctctgcgtttaatgaagaatacatcaaaatgaaacaggagcagttaacttattttcccggcaatcaacagaaatcatctccaagtccttggtcttggtctcataaccactggtgtgg

SEQ ID NO: 172 - DNA, 829 bp, Emericella nidulans
ccaagtaccagtgaaatgttaaaaggattgatatcaatgcctgagcagactatgaatccctggcagtggaggaaagcatggcccatcgccatgatgtcaattcgccatgcaagctggatgctgtcagcgtggctgaaactgaaaatgaccctgagatggttgaaatatatcaaaaatctataagctcaatcaaaagattgctgggcagccccatgaatatgaacaactagcaagggagcgagctgttcggtacaataaagcagcaaagaagcactgttccaaaaagcaggagtttatagaaagctggtggaagacctcttatgatgaatatatcacgggaaatgagtttgatgagcgacacctaaccaacctttttgacatatactacaagtacatgccagaaagaaaccgtctacaacagcacctttttacagaaatatcaatctacagtgaccttggaagacaatacttacaagatatactaaaccttatcactttacaaggacaagtggcatattatcctagcaaattactatagccctgacatggcattggccccgcggtggatttggtaaccattgcgtttgccttcagttctaaagttgatttccgagaaccatgacctccaggtccgattccgctggagcgaaaacgatattgccatatgggacaagtatgtaccgactcttgcagcccctgttaaccaaaatttctaacacctcgtagccgctcggtgttccatactgcaaaatagcaagaataatctcgcggggactttcaagtagaaatcttgctgacgggactacaacggagccgagtgaaaaccggt

SEQ ID NO: 173 - DNA, 3764 bp, Emericella nidulans
aataaccctactaaaggatctgggcaagagcctctctatacactcaaaccgcgctccgcgcctcgaaaatcctggccggagacgagggacccctcgcggcctttggcgggtatcagggtcatcgattcttcgcgcgtcattgccgctcctgtgatctccaagatgctcgctgtgctcggtgcagaggtcctcaaggtgacgtgggagaacctccctgacgtcgccgcaacctgggtcgagcttagtacgggaaagcgggacacgaacctcgacttgaaaagcgaggccggtaaaaagaagctctctgagcttgtcgaatctgccgacattttgatcgacgggtaccgacccggcgtgctggcgaaactgggctttgacgctgagtcgctgaggaagatcaacccgagcttgatctacgtcagggagaactgctacggctggaaaggaccgctttcgtatcgatccggatggcagcaggtcagcgattgtctcgttgggatttcgtggttgcagggaaagttcctggggctgagtgagcctgttgtgcctttactgcgtatgttcttcccttctcccaacacgacctgtttctaacagtgggacaacccaagcaaactcggactatcaaatgggacttgtgggtgcagcggccgtctctcacgcgttacttctccgaacacaatcagacacgacattcgacatagatgtctcactgacgcagtacaacatctggtactaccgactgggcgagcaaacaccggagatccagaaagctctacgcgcccagcataaggagctgcatctccgtcactacgacgagatgaatagcttgattaccaagacgcttgctgcggtgaaacaagcccggcctgacctgttccagcggcctgagtactttgacaaaatgagtgggaaggggtggggtattgacgaggatatttccatcttgactacgcctttcaaactggataagtcggttctaaagtatgatactccgtctgggcgaagggccagttcggagccaagttggataggggctaagcccatacttgaccggcaaggggcccttggtatcttctttctctcgcatatatatacgagaggttgggagcaggagagatgatgagttataatcccaacaaatatacaagattattgccggatagcaaaaatcctgtcaataaagattaaatctgagcctaagcataaatacaatggaggcgttccgcaacaatgtcaccgtgacgggacttcacccatcgtcgtcatatgttcaagtagacaagtgatatcactctaccttacacgtgaaaggatattcaaaattcagaaccataaccaaggcgaaattggcctcattcactccaattctacccagctctattttgaactgcacaaggtccagtttaagccctacttcttccccacatacttaatattcccatccgcatcctttacccatccgttctcccttgtaatcccattctgtccatacaccaggctactcgcctgcacctgcgcactattcatttcgcgcctcgcctggttcgcgcggtcattgtttgccaccgccttgcgcatgcctttgagttgctggacatcgagttcactaacttagccacgggccgcgtccaaggggtaggagtgcatacagctttcatagtcttgtgcgtgtgatacgcggcctgggtgttctggatagaacccatggggttcgagacgccgctggcggcgccggcgaggtcggcggcgtggtgggcgccgctaacgtatttcttataggggtcgtgggggccagacattctgcttggtgcttggtacttgatgagctttgggatgcttattgctggagagggagtacataaactaagaccgactggagcagtttgtatctggacagggggccctctttatatcacggaatcatccagctggaacggcagggacgggaatgagtacccagacacctgatagcccagagcgcagtaagcagctagccttgcgttccatctgtcgcggcgatagcccgatatggaaaacctggtgcatttagcgctgaccaagacgctaggcgctgtgcgaggggctgagtgaggatactttagctacctactccaagaggctggctgactacctacatcagccgcctctgtgaccaaggaaaatatgcgccgcactttctacttagagaaaatagataactatgttgctgccctggcgccaacgaaaattccaattgtagctagaacctagaagctaggtagattatacacacctttacccagcccgcactcaaactgaaatcgtatactgccctcttagagacaatacaggaggggtaggaagccatgggcgccaaacctcaacgtccaagtcatcccacccagacctttgtctcggataattgttgatacagcgggattggtgacgcatgtacgttggtcatgaccactctgcatattagacattctcaagacgcctgacttgtagagtctatttccttacaatgatatttccaggccccatacatcgtcatgttcctcagactccgcgctttgtcgtagccgtcactgacctcgtacctcggatactttgattcacaggatgtctggaacctggagaatgatggagcggcatccagaggagtaggggacaggatgtctcgtcctcgtatcactaagcgcgcgtggacggaaagtcgctagcactagatatccggcttctatttacagtgaaaggtaccacatccgacgaaatctcaagatgacgaactataacatgacggccaagaatacaccacgcctagctatttcgctacagtatcacttcaagcccagtgtgtgctttcatatcacgttacaatacatgctcaggtcaagaagaaaacagatctgcttcccagagaggctgaccctactagatatttactagtaagtagcccctgatcagggctatctatacagtaagctagagattctatagtgcacagaaatcagggttagactgttatagaggtgtctgttcaggttttctgtgcctttgtgattttaatacgtaagacatgctctacttacctgcttagaatataatttttaaggctatactagaatatgatatcctacatgtcatattgtatagaaactagtaagatatacttgctttggttgttggttatagcttcaaatatctagatattgtatggttgctcatgctgcgcgggtcgcttgtgtgcgcgggtcgcttgtgggttacgttagttaactatactaagtcaacttattttacaccaccttcggactcgcgattattgcaagtcccatgaattttatcgaatactcagacccagctcccagtttgggcaccacgtcaaggattagggataatccccgccctctgccagccccccgcagccccccagctaccagcacgcgtcgcgacgcgtcaacgtgatggcacgacccaacgcccaacctggcggtcctttgctagctgcgctgcaggaaacaactaccgcagctactattaaggccgctgagggtcagaagatctgcagccctattgcggccttcctcgacgaacaccggagccagacgggcctggcgttccaccagcgaggagcgctcgaggcgctcagcaatgacctggctgaggtagcccaaagacacttcaacgcctatatcagcggcggccccctgactaccacctctctgggcactggccctgccccagaccctggtacgctacccccctacccttctgccttt

SEQ ID NO: 174 - DNA, 3598 bp, Emericella nidulans
gaatctattcgccccaagcggtttcgggatatcccaccttaaagtcccgatacggattcatgcggtttggtgttggggcggcgagtggacgatgccttgggaagcatttggcggatactttgttcaaattgaccttgatagcagttattgaacggtacagtctccactcagtgcatgatgggccagaagtcgaactgagagaagtggttgtgagagtatgaaccagaaggaatgaaatatgcctgctggccttgatagacagtaaggcttcttagttcgagatattatgtagttctccgggtagtccgtttgttttcgaaaggatagtacttctgcgggcctaatgcaatttaatgaacggtaagaatgtcattctgtctctattctcaaagaaatttgatccaaagtacaatataatgagagatcatcgaagagccctaagactcttatgaacaatacgcaaatgccaaaaaaaggagaccgaaatatcatacaccctatctctgcaaatgtgtcattcagggatcagaaccatgctgcccaagaatcacgttggttgacggttattgcgaagtttgcccattattattgctctgggcacctgcactatatagagcaacagcagtcagaaccatgttcaacaaacgaccatcactgaggaaagcaaatggagacgtactgatagatctttttgcagacaaagtaagcggccgttcctacgagggtgactttgaccagaccgccgatgccgccagcacgagggttgaggccgcgcatgtagttctggcgatagaaccggcggcctcggccggcgaaagaaggtgctgggttgtagtaggtgtagtgggggtgcattttagctctttatgtgacgttgttggagagattttcttagagtaggtaatgcagtagctatgagaagaggaaaggggagcgagagaactgtacaaggtgaccaatatatccttcgggttattgaccgagcccgagcccgagtccgagtccgagatgagtacatttgacccatttcgccacgtgatattcgttaagtccgaactatctcaatgacgtaatatccgcccccagcttcggctcccgagcgagaatattctgggtgcctaattctcttcaaagggactgatttggccgcgctctggcatcgtattgggtgagttgttctttttagaaccaaggaactgagagccttaattatttcttaattattgtgcagcatttcgttgctgtcttgaacacaaattactttggtgactgcggggtgaaagcttctgtagaaaggacgaagatgatgatgggaaaggggatagtgaatatagacagagcagtaactgaagatcatggctgcgactgaaaatcttagttgttcaggacactgctgatgagcgatactcaagtttggggaaaataatatggagaaattctctgggtgtcagagtcccataaccctaggcaagttagcaaacacagccggagtgaataaagcagttggtctgtggtacaccctgtttctctcattatacactgggtatgcctgggtgaattttggtgactcacctatcagcatccttagactctgagaactacacgttgttcggcttccggcttttcacagtaataccatgcttaagaaggagagtgtacagcgtcgttggtatatgattctttctacgaggcatagtgtctaagagatgctatattgtgtatcaacttatactaagagagcagttaatgctctcctcggctcatatcgacggttgctatgtatatttatggccctttcgatgaataaattaccacattgctcccgagaaagactgatatagaataattggtgcaagagggtaagtacattaaacaccttaaacaagtcgaaccgccagggttcgttcaggaatgctcatctattggtcaatagcccatgcttgcactacatgggctactcctcgaccgtgaataccagatgaagcattcgtttatgggcccaggcctatgaaacaggactcatacaaccgccgaactctcattttcagacggcagttgggggagggtaagatggtcctttcacagtatgagcacaggtacactgtaagagtcaagtgaaacggaaatggaagatcctgcctaaatctcgccagaacatagtgggaaatggcaaaacaagctgcattatcatatcagtgtgtcgagtcaacttcctaagttgaattcaaggtgccaatttctggggtacctaatctattagttctgtcacggacgcaccatctcatgatataggccaaacttggaaacattcttgctagcatttctcaattcatcagcaatagaagccaattgtcgttaagataactgacaatcatggaactgcgaaagttgtacagacggcccttcggatcgggggaccaacatgaacagatgtttggctgtctctggcagttggtactgacttgggggatctgcgccacttgaccgaaaatcaggggattgaaacaattgcaagcgagacaatcgcctgttctcgtgatattaacttgccccaaatttgtctcgctaggcactgccggccggaaaatgatgcagtcacggatacacccgaggagctcttcggagaatacccatttcatgctttgctggagtttggccccagagtatggaactgaacgtagccataggaaaaatcagaaaggatggcagccttgcaatgtattctttcactcttacgttctatattttttgaccgaatagatctaatcgcagagtaaaaccggaaccagtctccatagaaacctacctgacagggcaacgcaactcaatttcagatgcctacgaccagatcctgttatagccgacctgcggcgtgggaattgtcgataatcgcctgattgctctgatggcagtcggactgagggtgttttgtactcttccacccgttttgtcttcctgcaacacaaggctctacccgtcgtcagcgtcccagcagtcgctctcaccggagcacagcatagatcagatgggaaaagcgaactaaccttgctctgttcccacctctccaataactcactcagatcatgccgcccacacccactcccaatctctccgtgtcccagaaacgcctcaaagaggttccattcctcctcatccccgtctccagactcattgacagccaccgtcctcgccaatgtgtaatactcgtacatatccagtcctgtcgggcgaccgctgggccagtaccccctcgagcccgcctcgtacattaacgcatggaccccgcgatctagctcatagcaggccggatcgaacaccccgtcgcgcttatcgatgtccattccgcgccgaactttccactccagtattagccgctctgcgccgccggagaggaggtacgatccgtcagagaccgaggagagctttaagccgcgcagcctgaatgtgttccgggtgagagggacgagacggttgaggtaggcggactcattgaaatcggcgatgcgttcaaagcagggaatgtggtagtagtctgtacgggaaaccaatatcatcagccatttatcatctcttgcccatagagtctggtaaactcgtg

SEQ ID NO: 175 - DNA, 2082 bp, Emericella nidulans
tacagcatcttccacttctacgtctgcttcagtgaggtcattttcggcgcgcaggccgcaggcagcgtcttctcgtatgcgcccggcatgtccaaggcaaaacacgccgcgggcgagctgaaagcactgtacagccgcaagcccaagatccacggccacaacgtgatgcgcgggcgctggtctggcgttgcggccagcgctgcgatgcgcaacgtcctccccctacctccccgatcgctgcaggggtcgatcgagttccgcaatgtgtacttccggtatcccacgcggatgacggtccccgtgctatcggggctcagcttctcgatccggccaggccagtttgtcgcgtttgtgggcgcaagcgggtgcggcaaatcgacgacgatcgccctcctggagcgcttctacaacccgctgccaggcagcggcgggatctacgtcgacggacgggatatcagcagtctggacctgcagagctaccggcggcagctggcgtttgtcgggcaggagccggcgctgttccaggggacgatcaaggagaatatcctgctggggatggaggagggggaggtcgatgacggccagatcatcgctgcgtgcaaagacgcgaacatctacgacttcatcatttcactcccgtgcgttcagtccctgcttctctccactctcctatactcacattgtgacaccggctgacatgcgagcaggcagggcttcaacaccgaagtcggcagcaagggcgggatgttgtctgggggccaaaaacagcgcatcgccattgcgcgcgcgctgctgcgcgagccccggatcctgctgctggacgaggcgacctcggcgctggacagcgagagcgagcaagtggtgcaggcggcgctggacacggccgcgaggggccgcacgacggtggcggtggcccaccgtctgagcacgatccagcgcgcagacgtgatctacgtgctggcgaacgggcgcattgctgaggaggggacgcacgccgagctgctgcggaggagggggcactactacgacctggtgaacctgcagagtctggcatagcctgagcgcaatacgtgtatttaagttaatcaagtaatcgaagtaatcatcagtatcagtcagtagtcagttgcaatcacatcgccgccatcattcgaccatcagtcgacgatcatagtcaactatgtgacctaattatgtcagtaaatcatgccaaacatgccagtccatcatgaaactgtcttttctgtcctgtcgtgaggtccacaaatttgctgggaattaggtaaaattaaggcggccacgtgcctgatactaccctacgagtcattcagaggcacgggatcgcctctatgacccagaaatatatgaatagccttgtgaagcttgtgaagcttgcgaaccgttgaataaaccccctaacgactcgatcgcttacatgatagaggacgaatcagacgattcaatgaatttaagagcaactaagagcaatactgacattctggcattgaatatcaagtaatcgagcattgagcaatccagcaatgcagcaatccgggcagtagcaaccgcagttcaccgtccgagtcttagctgcgtccccaaggttctcaattgcagcttcacaagggcaaatggcactatttgtcctttcctaccaagtgggcccttcctgatacggcaactgtgctccgactgggctagtcatgctgctagtttactcggtatactcagaggactctgtccggctttcactttgatctgacggagcagtctcctagctcgtacatttttttttatttgccaatctgtagtcaaggaaccggggatcagctcggcgtgcattccgcgcttgtcagttcctcccagccttagtgcttcacccttattctccagtcgccattctccagctcagtctccagctcagtctccagccagtctccaattccagtatgctctcctcaccactggctgggtccggatcagctggagagccaggcgctgagattgtctgggtcggtccaggacgttctgggacgtccagactacgcttatgcctaatcaggggcaatggagggacttctc

SEQ ID NO: 176 - DNA, 898 bp, Emericella nidulans
caatcacgacaacctcttgccggagtccgatcaactattcgtgctctggatagctcatagacctgtcctcgtgctcgttgccctgctccaccggcgaaacacgctacgatgcagctttgccccaatattccggcactcccatctatacctcttgacctcgtctatataagcagccatggcttctcttccaagccctcctcagcaagctagtctcttcagacacccgtatcgccttgtggccatttcattccactccatcccacccatttgtctttccttctctcttttcttctaagtcgtccttcgttcagatcgagctgcgcttgatcatccacttgttgtctcctctcactctcactcttgcttgcaatcgtctgctacaatgaaggtcgcggttgctcttactctcgttgcgggtgtactcagcgcacccacccctactttctggggccccggctggggagacggatccgctagcgctgaaggctcggccggtctcagcggctcagccggcttaagtggttccgctgggattggtggctccgctggtctcggaggctctgctggtctcggcggctctgctggcgcgtcgggttccgcctcaggttctgctgacgcttctgcttctgggtctgcggacgccgagggatctggtgatgcggagggctcagctggcctgggcggatcggccggtctcgggggccacgctggtctaggtggctctgcaggaattggtggttcaggttccgctaccggggaggctggtgcatctgcgtccggcgctgctggtctcggaggtcatgccggtcttggaggctccctggcattggtggctctggatcagccactggcaaactgaacgcctctgcttcgggcagtgcaggtcttggaggccacg

SEQ ID NO: 177 - DNA, 712 bp, Emericella nidulans
  unsure (1)..(712): unsure at all n locations
cctcggacaacaaggtctacttccagctgcaccagaacggctcctcgacagttaacacgggccccaatggattggagcgtctcgactacatcatctctggggccgagaagcgcggaatcaagttggtcatcccgttggttaactactgggacgactttggtggcatgaatgcctacatcagcgcctatggcggcgacaagcccggctggtacaccaatgataagattcaggctgcatatcacgcctacgtcaaggccgtggtgagccgctatgttgactcccggcaatctttgcctgggagttggcaaatgagccccgctgcagtggttgcgacacgtccatcatcaatcagtgggcgacgaaaaccagcagcttcattaaatccctggatccaaaccatatggtagccatgggcgacggtgagtcccctgaatctccctctctctggtcgtagaccgccgctaagaggggatctctcttagagggcatgggcctccctggtgacagcaactatccctactcctactacgaaggcaacgactttgcactgaaccttgccatcccggacattgactttggcactctccatctctacaccaccgactgtacgtatctnccggatgacccagttctgcgttctctctccatatcgggtgctaatgacttccagggggcgtgagcaacaactcgtggggcaacaagtgggtacaag

SEQ ID NO: 178 - DNA, 1192 bp, Emericella nidulans
cagttcaagtcattgcgtcgcgcgtactctggcgctgcccccatgggagcggatctgcagaccaaggcgcaaaagaaacttggatgcctgataaaccagacatggggcctgagtgaaacgacaggtagcaccacaggtatgccttgggacacggaagaacttacaggtagtgtgagtcgtctatggccaaacatgcgtctgcgtattgtcgacgaggacggcaaggatgtcgaggagggtaaagagggcgaattccttgtaaaaggacccgtggttaccaagggctattatgggaatccgcaagccaccaaggaagccttcaccgatgacggctggttcaagtctggagacattggtgtgcgccgcgacggactgttctatatcgttgatcgaaagaaggtacgtttgcgcttccttgttacgtctgcacattgaaactatactgaccaattaggaactcatcaaatacaaaggtctccaagtcgcccctgccgagctcgaagcccaccttatctcgcaccctctcatctacgatgcagccgtcattggtgtcccagcacctgacggctctgggaacgaagttccacgcgcatatatcgttgcggataaagcgaaaatcagcgaagaccaggtcaaggactttgtcaaaagccaccttgcacattacaagcagctccgcggtggcgtggtatatctgccagccatcccaaagagtccgagtggaaagatcttgcgccgcgaacttcgtgagctggtgaagaaggaggctggcggttccaagttgtaatgtgtctgttcttagttagaaagagtaaatatgatgtattgtagaaaaccaatccgtctcgatccacttgatatgttggaggaatctttgatccgttctcggagtagaagaagaaagtggggtgggatcagtggctttccccctccacaactttcccgcggacaacgtcttcccttcaaagctatatatccatgctcagagcttcatttcgtctggtaactgtctctcattctcttctatcgccctcgatccgtcctcgtatttcacctcgcgttcgattgccttttcagacagccgcaatgtctgacctcactaacatctttactcccaacgcttgccctcgtaagttgactcatctttttcaagaactcagacgatgcactgagtaccgcattctacgatagc

SEQ ID NO: 179 - DNA, 10467 bp, Emericella nidulans
aggattataaatggagggagcgagagggagaggggagtggagagaaaagtagaaaaaaagagaatagagaaggtatagatagattgagagaaaaagtgagaagggagatattgataggagatatgaagtgaaaaagtatatgatatatgaaggatagggataaatgaaagatttgtgaagaaagaatggatgccgctgagggcccagtgagttgggaaaagtttggatccccaagagagaggtgaatagggtgggaaaaaatataccgaacggataactaggaaagtagattgacagagagggctttcacccaccaggtatatggtaggacaagaatatggcgcgagaatggaccgagcactgggccccttttattagcattgggagggtaaacttcctaaccacggaaggaaaaagcaaggggcccagccgtccctggtgtaataaataaaagttgggtgaaaaaaacgaggcttccgtgggtccttgcagatttcaccctaaaaaaaattaataagaggcttggtgatttagggcaaaaggctattttaagtttaaggcccccctataaaaaccccttagaaaagcctataccaaggtagggtctggcctgaaaagtccagggcctagattcgcagcagtggatcgcggcggcagatcctgccagcccttcctaatgctttaggcctaggtagcctgccaagagcctactctggctctccccatgttagtgtcttttagttctgctcgtagaccgtggagtcaggtggtgttcggtgggatctggatgtctccagctcagagggattgttttccgtaactggatgaatgcacactgtgccttcaagaccagcggatcttagactgatatagttaggtctgattagcttgggatagatctaaaataggaagctcaatgtaagattactcagagtatgtatactgaccagcatgactcagttggattaacaggtcactatggtcagactccacagcttaatctgcctggattgcacctatagctagccagctcgtgacaggtattggctagtatatattagaagtagagactattttcctctcagcagcctgctacacaatcaaatacagttaactttttagttacaaagttcttcctgcagcagtgcgagttccagctaccatacaggcattcgccagaaaagccctatatctatcgagttagtactagatttaatactagatttataattgccaggctactccatgttattgagagatcctgtttagtaaaactctcctgatatagttcttggctaagcatattgctagtaagagagttataggacttcgagtgacagtatagctgaataccatatcagaaaccagagatgacggcagccccgtgcaggatcaaggaagcgcggacaaaggtcctgacttcgctacagaactagtaaacagtaatagaagccgacccactactctggtacccctccgttgcaacaatctgatagttatgggtgcccagcctcatccccagggccgcccaagcattgaaatggttggccgtagtcacagtcccgcccgtccgctttgactggcggacagaccagaactgctcgaaggtagcggtgccttcgatggacggtgcattgtaccgggtcgcggtgtagatgtcgtacgttgcgccatcagagtacacggtgccccggtgctggccgccactgccgggattatacgtaccgtatgactcgacgatgtagtactcgatcagcgggttctgtgtccacccgtatacggcgaggtagccgttgccgctggggttgaagcttccgccgtagttgatggttctggagagattggttagcagggtttgtatgcgaggtgagattgcaactgcagttcttgggtatcaacgcaccttgtgctcccggggttccatccttttccaccaacgaagtttccgacgttgctccactgcactgtgtatgagccgccggcaccattggtgtaggtcacatcgccgccaccgtcagtccagaaggagtagtagtagccgttgctccagccggtggagctaggggtagaacgttcgagcaggcttgcctcgcgtgcggcgaggtcttcagacccgacgggcgtagcgaatgccccaagggcagcgcaacagagaactaggagagatttgaaggagaccattgtgctgatcctgtcagttgggttgttggaatctgggagccggacagaaaggaatgctacctcctttataggtagtgtccggttaatagcctctggatcagaagtacaacgtctccccgtgagagggcaatcagcctgtttccggctcttttggttataaactcctgaatagccattcgttttcccagatagcgtagcagcaactgcaagctgtgcatgtgctagagcccatgcgggcaaagaaaaaccccagactaaacccagtggaccccgatccgctccacaaaccgaattgctgaatagcctgaatgaagaatctctgcagaattctattgctccttgttccagtgggaaacggcgccgcttggcacgcttaagtatcatggttcagctccgtttcaaatggaggcagttccggcgactgttctagacccgtgggccaagacgagtccatctgtctgtaatgctatcggaagctattggatggcccctgagcatcaggtagatgaggttttcggctctcaatcagagtttagggcaatcggtcggtacacgttcaatgagaactccagcttaggcatagatgtcctaccatagccaccgttagaccacttactgggtactacattttcggggaataatgatcaacgccacttggaaggaaactgcttaactctcctacctacattaaagtcatctagtactatgtgcaggtagtatacggtaacaagcaatttcagtaggtactgcctacaaacaataccttgtaacttgaagcctgaggtgttccaaaaatcacggtctgttcccgcagagtcatgattagtactcaagtgtatccatgaaagcatccggcacatctccagcattgcgtctagtggccagtgggtgagcgttggcgctggcgttgctcgtctagctgaggatggtaagcgctcaccaacagcatatatcatatcactatcccaatacgctcgtctgagcggctctgaaagaagtaagtgctttagattcgctgctggtataatctgaataactttcaacgctgccgggaatgagtatcacgtcaaatacattaagcgcaaccctgatagacttgtacgtctgcatgctgcatggtaacaaaatactaatggaacactatctcctgcactggactgataataatcaggtttacggaattggaaaaaggaatggagacatagcgtttcgtttaggcctcctacctatgtttgggtattacagacattaaaaaacgtcacaggcttgccacaagcgatgtatgttcgtctaagcacacttctctatctcggtattttctctatcttgacaatagacctacttgtaggaggcaccttctgttccactcaggtttgtgtcaaacaagacgatccccaccagtgcatcgcgcacacggccttgcggctgatgatgtacatgattgtacagtcaagagctcccctgtgtctatgctgtatgttttcggcggcccacgttgctgaatttctacagtacggttcttcagtacggccgtgcgcagaagccgaagcatctcagcaacgccagctttcatatccgctatcttggctgcctagacccctggcaagagtaaaattcggggagacggtgtatctcctcaagactctcttgatgacgcacccggctcttagcggcctgcgcgggagtcactctatcaagttttgtactgctagaaggtatcacggtgggatccgcgccggccttcaacagcattataacaagattgactttgccatttgctgcagcacggtgtaaaggcatgccaattcgtcgtcagatgcaacattcagatctagacccctatccagcaggaatcgagtcataacctcgctctgcggtacgcgcgaactacagcgtataagagcaggctcggttctaacattgcgccgtatgcaatatacagctcgagtagggaggtgtctagctcctgggcgcttatgatctcgcggccaaggggggattcctctaggcccgcagcgattggggcctgcgcgagcttccagcagtagagggacgcttccatgattgcggaagatgctatttttgaatcagtccaataccctgaggcgggtcaatcaagcctttgagctgccggacaaatgaacatacgggagaggtctggctcgccatcagaaggcctccgcgaagggggattgctggatgtggagcgcttcggcctcatgatgagttcggagtgcgtcgcgttggggttcatgccacgatcaagaaagaggcgtacaatgtgggggttgctgttcatctgctccgggaagagaatgtgttgtctctattgtaactggggcgccagcctcaaaaagtgctgtcacgatatcgacgtgccgcattcatgttgcgaactggaggcccccttgtcgagatcttcaacagttaagcgcccggtcacgatggttttcttggtgtctgagatttcaccagagtcacacgcatggtgaaaggcatcgtcaggctgagttgtagcaagatgtcggcgctactttgagaaagatgcatgcaagcagaatagaattttacgaatagacttgccttctggtgaggggctttcaaagcaactgttgctagagccatcaaggcctagaaaaagaaaagtcagtataagctcgagcagggtcgttgagtgctatgaggggcataccccgcatcacatgtccacacagccttgtgacagtctcattttgaccgattgactaacggcatagggcccctagatcggatagtcgatcagggcgtccctggggttatatttggacttcttgagcatgcccagagtagaaaggcttgttcggttgctacataactcgtagaaaagaaagtgattgacagatggacagaatataggatcaatagccttttagccatctgttcaactgctataaagtgaataatagatattacgtctctaatagcctcgtcattagcttggccatgatggggtcccaggggtgagacaagacagtccagccttgtacccctgttttaccctcactatattatgtagttcctcaagtagtgctttcaaatatcgtctgacttaggctttgtaaattatggtgaaattattagttggcttttgacacgatgtcaccctaaggggctctagaggaagccgttccatgccctaactgctagcgtgagcgccaaagggtctaccattaagcgatgcctacaacgctagtatgtaaccagactgggtctgagttatcggactattgcacgcttttgtgctatattctaatgcgaacaagatgaggaagaacagagatacacgtctggggacccctctttatggaatgtatcacaatctccattattggtaagataacttacctcattgtcccattggttggtaggagtagtgcttgaatggcacttgcccactttcttgtcgtccgttctccgtatttcttacggcagtggcgctgataactaactttgcgtcggcgatctcgcgcagtataccacagacggagtttgcctccctctccagcctgtcccgtcctaaagaagaaacttaacaaagcagaagatatctagcacctcagtaagcccatatcccagtctttcaggctctgtcactgtcgtgggcgattcagccaacaatggggtcccggtgttccgcgtccccggatatggaggccagcctcaagtctgcgacagcactgtgcggaggctgacgatttgctccacagttaccagctgcaacgcacaccgacgataacgtacgagcagtaccctgctggctttggattgatgggccttccacccggagacggagcgcagcagatcgcagtggcgtcgtacgttaaaccgcttgccgactcggccgcctgaaccgactgattgcgtacagtcctgaatccaggtttgtctaaggcattttgttatagggataccatggacacctgcttgccttcgagctgccctacgatgcgtacaagaacccatatactcccaacaactggacgttcaaagaccgcgcaagctctggcatgtcatctatagcattcctgacctccgagggccgaggtagccaagctagccaaaggctgtggagctttgttcatcgaatacaagcgacctgacgcctaatccgtaccacaccctaccaggcgagtcctaaacccagacaatgatggatgctggcgggtcgttgctgaacaagggagcaccgtcattgccgtcaaatggcagcgctggcgcgtctctggactctcagtcatgcgctcaaactccagctctgcaaagctatcctagaacttcgccgccaacgctctcggctactacctctacctatacttagtgtcaacgtccataaactagctccagctgcagctgataataattattattatttaatagtaataatgaaatagacttggttacaagaaatattctataaatgacaattcaaagctagattatctttgaggcgtctggaggctggaaagctacgctacttctagctcgcgagtcagttcgtgccatatgctctgaattggcctttccaggacaaacctactttgacatatcattcaattcccagaccgtgtctactcgcttagcccatccgaatcttccgaatcttcctcctcattcagccgcaccgcccgtcgatactcctccaaccgagtcgcttgaccgatttcatcccacaccaagcgatccgacatctcagcgaaccccccagaagacgaatcggacggtaagacgagcctctgatgctccatgacagtccgatccacaaccccatcggcaaaaggtgtggtgacaagtaacttgaaatgtggacgcaacgcaggatctttaacgatcttgtccaggatgtccatcacgtcccagaggtcattcaaccacggaccatattcaaatcccgttataccgtcgataatacagatgacactctgtttttttgggagttgctcaattagtcggcggaaagtatggcagagcgtatgcagggattgtgacagaatctcatctgcggactcttgggtgcagataaaatccagattgaacttgtgccggctgcaaaagagaagctggaagattagactcctaattaggccgttgggtccagtgacagcgccttcgccaccgatttcatggagaccgcagaaatgatggagaacaatggcgttggtattctggtggacgctgagaacgaacaatgcacacagaagtgaaagggcagaaagtcgtccaggcccgacgcattcacagtttccgttcacccagagcacatccgaggattgggaggagaaccagtgcgaaaatctaggggactggagaagttgcctagcatgactctgtgccgcgtcgtcgaattgatgctgttccttgagcacggtgtcaagatcctccaagtgctgacgaaagtagacccccaggctttgcatcagctctgtttcggacagccagtgttgtggatattgggttggtaagtgattcttcggcgggcgtcctgttggaagacttcccccagtcaatagaattaatccgggaaggattggcaggcttaccagagtaattggaaatcagaaagttgaacaggtgattcatgatatccaggctatgttggtccttgcgattcatgctgccgtatttctggcccagttctatcgcctcggtggaaacctgtcgttgcagtatcgggtcgggaccatcgtctttgctcttttcagcattctccttgagacttttcatgtcactttggagttgttgtaacttctcattgaattcgtgcatcgcctccgcagctacgacaacggtttcatacgtgcccattctaatcttgtcgcgaaccaggtcaaggcattcctcgaacttcgcgacctggatcgagaccgtcctcaggattgtatcaatactctttcctctgaggctggagccgaagagccgttctctcagtctgctcacgcggtcccagaaccgcgtatctgaattgatactgccattcaattggacaatcagttgggctagagcgcgcaccaccgtctcgtagaatgtgattgcgctgtgcctgacatccttggagaaggcaaactggctctgttgccttgaagctttgttaacaagcgctgggatgtcatgaaacgcttgcaagatcctctcgcggttgtccgcatttctctttgcgatctatatatggaaacgtcaggtctctgcaaagggacaggataagagcacttacgctgaagatcatccgcagaccagcactcagcacgttgagcccgttgtctgcgggcaccaagtcgcaccaaggggctatctcgacggagtagtctccagccgcgcgtgcgaatctgcgcagcacatttgccggtccagtcgctttctgctcatagaccctaacagcagctttgagctctgaaaggacatcgtcaaaggtacaagtgttgacactaaagcgcaacgcctcttcggctgtcgcattgtacatttccagcgcttcttgaaggtctctttgaggtgttagcagcaatcatacttgtaatgatcaggagccaaacctaatatctggcagcggcacaatcttctctaattcttgatcatactttgcaggggctgtcaaggcttggtgaaattcctttccactttttagggtaaagtccgcagcaatttccttttgctctcgcagaccgtttcgcggatctagcttccgccaacgatcgagcatcttggtaagtttcaaaactcccaggttatgtggaagaagccacagtagatctggtcggcaggcccgagcagaaatataagcttgccagtgccattccgctaccccctgcggccggtccgtactcgagtattttggggccagaaggcttgtagcagtcagattttagttgaaagtagcagctgactttgattggagacacgtaggatgcggctacagtgagaaaggctgggtgttggcgaaccgcacggcttgagcctgtgatccacataggggggtgaggcttccaaccctacttgtcaattaacatagcccagaatcgtctgtgtggtccccattaggtctgtgtggccccaaatatatatgccatatctaactgccatggcccactggcttataaagaggccctagatgtgcactgtgcatgtttgctatatgctacacgcgaggtttgtcacatgcatacccccaacataataccgggctttagggcccgtgggggctagttgatcctatgtttgcgattattcgggttgctacaatccttgtaactatattgggaggacaggcttactggaatagtgatgtctacggcggaggggagttggctggtcatgaaccaggggctgtgctgggatcagcggcttttttaatcctcgattataattatgtgccccggccaacgagcctttcaagattccttgtaacatgtcagtaagtacgctttcctcgattctacagccctaacagcttcttctcccagcagagcgccatggctaccacggagcccacccacggacaggccgacagtgttgccagtgtcgagagcccggcccaggataacccgggccccaaagaccattctgactacactcgggcactcgagaagcgactcagcgagttggagtcacggctgttgaatgtcgagctacacagcaaagaatcggtgagcaagcgcgtaatcagcggcgacaaccctgaaagcgaactcgagaatgcggcaaaaagtccttcagacgacgacgcagggcctgaaccagaacagctccctgtcgtgcgagaaatacgcaggttgaactggatcaactttgtaaaccgttttccggaccagaaggatgcagccctcattgaactcctcatggccccgccgtcgttagaagatgaagaaaagaaggacagcctcttctgcgcaaagctgcaactggtcggcgccgaggaagcgcagcagcttatggcaacaatgcgagagcgtaatgtctttcgatcggatgcgtaccttcaatctgtccgcatttcatccataccactggcccgcgagcttgtggatatcttgggctcggacgatgatatcacagcccccctaatctttaggcgaccatttgcaccattgatctatcatatcgatgacttcaagaagaagctggccaagttggaagcagagctcgagaaaacgacggaagaggatgttttgagcatatttccctcgagcgtggtgcctacgcagactgcgatgactgcctccgaaaaggcacgcgctgaccggacaaatcttgctg

SEQ ID NO: 180 - DNA, 1915 bp, Emericella nidulans
ctcgtgacaaccagaagagaaatagagaacgccggccttgtttagttgcatggcttaaacacgcttttaaaaatagtattaagagatatgctattaaagattatctcaaagctactactataaatactagttttgagtatcttcttaaaatcaactttcctctatctaaataaaaaagagatttagagcttgtataccttcagagccgcgcagctacttattctggcctaaaggtataagcaatttctacccataggtatgatataaactaatattatataaaagagtactatactttatataaaaactgtttcccctgcaaccctacttaccctctaaaatagctaatatagggtacaggcactggttgaactttgtaataaatagaagcagcttgcggtgtctggtatctttaataattctggcaaccctattggcccaccaggtgacaatgttagttagtaccttatctacccatggttagaatataagccctgctaatatattgtatcaggattatctgtagactatagatctatataatagcagctaattaaagcctgatacactcaatgccttgattttaaattataatattgtttacaaaacaaattcagaaggatataatactctgaatattattatatatattaaacagttagataataaggagagagctgagtaattaaaggccagtaattttaagtagtggcttaataatatctttggggtgaatcttatatatacaatatatataattactatcctcaaagacaaaactctctctaagataatctgcctgtattgtggtataagatatagagaaaacttgtttaactagttcttaatagctcaaatccaagcaggtaagcagacagaggtaagtaagtccccatatttcattctaatagaaatctaactatagggtagatgtggaaacaggagttccagaagttctttaagttttgctctactatttttagggctaaatatcagaatcttattatatataataattagaagatgatccttgctctggaccagggctgtctactctcccagctaaggcttctttttttccctaaatacaaggattattagatagagtttaccaatagttctgtgcaaagatagaagtaactatttctaatctcaagtgactactccagcaagctggaacttcccaaactggaatcctctattattatctagaatcaggagtttgctaacagacagcctgggttccttgttaatctctctaatatatcctataaagatattttcagatatctctatgcctattaaaatctctacttatcacggtctatgttgccatatcccaaagcctggctcgcaggatgatagcccgtgacccaggcggtcggtcgtcgggcagaataacaaatgtatcactagcgatagctttaaaacaacacaacaatcaaccatacttcatacatcaattgaacttcgcagaattgcaacagtctagtgcgggcacggcgcctatgttagtccttgcacagctctgccggttattacttaaggagtcatcgaccccagcagcgaagaatccgccttagcctatctgctccaactctctacctcgactcacgagtaaagctcactaccgtacatatcaatgaaagtttctccacagcccgcctctgtccacgacgtcaacgaacatgacgacccaatcctgcacaccaaacgctctgccacccgagtattgaagagaccaagacattccgacccagggcccagattggcaagttctaagtacggaatcgatcacaagactcaggtagacggaaaatccaagacggacgctcgacgaagcttgataataggagaatcacgctgccacgaacccatcaagacgctggtttctgcgtacaaagggaaaacccct

SEQ ID NO: 181 - DNA, 1589 bp, Emericella nidulans
tggtggtcttgcttgcgaccgttcccctgacaagcgcgctacccgttgtcgcagaatggccatggtctcgaacggctcttttacatcatgtcctgcgcccttcattgctgagctctcgataggcgacactggtggctgttggtcttggactacctcaattatcaacggcggatgaacctctaacgtcagccttagatcttgccggccgctggtgcacgcctcacatcattgacaatgagaccgtctcttgctgttttccgtgtccgatcacgcaatggatgtatcctgacggtgcgactcagcattcagacttcagaccagggttgctaatgcgccataggtttcgacggccgagtcctctcctggatcgcgctcgccgtgctgattctcatggtctgctctgcgttgacatacattcttcttccggttgaagacacccagcgccactacttgacgttgagcccgctgatgggtttcatattcatgtcggtatgtaccctaaactgctgaaccccagggctggcttgattggtgctgagggctgtccaggtcgcattcattatgcctctgggaaactctgaccaccattgccacgacgccattacccccaacgactggctgtccgacacgacctgcgcgtttaccggctcattgatacattatggcgtctgggttcttgtcatcggatgtacgtaccaccatgcactcacaccagcctgtccaggactaacatggtgaaaggctttttccgctctctctccctctaccttcagcttatctgggacatccagcccggcaaacagttccgcttggtagccctactcagcatatttggcggctccctcggcctgctcggaatctccctcggcgtgtctggcgtctcgtatcaggtgggcgacatgtgctacatcagctatcccaacagcgccggctctttctggggcccgctcatcggcgtcgcattcatatcctgggtcatccagatgttcatcatggtgtacactatccgtggtgtgctgactcgaggtgggacggcacggttctccatcttcaagaagcgatcagacgacagtgacccgctttcgcgtgccgcgcaggcaagggccatgagacggaatatcttgcagatcctggagctccaatggagggcgattgccatctgctgtctgattctcgcctatgtggtttatgtggcccaggtggtcctgcgatggggagatccaggccagtacagcgcgaatgaattgaagccgtgggttgaatgtctcgtccgcgaagcaggggacaaacacgcctgccgggacgaggcgagctctatagttccgagtcaaaagagtgttgttgcagcgttggtgatgcttgctgtatgttccaggctccctaccaattccttttttaccaccgtacttggtatactaacatctgatcgccagtcctgcggcgtcttgggcatcgcctgcacggcccggtacaccatgatcctcggctggaaagactggttccactatcggttcgacgccctggctgacctgctgccggggcgagaccacaccaaccgcagcagctccatagcccttaaccccagcgct

SEQ ID NO: 182 - DNA, 1324 bp, Emericella nidulans
aagcgtgtaagctcctttttttttaaaccaataatgaactcatatttcgaagataattagggttgttgtgctgtgcgtgtgttgtcggatgactgccgattgtacgtcaagaccggtgcatacgaattccttgctgctgccggtataatgccagcgtctggtatctccctggacagtgacccttggacaacttaaggcctactttaaacatgaaatcagcggccataaatgattgcagagtgactttgaagaagtaaatttgccgacggttggactccaaatgattgaccgccgaccattccctactcggacaagtattatgaatttcggtcccacacgatgcatgcgcggctttgaagcttcctgaagctgtgggtgctgagtagagctctgagcttcagcgttaagatcttgtaatgccactgacacccggtacggccttcttcatctatatttcagtgtcttctcaagtctatctgctcttgtcaggaatcaccatcgctatctcccgtgcttatcaacttttccatccatacttagcatgtgctgattggccgaagctcttctcctatccgcgcacccatcggactgctgcgaactctcctctatatcgggaagggaacgtcatgcattgtcctctctaacagtcatacgatcggcgggctctccagctagaaccgaggtaataaggtttattgatgaggggtatgggtgcccgaaatccagtatgttgcatttgcaggcattctatacccgtctatttaagatacaaggttacttgaacacttccccatagactgattctctcaattctcccttttattcctagtttaccgccgtaaaaacaaacctccttaagatcagcagaatgactccgcaccgcttcgatcccaaattcacagacaatgtcgtcaacgctatgggcaaggatgtcgacccgcggtttcgacaactcatggcctcgctaatccggcatgtacacgatttcgcccgcgagaacgaactcaccgttgacgagtggatggctggggtacaacttatgaactgggccggccagatgagcaccgcaaagcggaacgagggacagatggtttgcgatgtaatcggacttgagtcgtacgtcaaatctatctcccctcccttaccgggacttctgtacaagcctgtagggacaagcgttgattgaaacatggatagcctcgtcgacgagataaccttcaaactagctgacgaagccaccgacgcaccaacggcgaccgcaattttagggcccttctttcgcgctgacaccccttccgctcaaacggcgaaagatcgtcaagac

SEQ ID NO: 183 - DNA, 1245 bp, Emericella nidulans
  unsure (1)..(1245): unsure at all n locations
atgataagcacagcgtatcccgcttggggtaacgacggcgagggaatagcaccggactttataacatcgctgtcaaaagctccgacctctcattgagtatccgtagtttgtctgcctcaaagaaatagaaaagatttgggtgaccgtaagacaaacacacggaatggcacaagcaaggccagcgagtgtctctggaccgacagtgggagtgtcaagacagggcgagacgcagcgtatggaatgatcgttcctagttgtccctgtaagaaacatcgaagtggggtagtcgattgcactacaagtataacgatcttgagtggctgaacggaggaaaacgggcagaaccgcttcagtaacagctgagcctcgtgagtggtcgaatctgcatcttaattttttctcagcacagtgacagtttctggttgggcgagctggcgcctcttaagtagagggtccgtaggctccatagatcagactgcctccgggataaaaggtcacatctcccttcaagcagtcaatgtacttacgggaaacatggaaacatgagtcaacttgcagaagtgggcatagctttgttatctccgttgcaggtcgggcacttggtaagctcacttctttgtcgagtactgaatatacccatatttcgaagagaattatggttgtgctgttcgtgagttgtcggatggctgccgattgtacatcaagaccggtgcttgggattgccgaaatccttgctgctgccggtaagatgccagcgtctggtatctccctggtcaaggactcttgggcaacttaagacctattttcaatcatgaaatcagcgttcattgagtgagtgtagagtgatttcgaagaagtatacttgccgacggttggaaaaacaggaacgctggttccacaccaaatggctgaccgccgaccattccctactcggaagaggaatcacgagtctgctgatgtcatcggttccacgtgatgcacgcgcggtcttgagcttccccaagctgggtactgggagaagcttcaggtttcagcattaagggtcttgtgcaatgtcactgacgcccggttagcgtcctatcaatctcaatctagctttcagcgtcttntcaagtccatcgccggtcctgtttcggatcaccatcgctatctnccgtgctatcacggttttccggcgtcccaccgagctttcgctccttagccgccctggtccctccttcagctcagtttctgtctgacctagcg

SEQ ID NO: 184 - DNA, 1718 bp, Emericella nidulans
actggccctcgggtcaggatgttctaagtacaattaatcctccgtttctagagggaagaaggagccaaaagttcaggttctgaaacaggatcgcatggaatggttatatctggcatgcgtgcggacgcagcggtgctgatctacattgacattcggagggcgttggcgggtgggtgcccgttttggaggagcgagaatggggttatcctttcggaaggtatggaggtaaatgtggctacaggcacaggcacagaaaagggtgtaatacctgtggagtattttgatgttgttgttgaacgaaggaagggactgggcaagatttgggagggtggcaaggtaattcagagcttaccggaggaactgacgaagaaggggaatccgaaaagaaggggaggcggcgaatagcagaacttgctaagctgtatttaaatagatgcttcgcagtgagcaatgtaataccgatttagccaactatttcgacggtagagcaacaaagcgatgacagtgtcacagttagggctaagattcggcgtctgtctgctacgcctttcactcatggcgattgcatcctaccatcacgtctcagcaataaatccatatgtagtattcaataggtacacagaagccgtgcaatgactcaatttcaggtatcacagacaatagtagaccaaaattatatacaaagtaaacacaacccagttcaagcgccgttagacttcatcccatcgggaactaatttgacatcatatttcagctcaagcccagcttgagggtcacctttgcgctcaacaaaatcgacaatcaacgagtcctttacggcaaacaccgagtcattcgtcaggtaggggtcctttcgatcgaaaatctgcgtcgtgagaggcttgtacccgtcgtgtgttgcctgtacaacaaaaacattagttgatacataacatgaagagccatgccacgctgtgcatcctcaaacgaagagttaaggagaggataaaacatacaatgatatgaatatgagccggccggaacggatgcctatccatcaacttcaacagctttcctgcgggcccatcatccggtacgggatacggcgttggccgcaaacaatagaacgagtatcgcccattttcatccgtcctgaatttcccacgcaggttaaattcctcctgatcgggatcctgctgctcatacagtccattcgtagaagcctgccacacctccaccaccgcgccaacaagcggcttcttggtgacaaagtccaacacttggcctgccatgtaggccatctcgcccttaccgtccttcggtgctgtcttgacgatgctctcgccgtttgagcggaagggggtgtcggcacgaaagaatggccctaaaattgcggttgctgtgggtgcgtcggtggcttcgtcggctagtttgaaggttatctcatcgacgaggctatccatgttcccattaacgcttgtcccttctggtcttgtacaaggtatccctggaaggtaagtggaggtttgacatacgactcaagcccaattacatcacaaaccaactgcccctcgttccgctttgcgttgctcatctggccggcccagttcatgagttgtactccggccatccactcgtcgacggtgagttcgttctcgcgggcgaaatcgtgtacgtgccggatcagcgaggccataagttgtcgaaaccgcgggttgacattctcgcccatggcattg

SEQ ID NO: 185 - DNA, 4987 bp, Emericella nidulans
atatataagtccttctctccgactacagtggcgcagatgacttcatctggcccctctctcgtttgaacagatagaaatacataacaactagaaacatccccttgcccgaagcgactttgatataaggaaaccacaattgtagccatcatgccgcatctcccaggtgcacaccatatccgacgccggtcttcgctcgccagtaagttccgtcatcaactcccaacgtcattttctcttcccctcttcttttttctcaactcagccagccttctctgctttcccttgaactttcactactgtctcccctctagccacttgttgcatgtctacgtccaaacctatcgagcgaatttcggtcttcccattcccactatgtccgctgactggagctatttctggggtaattcaggcaatcgttcatccaccgatgatccaaggcacccaaatcctgccagcgaagatgatgagattgaacctgaccagggcaatggtatgtgcttttctttagctttttacccgttgtacccgtcgtaggttcgcctgggcgcgatgctaaccaagatcccgatcgcaacagtcctgagccacatcatttcccaactccggcctggagcagacctcagtcgggttgtattgcccacgtttattctcgagccccggtctatgctggagcgaatcacgaagtatgtcagcttcggctggacctcttatgtactctagcaggcaaacgactaataggattctagcttcatggcacaccccgaaaccctactacccatgcccacgaacgatgaccctctcgagcgctttgtatccgttgtcaagttctacctgagtgggtggcatatcaagcctccgtacgtcgatcttgattgttccttggagacaaaccgaatctagagggttttctactaacagagcttaggggagtcaagaagccgttgaaccccgtgctcggcgaaacgtacacctgctcctgggaatatccggatggtactcgcggatactatatttcagagcagacctcccatcatccgccgaagtcaagctatttctttatggcacctgagcatcatatccgaattgatggcacactcaaaccgcgaagcaagttccttggtaattccgctgcgagtatgatggagggtatagctatcctacgattcctgaaccgtggaaacgacaaggaacggggagaacgatagtaggtgaaatgtacatggtgctattccacagaagggctaacaccatcagcattttgacgcaaccaaacatgtacgccaggggtatcctcttcggaaagatgaagtatgagcttggagatcatagcttcgtgagatgtcccgagaacgatcttgtcgcggatatcgaattcaaaaccaaggggtacttttctggaacctacaacgcaattggcggaacaatcaagaatgaaaaaaccggagaagtatactacgagatttctggtctttggaatggcgagatgtatattaagagcgttcacgtatgtctttcatcccttttcttgacgccagcgttgcagattagaactaacccacgtagtcccacgacaaagaacttctcttcagtgctaagaaatccaagccaacattcccgacaacccgcccgattgaacaacaaggcgagcgcgagtcccagcggttgtggcagagcacagtgaaggctattattgcctcaaaccatgaaatggccacggacgagaagactaagatcgaagaccgccaacgcgaagaagcggcaaagcgagcggaacagggtgttgaatggcacccgcgcctcttccgggccgttcgtggcgggcctggtggttcagaggagggtgaagaggctcttgattgggttatcaatgctcatgtgtatgtttcacgatgcgagcatgaaacaacctaagctgattcgtctttagtgacgctcacgaccctgagaaagccaagcgacagattttggcgatcgcacctattctcgatggacagacgtgggacaactttgaaatcccagaatacaagggcaatgcggtaaacggcgcagacaagtcagagcaccagtcggagaacaccaaaccggaaactaaacaagaggttatccaggaaataaagccaacaggcaatccggagaacaagacagagatcaactacgaggctagcccgggagttaagccaggaaacgcggtagaaaccaagccagagctcgtggagcggatggattcaaaaacgattgaggttgatcagtacatggacgcgctggagggctcgaagccttgaatgattttcattcatcactatggcctctagccagacgctccgtcgttacatttcccggaaagtactcgaggtgagtatactcatttacccgacgtcgtacgtgggttgccttgacgtaacttctgctgccttccatacaccacccgcatgcctcagtaccgataccagggcttgaatgggctgagttttgccaattccgcgagggtcgaaaattttgcccgtcccatcaactgtactggatacccgatttgcatactgtctacgcgcgaggaaaatgagcgacttttacggataaattaatataaaaactgaaaatagggttataggtatgagctagggtagagaggtttggagtgctggtatatagggtctctacttgcttattatcttctattctcttcggagaacatgtgccccaataagtatatggtataccatcatgttattgaagtcgtaactgtaactgtatgcacctcaactccaatcgccatgaaaatgcaccgagttccagaaaagaaagttgcctaccctaacgccagcggtcggtacttcccagtacacaccatagtcatagccacaagaatcatatattatggtcaagaatacaactctccccgcagtccagcacccttctccgcatctctcctccgagaattcttcccaccttcggcctcctcccttttctcttccaacttcgcaatctcctcctcgatttctttctccgtttcctccctgagccctaatagatccggcggaatcacagacatctgcacgctcggcgccgcctgcaaatacctcagctgctccgtgatcgtctgcacaattgtcgccaagtaagcgcgcgagttcttgttttcgagcttgcgcatctccgacagcggcggaaacagcgagaagtccgggccgaaatggttccgaaatgcaacattggacggaataacggggttgattttgtcttgggcgtcgattagtatggaggtttcgtgcgcccaggctcgtgagacgttgcgcggggtgtagccgccgccgccgacgacgagcataggtagtccgaatgtctttgtgtacgcgacgcaggcgccgtgtgcggccacattcaagttgaagcagccaagtctgtcgcagcccaacgagtcggcgccgcactggaggacaatagcggccggtcggaacttgctgacacaggcacctacaacgtccttgaagagctggacataagattcgtcgtcgatgccgtcgtggaggggtacattgactgcgtgatgagcgcctgggttgagcgggtgtgttggccctgtactatctaagggccctgtgcccgggaaaaagttctccttgtcatatttatgaaacgaaactgtgaggacgcggtcggtagaccagaaggcttgctcaacaccgtcgccgtgatggacgtcaatatcgatgtacataacgcgcgggtgtatgcggaggagctgcaggatcgcaagcacaatatcatttacgtagcagaagccgctggcctcggcctttttggcgtgatgcagcccgccagaccagttgattgcgatatctgcctgattgttgcagagcttgcgggcggcgtcgagcgaggctcccgcgtacagcgagcagtattggaataggccgtcgaagatggggcaatcgtcgccaaaattgaagcggacgatgttttcgctgaaatccttggacgcttgcgcgtcattcatgtcacctggcaccactgtctgcaaaaagtccaggtaatcggatgtgtggaagtcgctgagctcttcaacagttgcggcacgacagtggtataggtccatcgcatgatgcatgccgtaggcgagcacaagttgtttggtgagtgtgaggcgccatggcttcattgggtgcgactggccgaagtgatgcagttctaccgcagggtttgcgtgccatgatacccggtagcccgatggccgcgcgatgatgccttcatgttgatgctgggcggatttgcggtcgaccgagagcgtgggagtggggttgtactcttgtacaatggcggaacggggcatgagagtggaatggcagaaacaagctcagcagcttgggaagggatttagaggtggagagaagcggattcgatggtccagaagacgggaaaagtgaagaatgaagctgaagcgatccccaaatcacaagctcaaaggcgggtctccacgcttaactaagcatccgatctcgcccctcggttctacgaatccatctataaagtggcaattggagacatgactctattacaaacgcaattccgccgcatttttctttagaggaggttttattgagacggggagcatacagcattcacaaaatgaacaccgctgcctccaaactccgccaggccctccaggaccctaacgccttcatcaccgccccaggtgtctacgatggtctctcggcccggatagccctcaatgttggatttgacgctctctatatggtatgcggtttcttcgccattgatgcttttttcgactacctggctgatactcccattgagtagaccggcgccggtaccgccgcctccgtgcacggccaagcagatttgggaatttgcacactcaacgatatgcgagctaatgccgagatgatcagcaacctttccccatcaactcctgttatctcagatgccgataccggctatggcggtccgattatggtcgctcgtactacag

SEQ ID NO: 186 - DNA, 3179 bp, Emericella nidulans
gctatgttcacgaaccgtactttccactccaaagagtcttttatctaccggttccttttaaacataggacaaatattgagttcagagttaagccagtccaggccaatctagatagtcagtcaaccattagaccccaggtcctgcagccagattctgctgatgagtttgggttgcttaccataaatagcccgctctttcatgtttcttgccactataacctcatcacctacacggaccatcttcaagtctgactgcccctccaggaacgcgtaccgcccaaagacagggctgtacttggcgccagtatccactctgcgatccgccataagtttcttcagcactttcccggactcgccggtccccatcttgcccgtctcatagtccacatccagactacgacaccgtacacagttcgccgtcagcagcaggcgcacttgagcatcgccgatcaccagttccgcccaaaaatcctcttcaaatgccgtttttgctccggacaccacaatgtttgcacggaacttcctcatgtccatctcttcgccttccaatcggtcagtgacgttcgccaccgatgtctcggaaacaaccatgtatggcgctgtatctgcgaacgtgatgcgttcgtctttcgtagactgtcttttcaagaccaaaaaggctggcaaaagtgcggccacagcgaccatcacgccgactctatcccgccgcccaagaaaaccagcagctacaaaagcaaatccagggggagacggcgtcaaaaccgtaagtgcaatgtagaggaccccaataacggcaagcagcgccgcaacgtaacctaaattcataccctgcctctgatccttgtgcgcgacgtgcttccccggggcaaaggtccccagcacagccctcccgttgccatcgcctaaatatgcaagcacgacatcgtagccgaaacgctcgctaaaccactcattatacttgggacccatattataccctttcgttggagagcggtgcatcacgaccgccagttgctcgagacccctcgtgtcgggattgagggggatatgcagcgcctcttcctcttttccatagccagttccattcacctgccctgccgattcagagtccgaaggatgatacgtaacccttattctcgcattgtcaccgctccctggctcgagcaactccgtctggaatagcgacatctccgggaaatgcgggatgtgcatattctttagcgttttttcgcccttcgcatcttcggattccgacgggatgactttgaggagcatgaagcggcggtcatattcgaagccggtccgggttacctgcgctgatgaaagagggactccacgcagagattttatagggtagacatatatctgtatcgcatttgtttctacttttagtgaagttgatgaattgagaggggggcattgaggatacggttgtaaatgttgggttgagtggttggttgagagtctccgtacgtacctggctaaccttcatcttggtggatgatagggatatatattgtgagaaggggtgttgttgcagtgctgaagtgagtggatgattccagagtagggaagactagaacaagggactgataaggagatcctgcataccagtgctgttcaaggctgcgggatcgcttactcgaaaaagatactcgatgcgactgcggagggatctggagcagtcgggagttggagtctagcctgctttgacgtgcgttgtttccaaggtaggaatctggtcttggcatgggttgcttgtaggataattggatgtaaaatactccgttgggattgactatcgtgttgaacataatacatacatgattatcctactccttcgcccacggaagattaaaggtaccggcccaatcctccacctcctgtcgcagctgcacaatctccgagatttcctcaccgttgcctacatactccaaaaacgccttgaccgtgttagggttcttgacacccttggaagctgcgctctcctttgccgatttgtctagcttctgcgtaatggtgaccgcgcggtcgacgatatcagcgacccggcggaagtcctccggttggaaaccgcgagtggtcatcgccggcgtaccgagacgcagaccaccgggtttcagcgccgaccggtctccggggacagtgttcttattgctggccacgccacagagctctagcacgcgctcaacgcgcgctccatcaacaccacggttcttgagatcaaccaagacgaggtggttgtccgtgccgccggaaacgatgttgtagcccaggccaccactgctggtcgaaccaccgaggcgttcggctagagacttggcgttggccagaacggtctcctggtaggtcttgaattcagtcgactgcgcctgctggagtgccacagccagcgcggtgattgtgtggttatgagggccgccttggtggccggggaagacggacgcattgatgggaccttccagatcgtacatctcctggttgcctttcttgtccgtcctgcggatgcccttacggtagaagatcatggctcctcgggggccacggagtgacttgtgcgttgtcgttgtcacaacatcggagtgtgcgaagggagaggggatgacgccggccgcgaccaggccagagatgtgcgccatgtcactcatgaggtaagcgcccgcgttgtcggcgatctggcgcatgcgagggtaatctataagacggctgtaggccgatgtaccggcgatgatgagcttgggacggtaaaggagggcctgcttctccaggctctcataatcgatgagacccgtagactcatccaggcggtaggggagggtctcgaagtatttggaaataaaagagatcttcttcgtcggggtctggtatccatgagaaaggtggccgccatgcggcagatccaagcccatcagacggtcgtgtgtgttgaggagagcggagatggcgtatagattcgcgggggacccggagagcgctgcatcgtcagcggagaccgtcaataatagtaaaaggaggcttacgctgaacgttgacaccccattcctctggactaagtcggaacgtctctagggcgcgctgctgacagaggcgctcgggctcatctatgtgctcgttgcctccgtagtatctggcttcgggataagccctcgagttttatcttcacgagtcagcaccgataac

SEQ ID NO: 187 - DNA, 982 bp, Emericella nidulans
cttagtaggctatgttggtgtagttgatgtagtttcctcctgccctttatcctctgagcatattctacaatattggttatgagcctgggctgctatgtctagcctaaccagcaggcttagtaccttgggggattatataaagcctaattactttgcccaatccagcaggagattgaaactgtacgcgatgtgttgatccttgatcttgtgaaggtggccaggcctgtacaacctgcctatctctccctgattgagctattaaaccttgaacctagaactgaacacgacagatgctaccagctcgaagacaagaacaagacccatagactgggagatatatattaagctgagagagtattaaagacctagcaggaccaagttagaacatacccagggcatttgatgaactggtagagacaattaatcagaccaagacagtgccaggggcgagtgagacagttgagagaactgagccggacgagagaatctgaagtactaggggcattgagatagatcctagcaagcagctgcaagcagaattggcagctgaggaccctgattagcagctacaaggagaacaagtatctgggatactaggtatagaagaattgatatccaggatgtcaggagaatttgagattcctgcctaccaggcagtgacactacagaagattattatatttaatattaaaaagctagactagatgaatataagtagttggaaagcccaatataagatcttcctggagatacaaggttgctggagtgtggtagaatatatatataagtggcatggaaatgtgacaagggtcagaaagctgttagaggacctaggatagagagtattagatgtaacagctaagttatatatcctccagaatataaaggtagaagataaggcttccatacagagtttaaaaacgtccagagatatgtgggccttcttaatagagaaatataagcaaagaactcaggttaatat

SEQ ID NO: 188 - DNA, 2024 bp, Emericella nidulans
gtacgtcttgatcagggggttgcctacgcagatgaagccaggtaaactcagccgatggacagtcgaaaatagtacagtatgagataaattgcgtaccgcattccaattacttgctccgtgcatacccaaggccaggaacaggcacaaagagccgctcagccgtcctgaggttgcacccagcgcgaaatgaggctatccactctgatgaacggtgggacctggctgagctgaaacatcgctagttcagtaggattttcagttttggccccttggatactaaacggtactaacgccacaaggttagaaccccgaagttctcaccttgctcgcgtgtttttcacatcgagcgccgactgcaacgccggcacagcgcagccggctaagctttagctagtcaaggcttgtggccaggccttctcagcataccttgtaagcactagaccaagtcatcatcgtcctcgggcatatacagcgtaggacaccatcatgaggggggcttcggacggcccccaacatggtctccacctgttggttagaactagccctcccgcaacatccgcggcgaatccatatagatcgatccactcggtaggccttcagcatcagggaagccggagaagcccggtccaaaatgtagattagccgcttgaacgcattgcggcactaggcgacaggaacagcgctttatccacatcggcattgtccaacaggggagtttttctccgaagaagggctgccctgcgccatcgtgtgccgtggagacttcaaataataagtccttgtttctgtcgaccagggctttgcgtcggcttgatgaaagctttctgtcccgttcgctgttgtctgacgttcctcaatctcgtctgttcttcgacaaccagagaatcttgttgcttcactccatctttatttactcaaataacggcgcacggggaagtaggaaactgccatggttagggtacgctgagaggacgtgaatgcatgtttgacctttgtcgagtgcagcgatgaaacctgtgcatttgctcagagccgcgggcctgggtgccaggattctagcactcatctccctcctcgcattcatatccccatgggccgtgggccagggagttggagagcccggcggaacgtgctcggactccgtcccatgttaccagggctgctgcagtaaggactactcgtgcggctttacgcctgaacactgtggtactggctgcataagcaactgcaacgcaacggcagagtgcgggcagtacgcacttccggggcaatctgactgcccggtcaatgtctgttgcaggtaggctctgtgcccccagtgaaacatacgcagacccagaagctatgctaacggccagacagcgagtttggatactgcggtgtcacctcggacttttgcggcgatggctgtcaaaagaactccaacggcgttggatgtggccagccagagtaggttgacctcatctcctcctgggagttgaatgctgacgaagatgtagccgtccgtcatgctccgcaaatacagacgccatgtccttcaagcggcgcattgggtattatgagctgttcaactactacaagggttgcaacgtgatcgagcccgagagtctcatcatcgagcctttcacacacatcaatctggcgtttgtcaactttggcgacgactacacgttgattgacgaatatggcgatatcgtcgaccgcgtctcgttcctcaagttctccaaccctggtctgcgcgtgaatatcgctgttggaggatgggcatttagtgacgccccgacgcagcacctgtggacgcaaagtaagtggccatccgcctgccattggtgcatcttttgaagatatattgatttcgccgtatagtggctcgctcgcacgagaaccgacagacattcatcaactctgtagtaaagtacctccaggactaccacctcgatggtatcgatatcgactgggagtatccatctgcatcagaccgcggcggacgaccgcaagacagcgccaactttgtgacactgctc

SEQ ID NO: 189 - DNA, 5236 bp, Emericella nidulans
aaaagtttgagaaatttgggtgtttctgaccgtgtagcaagctcgcaaatatttcatgcagaccttaaatgggaatcattacgtgaagtgtgttgtgcctaaaagtcacagttcgaaattcgtaggtgtccgcaggggattggcaaagctcttggaagagatgcagaggtcgcaagggcaagcctccatgtccgcagtaggagcagactttggttcagccaggaagcctcgaagaatgacaatccatcctcagtaataagagattatttctacagagatccgtcataatcgctgcgagtccctatagctaagtaccgcaagccaaacccatgcagcacataaaaccctcacagtttcccctgcccagcattggacggaacactactctgcgcaacggtatacgcagatgcagacgcaatgttcttgccctggaaattcactaagaacgccgtgtctgcctgcttgaacgttccagagctcccgaagccattgacctggcaggtgtggcccaggtatgtcgagcagattgcattagtgctggaatctggggaggtgaacagctggccgccgacggtcccttcaataacagtagggatattctggaagacgttgccttctgcaagcacatagccaccagagtcaatttcaaaggcatggccggacgagtcataccagtagttgttgacctgaaaatgttagtgggagggactattcagagcgctgaggtcttaccgcatgcagaagagtgttcccgccgactttagggctgcgaccgctcatgtggtagatatagttccccttcagagtgaccatgtcgttcgaaccagtcaagtaaatgccccagtagtggtagccatcgcaggtggcggagtaggaggtcacgccgttgaagtacgaattggaaacggttactctgttagaggcagatgtccccaggacaagatgttgtcgcccaatgcgtgcagtctgcgtatacggaagttagcctcctccattccttctaggtactctcctaaagactgaccgtgacatggtcgatccaaaccatatccgcattgtcgagggtgattgcatcaccgccccagacatacttagggttcaggtccgtgatagcgatgtttctgtaattgtattagcaatcttttgcataataaagacccaaaagacggtattactggatgatgacattgcttgcgccgctgacaattcgaagacccttgcctttgatcacaccactggatccttcacccacgaggcttttgttggatttgacagtgatacccaacacgccggcgttgtcactgtaacactggtgtcttagcttctgttttcactactacagttaaagcaagcctgactcactaggttacagaaaccgacggagcgttaggctggtagtttgtacaccagtcgttcttgttgatggccacttggcaggccgacgcagtgccccagggggcgcagccagtctctgtcgtagtaccctcggttcccgtgaagtcgaacctgtgtagtgatcagtcctgtggcaccacgacttcattcaccaggcacaccatacgtcttggtcaagacaataacgcgggccgaactgtctcccaggtacgagactagctctgcagtagtgcttggataaaccggcgtcgcactcccacctccagtcacgccctttgcgaagccctcggctgatcctgtcaccccggcggcgctggtgctggcagccgcagccaaaagagacagaatgggtgcgtgaagcctcatctcgagtaaacgtccagtttctactcgattatgatggtggatttgtttcgtgggttacagacacaacaacgtcttataagcgttttcaaaccgccgcctcatccgcatctaataagggtaaatgcccgcttttgtccttccggtggcgtcccggcgttattgcaaagtgacagtgcatatattaggcgacgaagcgattggtggaacggaataatacctgcttacttttgtgtatacccaccggagaatgcctagaaaaatgcctgaagaatgcgtcttatctgcctggataggtggagcactgcctaaggagaatccggggaaattctgcagacaaacgacggtgcacatgcgcacgagatgacctatcctagggattctgaaagcaacctctactaccggaaatgcttgtccgtagtctgcagcgataatatatgcgtttgtccggcaggtagttatcaagactggatacataggacagaccccaggagctacctcgtcctggacaccctggaaatatattccgtatagaattgcacgtgatggtatggacggcctggctattctgctttgagcaggctctgctaaactgtgccctagctcaaattccaatcttgtagagcatgcataatgactggatggagaacaccacaccgcaattttggttgattcccaagggccaaggcgggcaggttagtgctctgcccaagaagcctggaaggtcttgtcctattgcgccacccgctgcccacgagagcttcgtaagacattagtcctagggctagcacgtgcagcccagcgggctagattctctgcagaccaaattctaagtttttgacaagagtttcgcacctgaaaactggcacttttatccgcgctgaaagattcatatacgggataactttccctttatactcccaatacactcgtatccaaaagctagtttacaggagattacgaacaaaaattaggtttatatttggttcgatatatgcatctctatctgcgacgcttcataaagactggacatacacggctttttgctatacccagtatgggattctccaatgctgctcatccaactaggacggtggtagtatgtatatcatgcgagtcggcgaagcgtaaatactgtagccattttcacaaccagcagttggtacgtcaaaaccctatgttgcttggtgaggtcatgacaggccaactttggtgttatcggcggttgaaccagactttggcaacccattcttgacgtgcaaatacccgatattaccagatatcactagacatcaatttatattccagggagagcttgacaacgagctactgacccgagagttctcgttcgtatcgcgccttggccgtcttgcgaagctattcataacccagtccgatgccttcaaaggtcgaggcataaccatgatgcctgcctaccaacatggatctgaatactccccccttcggcctcgagcatggattggaaagcgccaacattgcgctccgtatgacagcggccgcatttctctgcctcgccctgttcaactcgctcgagctcgtcctgctcgtctgctggaccttccatcagcggcgcggcctctacttttggtccctcctcatctcatcgatcggcatcattccctatgtggttggaaccattctgcataattttgaccttgttcccctcgcagttagtctgccgattggacatgtggggtttatctgcatcgtccccgttcaatcattgatcctatactcgcgtctccaccttgttttttaccatgaaaagatcctccgcatcatgttatttgttatcattactgtttcaattgtccttatcgtccccaactcagtctccatgtacggctccgcgtttacaacgtcgccgtcgtggaactactcatacaacgtcaccgaacggttgcaagtcaccgggttcgctattcaagaattgctactctctctgttctatgtctactccgcagtcctacttcttcggatcagtcctgaagggaagagccgggttaagcgaattatgtatgagctgctctggatcaacacgctcacgatcgtgcttgacattgccgtggtactaatggagtacatatatttgtattcgttgcaggtctgtctaaaggtgtttgtatatagtgtgaaagtcaagctggagcttgcggtcctggggaggttggtggcgctcacgaatacaacacaggaaaagcggagaaacactgtcaggagggcctcgtttataggtccaacttatgacttgagtgatttcacaaatacgaatgacgctccgatcgggacagatacagatcgggggccagttgcagtgggtatcgaagaggtcgagcgaccgagcactggtagtattaccgagccaacgccgggaaatgcggataggagaagcgccaacgcactggcccagcgcatacattgggattcgcatgtctgaatatacggttcctgctcgtgcatctattcgctgtgtcgtactctgtgccatactcgcgagattgaagcgtctccctcatttgcaatgattccgccaatgctatgcttatcctgaatcatatcactctcttaatgactattataccgccaaagatctgcacaggccaattcgaatcaggaccgagaaaagctttctcgctgtattcttccagcgtatgaagatgtgattgggcagcagccccgaagggcagggcccagtataggaaccagatagttccagaaaggcaggaagtccagagcgcggccagtatacacgtgatcgatccctataggccagtacgtgtgcggattagaaaatggttcttcgctggcctttaagtggtgaaaagacataccagtagactagctggacaagcgaaagcatagcaaatatgcttcaatcatcatctatcaaggatttgtgccaggctaaacagcacgacgaggagtgggttgactattgccaccaacagagaaatgactcatggtcctctgggccatcgttcttttgaacgtcgtattgcaattcagccccgtaactcatacgagcgttgagattatggcgagtattgacatgccgctgtggacttcccccatagaggagcataccactgtgcgagggcaactttttttctattgactcctgagcataccgatgtgacagggttcatctctacaaaggggttagggtcacagactatagggtacgcttacccaaatgccaagtgacagtccttgagacccaccgtaattctatagaggcacacacttggtgatgacacgttagatacgcgtcgttcactcgacaaacaagtagtctgcaggtggcaacctgacggcttgctattatccgtttgcaatcaggcttacgagctcggtatcaaacctagcacgaggaaagaacggaatcacaagcgtcaaggggaagtatatggcccactcgactctgccgatccaatttaagactggtcccggagttcca

SEQ ID NO: 190 - DNA, 1249 bp, Emericella nidulans
gctgctctctgttccacacccttatctgcccctagggaggacagacttgctactactgcttagagggagctctggcctgtactaggggatacaattatataactgtactacaggtatatagaggaaggctgctttctactgagcctgaagtcagcaaaggtaataatattaccaaaaccaggaaagagggactatacccaacttaatacctggcagccaattagcctcctctctatcctaggtaaaggcctagagtgcctcctagtatagcagatagctgtaagagcaatttaggcagatatgctagccccctgctactttagggccctgccaggatactctgctattaacctggtctaggttcttatttacagggtagagaaggccttttaacagggaaaagatgctttactactcctactagatataaaaggggtatttaatactgtaatatactaacagctcctttcttacttatacctgcaagaatagtataaaggcttactctagctacttaaggactggcttactagctgctctgtatctgttcatattaaagaaggcactgctatagtactaattaaaggcagactcctctagagatcttctctatccctaatactcttcctactatatatagcaagaataatctctatcttagagggctccttctgctatgcagataatataggtatattattaactaggaataccctagaagagagcttacaataactagtagaggcctataagtaaattactactctagggacagagacaggcctccctttcttaataaagaaaatagagatataatacttctctagaaagctgtagcagtatctccctatagttaccctacctagtataagggagattataccatccctatatatattttggttaggagttcttctagatacaaagcttacttttaaagcctatattaatttagtctttagctataggaaataacttgcctagtacctaaagagacttagtaatacctagcatggctgcccagtggcctctatataggcagtagttatatagtatattcttttaacagctctgtacagggcagaagtcttctatacaggcaaataataaaaagaggtagttaacttcctactttctctcttctgcatagcagccctggctattatcccagcctacaagactaccctctactatagtactcctctacaaagcagaccctactagatctagaagctctacttaacaagaa

SEQ ID NO: 191 - DNA, 2558 bp, Emericella nidulans
ggactttgtttctagcattgacggaggccttgacaggaagcaggatgttattgcttagtgtttctatctggatatgcctagcattaatattggagctgcaatatcatagacagactgcctgtcttcacttcgcctcttcagaactctacgagtagtcttcatagtggccagaataaatcgcaagtgtccaactataaccgtaagcactgaatcatagaatctctcaactgaattcaactattgcaatactctcaagcacccaggcagaccaaactggcactgcatctgggcaagaggcatcacctagaactttcgtgtttgttccctgcacatgcaagctgcaccagtgcaaagagtagtctttaaaaggctagcgagggctgaaatcctgcaccaagcggtttatattgtgtagaagtggagccgctgtgatcaggtcggctttgccctagccgactggccaccgaaggaagccatctggacaaggtggaaaggctcacgccctgctgagaaccggcaaatcccactcgaatttgcggtgtataaggtgagtctacccaatagtaggccaacgaagacgcccagacggccagcgaagcgagtctagaaccggtctcaaggatcgtggaggctcgggacaaggcccgacgcatcggagggccctcgggaccgagtgcgcctttcaaggatcatccaaagacacaaaagaggacagcagaacccttccaatcagagaatagcaggcttgctctctggaaggcgccagatgcatggacggacaccccactgcgctactccaacaaccgatgcatcccatcatccatcgtcttgtgactcacccgaatgcgcagtctgatcaacctatttgaaagccttccacagtctgagctgctcagttaaggcgacaaacaagccagtaccgaccgcgagtaccagaaataagggctaatggacaccaaaggggctcagctgcagactacctcgggctatgaactcgccgaatcttccagagccgtcaatcgtgaacggccggttgaatacccctccactgagtccagtaccccattagttgagtctaacgatgcagatgattttccagacggtggcatccgctcatggctcgttgtgctgggctcgttcttcctcctcatggcgtcgtacggactcatgaactccgtcggcgtcatccagtcttacctcgaaacccaccaactgtcgcactactccagccgcgatgtcggttggatctccggcgttttcgtcttcacatctctcattttgggcatctttgttggccccctctttgacgcatacgggccgaaggaactcgtcgctgtggggacgggtatctatagtcttggagtgcttctgacagcgcaatgtacgcaatattggcacttcattctttgcttcggcgtaatagccggtattggagccgcagtgatcagtaatgttggcatgtcctgcatcccgcactggttctatgcgaaagcaggcatggcgattgggacggccatggcgggcgcgggcttggggggcgttgtcttcccgtatatcctgcgggagacgtggactagtatcggcttcaaatggggaatgagagtcactgcgcttctggttctcctcctctgtggttcggccactttcctcgtcaagagccggctgccccgaaacggacggccaaaggccgcgtttgatatccgctgcttcaaggacgcgaggttctcgtggctttctgctgctaccttctgtacgtattctgctaggtttagagaggcccagacgcgaactttttttctgactgtcttccacttaggcttggaactggtcgtcttcggcctgctcggtatcctgcccagttacgttgtcgcgcaagggttcagcgccgcatcgagcgtcaacctcctcgtggtgatgaatgtgtaaggcttcgaccacgcagccctcgaacgagattaaactaacatagacagctgcaattcgatcggccgcctggtgagcggccgcgttgcagacaagtacggccggctcaatgtgctcatcctcctagtcgccatggctgtgatcctcatcttcgccattctctacccgttcagtaactctctgcccgcgctttacatattctgcgcgacatatggcttcgtatcgggctcgtttatctgccttgcccctgtctgcgtccgccagatctcgccagctaaggagacggggatgcggtttgggacactgtatgggttggttgcgtttgcgtgagtgccgccgacatatcatccagagttgtcgtatcgaggactatgctaacagtggcaggacattgatctgtatccctattggcggggaaatgttggagaaaattggggcacatatggttgttgtctatctcggcgttatgctcgttgttgccatattgttttttgtgattgcccgatgggcttgtctcgactacaaatggaactggtggagtaagatttgacctgcagctggttatttgggtcaaaaaataaaaaagggtgaagaagccaagaaaatgataaaggatgcctgccggcctgaggggt

SEQ ID NO: 192 - DNA, 7286 bp, Emericella nidulans
ccttgaatatccttgcctggttcgcagagaaccaagcattagcgacggacttccattcttggatgacggtgaaacagcaggcagcaccggattgggtggattggtttgatgtgaagggtgttattcttgacggcttccgagggcacatcgcgcaacccggtgatagcaaaggtgacggtaatgctgagatcttaatcgtcgacatcggcggcggagaaggtgcctacctgcatgcattcaaccataagttccccgatatacctggccgtcggatcctccaggatctaccgcatgtacttgacactgttaccgatataccggagaagacagaactcatggcgcatgatttcttcacagcccagcctgtcaaaggtacggcttgactatcgtgtttccccttaactttactgcaataacgtggctgataacccgaaaaggagcgagaacatactacctccactggatcctgcacgactggtccgactcacaggcctgccaaatcttgtccaacatcgctgcagccatggagcctggctactcggtacttatcataaacgagacgattattcccgacgagggttgtgattccctggctgctgccattagcgcaatgatgatgcttcaggttggggcggcggagagaacagagaggcagtggagggaactactggcaacggtcggtctgactgatgtgcgctgttaccaatcgcctgctgggggtgccggggagggtattattgtcgttaggaagtaaggacgtcttagtgggtaatggagactaagatgtgggcaatggctttagggtagctatcatatggccgagctctgtgccctggaccaagactagctaagatgcttgagctgtgatctagaagaaggttaggccaatctatgccgtgtctcgcagcaaactgacactttattatggccctgttcatgagttcctcagaaatggcgggagcaatgaacataccctgtatcatgaatagcttcctcgtgtaacaattgcggcctcaacagcttatctcgctaagcattactctgcctacatgctacctattgctcagtgacgtaacagacgtaagggaaatttacaggccacaggtcaggtgtctcaagctcgtgatgccagtaccacatggcgggaatagcccaagaaacatattttacgacttatatattcaatttaacttgatattttattcttactttacttaatggaggtatcaggatttattgatcggttactgcatatgtaccaaaggctaagtatctagttgcaaccttcggtgagtattataatccttaaaaccaccgtcataaagcctgtggtcatgcgaaaactcctccatacttcaggcgtggtacgctcaagagggtttcattgggcaggtttcctggacgggaatgcacatttggctcatccagcgaggattcctgggccttacgagttgtgagctcacgcggcagtgccttcaagggtatttatggtgcgattgcagcaaggtatgaggtggggagctccttctctcaccatagcaatagacgctacctcgtgtgtaagctatagatacggttggcagccggcacctcatccagcgcccgtcactgtacacaaatgctacaagatgagatcagtctacaggttacaaatttgattgtttgacattaaccttcgatgtagacgtccacccggccatcatctgctcgcttgggctgagactacgaggctagtgcaggtacctaaaatccaatatccagagcatgaaatcgcatcgaacaagttttggacagtaaattgaaaagaagaaaaaaagcatacttaaggagagtacgcggattcccttaaggtcgaatagatcccatgacagactgcagcgaatggcctattactcttccaaacgcatatgcatcgacaacactctcacaggctgcgcgtaattgcccaaactgtgacaagagagtcttcgcaagcaaagtatacataatttgctttgaacccgcaacagggaatgcgtgctccagctctgccacatgctctgtgcgcaagtggcaaacaagcatttcggcttgtctagcaaattctagccacaagttagcgtgctccattagaaacaaaatacatgatatagagaaaaaggaataaagcagaccgtcggcgcgacgtgctagaaagtctatgtagacatcatggacgatttcctttgctcgtgtcagctcaggcatcgtgtccggcgcgatgagatgaagttcagatagggtgacacgctctatctcggctgcatgattcagaagttgatatagttagatagctgattctttaatatacagatggaacacgaacttaccctggatatcttcacagcgaaagaagtcgcccagcgtggcagccccctcatcctctgctctgggtccaatcaggcccgcaaagtgcacagctagaggaaacttccattttcggtcaataagccgcattatatcaccaagagcagcgaagcggtttcgtatttcgtcgccggatagagacgcacacataaattgctcacggaaacggactacctccctcgcccaacgaggtccatcgtccgcacggatttgaatatcggggaaaagaggctgtaagcgatatagcagcctatcctgaaacagcgaactagcgctaatacactggtgtttgcctgcaattctcagcgagccctgcgaaaggtactcgccaaaataccacgtatgcccgttccggagctttcggaaatctcttaagttcttgccagggggctcggagacatcaaatccacagaacgcgtctatgaggtcaaggtcacgtaggaatgttccccgcggaaatctagtagtgtccacgacatagagcctgatgtcgtgtagggcagacccatccttcgtgctctggtgccggtagtagataaactgcagcgcaaacagcagggagctcgtccatgagacaaaattatcgtgaaagtcatccttgggccaccatctcagatgtcggttaagcgtacatgcgactacctttcgattctcgggattgaggttcgcgaatatgtccttacggctggagtatgtctttagggtggctgctttagagcgcacccattctgcgtctgtttggccgtccgatttaggggagacaatgcgaaaaaggtaccgcggaatgttatcgagggcatgctgggcaaggttactgtctggtgaaggattgaaaagtaactgctcaggatgttgtgatggtgagctgtccaggtgagtggattccagaacttgagttagcgcgtccatatgagtgtccaagtagtcaacacgaagtattgatagttttgaaaaatatatgcagcttgatgaaacggaaatgtcagcaggggaatttgtgcaatgcaaggacttatataccgtgcgaggctgaaagacagcggcgctgcacagaatgctgtagaaagatcatatatgttccgaatcatcgtattgctatattgacccagaaaacaaccagtagaatgtaaatgaccaacattgttggcaatacagcctagtcttgcggcacagactttgctctgctccgagacgccgtctagagccttgcgccacagcgacgtctggtgaagatgtcatcaatcacagttcagcctcgtgattctagcaccacaccacgcagcttggctaccgtatgggcgtaatcaattgcctcgccacctttaacccagcggcaagtgaaactacaagatgacaaagtgcatctcctcgatgtactgttagaggaagagtctattggccagtagcctaccaccgagcaagacagcgttattactcctgggtcagcattaagctgggggccaaaggactgcttgatagtgaagtaatagttggacaatcctttgaagcgactctggacgaaacctctgtagagcttccaggcatcgacttgtttatgctggagtatggacggtacgtaatgcaggacccatgcatttggggctttcgatagaaaatatgctcagcttaagaaggaaatatatcaagcacattttatgagcataaatcatgacaggagttcctgcccacctgcgtcaatcccttagtccttgggctctaccaggacgtattctaagaatgagctctaactgtaaggagtgaatgatctaaccagagagagtgcttacgccgccggaaactgatttaggaaggtaagctgtcaatattacagagtatgccatattgatcaatgcttaatgcaataacacggtcaagtccgcagggtgggagatcgcggcctcaaccctaactcgggttcccagattgatatggtgcaggatccttttactctcccgtcgacccggtaagaacgttatgtctaatattgcatctataagctctttatccttgttatcaataagtaaatcttgcgcttgggaaattatctctcgcatcccttcacaagttgtacggtcatctatcaatcattcgggatagaagctatgtttctcttagtgaattgtcccggattctttattagaagattggatctgaaagcatttaactgtttcgcatttccataaactaaaacccatcttccagcactgtaaacgtaggtcctccgcaatcgtaagtctgctcggtaaagctccgacccattaccaacccacactgttatcgcaggccagttcaatctttagagactatcgccgtggttatccttgacaacgtgcaatggcccattcccatcatcaacaggacagtgactggcatcgtcgctgtcaaactccaccacacaagttgcatccatgccaatcgagattccgatccacgtagtatccgtctgtgccgtagcttcacccagggtgtttccgtccgcatcacgaacatcgcaggtttcagggtgcccaccaaagtcactttcgcagtggaactgtcggccggagttccagcagtcgccctcaatttgatagatgcggccaccacctgtattcgcgcagggtgtcttgccgttaggtgtctcggtattgtagattgcttcaccattctcgcgaacaatggcaaagccgtcgtattttccactgttgtcaccaatggtggagaaggagccggacgaccaaacggccctgaggcgctcggcgctggcggcgctggccaaaagggtgaggttaaaaacgatggctcggagcgacggcatattgttagcttcaaggcgtgtttgcttaacgaaggctgatggatttaaggccaatgatgactagaaagaatgatggaggtgcttctaggtgtgtcgaggcttttatacctttgaaagaccttgtctctttattgggatcagcatccgccctgctaatagtcaacaggattctgccaattgctcgccatggtggttcaatctggtcatgcgcaaatgagggaattggagttgggggcccacaatggtctcggcattaggtctccaaatcactatccctcacttgacttcctccgtagcggtctagagtagcgatcaaaattaggcctcccaacacaagagctcgagattagttctcagggtttgcgggactttgaaggccaggagcagactggtgcctccgggccttggaaggcgccagtaggccaaggcgatgtggtaatcgtccaatcgtgtcatgctatactagcggttgcagaccgctaaggaagtgtcgatcgtcagcactcacaaacgtcaggcggcagcagcgccactaagccttgcggcgctagcggccccggaccgcccacgcactgggtctcggcccactataccatcatctcgagactgttatggttgaccccataacatgcgccacagagcatatgcggctgcggtcacgtggctcctacccctctatcttctgtttgctcctccaaacctgttctcttcttcagctattccttcttgtatatgaggcatgattagataggaagacccatctatgttcgtcccctgatagagacggggtaaaagggtgtggcaggatcctgacagttgacagcaaccagaataatgctgcctacatgattaggctacgcaatgactgtgctgcaaccaaaggtgtctcctgcaacgcctttctctatcaaggtagttccaggagtaatcctcgatgttagaatgccgcttttcgttgactcttccggggcgttggatggattccgtagcagcttcctatgctttacaataagtcaatatttggatttaaacgcgaagatatttaccatgggtttcaatacagtatgatgacggttccatagttatatctgcacaaatgttatctgagtttatattaacatttaaatattagctttaggcataccttccagcgcgataccggaattgacaacaaaggctgtaaggtgtgcggtccgacgtttgaaacagcatattggcgtcgctgaaacatacccaccttttgtttctgttttttcttttctagaaaaaaagttcattggtgatgactgcagtgttttcttatggaaagcgagcctcatgctcccgtatcactctgagtatggaggacggtttttccccgccgtacctggacccggcaacataggccatagacccaaaaagaattgcacaaaatccttctgacaagtgatgaccaagcggaatatgccgttggcattcacgagaacggtggggcagtggctaggctcgtagatggaaaattacggtcaacaagtccaatgagctggtaacaccagttatagtggtgaccgcacgcattgaattcaagtgtcgggttcttccctgtcgagggaccgggaaggaaggacatctaacactgggttgtcaggtcaatggttccgcctacagttggtagcggacaatgttcatgtgtccggaggggatccggctaaggtaacgatctgtacggttggctggggcgtagtccgtcttcgaccaaatgactctatattatggcaacgggacatacactgaaaggcgctatcgaggggcgagcatgaactcgaagacatcttccagcggacgcgttaaatggcccgaaggctcaagtgctttatgcacgatatgaatttccatgcccttcaaagcattacagtcaatcggtctccaggtcgttaacagcgcgggatgcacagcggctgcaaatacgcggcgatgcctttgtgaccttgattgtaccgcggctcagcgctgcaagcccgcttctgccgtgctcaataccatttctagcgacaaccgactccctcgtcctgatggcattgtcagaagcaccggatgagcgtagcctaaaagacaagtgcgccaa

SEQ ID NO: 193 - DNA, 2148 bp, Emericella nidulans
ctcctcaagaagtggggggttggcgggtaccttgagtgactgcaacggctgcagaggcaatatcgagttcgacgagactggatagtcggtgctttccacaagcatttcaccatcctaccggctgctaattcccggctcctcaaggcagacggatatgtcgcttgtctcgcggactgtactggacagctgaagccggtcttcagcttcatcgaccccggtgccgggatgttcatctggtcgaagtggtactttgctggcgtgaagcggtttgctgaactctctgcgtctgacaagcttgatcctgaacaggcctttgcaacggagctgtggaattcgtgggccagtgagttatttctgctcacgccggggtcatactatcaccattggcaggggaagaataaagtcacgaggagggaacgaggcgcggagaaaggcacggcgcatttcaggttctcgtttgcgacgccgacagagaagcagattaatgctgaggtggagagggttaaaacggttgttgatcggtactggaactgagctcagtgtgtagttttcaaggaatcaaaaattctcagcactttgcagctccttggtgacttgatcaaaggtgctcggcgtgctcgccaactcagatttattaaagctgcatgcgcatccggaatttgaggtatatgcgggctatgaccgtatgatattaggcagctattgtaacagcgggccagttataggtgcaatcaaggcaaatcaggctacggggtctgatcatagtgacctttttggccgagttggaaatgcttgcctggacacgtctcttacaagtatgactttctatcttaaacttcttgaattcttttgggttgtcttctggacaataggtcctatggtacaatattattgatttatcttgtcctttatcagcgttcaattgcagaccttgtagaatggtatgagaaagagttgatagtgagaccctaactagaagaatggactcatttcacaatgtacatcccagaccttaaccatgctcgctccaatcctctcactcgtcctagccaaaagtccaacgctagtacttgtaccgaaaaaacacattctctcgatccgtcatatccttctccgcattcacacttccagccctctcacactcctcctccgaaaaactatctccgcaacaagcctatctttccgtctattctcccagatgtctgtacatattagcactatcttttatgatagggattgggcaagcccatacaatagaacctgcatgcccccgttgaacagaactctaccacatacaacaccccgcacgccgtgatgccgcgggtatactttggtgcatccgatggaaccatcatctgcgcaccaacggctttgccaacacaataggcgataaagaggaccgttgagatgacagttttcttagtccggccagcaacgttggagggaaggaaggtccatatcactgttttgccaatgtattagaaagaaagagacaaaagagagagaacagaacgtactcaagccaggcaaggtgccaaacacctgcatgatgtacatcccccatcttgtccattgcatgctatctgtcgggagctgggaaagggcgatcacgccaacaaaagctgggacgagggagcccatcatcatgaaaactacacgcataggcagacagctacgctgttagatatgcccgatcctacaacggccgaagggcagactcacatctcagattcggccatttgaatgtgacgcacccaacaatgaggaatcacacaatgctgacggcgtagtacggcgttgagcccttgagcagcgtctcaagagacgagaacccaaaagacttccagatgagtttcgagaatgtcgtgttcgcccattgggcagggcattaacaatcgtcacgaaaaagaaaaagtccgtcaagggatctctaaaggcagaccatacctgctcccatctgaactcggagcgcttctcgcggtctgagcccgtctggttggtcatcacacggacaatggccgcattgttctcttcttcagagagccagcgcacctcgcgaggcgaaccgaggatgaaccagaccatgatcccgcagaagattgtgaggccgccgaggaagaaggagattccttaccactgggtgacgca

SEQ ID NO: 194 - DNA, 2350 bp, Emericella nidulans
gggtgcatactatctatagacaatgcaacaaatgctgttccgctcttttctcgctctgagtataagggtcagatgtgtagaagcgggagtggaatatcatggacccatttcgtcggtttcagtgattcccatcgccgatactccgcgacacgcgactagcaagcagtgggagaggaaagctagagaagaccggaaattatagagggctgctagagatacgtcgaggtacccgaaggccttcatcaatatgttgcttcaagcgattcgagatccagactcacacagaatgacagtgttcacccaggcttgcaaaggtatatatatcgagaggcattgggtaaaccgtacctcatactttgttgatactatagagtacctgcatggtttatttattacgttcatctttgtagacagcagcaatggctttcaagaccgccagctttgtgctttaccttctgggcccgacccttacctttgctcaggaaaagcgcggactcgcttacaacgacggtgctctcgcaaatctcttcagcggacatagtcaagtctcttggggctacaattggggctctgatggcaacggcctcgatactgcactgaatttcacgccaatgctatgggggctagcttcccgcctgagtccagagtggacagcggccgtggaaggagagggtgttgaggccatccttggcttcaatgagcccgacctcgatgcacattcgaacattaccccttctgatgcttcccgccggatacctggtgaatatcaagccgttcgcggggaaagttaggatatcgaccccagcagtgacaaacgggtctcctccaaacatgggaattgggtggatggatcagttcttcgagcactgtacgacgtgcacgatcgacttcgtgacgattcactggtacgcgaacaatgacccacagggtttcaagtcacacgtgcagcaattctacgacaagtacaggctcccaatctggattaccgaattcgcagcaagtggctctgaagaggagcagatctcgttcctgcaggctgttctcccttggctcgactcgcagccctatgtcgagcgatacgcgtatttcggtgttttcccggggtttttggtcaatgagaatggagatggtctttcgcggctgggccaggtgtatgccacgtgcagtagatagttttctgcaaactggttgtcatgtatcctatcatgctgccattgatgccaaagaggcaatgtttatttctatatctatatacaaggtgtgtgtacagggctgagcgtatcgtggagaagtctccgtctgtcattgcatttagtacctgtacacaataaatcaaagggtgctcgagggagagaggtaccagtcaaatgctccatgtaacgggtgtaggcagtattattttcaactggctgtcctgtataaacgagtatcacaagcttagagaaagaaacaaaagatagaagcgcagatatcttcctcctccctttatcaacctttctgacttcccggacctgtatgccgacggatcccttttccaaagttatgaggacggatctcctttcctaagcttcgaggccgcaatttccgaagctgtacactgatgttgcagaaaccttatttagaaccaggttgagggcatggccgacaaccaaaatccaggccatagcctgtgacactccaggtcaacatctgtaatgacggcaccgaagtcgattgcagacccggctggcggtgttagtggcttaacagtgatggctggcattgtgtaaatctttatatatagacagcctatttggaatctgggtccctgttggtgtctatcgcttttatagatacttttgtgtaacagtcggccgggcagtcccgctgcgggatccgccgacgcacgttatcggtacgggatcggtatcggtatcactatcgtgcggcttatctgatcgatttggatcggagaataattagttttatataagaaaaccagttcccagagcgtcatatgctgtatccggcggccctgctaactgtcacagcaaatccaaatatatacaatagcaattatgaacttgttaggtagagaagcttgtaaagaatatgctataatcataggtgattccaatggcctgtacttagaggttatcacttatattattagtgagggcaggcagcagcaagtcagctgctatagaggccccttcgtagtggtagtagacatcgtgcgtgtgtatcgcccttcgagaaaagagaggcggcgtgtcatgtcctatcagatcgtcctccccatcgggtcagacaagataagagtcctcttctagtggccccggcaccactcaaccggcacggtcatgcccgg

SEQ ID NO: 195 - DNA, 4518 bp, Emericella nidulans
  unsure (1)..(4518): unsure at all n locations
ggccgacctgttcctctgttcctccagttgctcattgaaaaccactatattagtcagaacttaactctccagagaaggttagcccttttggccgagtgggaagttcgatacccatatcttgtcacgtgctgtcaacccatgttgctcctaagcgccgacctgtaaacgcctgaagttgctctcccttccctcctttttcatattcattcccggacaggtctttgattcctctggtgcaggttcttcgtcatggtagcaactctaaagagttcgcttttgctcttactgctgatgccaattagcacgcttgtgacggcgagagcggtcccggcagttgcagaacgcagggttctctctgacttgtccagtggcttttgtcgtagctggaagttcggcggtaagctgcccagctcacaggagttccttaagctgagggaataacaactctagccgtaatcgtcaacgatgtcctatatatgaacggcctggatggtgggatcattcctggtgacaacaacgcctcgagtatgagaaccatcggcagtcattttctttcctaacagtgtcagacaattacctggtcgagctggacctctccgcgcgaatcgacctagacgatggggtgaactacaaaatgaccctaattccacccgatgtcccgaaactcaaggaccaagcattatggtcgaacagcgccaataccacgcttttcaactatggcggacgaggcgcaaattctacctcaacagataatggggcctgggctacagcatctctgaagcttcgtggcaggtacaaatgtcaagcgttaaacccgtgcgcctcgttgatggcggtacgccggcatattgtcaattcttcgtttctgtctaagctaactttactaagcatacgtgaatgtccccgaactccaagcagcgtattggcttggtgggtaccagagtcgcgataccacgccttcaatcacggacgatacaaggacctacgcaaatggtatgatccagttcaacactactacagaagtgtataccttgctcgacgccccgttcaccccagtacagcagggcgcgctggtctatcttcccactctgcaccaaggggttttattgtattttggaggcgaaattccgtctgtacaagacggtattgatgcgcagctttctccggtgcgttcacccacgcctggtagtttgaaaactaatgaaatagaactcatgggattacgtttacgtatacgacattgcaaaccaaacgtggtataaccaaacgaccacaggtagagtggcgcctcggactcaattttgtgcctcagtggtccaccaggatggtaccaactcgtggcaaatatatgttattggtggtgcagactttgatagtaaggaagtaatgaccgatgtgtatgcgctccccaacaaaacccacgatggcatcatgctaatcggacaggtcatatttgtctatcccttcgttcaaatggtattcagcagcaggcctgagtaaaggtcgaatgtctcacacatgccagtcgtatggtagacagatcatcggcattggcggtcgcaggcttgggcaaatgacgctgcggctggctgctacgacactcctgctttcttatacgatgcacagtcggaggttgtgcgcaccgtattcgacgtaagctagggctagaaacgtggctgatgcatgctaaatttatgataacagccgtcactgtcaacttattcaattccatccgccacagccgatgatattgcggcgtccccagtacccagttcttatgacaacattacgatgagccttcttttttctcgaccagtaaatctcacaagcactcaagaggtcagggagtcagtaaacaaagaagtcattgcgggaggggtcgtcggtggaatttgcggtgcagccatcgtcgccgggctcatctggttcttcatatggcgccgacaaaaggtcaggaagagcaccctaaagcaattccctggaaagccggggtccgagttgaagctccagggacctggggagctttccgccgaggaggcagctcgagagctcgatgcatactattcgcaacggtctgagttgcaggctgatacgcagatgattcaagagttggaatctacgaccgtaaatagccggagataattaggttgagttagcagtaacgaaccaggcgctgaatggcgcccgtggccccaaaaatatgacaatagacatatgagcaggatgacattatatagttatacatctgatttcgcaacgggctagaaattaaagctgtcatcaacaacacaatttatggaggagacacttcagggtctctaattacaggatactgagatgtagtctgccccgaaattttgtaattaaaccatgggaagcgcgctgttttggggcggaaaagaattctggagcagagttatcaaaaggggggatgatctttgagtattctgttaaagtggctgtcctgatctataaatatctgtcgtgtaaagctatttgaagcctcaacgaaatagcattaaacgagcaattagagtctatcgagctatagcaacatttttgtctcgatcagaacgaggaagcccggtgtagatatcgaactataatagacgattagaaacaaggagaatagagcccaagtaactccgtggggagcggcggtgtcgcaggtgctagatcgtattgaccctctctagcaccctttgagacttgtttatttaggcagcattttacatgtcccggaaagattacaacctttaaatattgtaatatatataaatgatatatcgaatatagacggctatgttattactctgtagtgtaattagcttggtccctacataaatgcgtcgtattattggtcgcatcgtgttctacgggccactagagcctcactatataagatcacaggctagccgctgcgtggttacgataaatatattaaaatattacgtaagggctgcgtccttattggtcaggtcgtgttcaaggcagtgtagtggtcgaataatcattaggttgacgtgagcaacgttatatcttggagagctgcttgactcgaggctgaaattcgacgaaagggcttgagttgattcgcttgatcgtgtttggaacggcgggaggaatcgccgcaatataatatcctgcgtcgagaaatagataaatagaccgagcaccaaaactcatcgagaccaaatgacccagaatatttagagacaggcactatgtctgaaatacactacgactatatcataatcggcggtggccttgccgggtgcacgcttgccggtaggctcgccgaaaagaatcgctccctccaaatcctcatcatcgaggctggtccaaacgtcgccggacacactctgactgagtatccgctcgcatgcttcggtgcgcatttctcgccgcttgactgggcgtataccaccgtccctcaaacccacctcgacaaccgaatgtgctataacagtgcggcaaaagcgctgggcggcggttctgcaatcaactacgggacttggactcgcggaaatgcggcggattatgaccggtgggcggcaatggttgatgatgagagttggggctatgaagcattgctgccttatttcaagagaatggagaattgcctggattgcaagggcactgagaccggtgcacatggggtttccgggccaattcataatgtctctgtgtcgggaggcagtgcggaccgaatctacccactgagagagcctttgagacgcgcgtgggagaggctgggtgtgaaggaggtattagatgcgaatgcgggttcgccacttgggctgggagagctggttgagaattggcgtgaaggccggcggcagattacagctgatgtttttaacatcttagagaggccgggcatcacaaccttgacagagacgatggtgcagaaaatccttatcgaaaaagaccaacagggaaagaaagtcgcaaagggagtgcaggtggttcaaggccctgtattccttgctgatggggaggtcatcgtatctgcaggggcatatcgtaccccacaaatcttgatgctctctgggatcggcccaaaggatgagctcgcgaagctgggtatcgccgccgtcgcggatgcaccaggggttgggcagaacctgcacgatcattttgccttcgtgcagtggtggaggctgcgacacccagaaaaggggttatcaatcgngtacaccattgtgggacagtttagcatacggcatgggactgccctgtgattggattgccacgctacaggctcctcgcaacgagctcgtccaggcccttcatcaggacggagcaaccgatgtagggagccatccatatcttgctcctgatgcttgtcatgtagagacgctcatcgtatatgcacccgcaggggcggccgtctcgcgcatagagatcccgatggacggcacgcatatcgcctcggccgtcctaggtatggcgacgacatcacgaggccggatcactctcgcgtcagcggacgcaacgactgcgccagtattacag

SEQ ID NO: 196 - DNA, 1081 bp, Emericella nidulans
cagggccgctttgtcgcgaacccggggggaccattagcacaacatcgcatcgagcctttcctgagtaacgctgttcgtcagttgtcggatataagatgcagggctccaaagcggccattctgcctcgccgtctgggtcggcatgagagatgatatccgcgatagtaggatgtgcgatctcagcgggtgcattaatgttcatggcagcagacatgacatttccttgtaacctggcagggactggagggctatgcatgcgacgtctcatgtcgacggcctcaccccagaagagaggcttggaggtgtccagtttgtaaactggcgcacggagacgcgtcagtcctgaagaataaacgccgagaaggcgtcatacgttgaaatccagctcccgtctgccgccttcggtgtagcgagcctcttcagctctgcagctttgcttctcggaagatggaacaaaagcgctatcctgggtaactggccttcagtgggttgtggcggagtaggcccgtcgactttatcctcctccgccggagcgggtttcgtgaggcggctgacgtcgaggttcgccgggtcccacaggggaaagggcgtatgatttagtactgcgtacagttctccgccagttgatgcgtcagaccggcccagcccatgacgtcgttcgcgtagtggtggtggtgcatgataaagacaagaccgccccggacgaaattcgccttgtaagcagcgacggcagggctggcgtctggatgggcttcaggtttctccccgtacgtcataggctggacactccagcgcttcaggtcacctagtcgtacggtagagaagtgagtcgcttcgatctcgtcgatagatgggtacgctgggtctttgtcgacccactgcacgacaaacttgaccgtgctgtcctttttcctcgtgaaggagtgcccgccatccgagtctttctctattgttccgcagaggtgccgggcttgggagagtgtcgctcgagaccggctttgagggctctaccgcggtgctgctgagtgactcgtcgaggcgaaaaaagagtgcatacatgttgtaggtgcagcagagaggta

SEQ ID NO: 197 - DNA, 5754 bp, Emericella nidulans
  unsure (1)..(5754): unsure at all n locations
gagtctccttggtgatcttcccgcacaggaacctcagcagtgtcagaacaagattccagcgcaaaccgaccggtcaaagccgcagcctccagcagcttgaagcatgagggttcctcgaagccacccagacatactagaagcggtgcgataaaggaaatggcacttgctaatggactctacaaatctagctttttcaagctacaactggacgaattgattactgagtcaaggccatcttacgataagcagctctccacaatcaaagatactctccatgaactgaaagatttgatcgagagcatgccagaaagatcggcaaaaccggcgttagaagctgagaaggagatgcgtcaattgcatggagttaccgttccgtatcctgaaccgcggcccggaaaggataccaaatacacagttatgtttgctcgacctgcgaatatcaatgttgttggaagcttcgcactacgaacaggtttgaagacaacagcgccatatgttgttgacatgtctgtgacaatgccaagctcaattttccaggaaaaggactataccaattttcggtacttccacaaaagagcgtactacattgcatgcattgctgccggaatcaaagacaaaaagagcactgctctagacataaagtacgaatttcaggatggggatgcacttcgtccaacaattttactacagccagcagccacaaagtctggtcacggacgctcgaagttccagatccgcatcatcacggcagtcgaagacaccttgtttcctatctcgcgtacccttccgatgaaaaataacattcgacgcggcgaggagggagagagcangagtgtgcctactccatttataattcatgcctccgttcagaggccactgttgctctctatcacaaactcttatcgtcagcttctcaaagctgcgaatccttcaaagatgcatgccttctaggccgcgtatggttaaaacagcgcggtttcggctcatcttcgcacaaaggcggtttcggcggctttgagtggtcagtactcatgtcatttctacttgaatcaggaggcccaaatgggaagccagttcttcttccttcctacaacagctaccagttatttaaggcaactatacagtttctcgctggcaaggatctaacggagcctctattgctctctgcgtctgacgtttcgttcgttagcaaagatcccgtcatctacgacggcaaaagagggttgaatgttctgtacaagatgacacaatggtcttacttcttccttcgccgggaagcaggaacaacactccgaatgttaaatgagtctcgagacgacaattttgaaaaagtttttatcctcaacattgatgaaccgttgctcagatttgatcgactcgttacacttccagctatagggaatgatggactcgcattattccacaaggaacgtgagatctacgaagtgcttttgagagcattgggtgatagggtggatctcatatacatctccacttctcctactagcgcttggtcagtggaaatcaaagggcagcggaagtcaatggcgcgcagcttttatgtgggcttggtcttaaattctgagaatgctacgcgtgtcgtagatcatgggccatctgcggaggagaaggaagcagctgcatcatttcgggcattttggggcgaaaaagctgagctaaggcgcttcaaagacggcagtatccgcgagagtttagtatggtctgagaactcctcgtcaattgtgcatcaaattcttctccacatcttgaaacgccattttaattatggtgagggcagtataggctatgtcggagacgaatttgatggacagctcctgaaaaacggcgatggagtaatttcatattcaaactctgcttttcagataatcagcgatgctttcaatagtctggaaaagtccattcagactatggaaggggtccctttgactgtgaggcatctagcaccggctagttcgttgcttcgatacactgcattgcgcgtggatcggaaccatggcgctgttcctgttaacgtcgtgctgcaattcgagagttcggcgagatggccagacgaccttgtagccatccagatgacaaaggttgctttccttgcgaagattggcgatgctctgaccgattttggtgacttctcttcggctcgagtcggtttggagaacgagcaaagcaagatactaaataacgcattcctagatgttactcatgcgtctggaattgtgttccgcctgagaattcatcacgaccgagagcaaacacttcttgaacgccaggtcaaagagcaaggcaagagtcctcaagggaagcaggagatcgcgtatgcactttctgcctacaagcgactctttattcatagccctcgtctctcgcaagccgttagaacattatgcactcgtcttcctcttctatcccctaccatacgtcttctcaaatactggtttagctcccatctcttcgacgcgcacatcaacgaagaactcattgagctgatgtcggtacggacatttactcagccacatccttgggagacaccatcaagtgtaatgactggtttcctcaggacgttgcacttaatttcacgctgggactggcaacaggagccgcttattgttgacctaggtggcgaactggatcaggccacaatcgaattgattcggacacgttttgttgcctggcgaaacatcgacccagcaatgaatagcgtgtctatgttcactgcttccgacgttgaccctgaaggtgtaacgtggacacagtacgaaatgcctccaaaagtggtagctgcacgaatttgcacccttgcaaaggcagtgatgaagctcgtacgggaacagggcaatcgactggatatatcgcagctgttccttcctgcgctcgaaccttacgactttgttattcacttgcacccgaagctgctgcatgaacgctcatcctcatttatcaagttcaagaatctcagcgcagcgggagattccgcgcaacttcaaaagcaagcggctgttagggcatttgtttgtgatttacaggcttgtttcagtcctaatatcctctttttctggggtgctgagcaacccaacatcgttgccgggctctggaacccacagactttgaagaagaactggagcttaggactcacatactcgacaatgcctgaagggatgagtagccctgcttcggactgcagcgtttccatcaatcgtacggccatgattaatgagatatctaggttagggtcggacatggtttctcggatcgaagtccacgaaaagtgaacgacattatgttgttatatgtaggttagtggttgtgattcattgttgtttgaaatgatacctggaagcgccgttgcaatgctatatatcaccaaacaagacattactggagagaagagagaaaggaaggatgaaaactgagggtaaaagaccattaaacagatcaagtcaattcactattcaccctccaacattcaagaatttgttagtagcttctcgttcttctccattgagggctgagtagaaaatgaacagtatttgtccttgatcgccactacctcataggtaccctcgtcagatgtcttgatgatcttatgatgttcgtaagaaatgtcatgttttatgtcaattatttcggccttctttcctttgcgtgcattcgtgcttcggatgtacctagtggtttttgggttagatcagccgattcggggcccaaaaaaaagagggtaggaaaagaaaggtcacatacgtgaactcgaacggtggcgtgccccagaactcaaactctagcttcgcctcaccaccctcatggatgtctacaatagagacttgaccattgctgatcctaacgctcggcatcgggtgaatggttttaacaatatctttgtgggccttgcacttcccgcttgcgccatcgctgacggcagttatcgtgaagacgccgggtttctctgcgatgcgacggaaatggttggtctgggaagaagcccttcgggcgacgccattgaatgtgtaaaacacctcaaacggagaatggcctgataatgagaaggaaagacgctcgccaacacagtagtcagtctttgattcaagcggcacaatcgtaggtacgtccgagacggcaactctgactgatgccgggtctgtgtggtaggttttctcgcaacctcgcgcatctctcactttatggatgctaactacatgctgacctaggtcgagatggcgcctaggaattggaaggttatgccgatttgatttaatatttggaatggacacaatctctggtttcgccttcgcgtagtgtttgattgagatttcgaggaaaaacggtggcacaccttccatagtgagggggataagctcatctccactatcgtcttctctgcaaaaaccatagatgcgacctggagcgtcaaagcgggcggaaggaagtgggttgactttctgggtgaccacgacctggttgcctctcgggtcattgttgtagagattatcaccaacctccttgaatcgataggtatagtcgcccggctctgatgtttccagctccatagaaagagaatgcagtgctgttttgaggctccgtattcgcacggcagtagaacctcgagatccttttctttgttgctcacattggatcgtgtagggtggattgcccgtcaagcgaagctcaagactatcaccttggccctgacaaatatcattcttcgcgactagaccatccggtccgacgggcgtattatctacggcagtgatttgaggtcttggaatccaagatatctcgaaaactttcgctgcgtcatcaacggacccaggacacgagctatccgttactcccaacagctcgtaacgtccttcttggctcacagtcaagaaactattttcatgccagaaggttttcgtggatattgatgcatctgcatccagattcttgtattgtagggtccaagggcgttcaccgctgagtctgatgggtatgtcgactttggagccttgcagcgccgagtattttctgctcttctctacaagaccaaaagaaacgtgagggggcttggatctggcgtcaaccttgaggatttcattaaggtttcgtttgcatttggagcgatctttcacgcttgttaatacgaggttgtacccgccaccactgacgagattatctgtaatgattgtggatctcgcagtttcggattcaagaacgtgtcttgttttcttgccgttatgaacaagctcgtactgcaaggtccagggcgcctctccatgaaaagcgacgtcgacagatataggttcaccaaagcaggccttgcgtacttcgggtgtaccaacgaaatttgcagaggcgggaggtttcacgtcttgttccagtactgccactttgttctccaaaggtcgaggcccgtatacactatcagaaatatccaaaaagcgataccggtagtggccggcttctaatggggtgaaatctgactgcgcgcgtaacccatcaatgatttggtgcttggtttccacacctttagatgtctctatagtgtatcgaagtcggaacggtggtgaacccgtgagatccagatcgacaagcaatccaacagggttgtttgcgcatttgtcgaagattttctcggagcgaactgagatctctggctctggagggttatgcaggtaacaggacgagggctctaaaatctcccctgagcagaactggctagaaacgtacttcaggctataccaccctggctctttgatcata

SEQ ID NO: 198 - DNA, 583 bp, Emericella nidulans
ttgcaggtcgactctagaggatcccccgcccaatagatgcaaggaacggatgtgaccttttggaaagaggcaaggaacggatgtgacctttcggaagggtgcaaggaacggatgtgatgcttcaggatgcatccattcgcccctatataaggaaggacgcccaaggcctttagggcatctcacatcatctcacaatcatccatacaccacaaaacattcttaaaagagtcccaacacatcccgaagttgttggtcggaaagggggtgcggctcggcgagtataactcgaccgaactgatgcgcatgctacctcccggtccaacggtttgatggagtgtagaggatggagagggtagaccgttcgtcttagagacgaatcggatctggtagaccgatcgtcggatcggatcagccagaccgatcgtgggacggatcggatcggccagacggattggatcggacagaccgatcgtcggacgggtcggatgggacaggccgatcgtctgacggaacgggtcgaacagaccgatcgtcggatgggatggatcaagaaaagtgtttgaggaagcacaaggataagtgc

SEQ ID NO: 199 - DNA, 1875 bp, Emericella nidulans
ccattcacttctggttgaggtactgacgatttttcataggaggattcaccggtcttagtctgaacttttcgcccagttcttcgttgcgcgtgaagcttaccgtcacctcaacacccacggccgcataatcctcatgtcctccaacactgctaaagagttcagcgtcccccggcactccgtgtactctggctccaagggcgcaattgagtcctttgtgcgtgtgatggctaaagactgcggcgacaagcagattaccgtcaatgctgtcgcccccgggggaacggtgacggacatgttttacgacgtggcgcagcattatattccaaacggcgaaaaacacagcgcggaagagctgcaaaaaatggcggcaacggtatcgccgttgaagcggaatgggtttccagtggatattgcaaaggttgtcggttttctggcgagtagagaagcggagtgggtgaacggaaagatcattaccgtcgacggaggcgctgcttagttctgctagatttagtagctaagtcgtagccagaacaataaaatggcacattgcgttgatgatctaggctgcattgaaatgggttccactcaaatataggtaccggacaccgaaggtcggggaccaagtaaaacccgccttcatacggtacttagcaagtcaccgacctgaagtacccttgcatggtcttcccgtcctagacactgtcttgtgagttgggatcgacttaaaatattgcttttgagtctaccttttctccgtttgtcccatcttgtagagaaacagggacggcacaatgacgctgcagccaacatttgaaggtaggacccctgaacagtgtttgaatgtgcatactgatagccatccagacattacgggctgtcaagctgccctgttcgaatgggcagagagctacgacagcaaagactgggatcgcttaaaacaatgcatcgcccctttccttcgcgtcagcttcccagtctcgtcctatataatcagtgctgacggtaccagatcgattacagagccttcttggacaagctctgggagaagatgccggccgaagaattcgtggctatggtctctcatccccacttcttgggtaacccactcctcaaaacgcagcactttgtgggaacaatgaaatgggagaaggtcgacgactcgaaaatagttgggtatcatcagatgagagtcgcccatcagaaacaccttgattctcagatgaaagaagtcgttgcaaaaggtcacggtcatggctcagcgacggtgacgtaccgcaagatcaatggcgagtggaagtttgccggaattgaaccgaatatacgatggactgagtttggtggagaggggatctttggaccccctgagaaggaagagaacggagtcgctgcagacgaccaagtgatgaactcgaatggttcgagtgaggtagaggagaggaatggtcatgtggtgaacaaagcggttgaggtcaggtccgtctgatcatgtgttagacggctggtatatccataaactatataatatcgcctacaacctatcgggtaattagttccatatatcttggtactgaggaaaggtagtttctgcgtcggaatcgcctcttgctccccatcggggtttgtgtaaggccgttattcgtgttgcttcactgttcgcggtcatgttcggctgcatatgcattcttctgctgtgttgcctgaaatatcccgagtgaggttcaagctctatcggttgtgcttatatagcttagaacctttcctgatgtgattctactaatatatactgcccaccaatatatggtggcaagggactttcaggacatgatgtctagtctatccaccttgaaaaccacgccagtgagctcacaagcgctg

SEQ ID NO: 200 - DNA, 1336 bp, Emericella nidulans
accaacaactcccacaacaacaacaacaacaacaacaacaacaacaacaacaacaacaataacaacaacaataacaacaacaataacaacaccgacaccaacagcaataacagccaggacgtggacagcaacgcggacagcaaccataatagcaacagtaaccagaattagcagaagcctattattaagactactgatgatcataatgcagatgaccagtacatcaacactgtcagtaacagcaatgaacccagctccctaatcacaggcattggcctctgccccatcagcaagcctgtgtctattattgtcaacaatacttgaagaaagcattatgtctaatcccttattacaagccaggacaatgatgtcgcagccctgttaacataccagaaacatgcctgcatgaacaaatacctgacaaggaaggtgagtactcagcctgtatactggtatatatgctgactagacctagaaggctatccaggctgcagcctgagtctgagaccccaaccctattattgctgattgcccctgcgtccgctgttcgaaaaacctcttcatccttgacacagccactggcaaggtggttagtctggctgtctgtatactgaagcattgctgggcaaagcattgtactcagtatactaaagggaataaaaagtatattcccctccctgcaagcctggtccaataggctttgtccctggcgcagatgccccagacaaaggaggccgcccatcaaacccttaagttctgtttcgacattaatgccaagctgcagaaggccaacaaatagaaggcaagggttattgcagggggtagatatagtactggcactgtgctggaaatataccagttctggtgccaggtatagctattagtactgtaccatacctttcagctgtagaataagatctgcttgctcaagaactttgctctagtcccagcatctgagatgctggtaggcctggacaagtttaataataccctagctgccagtactgacaacaatcttgacttcctggagaaggacaataataacaaccacaatataaaggaggatgataataataataataacaatgacaacaacagagacagtaataataataagtaaggtcataacactgtgcttgggtaaatatagtatagattttatttctttatagcaccctgggtagttatttgtaataattaataatactcctgtatagttatgtaataataatacagtaaacttatatccttgcctacttatagtatatatctcctttacgttttggcttgatactattatactgctagtataatactgatattaatactactggta

SEQ ID NO: 201 - DNA, 818 bp, Emericella nidulans
accggggacagcaagcaaacgtgcgtcattgacgtatcgttggaatttctgtgcatccagagtggcggacatgatgatgatcttcagatcaggtcggcgctgcacgacttccttgagaagccccatgagaacatcggttgacattgttctttcgtgggcctcatcgagaataatagtgctgtagcggctgagttcatggtcgttcatggcctcccgcaagagcataccgtccgtcatgtacttcaaaagtgtcttgggactagtcatatcctcaaaacggatactgtaaccgacctcctccccaagagtgacatccaactctgcagctacacgctgggcgacggacatcgcagccacacggcgaggttgggtacaggcgatcatcttgcgttgggtctgaggcagatcgtcaagcaggacgaattggggaatctgagtggtctttccggaaccagtctcaccgacgaagaccaggatctgagactgctggtagagctgcaggaactcatctctgagaaacaatcacacgttagcgatttgcgaaatcattgaagggaaggcaacctacctttgagcatgaacggggagatcacggcgagttttcaagatcgagaagtacttgctcgagtatggccgatttgtgaacggattgaactcgttgtcttcaaccttttgcgcctgcgagcagttgttttatgtcgctgcaacttcgcaaaggctgaattcttgttatcagcctgtgagcttgagttgccgttagaggacgtatcagcgtacatatgagccagatagggattatcccgggggtcagtcccaga

SEQ ID NO: 202 - DNA, 2807 bp, Emericella nidulans
caaacataacactctgttcaacattcatacttcgtatgctagctctaatatttctctagcaatcgaccttgacgggcgcgatccacacttcgcagcctctcttcgctctatcggtcctgtaacacccaaccctacactctcgcactccagcaccttcaaccagacacacccaccatccgtcttcccatcgacgtccacaaaccccgctttgctagccgtcacagcacgccagcggatcaccagagaagcggaactgaagctgaggagctgggtaagggcggttttgaagggaggagatacctcgatgcgtatacgattaggcagatattggctatgcgcgatagacaaggactcggcgcggaagaaattgaacgggcattgaggcttaagagagggattgtggggagagttggtgctgctaagggagtatttggggttgtgtgaggctgagcctggcggaggttatttgtgtggtgatagtgtatattatttgagcttggtttgcttttgggatgaaatagaatgaaatacggtgttgagtaaggtatatgtgctcgctcttttcatgtatcataagtcagagaagctctttctaaaagtgacatcaaagctgagacatcatcatttatccaaatcactgccataatcccgaattctgtgctctgccagcagcactcagcacatccgtccactcatcaaagcgtatacctaaaaagcggactcttatcacccatagctaacagctcatcatcactatatctctctcgaatctcctcctcccccatcctctcttttttcttattcgcccacttgaagctcaattccagcaccaaagaaacaagcaacgctgtgccccccagcgccaaactcaatccgaacccagtgtaataataaggttcctcgctgtcgatatacatgtaacttccaacaactcctccaatatttccaatgcatatattaaacgccagcccgattgcccttctaccagagggtgccaggttattcgccgtccacgacgtcgtcgcaggatggattgggtagatgcccatagtcgtcaggatgatagcaaagaaggctgggccaacgcgcgtgtctagttcgccgtgaagagacaccataacggcgtaaccggttacgacgaggcatagtgggatcgcgacaaaaggcatgcgccaatagaaccggtcagaaagcttgctgaagaagacggcggagattgcgccggccacgtaagggggcacggtcatgagctgggcgtttgtgtcgcggaagcccatggctttggtgattgtgggaaggaagaatttcgttcctataggtgactatcagtatggaatcggcaagtaggtaggaagggttggccgtaccgtacgaacaagccgactgcgccagcagaataaacgcaagcatgtacatgcgccagttcagtaatgtcgccttgatgtccttccaatttgccttctttttctcctccttaaagtgtccgccctccttgatgaaatgttgcagctcaaggtatcgaatttcctcgggctcgagccaactgcctgactttctgggcgagtcgatgaggaggaagaagcacatagctcctaggacgacggtggcgatgccctcgaggatgaaaatccatcgccaaccatcttggccgccgactccgtccatctgcgcgatgccggcactacgcatgttagcttgctttaattataggggcctgtgtttgacatacgcaagaagacctgaaaatgcaccgctaagggcggatgcgcagtagaagatcgccagcctagtcgagagttctttgggcatataccagattgtgcagaggtagacggcaccggggaagaaacctgccctgtagtcctttagtttacttgttcgcatttgaggcttcaagcacgtactcgaacacacccagaaggatgcggacaaccagcaatcctgcaaagttctgtactagcccggtcagggtcatgatgattccccagcaagtgatgagtatgccgagatagaaagaggggcgggtgaagttcttgaggagcatgttgcttggaacctctgcccgggttagcctgcctcggtcatctcatatgatatatcttgcaagagtgccatacccagaagaacatatgggatgaagaagatcgaaagcacgatattgtactgaatgcccgacatgccaaggtcttcgatgagtccctcaatcttcgcattaccgatattggcgcggtcgaggtgtgaaatgaggtacaaaacagccagcatggggattaaacggatatcaacctgggcaacgtgtcagtagcagcctctatcacgtacgaggtagaggtctgaccttccatagcagcttcttcctcgcctcaggtgggtagttagtgtagaagtccgcatcttcagagctcaacccaagcacttgaatgttgtcaatggccacagtctgctgtgtcttttcgatatggtctgggtcatgaattttctcatcaacgacaatgtcagcacggttggttgcagccatcttggaacgcctagaatcgacttggaactcagtactcaagactcagccaccccatcctcttcgatcggcggcagtccctttatatcctcggccattgtaagcatccaacgtggagaggggcaggaagtacgagctcagcagcggaaaagcaacggccacaacataaaattggaacctttcgttgccaagcttacctaggagcagcctcgtgaacgcagggttgcgggcgaaaagctcatggtgaagctgcgtaacgcgatgcgggggcatcacatcccgggccaaggaa

SEQ ID NO: 203 - DNA, 675 bp, Emericella nidulans
cttccaggtttggttcgagaatatcgtaggtccgctgcactcattgtgtctccctacctactaaaattggtctcttcgataggattacgaggatgccgcggcgaatgagaacctgcagtggctagcgaaacaaggaatcgtcctgtaagtttgctgaacgtgcattccggttgccttctgaccataacaggtcaaacttctatgcggtcactcatccctctcaaccaaactactgcgctgcagcaggaggcgatacatttggcatggatcatgacgatttcctgcgaattccggccaatgtttccactgtcgtagatctcctagataccaagtacatcgcctgggctgagtaccaggaacacatgccctaccccggctttgaaggattcaactattcaaaccaagagacctacgccgacgattatgtgcgaaagcacaacccgcttatcttgtacgactctgtcgctgagaatgacatgcgccggcgtcagatcaagaactttacacatttcgacgatgatctagccagcgagaagcttccccaatgggccttctttacgcccaacatgaccaatgacgcccatgacaccaacataaccttcgctgctaattggcttcgtggctggatttcgcctctgctcgagaacgactacttcataacgacactcttatcct

SEQ ID NO: 204 - DNA, 655 bp, Emericella nidulans
atgggcatgaacctgtggttctcgtggactatgacagtcccggtttaggtgattgcctgcatcaatgtgctgcagtattgggaggctccgagaaacttccctatggcagcgtacatcacgatattcgccatagtcaccgcaatacccaacttatttcatgtgcggaaatacggcagcgtggaagttgtaatgagtgcacttaaggtcttctcaattacctcttccatgtgcttcctgttcatcatggcatctggtggactgccgtcacaggctggcccacttgtgttccactactggaaaacaccaggggcattcaataatggaatcaaaggcgtctgcaaggctgtgcttcaggccgcatttagctgtccctcaggtatgaagtcctgatagatgcaccgaaaaagtgtcctgctaactaactcagccggctgggtcgtcattacagctggcgagatgaaggatccacgaaggacagtgaaacgctcaaccaacccgctctttggggcatgttcctctttatattgcaacactggctcgcggatgtgcgtgcttacaccaccagacctgccggtcagacactgcggccccttatcatgtatccggccggggtaccgacttgccactatcaaggctgcttgcctgttttctgaga

SEQ ID NO: 205 - DNA, 6366 bp, Emericella nidulans
  unsure (1)..(6366): unsure at all n locations
tttagactcgatagttatggaaatgcgccaaagttcacttctggccgagggcatcctccaatagcttcaccatctcccagtgcttggcctgctctgctctatctctcggggtgtagccgtccaggtccacgagatcagggcgcgctccatgctgtagaaggacatgtgcacattccagtgccccgcggccaccgcgatatgcggtatagcccagcgcagtccaaccaaagtcatctacacggtcaatctcgattccaggatgagcaagcaggacttccatgcaatgaggggatttggttgtcatcaggggagtttccccggtgactgtggcccggttgacatcgatgccatcctgtgcgagtaggagcttgacgaatttggtgtccttatagcctgcggcggcgctgtgtaagggagtccagccattaccccaggcagcattgacatcgaggcgaccgcactcgagcaaatcgcgtactatgtcctctcgctcttcctgtatagccaggtgaatggcagtctggccagtcgagtccagaaatgtcaggtcagttgctgggtgcttgataaacaaagagatgatatcgtatctcccccagccgtgccaaagagcgtgcatgaacggtgtgacttggtaggcatctcggccttcgccttctgtcagttggtggttgacatcgacggatggctgttcaagcagcagcgcagtcgccgggacgtttttcccatagacagcataccacaatgctgttgctccaacaccatcaaccatgttgagtccttcaggatccttctccaacagtcgctgcatgaatggaatattgcccgcaaacgccgcctccatcaagggagtttggccatctcgattctggggatggaggatgtcaccttggctgcaatctagaatggttggaaaatatggagtgctggcaccaggatgtgttaagtccccagcagtggtgctcgctcgagcctggaggtggagaatggtgttgccattctcgtctgtgctggcaaactgttggaggttgaaaagaccagcgattgtgggaaatacttgtagcagggagatctgatccagaggcttgagatgaactgcgatgcgaagaaggactttagtgggcagaacaggggctccggtgggatgcattgtggttagatgcaagaggacagatggttggaagagaagcgcctggaggggcaatacatcctttggacgatcggttgcgatcagcaacgtaagcaaaaaaaaaggccttggcactatctacagctttcacactacttgcagttcttgatccgattgctcgaatgcgcccaactcgtgatagccctccgatgcaaccggttgtcctgcgtctggcgcattaggctgatggccgcatcgtagtccgcgatcaactgcgcccggccaccggggtagccctgctcgtacatgacgatcgtgcctcccctatcaggctgcatcgccccctgcattttggcgaactcctcgtagtctgtcatgggcgtcctcgcaatttgtcgaccgaagtatagcggccgcctcatctgcttgatcacaaactcattgaggtccttccgccgcaagcccaccaccagcttcacggcccgctcgccctccatattccagttcttgaatagcctcttctgatcgggattgaggccatttcctccaagctgcgcctcaatcgccctcctggcggccacctgccagtcgcccagctcccgcgccgcacggtagtactcgctcgccgtggtgctaaacccaggaagctccttgtaagcatcccaatacccattatagtacacgcccttcttcttccccttgcggttcttctcattatcgccttcctcaaccaaggccatcgcctccgctacagttctttcgcctttactccaaatgtcgtccgcagcggctgcgctccacgacggccagctcattttggccgggtcgggtttcgtgttgtgctggtttgtcggcgcccagatgtactcgcagagctcacgcagagtgcaccggttgggttgccctcggagccctgtccgtgagccgacgcagcccgtggcgatcccgccgtcctttccggggtcgtcgaagatttcctcttgcatgtagatactaaagatgaaggctctgtctggatcagacacgtattttgtcaaggggcgttcgatccagagcatgacacgtaccgttcagcagagccacgaatacccgtggcagcgatactcgcgcagaaagagaaaaggaggtaaactatggccagcctcattttgcacgatgggcgagagaaggacaggatccgcgaagtaggggaatgatcttgcttggggatgggaaaaaggttctggttgcggatagaaatacatcttacaaggggcctagcattggtctagagaattgggacattggaatcagaaactcagcagaggaaattttgctctacagtctacaatagccctaggccattgaggtagctgccgccaagacagtctgttggtgagaattttatataacccctgcatccttagtgtccggattgctctctgtagcgtagttttgccttgtttggggacggagcacgccgctgggatgtctcactttttcatgtagcgtcgggttgcgaggctaggattctctcgggggttccgtaggtatttgtcacttcattgtctggtcaccgagcgagctgttagatctggttcacagcgtctggtgggggcggtgcctccatcagcagcgtttttttccatcttgaaaggtggtagtaccttataaaccagtctctgggctctctggaacaacccaatccggcagaggaggaggcatctttctacctcctcttttattctttcctttcatcctattatcccgctcgccggcgctcgcagtttgctgccatctctcgtttctcagcatgtcccgactacacctcggatgggtagccttcctgtggacacttctcccctcattttccaacgctgggcaagatgtcgaggggaacaagatcctccgcctgggcgacgccgtacccatcgacagccccggaacctactataccgacctccacccctgccctgcagcatgcggctacaacangcccgatagctggacggtctactctgccgtcgagcggctaacacactgcccggagacaatgctcttcgacctcgcaatcaagactccggtcgatgcatcagacgccttcgtcaagatccgcgcgtgcactgcgggactgccggacaatgcgaataccaccgccaatgccctgtatctggcaatcgcggaagacgaacacgggctgactacaaagagaaagcgtaatgtgggtgagtgtctgtcggactctgcggatgaggtaaaactgtcggtgcagtttggacaacaaggcggacggacgagtcaggttgacatcgccgttgcggctctcgagcaccttgagcggttcatgggggatgattcgaactgtgatacgccagtgcttctggcctacaccaacggtaccgttgccggtatgtacctcggccctggctttggaagggacacggccacctccgtgctcgggcgcctccaaaagcaggtccgagagaatggagtggctgagacgaccctggtgcagctttgcggggtgaatcgcaatgcacaccatgtcctcggggtcgctgttgaaaccaccgcgaacgtcgcggcagtgcagaagttcttgagcacgtggtcgaatgctgaatgtgtggccgatcttgatgagatgaccgagtgggacaatatctcgctctcagagctcgatcaaggcctcgggcggagttcgcgttccagcagtgagaggtgggcaccatctgaggctgaccggacccctctgcagcctcgagcagaatgcacggtggaaaaggccatcgccggtgacaactgtgatacgctcgccgctcggtgcgggatcaccaagcccgatctcatcaagtataatggtagcgcagatctctgcctgccagggcggatactggccggtcagcggttgtgctgcaaccgtgggacactgcctgatatccggcccaagccgaacgaggacgggtcctgcttctcgtacacagtgcagccgggcgatgactgcacgacgctggcgcttacctacggcctcacgaacacggttctcgagcggttcaacaacaagactacctgggggtggaacggatgccggaacctcaaccacggaatcaatatttgtctgagcaacggcgatccgcccatgccggccccggtggccaatgcagtctgcggaccaaccaaggtaggcactgagcgtcctaccgacgggacaccgctccaagacttgaacccctgccccctgaatgtatgctgcaacatctggggccagtgcggtatcaacgaacaattctgcattgagaagcgagggcccgccgagaacccaggcacctcgcccgccaacaccaacggctgcatctcgagctgcggtgtcgacattcacaataccgacggcgacattgtcgttccctacgggcgcgtcggctactacgagagctggaacttcaaccgcaagtgtctgtggctgcgcgcggcgaacgcaaacaccaatctggcctacacacatattcactgggcgtttgtagaggtcgacccgtcggactggaccgtgaagattgctgatccgtacaatcaatgggaagacttcaaggcactggacgatgtgcggaggattgtctcctttggaggctggggctattcgaccgagccggagacgtacgatatacttcgtcaggcgatgagtccgccgaatcgcaaggcctttgcgacaaacgttgctgcgttcgtcacagagcatgaactagacggtgtagactttgactgggaatatccaggggtatgtctcttcccatcaaatgagctctgttgctgactacgcgcgttcaggccgtggatatacctggaaccccaccgggccttgaaacggatggtccgaactactacaaatttttaatcgtgatgcgcgggcagctggccgagggaatctctttatcaattgctgcgccggcttcgtactggtatctcaaggccttccctattgacctgatggctaaggagctggattatattgtgttcatgacctatgatcttcatggtgagtcaccctctaccggagattccctctggcaactgacgtcagacaggccaatgggatgccggcaaccagtatgcaacagaaggttgcccgacagggaattgtctgcgaagtcacggtgggccatcttattgtttccaaagctaccagtgcgtgtgactgacatgctagctatacatagtcaatcttactgagacaacctacgctctgtccatgagtaagctgccctacgtatcacttccctttcccatgcttaatcatgcttgcggggccgcttatccctgtacaagattaatatttttgctaacgcgaggcgcagttacaaaagcaggagttcatacaaacaaaatctatgtaggggagtccagctacgggcggtcgttcctaatgagtgaggaaggatgcacggggcctgactgcttcttcgaaggggaccggctcaactctccagcagccaagggcgtctgtacagacaccgggggctacatctccaatgccgagattgaccagattgcgttcctcggcgacaatgtgcaaacctggcacgatggggcctcgaactcggatatcatggtgtaataatggtacgtacccacaggcttggtgtgcaacaacggatcttctgctgataaagctcagacactcagtgggtggcatatatgtccccgacaacaaaaaggaccaggcgcattcactggaggggctataattttgcggggacgattgattgggctgtggacctgcagtcgtatacggatgacgagtactacgactacaaaacgggagaggggggcgaggatcttctacccccgttgcccgatgacccagaatgcactgccacatatgatggtttagaaggcatcgaaaaggactttggtcgcatccatgagctctgcatcggtcaatatatcctcgaagccctccagaagaacttcaccgcgtcgctaaccgcgtacgacgcgttgatggaagatggctacgacggcaagttcaaagcctacgccaaagccgtggtctccgcgtccaacaaggtcgtcgaggactttatgtacaagaacggcgagaactactttagctgcattgtcacggagacgatcgagtgctgtgagttgtgcgaggactcctatgccaccaaccacccagagatcaactgccggtactgcgaggagtacgattgcgtgccagagggtaactgcgacaaccccgaggttcactgcgatcccccgag

SEQ ID NO: 206 - DNA, 585 bp, Emericella nidulans
gtctttttttggctatagatacgtaatcttcaaccttcttgagtacattggggcctcggaatggtttgataagcaggtatcaatcgcccaagagtccttcctcacaaagaagcatcagccgatcaaaaatagtactgctgctggcaaggtcctggataacatctgggagcgatgcaacccacgtctgaataatatctcaggcaagttacaaaaagctcagcggcagcgtatatggctccaacttccaggggaagggagctgcgtagcagacttgctaagcgtctcggccttggaattctttttagtccaagaatttggtaggtacactgtctttaccattttatcagactgctaatgaacaacagggacctcctcaaactgcctatcgataaacgattgtttttgaaaagcatcaactcgctttcttgctgagagtcgaacaccagtaaacctgtatcgcgccctgacttctccctgggtactgcttcgagaataccctcgtcacgtctgaccatgatcgaccttcgtccttcctcagcctcactaggagggtctaccttttcgccgacatggaataccctttct

SEQ ID NO: 207 - DNA, 1719 bp, Emericella nidulans
tcgatactattcgaaacattgaaaagcactgagcaaccttgccaccacatatcgcatgcaaggcaaatatggtcaggctgaagaacttgacatttgcgtcctcaagtgtcgcacgaaagttcttgggcccgaacatccagacacagtcatgaccatgggaaacctggcatccacatacatggagcagggccgatggagtgaagcagaagagttgagaagacgccaagtagcattattggagggaagtattggtcctgaacataaagacatgctcgctgctatggggaacctagcgacgatataccgcgagcaggggaagtggacacttgcagaagatctggaggtacgtgtttggaaacagtcacaagccgtgttagggacagagcatccgaatacgctgatcagcatggcgaacctggcatcaacctaccgcaaccagtacaagttcgcagaggctgaactacttgagatggagaccacgaagatcttcaagtcagtccttggctcccagcaccctattactctacgaagcatgggcaaccttgcgtctacaaagcggagcctggggaaacttgaagaagcagaggagcttgaggagcaggtgatgacgacgtttgactccattttaggacgtgctcacccagacacgctgacaagcatgggcaacctggcctgcacatatcgctatcaaggtcgctgtgcggaagccgagaagctggaaatagaggtactagacgcgaggaaaaagctactgggaccgagccacgtaaatacactaaccagcatgtggaatttggcccgcacttggaggaggcaggagaagtacacggaaagctataagttgttgcaagcctgtgttgaacagcagattcgccagctggggccgaaccatcctgatactctcgaagctacgctggaattggattcatggcaatcgggcatagatggaagctggatacttatgaaaaacgtggagtaaccgagaactgctattgatatatgacacattatgcctgcacaggggaaagagaaaatggaataatgatcagatcccactttagacctgggttttcttccccaccgatatcgcgaccttgaccataggtaagctgatatgcaatcttttcaagctgcgaagggtctcctcgtggcgcagggggtgcctgtatgccactgtgatccctctctaggcagcgaaggtcgatttcagcatttgtaacgagacagaccacccactcgggaatggattcttggacgtcaccagggatatcctttggccaacggatctccatccccttaagaacgtcagtatgctgtgtcttccccatcacatactgactgctggaacagagcctgatcccacgcggtgaagaccgtgatatcaaggatatcttcccggccgcattcacatcgaagactgacacatatacagtatcgaccgaagaagtattgttcagtgttatgcatatccggtctctgcaactaatccaggcagtgccattagtagcaagatcctctgtaccatgttctccaggattgattttcgagagtgtaatctgcaactcgtggtccagtctcacttcacctgcaggtttgatagacaacaagtgagctgctcgagatactgagtttgcaagctgaagagctctagagacagcccctgtgatatctccattagcgttgaaagcagcacgcggctcgccacagatgctcagacag

SEQ ID NO: 208 - DNA, 844 bp, Emericella nidulans
attctcgcttttcatggtctgcgcactttttgcgccgcttgtgaatcaggtactgcgtttctttcctttcctcccactgagcagaactaatacggtgcccacgtagataatgcccctctttatcacccaacgctccctctacgaagtccgcgagcgacccagcaaagcctattcctggaaagccttcctgattgccaacatcctcgttgagatcccctaccaggtcttgatgggtattctaaccttcgtctgctactactaccccgttgtcggttccagccaaggaccagaccgagagggcctcgtcctcctcttctgcatccaattttacgtttatgccagcactttcgcacacatgtgcattgcagcgatgccgaacgccgaaacagctagtcccatcgtcatcctcctcttcagtatgtgtcttaccttctgcggtgttatgcagccgcccgacgcacttccaggcttctggattttcatgtaccgcgtctcgccgtttacctactgggtagccgggatggcaaccacccaagttcacgggcgagaagttgtctgcggcgagaatgagctctcaatcttcgatcccccgacgaatcagacttgcggccaatatatggagaggtacatcagtgtcgctggtggccaggtactgaacccgtctgcgacgcagggttgcgagtattgttctctgactgtggcggatgagtatttggcagcgagccagatatactggagcgatcgttggaggaactttgggttgatctgggtgtatattgggtttaatatctttgttgcgacggcagaatattacctgttcagcgtgaagaaatggaatggacgg

SEQ ID NO: 209 - DNA, 1106 bp, Emericella nidulans
  unsure (1)..(1106): unsure at all n locations
tattaaataatatttctactatttttataattatatataagataactaggtctaatacctactacttacctagctagctattaataaaaaaaatattataaatactaggattagtttcttcttcctagattataaatataatattaaactactagaaattaaataaatagaagaacttttatatttagaagatctagcctgtactcttaagaaataagaaaaatatattctaaaattaaaaaaaatcttatatatagctatcttagagcttgctactatatagtagtattaagaagaatacttaaattattattataatattatcctaaagtataaagttaactagaagatttgactagacctttaaaatatataaataaattatctaagtaagaagcataatagttaatatactaaatttactattatagaagttataaatttttatatttattaattaaatatatctctagagatttataatatcttttatataatcttattttagtctatatctaaggtcccttttctaagctaaaattatactaactactagcccccagtagttctagttaatagaaattataaataaataataaaagaaataaatagttaataagtataaaaaactacttaaatattaatattatagtaaggtcctaatatattagcttagctatagggaattaatataagagctataagtaaactttaaaaaaactaaaattttagatatctaggaatagtatattactatagggaagttatatttataggctatcttngatagaanggctgccagagaaaggggagtttatatacangctatgcccaagtcttgattaagtataactaaatataatagctggctactaggactaactgctaataaattctggctggaataagctgttcaggcattttgttaattttcttaattcaaatacaaaaaagggggcccaatatgggtgtattttgagagttatatgcctttttttattttgaaaattttttaaataacgccgagaaacccctcgcgacgggggggttttaattgatggttttaaaaaccccggggggggttattttttttttttttttggggg

SEQ ID NO: 210 - DNA, 2151 bp, Emericella nidulans
ctggtcagtgaaacggagggatatatggaaactgaggagaatcccataaagggtggtaagacgcagggggtggcactgaacctggtgcattcggcgcatttgtctgatgagaagggaaagcggccgggttgtttgatgtctgcctaaaaacagggttctcatggtgacttgagggattttctgggccattgttcggtgagctcgatcgttggttcgctgactcggagaagctggggaagctagagaagaagctatccgcatggcccgggaaagcgcctcggatacttgattcgaaagcgtcaatcaaagtctgccccaagccgccaaactgtacgctgagttcacgcaggctgttcatggcgctctgagttgtagggaactccgaaaaaaggctagcgcttccaggtgcgttgtctcgcctgaccgtctctggcagattgttaagggtggccaccatcgccttgacctgctcctcgaaagccaggaaagcactccgcatagagtctgtaatgtcgtttggaagcgctctgcgagcattgtccaaatgtctctcaagctcaggaagtttggatctcacgccagatttgatgagctccgcaacttccatgagactccgcagggcggaagcaaaagcgtcagccgtctcgcgttgtgggttagaggttgattcggtttgtgccgccctggaagatgttgtgctcccggaggcgtggttttctggacgctgtgattcattcatcattctggccatctctgcctcgaatgcggaaaggaacgactcagatgattcgttttcagtcgtggtcgttcgctcatcctcaacatgcgacttctgttcgcgactggaatcgagttcctcgagatctgccgtagtccgattgccattcaaatcggctattacaacttccgtatttggcgaccctggaaccgactggcgctcattatgttcataccgcctccagatatctataacggactttgttcgtctaatatcgaatagatgtatagtcgatgggaaaccggtgtctgtgctgtgggaagccggctcttcaagccgttgagcgagctcaagagaggacccgacctagagacaagattagcattgcagacgaggacaagttcttgacggaggtacgtaccgtgatgatatccccatcatcatcgtctagataagacaggcgggcctgcggatgtaaataggcgatttcgtcgtaatcggctctggttatctggacaagcccgtgtggccgctgagggctgacgcccgcatcggtggcattgtacaaatcagacgcggtgtcttcaataatattctgtgaataaggatcctcgtgaaggtcccttatcagaaacggcttgagcatgttgtatgacgggcccactcttaaaacacttgcctgccggacagaaaattataacaatctgaaatatccagcaaagagctagatgaagagtggtgataagatggaaagaagtgagaggtgagaataagagagttgatactaaaagagaggagtgaatcttgtcaaactagagggtggcgctggggataacgacgactgctgcctgtgatatcggcagacctatcagagctcagacggtgaaagaggcaaaatcccgatgtacgaggcggtagtaatcggtcatggtagtagtacaaggggcgtggtcagaaggacaggcaacgaaaataagttgcgttaggagctttcgggagcttgaaaccagcggaagggtccccaagtctgcacgtccacggcatctgaagcttcaaagctccgatccttgatccctcgcgattggatgtaccccgcgcacttgttgagagcttattggccgcaggtggatcaactgatcatcgataaaacagtgctaaataatttaattgttttgcagatacatagaaggctcaagaccagaatattgtgagcctattaacagagtaaaactggtcgcttctacatatggacaccttaggttacagagacatggtgactttggagatttagttttgaaaccgtctgcttgagcttttgctgccgaagctccaacggttgcaatatctatccaatgagaatatcacgtgatcagaggttaaagcaggaccgacatatactactgccggcagccaccacatacgcaggtgccgtt

SEQ ID NO: 211 - DNA, 2668 bp, Emericella nidulans
gcggcaagccagtcccatccgctgaattcaacctgcatcacaacggggcgacttgtgacgggccttacaacacatggcgctggtcgaagaaagatcagaaacgtctcgacaagggccacgatatcgccgtagaggcattcaaggacagcccggattacaagggaaagcggctcgattatatcttcgtcgggggtgaggtcggatggtccgtccgcgacgtcaacatcgcaatgacacagcgccatcctacactcaaatgctcgctaagcgaccatttcgccgtgcaaaccgtcatcacccgcgacgtctcgtcaatggcagccaagcaagaaagtggtggcggcaagtcgaatcgcctaaccctccctgcagaaacatacacccacatcctcgacatgatccacgcctatgttcgccgcgaacgcacgcagcgtcggtggcgcctcattcactttgttgcctcggtgctggtcactattggctgcctggtaggcgtgtggtggaacggtgatcgtccgtatatccccttcattttgacacttatcagcacgcttagtttcggcgctgggattttggatggcttaatcgggggtctgtttgtctccagtgagctgagggcactaaaggagttcgaatgggagataaggaatacgaagaggatagctgaggggcttcagcggtagatggctgcaatagtgactgatgtattataccttatgcagaggctgtatatataatttaataatgtataaacaggtggactaagatcaaattgatggtcacgatgaccattggcttgagaagcattaaaaatatacgcatattccagggttgttgggcagggactattacatctttatcggtgcggtagtctacgggagacagcgagatacttaagagtctccaagaactacgatatgtttgacaagagaagctgggtgttagagtagactgaaagatatagaataattgttcatcaatttggttcgttaaactgcaataactataatccttgtccctgcagtagagtaaagaacgactgggactgttattttcgctcatcaacagatttactcagcacactcgcgcttgcggtcatcaaagaccctcaaggcctcctcagcagccttaacaccgctgagcaccatggcaccaaaggttggtcccatgcggttaaagccatcgatctcagacagctccattccgccaatgataagacccttggcaacctcacgggtgttcttgacgatggcgtcttcggcagagttcatgtcaagtccgcgcatgccgccgagcttgtcgatggtggtcatggagacgagacgcttggcggagaaagcgccgaaggggccgtcatggccggttgtgctgataatcacgggggcgttgatggtgttggggtccatgcaagagtgatcgtcatggtggagagtgacgagcgtccagttagtgacgacacccgcgatttggacttcctgggcattgccgttcgggccggggcgtgtcaccaagtcctctacgcaggttgcgttgaacagcttgacgttggggaaggatagcaccttcgagaggagggtcgatgtgaaaagagatgcgtgcttgacaacaacgtagttcggcatgtcagggtcttcctcatatggcacgccgagctcgttcaggaacaactccgcaggacgacgcatgaccattgcggagaaaagctggcctcccagccaagcaccaccgcctggttgtatgagtacaatagtttacgggatacgccatggttagactaacctggggaaaccgacgcctcaataatagcaatctttaagtccggacgagccttggccaagacgtacgcagtgctaagaccgcacgaaccagcaccgacgatgaccacatcgctctcggcgtaccggtccaagtcctggaagtagcggcgggtcatggcacgagagacctggctctcacggataggagcaaacttgaagttgtcccacttgccgccaaagtggtcgagcagtttggtctgtgaatcgcctggaatagtagcagtctcggggaccacaacctttcccttgatgccagtaggggcaacagtaggctcgaagatggcagctgggggagacatgttgactcagttcaatggttcgactatagactgttagccattccactaactataggaagaggcaagggaaggcatgatcctttcgctggtattatccagatcaagttttgaccgtatattctcagaacgaacccagagcctttggcagtccccttcaacgctggataaaggccagtacagttgaggtagggatatgctaaggataagaacgaacaccggccacgcccagacattacctgagataccttgatgattgaattgaatgccagccaaaggctattcatgacttccgtaaacggcccgggaggggccaacgaggtgcgtgtttacattgtacagtcaggtttcctgtacaagtgttagcccattccagacccgccggtcttctaggagaggaggacttgtttgtgatgaaattcgatggattcggtatggatgtggatgggagaaggaaaagaagagagtgaagagcggggtaggaggggcatttatagttgacaattcacctgactgacatggacttgacagctccttgatcgccgaacctccgat

SEQ ID NO: 212 - DNA, 454 bp, Emericella nidulans
tgaagagagacagcacgaacccctcagtggacgccaaacagttttataccatctgagagcgaatgaaaaagggcctgcacacatctcttgggatcgaccatcgacggtagcctttccgcagcggaatggaggagcgccactcatgcgcgagcccaggatggcgtggaccaacaaggcactctatgcagccgccatatgcaacgggcaacggctcgagcccagcggaaatcatcgggtcggcccacccataggctccaagtggccaaggctgctcccgagaacgctcaacacactacgagcttgacagcatagcctgtgcgaaggaacgagaatagctccagaaccgacaagatacgcaacgagccggaattgaaactccgagccatggccacctaaaactataggcaggcggggcccgggaataataataaacgtcactcggcggaacacgggg

SEQ ID NO: 213 - DNA, 1035 bp, Emericella nidulans
tattgtcttacttagatagtttatataacgaattagtattaaaattaaaagttcttatctaatagagaattaaaattagttttaataattagattatatataaaataggcctttattagcttaaaaactactttatttctattattattagttatataattaaaaaatattaacttctagttcttaataattataacagctatcttatatcctaatttaattaaatatataataaaaataatattatatttatttatatatttatatattcttcttataaattttaatttttaaacatctatttaactctaataagatttttaactagctaaatattaaataaaagacctctatattacttagtagttaattaactaatttaatatttaaatattatatatactaaggcagctagaaaggcaggtattagtagtaataaaaataataaaaatatatatactaagttttttatattattagaactatgcctaaaaaagtttattaaaaattataaattatatcttaataaagcttatccttgcttttaaaaaaaaaaatattaaatttataaatttttaataaaaaggagctctaaaaaagaagattttttactaggtaattagctattataaaaggttttattatctaggagggccctgagaaattctagtataaaaattaaaattattaaacttaaaataatatttttatagatctaggactttctataatttaaggtattatataagtcctataggtttgggattatttaaaatttaggatttaattatttttatttctaaataagttttttaataaatttaatagagaactattatttcctaagagggaagggagaaagaaggtttattattattgataaaaaagtcttggaggtggctcaccccccttaggaacgaggcaggcccggttgatcacctaggtctaagggccttggtagggcaaccatttctcggcctgatcaggctcaaaggttgttttttggccaatattggaccttttggcttctttggg

SEQ ID NO: 214 - DNA, 570 bp, Emericella nidulans
agtagtttttaagccaataaaggcctattttatatataatctaattattggaactaattttaattctctaattagataaaaactttcaatcttaatactaaccctttatatagactctttctttaaagataatatatagaagaagtgcctaactagtcaagttaatatatttaatagaagtaacctattcttaattacctagctatataagaggggtctttctatagtaattagctctagtaactatctaagtagtagctactaggcctataataaagctagtcttatcaaagctatagatatcctttattataattctatactgtataatagtaatttatatataattaacctactacttaatagtcttaggatttttatatttagaatatcaataattatatctttatatattgcaagtctttagtttattctattatttaataaagttatgtaccaatttttctctaactgactagattactgtagtactgtattaagtaaaatattagctttttcttatatatatagttatcttaaaggtgctctatattaatctagtaataaaat

SEQ ID NO: 215 - DNA, 725 bp, Emericella nidulans
taaagattttttactatggagctttatcgtatcgccgacaggtatacttggtgaatgttggcctagagttttatgcccggcccatagcttggagtaaagtgtgacccataacctgcgagcctgagtatagattcagtccctattagagactgagatgtgattgctggaatgttgtgcctatgcagggttataaaaataataaaccatcttgaaaatattgtgaatagctatataagcaccgcactactgccagatgaacgtcttctacttctctgcttttgtcattgatctggtgacttatcaaatgtcatggttcaattttcattggaattatcacatgtaatgagtcttatttgccttagcagacatactatgtgttaaagcgtccgtgcattcctttgttgcagtggaacctagctgggcacagccgatgtaggctagagatgcactttaactaatatctatgaatgcattgcgaatactcaatccgcatgacaaccgatgcgtcgagattcaactggtaagctccatgttcattgttagcaggccttgaacagacacttcttctatatcgaacttgacactcagccgaaaagggctaacccctgctttggagagtaagttctgactaatatatttgttgtcattctagttacaaacaaacccttgactgtacgtgatttggaaatgcatgggtggagaagtcggatcaccacctgttatgc

SEQ ID NO: 216 - DNA, 2606 bp, Emericella nidulans
gctgtccatgggaggtgtggaggtttcccccgggactttgctaattagtagagtgcctaatataggtctcttagaagatttatgagggttcaattataatgttagttggattgaccatggttcttgtctgagtttctttggtcgtaacttcaaatttactgtcagaatgaccgaacgacgtcagccaatcgacctgttgtgccgcagctagcgtgtgacatagcacagaagaaagagaagccgaagccggtcatagccctgactctgatgccaagggatatggacatagccatccgagcccccgactatggcggccctgagggacagtagagccaacatagccagagactatgttgcaattctgcaaagttcaattgatgtatgaagtatgattcattgttgtgttgttttgaagctatcgctagtgatagacgaccgaccgcctgggtcacgggctatcatccaggccacaggccatcatcctgcgagccaggctttgggatatggcaacagactatgacggttaggatgatgcggagtatttaaggacgctcatttaccatgtaactagttttgtacttcgtgtcttttctcggaacaaccaagatagccaatattgtcaacgttattgagttactgcatttcaccctaccttccttgtctgatctcagaatatccttaggacctgttgagcccgactcctaagaaggactcttttggccttatctgacacaaaggccatgcctgagtccctatcctgtagttaaacacttaacagtcataaatttaagatacaattttagtaaacttttatcgggcaggttcatttccaagttgataagccatgtacccgtctctggtttcaaaggcagcaaggtagaaataaaaagacaccaagttattcccactcatatttaacgatctctgcagcaactccaataattctagatatcatgttagttaattctttgaacaagctgttattcttaatgcctacccactgattaaaccaatatggccactattactgaatttttagtaattttcaaaggctactgttaaatgttaactcacccagtcatgaccattccaatgatctctgcaagcaggtctctgattccagtgaccccagcaataacagtcctgtgcattcactccagacagcagcaaaacagacgttgctacaatagttaagaccttcatgttggaagatatgaataagagcgaagccttagccaagtggaggcacaagtggaggcacaagtggaggcacaagtggaggcgcaagtaataacaagaagaccagaatctagaaaggaaagggtctttttataataattcccagtatttctggctctacacacatttggtaactgcttactatcttagcttgctaaaaccagtgtctagatgggccgattctatagattatgtgcagaagtaggcagacccatgggcgacaaataagtataggtgtgggcagagatctttacccagagcaccaagccaagacctaagatcatgctacagattatatgattaatttaataattcttttagtctgcagcttatcttcagttgcttttattacacatcattattatctcagacaaagagataaacaaaacttagggttaagaatgacgtcatagaatcaactttgcagaggagatattttcaactatattttaaactttagcagaatcgttcccatcaatgatttgacttaggtctctttgtgcaagcggttgacagataactgtctcctgagcaccagagtcagtaggcctagttgaagaatgcaacctgataggtaggaattattaataaatgacataaatagttacaggaaaacccaaaatgttcatagcagacaggcttctactaggacggaaaaaaatattaatgtcaagttaaaatggcattaaccttgggcctctgttgggtgattttcaatgctgtggaaggctccctatattatttccaagctacttaggttagggtgaatcaaggtcatactattcatgtcttgctatatttgacttccggccattatttggcgccggacaaggtgttgattaagaagattaggtggaagatgagtttctgctcgtaagataaaaaatagggggaataaattagatgttctgtacaggtcactgtaaggcactcgggacattactatgcaggcagctgtcagaacacctgggcagcaattagtgctatgcctagtcagttcattgggcaagtactttatgagagagttacagagaggaaggtaggtcagaacagaacagaatgaatcgcatggagaggtaggtcactaacaagctcagtaactctatatatgtggtgccccgctgtcaggccactgttgattaggtatcggcagggtagttccgctcaacagcctgttgatgcccggtgagtcagctgtctatctggctcgggggttgatgcatgacaggtcaggtgtctgctgtgacagttgccttgggaagtctctcttccctcaaacgcggtctaaaaagcctgaccagtcataaagtactgattgattgggttgaaactgggggctgctaatacaatcaccacaagctgacgtt

SEQ ID NO: 217 - DNA, 1104 bp, Emericella nidulans
tgtgtcaaggtgccgattcaggaccataattagaaaggataaagagtagatatacaggcagctatggattcaggtatccctggtccttagacgagtcagacatagctcaggtcagaattcattctgctctgatttccgtcttttcgcaggcttgacatgcagaagtatgagccagtcagggtggtcacgggcctaaaagacttcatttgaatagatattagcagtcagaattattacctaggattcaacgcgcgatgcagaagccaacgtgtacgatactcgcatttccagaaggattagcgaaatacagctagtcagtcaacaaatattgcatgttggtatacagatgtttgttacttcttattaatgctgctgagttatcgggctgtgattttgccatagcggatataatcgctaaggcgaagctcctataaatcaccatgcttagtatttatatagagtccgaagggtcattagggataaatcaagggatacccacctcgggcgaataccttctaaatgaggaggtgcaacaaatgtgttggtaaatctctatgtgatccgaggcagcgtttttttgtccgaatttcgtcctacaagtaagatacggccgtcagtattaatctacatctgatacagggtcaaatcgatcttggtcaaacttcatataaacaaattgctttattcaacataagaatgcactgtactaccatttctggttcttggtagttgggaatgtggtaggatcaacccgatctttagcctgtgagacggaagaaaagaacgggttgtcgacagagcctgcaagagaatcgctcatattctttgttggtgtgccgaatagaggcccagacgaaccaaagccagagttgctagtgttcttttcagaagtgccgaatggagagccggacctttcaaagatagaaccgctagtaccatctgtaggggctttgaagagagagcgagacgacccaaagctagaaccattggtgttctttgcaaatatactagacccagagtcagaatggccagtatcctttgtagatgcgtccaccctagaaccaaacagcccagagccagaaccgctagcactctttgcagggc

SEQ ID NO: 218 - DNA, 860 bp, Emericella nidulans
ggcatgtatacgactaattggaaaagcaaaaaaaaatgaccgacgcagggctcgaacctgcaatctcctgattcgtagtcagacgccttgccaattgggccagccggcctgtgattggaagactgcgactcttttctggtaatgtttgacccttgcatgatatctagcagtagaatccgggttttggggattttgatttgaatatatattatctgtatggtctttgatcatgatgaattgaacattgatatcgaaagcacctctatatccttaagttactatgctgtatcatcaaccatacctatcatgcatttcccgtattcaccgagcgttggaaaaataaaccaaatatttgtgttcagtagaacctggacgtgtccatgactgccgcgctagaggcggatttaaagcaccaaaccttttggggtctgcctccatggctcgaatacgcggggacagagcgtagtcatggattttttgcgttgtccgtcgctggcccatcataatacgttgaaacccacggtcatggccgcatctaggtggtgagagggtgtccattttgtgctgctctgaaagtcctcgaggatgccgcaaggctctatccaggtgctggcagactaggccaagctccaagaagacctaataatgaagagttttccctgttggagcatgacctcatgacaaaaaagctgaactcctacatgagtgaataaatattctcgaggggcccgggaattgaattctataggtaacatggtgttaacttacttacaagcccgcacttgttgctaagcaagatgtcatggagattgatttgatccccgctaagaacaaaataacgccttttgcctgggaaggag

SEQ ID NO: 219 - DNA, 2646 bp, Emericella nidulans
tgcacagctttgtcgtaagctcagcttgacagctcgctggtccagactttggccgcggtgatgagcattttttctatgcatagcctgtggagaaaggcctgggggttttacggaatcgagcgcggagggagtcgagatctgccgtctatgttgacgatggcgcccgtgaagggtactttgtggataagaaagcatggtgggcaaccggtagatacttgtcacgctgatcgagggaactcgcagttggacagatcactttattgcatgactgggagagaccatacagatcagtatatgcaggtcgcatagacaaggtaggcgatataccaaccttttgcagcgctgcaagccgtcgggctggagccacgcagatgaggcacgaagatgaccgcctgtaccgatgtcagtgagtgaactcccaaagcaagaacgcaaaatagaagccgaagctaaagaaaaagaacgaaagcgaagctcaagaaagcaaagtcagtccgctttagctctaggtagaagtggatatgggtatagcttctcgatcagtcaacagtcaagcctgcgactatgcgatgctggttttttaaacactaagtcttctctgagaagaggaacctgaattgaaagggcaagccccaaggtagataaggtagatatttagaggtgggaaccgagggaaggcggatggagctgctgaagctatccacggtttcgatcaacaaatggggatgttggcccagcaacgccggttacgagggctggccggtggagcgatatcatcactggcgccctggctaggacttgcagtcatcgtgattaggctgcgatccaagtcgctagcctggcgtcggtctgtaaggagcctcttgtccttggtggtctcgactttttcatttcatcgatgggatgcaaacccggccttccggtgcctgcagggtgagacatcatcattaagcgccctttggtcgcaataactggaaaatagtcagcaagataatcgtttcatccatcaattattaaagtcaagggatcagcatcagcgtccacgtcggcaagtcccaacatcttgttgtcgggtagcgaaacatggaactgactgaagctctcccgctatggagatcgtttatgcctcaagatccaggccacaatgacatcagagaaaacaggtggtccgaactgagtcccgtgatttcttaccctgactaagtaactttaacgtgttctgcactagtccatttccagaatttgcttccacgtgaccacacaatcgacttaaacgagcccactctcccgctctacaagttcttttcgcaagttcgcacgaaggttgaggaagacaagttctgtcgaggtgagcatttcccagtacacggtgcatgaggacagcactgttcaacacgacttctctctctcgacgtgtttttggccagcaagacgtttggtgttcagcgcacaatctcgcggcgacaaaaattcggagaggcagaaatgaagctcgaatgaacagcaaaattgttctcaagactcaagaatggaacactaactttctatctcaccaggccttccatcatgcagatcttcgtcaaaaccctcacgggtaagactatcacccttgaggtggagtcttccgacaccatcgacaatgtcaagaccaagatccagggtgtgcctccctcctaatcaccacgattatccacaaaactgactctaagctctacagacaaggagggtatcccccctgaccagcagcgtctgatcttcgcgggcaagcagctcgaggacggtcgcactctttcggactacaacatccagaaggagagcacccttcaccttgtcctgcgtctgcgtggtggtggtaagaagcgcaagaagaaggtctacaccacccccaagaagatcaagcacaagcgcaagaagaccaagctcgctgtgctcaagtactacaaggttgatggcgatggcaagatcgagcgtctccgccgtgaatgcccctctcccgaggtatgcaatctgtctacagtacatccgaactatagctaactagttgccagtgtggtgctggtatcttcatggccgccatgcagaaccgtcagtactgcggaaagtgccaccttacctacgtcttcgacgagtccaaataaatgggctagttgagtctgccttcgtgcctgtcaatttccgtcgagggaggctaagttatgggtagaggttctgcgttcggatcttcttacatggacttgaagaaacagaagccttaagaggtattgcaatatgaatgaaaaaatctcaaaacaactcatctagccggtctaccggtatcctagtaacgatagtagtatgtacatataagcgagcgtatcaacgtaacgaagtatggcatgtcaacggagagaaactcgaccctaaccttaccctaggacgacgggaagccagccttgaggttgtcgtactggctgtcggggtagctgatggcgttctgtgtgcgatccaagttattgacgcctccaacatcttcgacaaaggtgccaatcaagctgccgtcagccttgttcgcagtcttgccgcccttatcagcactagtttcccaccacatagctccgccgagccggcgatctgaatgtaggcggccttgaggtcggccgcagcaca

SEQ ID NO: 220 - DNA, 122 bp, Emericella nidulans
  unsure (1)..(122): unsure at all n locations
gtatcaagacttccgnggtcgtgagatcgaggnnactgtgcagggagaggcaagtccgtcagtggaccaatgtntgtacgcaagggaagaagatcaaacttgagtatttgcattaacgtacc

SEQ ID NO: 221 - DNA, 555 bp, Emericella nidulans
taacagggcctctaagattctagatatctagtaaaaatgatattagtaatacctggctggttacttctagccaggctagtattagataatcagggtctgtttaattactggttagttaatggcaataccaggtttaagatctctaatcttattattataaattctgctaaggcttaatatcaaggtccaagtgcctcaggagacttcaggtataatcaagacctagggtcctcctctagaatatatactactagcaaactgtcagaattagctgctatttttagatagactttattgtaatattactacaagattatatatataattctatagataaacttaggactagaaaggttccatagccttggggaactcttaaaaggttagttctaattatattagccatttattcttcttttattttttttattagattagaatccttactcattcgatagactaatatattcgaataaagcagatttttaatatttttaaatcttttttttcactaccttaaggataaccataccctagaattattatttagataaa

SEQ ID NO: 222 - DNA, 1390 bp, Emericella nidulans
cctggtttatcaaccaagacaagctataaaccaattacttcccgatatgagttttttacgcagcgaatccattccagcaagaccttctagccattctccatatgctgcaacgggtgtaattcgacgcccgtctccaagtagtcctgaacggtcttgaacagaccgacagcaaaatccctcaaactcccaagcataggtcaatactaacattggaatgccatcgaccagctctatagtgaggataaagtactgcacatcataagttatataagcttcaacaagatatggatcgctgactactgaccttgtagtatgctaccatgacactggcccagagcttagtgtcgttgtcgtcgccattatccttctgctgggcgatagatcggtgagctgtggactcatgtacctctccagtctgagccgaagaaaagcaatagagtaatattggtgcagtaagctgtactctactttggtcggggtattggctgcggtattccttaaaatcccgaaaccaaagctgcgttaggagaatggtcaaatcattcagagacagtccatctctgggcatctcaacatctggaagacccagtttggtcttcaaatctgatataatatacttcaaaattggttagtagacaaattaaaccaggccaagaatgcatacctcttcatggtaatagacatggccttcgggacacagaagtccctcatccgagccaaagcggtctcaaagtcccggcgaaaattctcgacagtctctgttgtaggctttcccttgattcggcatggtgtgtttcttacataaaattccaaaaaccctttatatgttttgatatcagggggagagcaggcagcgggatgcagctcaaggaatctggaagaataagcagcaagcctccatggttctagggacttaacctgtcaaagatcataagacttcgatgatacttttcaggcgttcgtggaagaatgctcgttgatctttttacattgtgctcaacaggatgaccaccgcgtaaaatagctgcgggtttgttggatcttgagataagcctaaattggggaaggatagggatgccaccccaccctggtttaagagatttcttttttgagggatttttggccttttgcaattgctttggtggcggggcaatacaaggccaaatttccttaatggcgcaatgcggaaggggcacccccactattattggggaacaaatataatggggttttttttctcgtcccatacagcgtcgacgcgtcccctgttttttttttgaagaacttgtgggtgggagggaaggaactttattctttcttcttttcttcttgcgtgagttcttttaatacgtattacttatgttcttttatcataactgtagcctactac

SEQ ID NO: 223 - DNA, 464 bp, Emericella nidulans
attccgtggatccccaaatatgcaatggggtcgttgcccccgtcacatccgcaggcagagataaacccctgtacgctcacggctctgaactcagcagcccgcgcgcaacgagcgagtagctcatacctccgccccaggagaaccctgtcgcgaacgagaggcctggtccacgcagagatcgtcttcaacctgctccatgatggcgtcgatgaaggccacgtcctcgccgttggtgttggcccagccagcattcagaccgttgggggctacaaagatcgcgctcccttgcgcgcgggcctcgaggcgtaccatggctggatgctgtcgccgttcacgagattgtacatgttcccgccgcgccagtgaaggccgaagatgagatgatgtggcttgcttgggtcgtagccatcgggaattttgagaatgtactcgcggccgtttatttggttgacgccattggtgag

SEQ ID NO: 224 - DNA, 166 bp, Emericella nidulans
ctggacgggtgtaacataccgagaggaacgaaagctttgatgccttcgggaacagcgttggggatgacaattgacagtcttaacttgaatcagaggtagaatcagcaatttaaggcgtttggtgaccaacgtgtttgatgtctccgtgtggtgtcctagtcgaggt

SEQ ID NO: 225 - DNA, 291 bp, Emericella nidulans
gctggccagtgaaacggagggatatatggaaactgaggagaaccccagaaagggtggtaagacgcagggggtggcactgaacctggtgcattcggcgcatttgtctgatgagaagggaaagcggacaagctcgaggcttatggtcttgtaaggaaggtgaggtccgagacttgagggattttctgggccattgttcggtgagctcgatcgttggttcgctgactcggagaagctggggaagctagagaagaagctatccgcatggcccgggaaagcgcctcggatacttga

SEQ ID NO: 226 - DNA, 405 bp, Emericella nidulans
tagattaaagaggaagtacttaagtagtaaattctttttttagatctatacagagcagctcctataaaagcttatatataagaaatagctaatattctgcttataaagtatagttctaccctaatccagactattagccagaaataggtatataattatatttaatactatctagagcttaagtcttgcttgttaaggtaatataactactagtaaataaagtaaaaaaacctaaaaattatttaagtatagtttaatattatataagctataattaaataatacaagatcttactagataatatctataattttaataagactagctttgtattaggcctttatatatattagacaataattactaagctagaattatatagctaaaaattaattctacagcta

SEQ ID NO: 227 - DNA, 977 bp, Emericella nidulans
tcaaatataaaacgttataataacgttttttatataattgcgaacattactcctatatttagtattaatttataattataaatgtttttaacataaacgggcttaattatatctttatactaatatgataagtaaaaaatttttttttttcaaaaagtgtaaaaaaaaatataatcttgcactatatattataaaaaaacaacataaaatataagataaaaaagtatttatctatacaataaaggtatagagtaatatccccatttccctatactatgaaaaattttgagtttgatgatggctctgattgaacgctgtccaagtacttgacacatgctaatcgaacgactaattagttattaaactaagtagtagtggtgtacaggtgagtaaaagataatttggctaccttaaagtaaggggaaaaatcccttataaaaagaaaggaaaaagaaggtccgctttaagatgttaattattatcacggtgagtagtagtaaaggtaatgactttactagctaaatccgtagtcgtgactgagaggtcgatcgacccattgggtctgaaaaaaccccatgcgttttagacagcagtgagggatattggcccatggcccgaaggctgaaccagaacttggagaatgaagtgtttataataaacaataccgattttatcgataaaatctaatagaaaatggtatggcaatttttatataggctggccaactccggccacagtccggaaatcgaaaactaggtaaattttattagtaaaggccccaacgaaataacttaaaggccttttctagttttggaagaaaatttggaggatatctttcccaaacgggacgaggtctttttaaacctcggacagttttcaaagtttctttcccgcccctatgatcaaaggttttattattaaaggatcccccattgtctatcatcaactccctcgtcggttattttttttcaccacta

SEQ ID NO: 228 - DNA, 4930 bp, Emericella nidulans
attatcatcaaatgattacttatctattttaataggcattaatttggaattatcaaaaatatttttctaaagtaatgaagtaacttagttatttgtttcattaaatagtgaaataactttattatttatctagtatatctctctatcttattcttaaaccactgaagtgtataagcctgggatctcattgccgcttactaaatgataatgcgcctgttatcctcgctctcgtgtcctaactgggcgacctgcagccaccggcctggtcgcactctgggccgtcttgtaggaccaggtgcttgcgtcaccggtcagctacatccataaaaggcagaatgggtcttccagcgcaggtactatatactcatgggtcaggttcctgacgcgccgcctcagccgctgcatcctattgcgtttaatacaccttccctgcagaataggcagccacaatacagagtatcgttgtaaaaaaaagtagtcgggatgagttagtaaggttgcagtgcgttgatgtggattgcctcttattatgtgaccatgtaacgggcagatcttcctatgtgctaatgtaggcttggccgctcaaccaaaacggtacagagcaactgatcagataatcagttccagaaagatcaattgcatccagcgccttatatagcatagaaggctgtgcctgagcccgcatcctcggggttatcccatgaaagaccatgaggtcaggttataacgcctgtgctattaggccaatgagatatatagactgtaactcttagctacttgcctttataagtatttacttttaactttagatcgtccactggtctataaggtaacacagtgcagttcagtctgccatttacttagtaggtattgattcgcggccaagtctcataaccccatcatcactcgccatgttcgagtcggtctatactatcgttctccacggcaacgacggcaccgggaaatctactctcaccctcgccctcagggcggccggtgaggtcgtctatgctcgtggtgacgaagatcccgcactcgaagataccctcgtcgttaggtccttcgacagattcacgttacaacttgccgacgacgaccgtgtttctctccccgaatcgtacacggacagagatggagtacaccgcagaatcgtacggattatccttgatgcagacctccccgttcttcaagcgcggctcgcgaaccggccaagcacggacaagtgggagtccgaaaaagccctcttttacttccgcgcgcggttccttgtacgttctcctcatttcccctttcccattgcacaattttgacaggtcatcaggaattggccgcgttctacggtctgcccgtcgtggataccggaaagaagggagtcaacggaactgtctctgacatcattgctctcgcccgcaaccccaaggccctcgcggtattctccatgcttgccttgcgcacactgactcctaacgacatcgcttccttggccaggccccgtgcggtgatcccgggcgtggactacgcccagcggctggaggagatcatcgctattgagtgcggcgagacgtcaatcttcacgcccgaagacgtccgcgcccaatgccttcgagaccctggtctcgtgcatgcgctcgtgaatcactacgacaatttacatgatgcaaatgttccgctgcgccttcgtctggtcgtcgagggcgagtcgaagcaaatttacaaggtcgagacgcccctgacccgccactttgacaatcgcattctcgtcttcctcaagccgaccatttactcgcacagcaagcaggcgacggcggaaattgcaggtctcggcgcaatccgtgcagccggctcccgtctcttccttgagatgctccatcgcgcaggaatcagccatacgtacgacggcctgaacgtgcatgggctcatctgggcgcgcagcaccgagattacgcagatcgagaccgtgtacaaaggactctgcgcgggaacagacaggcactccttcttcggcatggtcaccgatcccaaagttacgctgccgacgggccagtataagcgcgggccatacgtccgcttcgactggcggaacccgaaccacacgtacaagggcattaatcctgcgacgcacccgttctaccatctcatggaagcgtccgtcggcaaggatgtcttctacgataactacctcactgggcgcgcaaagccgcttggggacaagtgtgtaccggaggagctcgtgcacggcgtgcaggacgtcgaggcgtccgtggactggacgatgcgcatcttcttcactatccaatactaccttcatcagatcgggctcgaggttcaggacggctgtgtcatgctcgatccgaccgggcgtacgatgtggtctgagatcaaccaggactgcatgcgcatcaagtggcgcgaggtcaccaatgcaaacggccaagacgcgttcgacaaggacgtctggcgcgcggggggcagctctgcagaagaggccatcctcgataagtggacccagctcaacagcctgctccacgcgcaccttgcgggccgcccattccacgagcacgagatggtcaccccgtgcgaaccatacggcctgcacgcgcgggaagtgctcgcggacaaaactcttacactcacgccgcggtaccgggcgctgtacgaacgtcttgccgcgcatgatcgctcacgcctgcggtcagagtccgcgtccgaggccacgtccgagcgtctgctcgcgctcatgcaggagcacatctggcagctcaccgccgccatctcacctcacaacgcgcatgaggaagcgaagacgatggtccgactcacgaacacgtacgcgcgccgagtcgggctggccccggcgcaagtgtgcgcactcactgactcggacgcggacgccgtcctcgcgcgaccagccacaccgattggctccaaggcgattggcgtgacagcgaacaagtatgcaggcaagacggacgtttttgcgctcgcggagctgggcgtcaagctcgtccgccccgagggccgctgcctgcgcgtcgactacgagattgtcgacgcagccaagttcaccaaagcgttcggcgagggcatgagcgtgcacttcgtgcctaccaggccaaaggacatgccgggcctcctcgtgcagggcatgctcgacggcgcggtgacttacagctcagtgatggacaatttcccgactgtcgcgcggctcgttgcttcagcgccagacacggacatttcgctcgcgctcattggccggcgtggtcggcagatcgacccgcgcgcgtggaccgcggataagcccgcgcgaatcgtggccgagcatgtgcgcatggtgcgaacattctttgctggcctcggcgtcccaccagatacgtacgagatccagcgcgtactcggctcctccgagtcatacctcgtcaacgacccgcgcgagacataccttctctgcgatgctatcatagctaccggtggcaccctccaagcgaatgatcttgacgtctggcaggtcgtgaaaagcaagggtgatatcgtcgttggcctctatcagcgactgtgacttgatagagtagtccttgaacccaagggttgtcaaacaacacaaacatgctgcataaactatattctgattaatcagaatttcaaagcagagaatatagcctgaatttggaggttttatatggtatgggttcttggcgggtaacccgtgggttcgggttctgtcctccgacccgtcaagggttttgtcatggtctaatagagagacactctcatcttagtatatatattgccgttgattatcacactagtacaactttccgtaagctaggccaacgtgtttcaggttggtagcgagtgagcatgatttggatgccttcataataaagaaccgactctcctgcgacggtttggctcttttttatgttatatctgtctacgtagcaaattctagagtcgaggtgagtgagaaattgtcgtctaggggtactgacagaagcgaacgtcggcagcttccttagggtagtgcgggccctactcccgtatttctggatctactttaaggatattcgcgagcctgttctagctaaggatttgtagttgccaaataatatcaatacatatatcacggctatatacacttgatcagtcagaactaggacattcactgagttatgacaaacaaatgcctgacgccttcgagactatctccggtgctgcgaaacctttcgtcattgcatgatgcctgaagggcagacactttgttattttgccttgaactacttattttaaacatccaaaatctgacgcggcagcttctttttgcgaacaataagaagccggcatcgactactacctattcgtaggttttcttgcctctatatccacgtgccaccgctgcgcatgctaaggattgaaccacacacaacgtcacgatatgcttgtagaagtagagaagttgtactttacggctcagttttcctgctcgcctttgttctgagtttcctatttggctcctaagcggcttgtcctgacgaagggagtaggggaataatactcacataagtgcatatacgcacgcataacttgaaacggcaaatagcgccacgattgcggcatccctccaaccgtaaaagtagtccttcaggtttatggtgtagagatagtcgcttcctgtccggtattgacagaccttgcagtcttgcgtatcgtttggattgagtaggttggttctcgatccaagaccctgcatgtaatcggcgaggtactctccacaagtctggccgtccggcgtattgaagacagcaagttcgctcctttcgcagtgaactggcgcatcgaacgttgtgaagacaagcatggaacccatgaggtagttgaaagggttcaggtagtagagccagtatcgccagacctcatggatttgtaatcttaa

SEQ ID NO: 229 - DNA, 1297 bp, Emericella nidulans
tctgatctgtgaattgcgtagtgatcagcatgctttaagaccgctgcttttctatcaatctcgaaaggacaataaagtcaaagagagtgaaactggagatgcttacccttaattgtaattgccagagtttattaagctgatagtcaattttcctaacttatctttttcccgtgctttgctcctggtgttttgaactaccgtattaaccggtggtccttggctgaacgacctctcacttgaataggagttttggacggcatactctgctatgaagaacgttgacatcttcattagtccgatggtgcaaggttgagctgaatgttattagcaaggacttgaagttccactgatctgcgctgcaacagctcttgattataagttcctggtatccgacgcttagcgaaattagcgctttcttgtttctctgagctagagtgggataaacagtcaatcggtcatccgttcatcactagggttcccataatctcggagatgacactttgtagaaccactttgagcctaggcctgacaatccaaagtcgggctgtgtctcatatatgaccgctagtcatgcacatgacttcagaattatggacgacgacagtcacatctaccgtctaccatgccttacactggatttctgctgttatcttaactcgaccgtaagtgacagctagtcatatatgatactttcctgtcttgaatatcggaactgcaagctccagcttgccgatttacgcacagcttttctgctgtttccgcggttcttaagttatgtctcttcccactaccgcatcggactatgctgggaaaatcaggccttcacttttttctcgcaagagcctctctggttctgattgcacttcttcataaagagaaaaggaatttcgaccacaccaagtgctatcttcgttaccagtgcgttatattgagtaatatcttcctttactgagcgactacacttgcattatatccagataatatatgttttagcatcttcgtgctcacccactaattcgagaaccctcggtgtgctataacatataagctctaggatgctcctgataatccaggaagtttgcggctgctccggctagtaactctcgttcgctcatatagctgctttgatgcattacaagagtcctttctcccagagacaaactgcaatcatagtgtcaccagttgaattgcaacacagcttcgcatttgagcgtgccttgatatatgactaacgctttgcagcttgggatacctatgatcagctagactcactcatttggacttgtgagcatgctta

SEQ ID NO: 230 - DNA, 894 bp, Emericella nidulans
agccattgaagtactatttattaaagagccagaaagggtttaatatatatttactatagtactaaatactatagaagagagtaagaaacaatagcattatagcaagcttcctgaactaccaaagaactagtttaatttactatagtatctgctaaggaataaatttatagcagcagcacacctagaaattagaggattagagataaaagaagtatttatacctgttaaataagaagaggcagcagggaagcagatcctgctgcttaaataggtatttatatataagtttaacaaggatagttactttacaaaggcaaaggcatgtatctgtataaggggagatcttaaaaaggattatactgctaataactatgctataactgctttagcaagaatatttagaatagtcatagctttaatagcagcctttgacctggatacagactagaaagatactattaatatataccttaattccttgcttaatacacctatttatatataaataccagatagcttaaaggatcagaaagatataaaaagtagaaaggtctattaggctcaaaaagctagacagtttggcaggaggaccgaaaaatactataaaggtaacctttctattctagagaaaaagcccttttaaaaaggtttaatatccgggtttttatatatatttttttacccccatccacctccggggggggtaaactcaagaaattccaggtttaaccttttttttggggagggggggttggggaagccttaataggacaaaatttgtttcaaccccttaaattggtttttaccaccgtgaaacgaattttggtttacctttttaaccaccagctgataattatatttttctccgtttaagaattttttcctttatccaat

SEQ ID NO: 231 - DNA, 5080 bp, Emericella nidulans
gctccgttaaaaaggagtttgcgtccggtgctcgtcctgccggtcgtatttccaatgttctacatgaatcgctccccaagggctctgaagtcgagatcagcatgccctttggtgattttgtgctcgataccaatgccaccactccagttgttctgatgagtggtggtgtcggcttaacaccgatgatgtccatgctaaagaccgttaccaacaattccaaatcgcgaccggccgtattcgtgcacgcggtgcgcaacggacgcgtccacgcgatgaaggagacgctagccaatatcatgactgacaatccacaggtgaagagggccatcttctatgagcaggtggaggaaggcgacaagcaaggtgtggactatgactatgttggacgtgtcgatgtatctaagatcaaagacctggtgttcttgccggacgcagactactacatctgcggcccatcgccgttcatgaaggcgcagagtgaggcgctggagacattgggagttcgccctgatcgcatccatatggaagtctttgggtcgccgactccataaccagcagcattcacgaaatgttcttgaaaagtgactatttactaagtgtcaaagcaagtcagataaatgctatcctccaattgcgaaaagagaataatggcttggaacgagatgagagctggtcgtgaaagtacagacgaaccattgccacatttgtgccatttggcgcgttctcctgggtggcaccctcatggcggccgtgtgtgtgctctcacgtttgttattattaatgtcacagtgagcctagtctctcacacattcctccattcatcaaggtctacaaggtatcgttcatcatcaccggcttgtttctgatcgccgaaggcgggccgttgattttgttcatcgactccacatcgtcaacggacgccatttacggctgcatgatgttcgtcgcggtgggtgctgtgctggactgtcgatggtgaccggatataccgttgccacgttgacccgaagcaggaagacatcggcgccggactcaggacgcagaattttcccacagatcggtagccaggtatatgcgctcgttgtttccgggcagatatgccagttcgaggtaattcggaacatccttgcggcccttgctggtagtagcatttcccaagaggtcatggagggtgcgaaggccagtactcagagcaccgtgtttcagactttggatggggagctgcaggagagggcgatccaagcggtcatctaggcagtgaagcccacctatgtcttggttcttgttgctggagaggttatgacgttgctcgtcgctttgtgtatgaagtgggagaggctgtttggaaagcctgtcgtattgctgcgtagaagattgtcatcgaactctaacaaatcagcctcgcccttgtatggcctaggcggaagtcgcacgctgagtatataatactaccgaaataacctaaccttgactgaagcctcctcagttttattgttgacgtcgcaatcattgctggcgcttctgtgctcagtcagaaagatatagtgtgttaggcacttgacgtcatgaccacgtatgattatcaccaaaatagcccctgcgaaacgctccttgcatctgtctattcgcacaaaccagtctcatctaattatgcagcatattgtaattgacccgaaccatctccagccgcccacccgcgataccggcaccgaccaggttccgcgaaccctgccgccagtgaagaacagcaaggtgcaccccagcaaaccaggcagcgagaatgcgtcgatctatttcatcgggaatgccacgaccatattgtaacgaccttatccagtatgtcacatagtaggctgtactaacggagcacagagaatggcaaggtgtgcgtatcttgacagatgtgggtatacactagttccatgatataacaagcctgacaaaatgcaataccgtagcccaacttcctccacgctggcgaccaccttcaccttggacctgggttgacatcaacccggagacacaacccggcagttgagctgcaggagctgccgcgcattgatttagtcctgctgtcacattatcacgagtgcgtgctcatctcctttgatttagataccagccaactaactacaaagctagagaccactttgaccgcaaagttgaagaatccctacggcgtaacctacctatcgtgacaacaagccatgcgaagtctgtcttgacctctagaggcccagactcatttacgaatgtctatgacctggaccctttccaccaaatgatgatcaactttgcgaccaagatagaggcaaaggaccagtatatgccaagcctgcgggtaacggggatgcccgggaagcacgctcctttgggcacggcaatggagagtctgaacgatatcgtcggggcggtatacagttttctatccatcttacttgtctgaataatgcttacaaggccagatccctccaacaaatggctggattctagagcttggctacggccatagcgcggacggatttaaagtgggctaccgggtctacatctcgggcgataccttgatgtttgatgagctcaacgagatcccgaagctatacggagagcataatattgacctcatgataatccatctaggtgctgccatggtaccgtcaccatcgctagcaccattcaccctgatggtcacgatgaacgcaaaacagggggtagagctgatgcagttggttaagccggacatcactattccagttcacttcgatgactatgatatcatgtcggagtcgctggaggacttcaaggcggctgttgcaaacgcaggcttgggctgtggtgtcgtgtacctggatcggggggaggagtaccgcttttccgtaagacgttagctcaacccttggtcaaagttacaatcaccataatatcccagttttagaggtagtctttcaccagtgaaaaaaaagtttgaaggtgcactgatgagacggctgtgattcatcggctggtacaaagtgatttgacaaagggacggcagtctgtgccacgaacattgttagccaggaattgtcgcttgtgatatattggtaatgctagatatttaagcgggaaataatctattcacaaggaactaggagtagcttactcaggattgctatcactctttgccctcgtttactacttgtgttacataactatcgataataagtgggaaaagaaactaaagctaggcactagagatgggatgaatacattaacaacaaacggggaatacagactggagctcttaagacttgttgacctggaatgaacttgtgggccgacggccgagtccacttttttcataagccatatccagcatcttcatttgggcaatggagtcggcaccactaatccaatgttgcgtctcccgacccttcactcgattgacaaattgctccaattggtgtcgataagacatccagaaaggctcaccgggaagatccgcgaattcccctccagcctctttgaaggtgtaggccttatggtaggttgtttgctcccatccacggataaccttgcttgtatctcggttccggacctggtagatgtccttgatatcgatacgatgccagaagatcccatgcacaaagccgtggagggtaagctgacgctgttgaactttgacttgggtttgagggagagtctcatctgcgataatgacttctttttgggtcacggtgacatgcgaaggagtccagtacgtaggccccttcaacgtacttgaagcctctccgatagcaccgttgggaaatcggaacgttgcatgaaagtcataatcacacttatcatggaccccgtccgtgtatgcatgcacctcgcaactgagacactcctcaggctcagcgtcaaaggccatccgcagcgcacgcatgttgtaagtgcccatcgccatcatgcttccacccgagaggttgtagttgaagtggatgtcatccttactggtcccccaccacgggatcatcgagactgcgttgacatgctcaatgttggccggatcgattaaagagcggaagtaggaccaagccgggaagaagcgactgtgaaatgcctcgagaatgacaggaccatttggctgcgacaactctgggaggttgaagaggatctccgcctcggtcgcgttggacactgatggcttctcaaccagcacatgcttaccggcccgaatggctcggacagcccattcaaaatgtaggccgttaggcagcggaatgaaaacacagtcgatgttgggatcgctgagaatgtcttggctcgtcagcggacaaatcactggggttagtgtttgggggttctctaccctcatatgaatctctgacttccgggatggaatgggcctttgcgaactcctcagccttcttccgatcacgagccgacactgcttggacgatgacttcaggatgagatttcgccggagtgatcagagccagtggtctgagcggaaagtcagtcacgttaggtccgacttcacacatgagagtctgtgaatcctcatacgtacgcaatattggccgctccgagaatgccaaacttgagagcgtctccgcgcttaggaggcggttgaggtgggctgaatgcctggtagattcgaccgaccatagatgccagggccgccatgatgctaccgtagtatgagcggatctcctcaacagcgaactctgcgcctacgcacctttctcttgcagacggttaatagcggtgacaacctatttggatgtggaaggaagagacagccgcggtaaaggatgggagaaagttggaggaaaagctgagaggaggaagccaaggcaggaagcgcctcgtgtctattaactggcagcggcccagggagctaaacacacaagccttgcgattgcggagacaaaaaccaacgaaactgaagtccaaccaattgagttagccaaactaccggtgaatcgctgccggacattttctgagtcaatcaccacagatgcctattccaggccgcgatcttacggggcgctatgtttaggcctgggaggtgcgcgggctgaaagatcataggatcctcagatctgtcctttgt

SEQ ID NO: 232 - DNA, 1263 bp, Emericella nidulans
ctatctctctgggccctttaagctgctttaccggcgaatttaatgaccgcgttgcgtccatgggctgctgcttcatggagagggactctccctgccttgtccccttcgtcgactttggcaccattctcgagtaaaaaatgcacaacatcgtcatgcccattggcggctgcttcgtgaagtggtactctctctgatttatctttctcgttgactttagcgcctttctcaagtaacgtcgagacgattctcctgtgaccattttttgctgcttcataaagtggcgtcggctttcctttactcctcttgtttacaactagatcccaattgggctgtttgactagcttgtcaagcagtaactcatagccattaactgctgcctcatgagccattgtttcccatatgttatcctggtttcggagatcagacctctctagcagatgaagaacgagtctctcaagtttgagatataacgcaacgtctagtatgctgggaaacttttgcgggggtgaaatactaggcttgctatagtgtgataacactcgtagccaagtgtggaaccgcttcgactgaggctcacagatttcggccgccagctcccaaaaatgaaagtctctggtatctgtgtctcgagcgtggttcatcaattggttgcagaatactgcaggaatttgtaccgggagacataggtattgactttcaaatcaatagtctcccgatcttcagttggatctatcagtaagggcgactcctcgaacttcttctcacagcgaagatattctatacacttcttcgctacgataagaggcgcgtcaggagagggccctaaacctgaaagtcggattgacacgactctccctgatttagtacctagcccaatcaccgaggttccagattctttcggtggcacggatacagtcgagatacaaggcctgtaacctggtggaagccacaatacattatcgccgttccacgtaatccaagaaaagtcgtcactcaaaccatagccttggcgccgcgggtgatgtccttgcgcttgacttcgatccaggacttgagacgaagcgaatccctcggtagccttactcctggcgtctaactgaatacggccgacgttcgtaatcagggaggacatgctcttgtcgaactgaatcctttgaatctcatggtccaaatcgaatgtgtgtcgaagggaatatatctccatatcccagatctttaccgtcccatcatccatcgctgaggctagaagatttgaagtgtgag

SEQ ID NO: 233 - DNA, 855 bp, Emericella nidulans
  unsure (1)..(855): unsure at all n locations
ggactccgtccagtaatcctggttttgatctcagggcgcctttttgtaaactctgttacccagttctttccaatttgtcaagataagattaaggatttatccaagataagttgtgctatcttacatacgcatgagggcctgggagctgctctataaatgttaagtaatactatccatcctatcaagacctcttcttgatgtagggatagcctatactggtggttgcagagttctgcttgagattggcggccatgaagtctccctcaaagtatattaggatgaattttgtatgcacgcgctgcgggcgcaattttttgaaattttccatttttaatgtcttgaatcgcatattagatcctgccctcttgctcaatcaaatctcgctttgttttacgcgcttttggtggcatgatggttgttgaaagttgaggttgataaacgcgttgnggtggacgagaaaactaccttccgcccgggatttacgttattactttattctggtaataaatacttactaattcttctattgatagcctgcttaaggattattaaaattaatttattatttaaaaagttctaagattttgctatatatataaaatattatggaataatactattaattagacagtttactaatattattcctaagatttagccctaaagagctaatataagataagcttcaaatttttttagtttcctgtaaaggtttaatgtaataattatagtttaccttctagattaaaaatctatttagatttgaaaccggacctataacaattaggtaggtttttaaaaggttggaactccataaaaacgttggtttcaaaatttttaacaccttcccccatt

SEQ ID NO: 234 - DNA, 188 bp, Emericella nidulans
taactgttctcaacgcaattacatgccttatatctcgagcgcagggtggcaaaatctaaggatgcggtgtagcaagactcttgatccccacgagctatgcctctttcgcctcaatataaaggacgaaagcgaccggagaacccagagctgcaatttagacccatgacgctacgcgtaacggagaggca

SEQ ID NO: 235 - DNA, 549 bp, Emericella nidulans
ggtactttgttagaatttcaaagggcggatccccagctaggcttgctgccttctctgacagtagttttttctttccctgttctgttgtagtaattgggtgcctagttaatattactggggcgtgtgtgatcacatctggaaccctcccagcaagggtgacccagatgccatgtagtctgatagcccggaggctggaggaggccaggaggcggaggaagatatagtagtcagtcttgtttgactgcttcagcttttattgtgtggtttgtttggcttgcatatgctgttcaggggcaatagtttgccagttcccctggccagctcttggagctgttagggatgcccaggttgtatgctgcaaggttcgcctgcctgggggttctttggacacttcaggagtaggaggttgatttggctgttccatctgcctgggtggttgtgggggtgcaaccgcaggcatctgaggaatcccgtgcggggagtcttgctatgcgagggtgaagaatctggctgcaagtccctgtgccaggtcttttggacgaccttgta

SEQ ID NO: 236 - DNA, 550 bp, Emericella nidulans
  unsure (1)..(550): unsure at all n locations
gttgccagcacacttgcgtcgtagtcaccgacggtttgtcgagaatatccgctgtgacaattgctgcgagttggtttcggagcgatgcgagcagtgcagtatcctgatgcattgcgtcgggtgtcggaaaactctctgcgccactngtgcctacgaacggccataccttcacgctcaagcgtcgaagaatacaacgacaggttctttttggtgggctccaggcgctactacttcgccctgttcgatgcacgatcctgctgagaacgctgatgattcagcggcacagcccaacacccctctgtcgtatcccgcattagaattccagtcggtcgatcatcgcgccgtacctggtccgactcttttgcgcgcattgactggccatcgtcgcgtcatcaacaagtccgcgcactcccttgccccgtggagagaggtgggaagaccttgagtactccgcgcaggaatggagcaaatcgttcccaagtatgcctacggtgacctcacaaacgggattacagccttgaagctggacatattgcaatgatgaagtggc

SEQ ID NO: 237 - DNA, 1115 bp, Emericella nidulans
ctgttgggtatagataatctcaggaatgggaaaggtattcctgtaagacaataaaatattagccacaaaacacaccagagccattcaaccctagaattataggtttgaaactcacttttccttctcgcccaggaaagtcttggtgaactccggcgtgaagtaaataaataactggggacgccctccatccggattacggattagagtcagcacaaggtcccgataacgcaagttaagcatagcccctggtcggcaaccagtgatggcagccagctggcagaagagcagcagttgtatccgaagccacccaaactgaaatgtcatctctgtcgttgacaggagcacgcgggcgaattccgctacgtcttcgatgaacatagttgccttcggtcgacgtccgtttttaaggcctttctcctgagcaacgatcgccagtacctgtagactattagccagacccaacatttgtcaggtcatcggccgcttacatccagaatcttcacagtgaggtctttgtttaggccctgcccaacctccgccttgtaaaccaggtgccaccatttccagaaggtctctaacgagcttttgtattgtattcctggtgtccggcctcccttcttgtttcgtcgccgatcgcatcgccaggagaagaacgctttgaagaatcggatggtttcctcagagtcagaaagccagtgaaagcgttcaatcggatcgtggtttccttcgtagcagaatctaaaaagactattagttaggagtattattggagtgtagagcccaatgacttctcaccggtcccagtaatcccgtgttttgtctaagctagcctgggttcttggactgtatcgcttctgtcggagttgcgagacatcaaggcattcagcctctttaaggtagtacgctgcagggcgttcctgttcgtcctcattatccaggattgaatcattgtcagaatcatcctccagatcatcatcactttcttcttcgggtgcactgtccaaggtttcatcatcggtgctctcgtcagagaagatgcacgatacatcggtgctggtgccgctgtcatcatccgacccgaacgctcgactgatgtgtcgcatggcagacagatg

SEQ ID NO: 238 - DNA, 484 bp, Emericella nidulans
tatcgcgcggatcgcttactttggctccatagcgatcaaatagcggaccaccaacaagaccagatccgaataggaaaaatgtctgaacagatccaatccaggcgatgtctgacgcactgtagttgctcagttggtgggtgatgtagtaatcctgataaacgctacactcgtggttagcacatcgaatacaaggtcctaggggaacgaacccaaaagcattgacatatccaaaagtacagaagagcacacctccagctcccaaggccaccatccaggctcgtgctccaccgtctggaaagggctcagactcgggtgcctttggaggatggacgatggattcatccttggaactctcgcgcacagaggacatgatgtgcgctcaagatctgtgtagaagcagagtgcctgtaccaagactcctgttattcatttcgataacctatcgaaagtcgggcatttatactagattgccctagtttgcgag

SEQ ID NO: 239 - DNA, 3849 bp, Emericella nidulans
ttctgagggctggttagataatgtaattcctaatgtcctatacatatcaacacggaattgaaatgttgttaatggtagttgtttgagcttaccaaaggcaaatgggttgaagccgtgtgctcgcataacgaacagcagttcgctgtccaccacacgcgagatacccactcgaatgtgagccacgtatccaaatccaccccttgatgctttacagcctctaaaactatctacagccgtcgccgtcgagttgattacgggacactaaaatctcagtgcaccgagcatgttacagctgtgattagttgtacgctgagtccttccgctgattcccccttggacacctagctttgcccctaaatcatgaaaggggctagctaggatttgtattccaacgtttactctactgactctagacaagtgatacatataatatgtgtatcccttgtacaatgtacagagtcaacagcaaacaatatgtagattcttttagggagtaagtatcaggaccttcttgatcaggcatcaggatcactggccgaaggcaaaaccctgcttacccgctgaagccttgcgctttccccccggaacgctacctccggggacattgtttgctcctaccattccgtgtttcgggagctggatccgaatgtacttacacgacacagctcttcacgctcggtaatggaagtaggtttgtagcgcatctcacgtcgtggccaggacgcttagactgaggaggcttcaaatacacgcctttataggccaatgcgtcagatgaggtcataccagagaacggagaccgaggacatacaaagatcaataataaatgtgagggccacgctatacatgatattgactggcacacacacctctatacggtgccgtagttctagagcggggtgcacgaaattgcgagaacgaaaagcacagcaagatgtaatcagtgctatcggaaacagcaggaggctcagctccaccgaacagccgcgctacttcggatacgaaggacgtaaaaccgatttagttcatgtcaaaagggtgcaaaggtcattgacggtttggaaaatgcgttgaaccgctgatatcaacttaattcgtccaaaatacgctgccagagagcaacgcacaaaacaagatcagagcgcaataagatgcggtttttttcaggccgaagtctaaggtaggcaggtgataggggtagaaccaaaactggccccaagatggatccatacaaggcctgcaatgatgaccaaggccatgtcgcctcgccacaaaaagggcaaaccttggctgacccaggcaaggctagtagtgtagtcacctcagccgcaattagtcatagtggttgctcacgtccataaccgcgctatcaccacgactatgcaatagctgagaggaagtaataaacacccaggataccagtgggtcatgagcaattgggccgtgaacagcaagcgaactgactgcagtcccggactgtattaacatcaaactttataaagaaagtttcgagaccaaacgctgctttggtggtattgctattgccattcagtttgctctcacagttaattctccctacatcctccttaaagaatctgtaacgttatcctgatactgttcaacgaggcggcaacttgttgcttggtactgtattttcaaccacatgcaggggcaggttttcgtgatgcagatggtgctgacgctgatggtgggttcaacattggatatgcggtgaaaagagtctttgctgcgggaacaatgccaaactggtaatctcgtacgtttgcacattcccacgtatgataatcccacatcatcaggtctgtgtcattattggaccactatctcgctcgctacgacggcaagtttctccccggcctgactttttcaataacgtgccacatccccaccgtcaatggaaacagcaaccatctcacagacggtggcaacacgacgtttggtactgagatacatagagttatcgataatgttattgatcaggccccgcaagcaatgcgttctgttctgtcatggactgtctccctctctgtatccccctcgtatggtacctgctttattggatcatctaggcagctcgccagttgctgccccaggcgttccgacggctgcccgcgcagcactgttctgagcaccttacacctatttagaactctggtaactcagctgattgccctgtcgggctttgggtcggttgaaatatccaatacaatggattattgaggggtccgacctaacccaattcctggcgagttggggtgggtttaacaagactaatataatatcctttttatggtctatacagccaataatagccaaccctccttcttgtgatgattttagctggaattaacacaaactcagggcatggtggctgatagaagttagatgaccgcgccagcaggcaagaaagtagttgggcgggcagctcgcttacaaccacgttagctgtagggccgttggttgatacaagttgggtacatgaaatcacgatcaggacaatgcgaggtcttgaccaacgttttcttgatattgatagtcaagtttcaaactcttatggactaggctaaaaaagctgtaattccgcatacactgcgaagggaccgtaattcattactcttctctattgtaaagatatgaaccctagatattagagggtagagcttatgatcctgcgccagctcagtgtggcaggccagtgggcgtccgttgttgccatgccgaggtggatggtagtgaccgctcactacgtgcatccttctggctctatcacccagcttggcctggcaggcgccctatcctattgtaaaggaaccactgcgagataaatagtcgctgctggcggctccgccgcagaatcggggccctggatgccaatacttggtaatgatgcgggctaaatacatacagcttatatcaaatggttaaatagtagcatgaggtagcggggtctagccgctagcacggacttggcaccttagggcttacgagggaatccctaagaagcgcagggtgggtctgcgaactctgtcgcgacaacgtactgtatggcccggaacccagacaccaccccctgtctcgtagctaacggtgtaagcctcagcccaacgctcaacatacagtaaccttttatggaaagtctcggccgttctattgctacgaaaaataccgactgtgtggatgttcggggacaatggctgcagctgagagaggacaaaaatgtatataaggacaggtttgccgctggataaaaccaacaacctcacaatcttttcttcaagtccaaaactcacttccatccgctcctttactgcaacccaaaatgcgcttcgctcctttcctcctgctggcctccctggctacagccagtccactccttgacaccaatactgaggtgactgatatcgacgtcgttaccagcctcaaggatctgaaacccgttgctgagctcgtcaacgactccaacgttctcgaagcccgcggctcaaccccctggcacaactgcaagtgcttcaatggatacatcaccgacgagaattactccggcgtctacgagaaaactctcgcttacgaaggcaactggtactgggggatcccagatgttcctcagggctatggagtgtacttcgagggtccctccaagtacttcctcaccgtcgaggtggtgggcaagaactcgcagctcttgaccaagaatcgcgtcgggaacattatccagcagctcaaggtcgctcgaggcgataagcaatgccgaaccaagcctgttgtttactggaccaaggacgagaatgggatcaagacctatgttaagaaattctaagggatatgcta

SEQ ID NO: 240 - DNA, 468 bp, Emericella nidulans
attatatttagattaaatattcttatttagatagttcataatactatttcttaatatagtattatattagctatatagattactgcttataaaagtaataatataaataactagattattttagattatttaggttagtgttatgggtcctttgcctatagaaggaccttagaccttaataactcggccaaggcctgcgctgtcctgaaggcggtgagcacctacaagacttactcacaacaacaatccttctttctcatttcttctttagcgattccttgtacgtacggcacgtctagataggaatatccatctaaatacgtcccattacacctctatataaaattatatatagaagggttatatagctagaaaaatactacttaattaataagattttaatagcttatatataaatacctccttatttttagtagaaatattagttaactatatatataatactta

SEQ ID NO: 241 - DNA, 581 bp, Emericella nidulans
gtgacccccgctgcagcttgtgctaatggtggggattggtggtggagtccccagcaagagcaatgacattcgattaggcgacgtggttgtcagcaaaccgggacgaaaacatggtggggttatacattatgactatggaaaggcagttcaaggcggacgtttcgagcccacaggcatcctgaatcagccaccgcagtcccttctaacacatatgagccaactgcaagcgaagcaaatgacagaaggcgaggatggtatttccaaaatagtgagcgatgtattgaaacgaaaccctgacatgaacacaaggttctcccctccggcacggaccaccgattacctctttgagccctcctatcatcatgctgataatgattctgattgcgaaacgtgcgataaaaagtacttggttgaacgacagccacgtttgacggagacaatatatgtccattatggcttaatcgcgtctggagaccaggttatgaaagactcagtaacccgagaccgtctagcccaaaaacatggagtgctctgctttgagaaggaggccgcaggcctaatgaacgaactcccaacacttg

SEQ ID NO: 242 - DNA, 541 bp, Emericella nidulans
tcctctagtaacagtaacggccgccagtgtgagggacgaatgagcatctgccttggtctctttagccctgaagggtcgatttctgactcgcaagcatgtcgacctgcgagttaccgtgtcatatcgctcttgcgccgcttggattttgtacactgtacccttcggccctggaagtacggatacattgggctttcaggtgttgtactcagtatgtttatgtatggctagcgaactttgagtagaggaaaagtaaaggatattgcaggctttttatggttgctatctactagcgtgcatggtcggctgcctccgcaatccctccatcgtttccttccggcgactccatggacattgatcccccttcctcaccacccgagcttcattcgcagagcgttgattcacggcaaacatctccttccaagttaaccaaagacagaaatgccaaaaacaaaaagaaaaataggcccaggcgattaaggacccaagcaagaaaaattcgtattctgttcctttggaaaccgagcaagctgaacaaaatgag

SEQ ID NO: 243 - DNA, 2191 bp, Emericella nidulans
cctaggctgtcttctctgggtcgttttcctctctctcgtgtcagtaatgatgtttgcatattagacctgcactgagttaatgattgtccaggacgctaaaattatcccatccgagcccatccatatctttaacatctaaccattgcaatgctaggtttacaacacgaagtcttacacttcctcgcatctcaactcttccgcaactcccattgcaagcattattgccctcgtaccattacagtagctagacaatctccctttaccgcgatggagaaccccaggtcacggcatatgcaagctagcgctgcgcatgcgatagtaccttcttcgaaacgagtcagtgcgagattggatacaaaaacattccaccgtgtctagagacagcctttaataagcagtcacggggttttattgcacgtacgacgtttggttcaatgcgggccgttggttatgaggcaagcgccttgagaatggaattgttgctactggaggctaccttattgtgcattaccacctttctagaccatttctgtgtcgtctacctcaattgagactactatcttcttttcgtaccaggaagacgaagaatggctatgaacttttgacagggtgatatacctaccttggggtgtggtgaatggctgccgctggaattagggctcgggtggggcatcgcaaaaatggctccaacacacgtaggattaacgatggaagaatgaagagctggtgtagtcaaaactaaatcttggggatcccccaagtccaggggacctgctttggccctaactatgtctatagagtcatacacatgcaacctggagcaacatcatgacgaagccgtgtccgaacggcgactgatcccgacggttccgccagcgtagcatcttccatagacgaacccctagatctcgattatacccagagcctccattgttgctgggctgaggctcctgaccattgatatcgaattccagtataatccgtcacaggtaccagcaggcagacttagtgctaagtcgggatttctttcggagtttctttctttgcccggcctgccctgtcatgctcggaagcccccattatccccaatctagattgatcaatgacagatattagtagggttgacgaagagacggaagagatccaaccttcgtctttgtaattcaataggtcatcttcatccacctaagtagggtatttgccacctcgtcgacagttccacggcaacacacggctctgtatcgtccgtcgtgtactgttttacgcccccaggccccaaatcccacaagagaaaagagagacaggcatacgcccaagaagcagcagatagacttctacacctgtatcgtatttctggccctgaacagctgactcagactccggttcctcaaatcagatccccgcacccattggtcccatgcctatactcaagttcaggtgctccaaatcccgctccgttaccagaacgctgtacctaactggcctcaaataatctccttgattcgtcgccgtcatccggcggcaatatgcatgatagagcatgcatctgacatcccgccactgatttgacctaaaaccctaccttccggtgctctggagcagcagtcgctgcagaagagcgagttcgctgcttgacaaatagtttcttcttatgccagcagtatagtttttcattctggaactacagcttatacgagtaccgctggtccacatgcaaaggcgcctaaccaagatcctataagccacaagttctccaacattcagtttttgtcaccaggatcatttcttttgcactcaaaacacggcatcttcaatcctctggaactaacgcattatgtatacctatgggaggcaaggagacaccgcacatccgacaaagacagcactgctcaacctgcaaaatatcgcattgcaactgcattgcagtctaacactatcacattaaatcagcttatttctgtccttgcgatacagcctatgccaagtcaccaaggaggagaaacaaacggaagttgattgctgcaagtgccttgaaagcttttaaagaacctcgcggtcctcatctgcgaatccatcaaggtcgacctcgacaatagccggcgaatatttggcttttatttgtggcttggaatcggaatcctgacgtagacagcaggcccaacattctccctaggcagggttagtggtttag

SEQ ID NO: 244 - DNA, 522 bp, Emericella nidulans
gtatagccaggagattataagtaagttactactattaaatatattaatttaactggatagtcagttctattaactattatctttaagagaaagtactatagagagggatagtttaaggaactctctattctacatgcctagaagattaagggtagtaataataaatagattatagatataattaggctttgctggctttaaaaatactttattctagatatagaggtaataaagaggggagtatatactttttattctaaatagctatagaagctacttgaccttgacctttaatactatatataagaataataatattatccctatctatatacctccttatttatcttacctcctataatctctagatataggctgttttagcccttaaaaagagtatataaatccctgattgaacagaagacatgcctaggatataactatattaataagcttaatttcttaaaggcttatttagatacctataagaaaatctttataataaaaaatatttaaagcaga

SEQ ID NO: 245 - DNA, 465 bp, Emericella nidulans
  unsure (1)..(465): unsure at all n locations
atatcgtaccacttctccctccactccttcggatggtggtcgagtatctctgtggcgatgaaacctggcgatatacagttgactcggcaataatcgacccactcgacagaaaggcattttgccagttggaccacggcggctttggaagcgttatactgcacgtgtaggacctctgttagccgtccctctccgaaacaaacttagggcatacgaagggaataaggagggcccatacagcagcctggttctgcggcacattcaccagacttgcgctcacactcgctgtaaacacaatactgccctttccggacccttngttcttgaaagatattcgccgctgcctgaggcgtccagaacgcgccgtcgaggtttgacgtccattatctggcgccattgctggacagtatactnctcagctgagacagatgacgcgattcctgagttcgcacgacgatgtcgagcttg

SEQ ID NO: 246 - DNA, 275 bp, Emericella nidulans
tatagaattctgaagtaataaagtcttttagtataattattaaactatataagatatagtaaatatactagaacctctactagctgctaaaagaaataataatataaaaataatatataaagcttactaagaatcttatctagattatataattttattcctataatagcaaagctgctctaaatattttttttattaaaaatattttaataaatatcgagataggcctctaaaaagttaaacttattaatatagtacttactaaggtataatct

SEQ ID NO: 247 - DNA, 406 bp, Emericella nidulans
gtcaagaaatatttaatactacctatggggaagctttatagatttagcagtctttatataataataaatcttaccctgtataaatttactaatttttataagtattataataatattattgttaagggatgtatatagacagatcttcctatttaaatatgctgtatatatataaaggaattgctgaagaagagaaagcaggacaggacagatcagagattggagatagatggggagccatatgaccacagccgtgtatgctacgcggtgcatgttatgggagcatcccataacaattatagttataatataacaagttttaatgaatacttcttctatttaactatgtctttagccctataatcccctaatttctttccagatctaaagaaaagctctcttagat

SEQ ID NO: 248 - DNA, 2819 bp, Emericella nidulans
ccaggatgtgaaaggcaaattgtaatagaatgaagctagggaagaaatcgtaggtcctaggtagtagtctagcccaatgttgttgttattgcaagggagaattgatcctcgagagtttgttgatgttgattggctgacagaaatcaatcaagcgcagctcccgtgacgacgctaaccctgtgcccataaacaaaaacatcctgcgaaatacgaaacatctcgctcgcataaagatagaatctatcagaatgctacatactacagggataaataagggaaataggcgaaccggaagataggataagagtaagcctaggaggtttgggccgaagcgttgaagcccaatgcgtcgaatacacaacgacaacggaaaaccttttgtcaatgtgtttctatacatatatttgatacatatatttgcccaaccatgattagccgatgctttgttgatgaggttactgtcagtccgaaaggcggcgttcgtacagtagcaggagagcgaccacgttcagataaaattggttatgcgaatataacgtcccagcaaccaataagaggagtttatagcgagttcttggcctgcctgacaagtagggaaggacccagtaggttactggaacaaggaagcaggacgagtgctgagtcagagcttcagagagatcaagttagatctttcgacctgaggcgaaaacattggacaaaagagctgcaaataattccttacgtcatccaagccccgccacaattagattgggtccatccaggctgaggttcttttgcagccccatcaaagcgtcatcgatgatgagcttctcgatcatgagtgcatgcaaaatttggagctttcacgaagataccagcctcattcgagcaggatccgtagtgttgctagtgcacagcagctccagcgcatactgagatgaagatcccacttagaggggtccagaattcgggagaaataaggcgcctgaaccgtagaagggcgtcgaatctgatggatgcctatcgaagatgtcgcttgctagaaacttcgctggagtagcaacacaccgcccacaagtatatcagtcttgctcctcgcacaattttctcccacagtttcaaaaatcatatcctctctattcacatacaaatttattctcctagagacacttctatcatcctcctgtttgtctcttctttctccccgcttctcctatacctcacttttaacgagtttctttgacccctcttcacgaacccctcatcacacatacacacatacacacaatggcccccgctgttggtattgatcttggaaccacctactcctgtgtgggtgtcttccgtgatgaccgcattgatatcattgccaacgaccagggtaaccgcactacaccctctttcgttgccttcaccgacaccgagcgtctcatcggtgatgccgccaaaaaccaggtcgccatgaacccccacaacactgtcttcgatgctaagcgtctgatcggtcgtcgtttcggcgatgctgaggtccaggctgatatgaagcactggcccttcaaggtcgttgacaagagtggcaagcccatcatcgaagtggagttcaagggcgagaccaagcagttcactcctgaggagatttcctccatggtcctgactaagatgcgcgaaactgctgaggccttcctcggcggtaccgtgaacaacgcagtcatcactgtccctgcttacttcaacgactcccagcgtcaggccacaaaggatgctggtctcattgccggtctgaacgttctccgtatcatcaacgagcctactgctgccgccattgcttatggtcttgataagaaggttgagggtgagcgcaatgtgctcatcttcgatcttgggggtggtaccttcgatgtctccctgctcaccattgaagagggtatcttcgaggtgaaggccaccgcaggagacactcacctgggaggagaggactttgacaaccgtctggtgaaccacttcgtcactgaatttaagagaaagcacaagaaggatctttccacaaatcgcccgtgctctccgccgtctccgcaccgcttgcgagcgtgccaagcgcaccctgtcctctgctgcccagacttccattgagatcgattctcttttcgagggcatcgacttctacacctccatcacccgtgcccgttttgaagaactctgccaggacctcttccgtggtaccatggagcctgtcgaacgtgtcctccgcgatgccaagatcgacaagtcttccgtccatgagatcgtgctcgtcggtggttccacccgtatccccaagatccagcgcctcgtctccgactacttcaacaaggaggccaacaagtccattaaccctgatgaggctgttgcctacggtgctgccgttcaggctgccattttgtctggtgacacttcctccaagtccaccaacgagattctgcttctcgacgtcgcccctctgtccgtcggtattgagaccgctggtggtgtcatgactccccttgtcaagcgaaacaccaccatccccaccaagaagtccgaaaccttctccacttactccgacaaccagcctggtgtcctgatccaggtctacgagggtgagcgtgcccgcaccaaggacaacaacttgctcggcaagttcgagctcaccggtatcccccctgctccccgtggtgttcctcagatcgaggtcaccttcgatcttgacgccaacggtatcatgaacgtctccgctgtcgagaagggtaccggtaagaccaacaagatcaccattaccaacgacaagggccgtctctccaaggaggacattgagcgcatgc

SEQ ID NO: 249 - DNA, 212 bp, Emericella nidulans
caatatactataacccgtatctataggggctggacgtcagcataggttgcaaataatccagcaagtgcctgtgcaaggcgctgaagcaggagagtaagactaatattagtacctagtatctgctaaacattactaattattacaatattaccattggcattagacgttaattcccgtgtacattaagtatgttcctgaacaatatccaggcc

SEQ ID NO: 250 - DNA, 450 bp, Emericella nidulans
cctagtataataatataggcagtaaataaaattatttaaaatatataaattattatatacaaaaaaattctagtacagcaagagatctagcaactttatatataaaatactaaaaaggaaaagtagaagatattaagatattttatctagactagtagtagtctcacaggtagtaaagaataataaaaagcctaagaatataaagaacttacctaatagatactaaggcaatataggttactaatttatagtaactataactagacaggatataataaattattatatataagtagatagtgctgtttactcagataagaaattataatatttatattatctaaagctatgcagttcttgtttatatttctaaatataatttttctatatttggccgcgcagtcgagtggtggattatgttagaaatactttactataggctgagtttag

SEQ ID NO: 251 - DNA, 502 bp, Emericella nidulans
aattaaaactataaacttatttaaatttaatagtagagactaggtttatatctatctctactatagttactgattactaggtaaacttactaggaaacttagcaagctctatactagcttatataagattgttaaatttaggcaggggtatactacttggttatatatacacatgagacaagctatgcctgaagtcttgattcaagcattgcctgaattgcaagctagtctactaggaaccaactgctgattaaatctctggtctaggataagctatatacaggccagttcttgtataataattgctgacttctagaataacaaatcaaggttggcaccaatgttagtctatgatatatataagaagcttgacagttactatattttaattctctagcaaattcttctagtctaatactacctgctattatcaatgactccgtccggttcataatactacaaatatattaggctactcttaaatataaaatataaagctaga

SEQ ID NO: 252 - DNA, 472 bp, Emericella nidulans
agttagttccctctactattatcttcaagggaaaggtctatatagagggatagtttaacaaagaagtaatcctagatacttagaggattaaaataagtactaataaatagaccttagataagattaggctttgctggctttaaaaagtctttattccagctatatatagctattttagggggaggtattaactttttattctagataactatagaagctacctaatacctaaatttgattatatatataagaagaataatattatacctatctatatacttttatatttatcttacttcttataacctcttaatattagttattttagtcccttaaagaagatatactataagcttataaagtagaaagggcagttagggtataaccatattaataagtttaatttcttaaaagcttatctagcagcgtataagaaagtctttataataaaaaatatttaaagcagatttag

SEQ ID NO: 253 - DNA, 519 bp, Emericella nidulans
catttaggtgacactatagaatactaggatcaagcttagcaagtataggaacaggtttagctgcctgatcagatatatacagccttaccaatagagagctgctcctttattagatcaagctcactgtgcttaagctcaaatttggttgaaaagagatgaattatcaggtcttggattatattctcttttagctgcccgcggtgatagtgacatatgttacaagcacaattaaagaggcattcaataccagctctacttgctagtacgaaagaatatcctgtacaaggcagcaagaactggatattctttcctaatggctctttccagaagagggcgggatttccccttagtaggccctatttaacttgttggtaaagattttaatttttgtttagaatagttttagattttactttactcttttgctcgatacctatgccattttcatttttttttttatttaacccccattcttgtattgctgttttctttttttttcatttctttctgctttttcct

SEQ ID NO: 254 - DNA, 481 bp, Emericella nidulans
ctgccatgtatcggattcgtatatagctcaggtgaccggcttaaaccctcaaataatctctgcacttgaatcaacctctccttgacgtcgtcgccggagcgatccaactcctccttcaacttcacactgattgcacgcccagcttgatcagttgttctgaaattagcgccctcgctcaaaagtttctgtgcggcttcgagccggccatttatggctgctaggtagagcggggtctgcccatttatgtcaggaatatccaccaaagcaccgcggctcagaagaagcgataccgagagaaggtgtccttcctttgctgcatgatgcaatggagtacgctggtccctatctttaaccataatatccgctcctccgcgaacgcgtggatatcttgggtcgtctagttcttttggcagagtagacgatgcaaaatcctgtccttgcgatactatcactgggctacccatattttttgcccagcatc

SEQ ID NO: 255 - DNA, 535 bp, Emericella nidulans
aggatttttaaaaaaaaaaagtatatagaataaacttgcgaggtaattagaggattaagttaaataataataaataaataattaataagataggcctttactagcttggaaattactttatttctactactacttcctatataattagctaatattaattacttatcttagacagctatagaagctatttaatatcttaatttaataagttttatatatttactagtttatcttatctactatagctactaaatattagctattttaatctactaaaatatatatataaaggtcttactaaatcaagattatatcttagtaaatactgtattaacgagttcaactttttagagcctatttctatatttattaaaatatttttaataaaacccatttcgcgcagctttgctcgtataacaatagaattatataattctcatcaggttcttagtaagccttatatattatttgttatattattacccccccctggcagctagcagaggttttagtatatttattatattttatatag

SEQ ID NO: 256 - DNA, 886 bp, Emericella nidulans
ctccttacgtgtctctaggtgtaggagactactagtggctagacacgctgaggtagataaagatatcggccacgcaaactttagaactatataaggtttattattatagaatataattggctctctaatagccttccttcttgtaagtagctttgaaaggttaccaggtagctgctgttattaggctgttgcgatagggttgacaccttcaagtcttcctaaccctggtgactcctggtaagctttgcagcctcggttgacttacctgattcttccacggccacgtccaactagtatgaagcttagttacgccctagttacggtccttggtagagcccacaagagaaagcacggccaagatatacagctaggctctacacgcggcacgttgtcctagtcggggctaggctggtagccattgctaagggcatggcacctttgtcctcttcttccatgctgtagttgtaggcgtacttgtcctctttacttccatggttgtgcttaaactgtagagggtactaaaccaagccagtgtccaagttatcttctgtatcagatctgtggaggatcgtggagggtataatccaggatgaccagggatagaggacttatatttgtcaataactattcctatctttatcccaggctggttctggcagttctgttctatacggaaggaggagttctagtatatataaggccagagaaataaagcataggcattgatgttttactaattcctattctggccactggggatgccttgactttctgttttcaggccccttgcaaccattccactacctgcgtctatcacagactttgatattagaggaatccaatgaacaaaatagatgaatttgcatagaggttagagatttggctt

SEQ ID NO: 257 - DNA, 560 bp, Emericella nidulans
ctctagtctagtaacggccgccatctaaagggacgaatgagcatctgccttggtctctttaccctgaagggtcatttcgactcctttacatgtcgacctgcgagttaccgtgtcatatcgtacccgacacgctttggttttgtacactgtacccttcggccctggaagtacggatacattgggctttcaggtgttgtactcagtatgtttatgtatggctagcgaactttgagtagaggaaaagtaaaggatattgcaggctttttatggtttttatctactaggtgtctaggaagtcattggaacaagaagcaacgtttttctggaagaagacatagctcgacattgaccgccttcctcaccacccgagcttcattcgcagagcgttgattcacggcaaacatctccttccaagttaaccaaagacagaaatgccaaaaacaaaaagaaaaataggcccaggcgattaaggacaccaagcaagaaaaattcgtattctgttcctttggaaaccgagcaagctgaacaaaatgagggcgctctagggcaaagtatgaaaa

SEQ ID NO: 258 - DNA, 674 bp, Emericella nidulans
ctgctcaatacgcacgtatcaaagggccccattttacagacagcaatattgataaaggcctttacccatattttagctgcccagtactagctgaagacggtgccggcctttccgcgcctcgaatcttatacgctacatatcaccaaggttacatgtcttcttacaaatatctcgaagcttgctcttgtagtaatcaatgtcctttaatccctaatcatggagtacagccccctactgagccttatggtgttgtcagcctcagagactcgtcaatgctagctcgttccgtgcacagattctcatctagataccagtcagatggcctagctgcgaacgtagatatgaagaggagaaaaagagatacagaaacattccgaactgggtgatgtgacaccatacctgattactcccatgacaaacccattaacccagttcccttaacgcaacccacgtattcagcttctatttctttgcttttgagaatgctcgcctctacccatagacacaatttgcccggtaatcgtcccatcggaccgtccggcgcatagctcgccatgaactcccgtctcaggttaacatgacccttgttttcgcgcccgatcctctccatggattccatatcttgaaagtagaagagctgaattttgcggttgtagtcaatgcagagggagcac

SEQ ID NO: 259 - DNA, 511 bp, Emericella nidulans
gcgatacgtttagagaacacaatgatcaataatactttatttactgatcaaaccttgctcattgcaacaggtcagatcacaggtcagagactaggctgctgttatcacgtagtgtaagccagccaaaggggcttatcatgtacactaggtgttgcaatgggcaagggtttcattgattaataaggtatgattgattgttctctaaagctatgctaatgatataatttaataatttgcctggcagcaaactgcccgtgttacaagccaggctattggctattattgtcacgagctagagtcgttgatactaacaggtagtattagactagaagaattcgctagagaattaaaacacagtgaccgtcgagcttcctatatgtgtcacggaccgacgttggtgccaaccttgatttgtcattctggaagtcagcaataattttataagaactggcctgtacagggcttatcccggaccagagatttaatcagcagttagttcctagtagactga

SEQ ID NO: 260 - DNA, 3021 bp, Emericella nidulans
ccaagaaagctggcaatatgggggcgcactgccgtgggcattgcttaggccttccaaccagacgtgcgagatggtcacatatacatcgccttcttaacgggatgcacgtcaacctcctaccatcgtcagacagattcacgagtggacacccctcgtcggcaagtattttgacagaattatcagccaccggaccgacggcccaacacatcgcctctccatacagtcaggccgatgccgcggcctgtacgtgggctcatcaatctgatgagcctggcatcccttgccagcaatgcaccgactatggtccttcccctgtgcccagcggtcagttagcgcgagatagaatcgagtcgagcagtcggtatatcctttcaatctgctgatctcagcttcacatcaccccgctgctgaaagggcttgatcggaaaatcccactccagcgctgggaggttgacttcccagctgtaattgttgatgtcgacgcgcgctcagcgcagataatcgacgagcgtaattatggagaaaaggaccgtattcgttgtggaccatagctttgcttccgttcggaatgttctgctagcaaacgtcgggagatgtcatttaaaacggcattggcaaactcaagacatttatcgaggctcgccgagtgatgtcaatctcgtcagcagccggataccaaatatatcgattcagcttcttggtcgtgacaaacgctgtgtaggcagagcggtcggtgtaatgatctgggtcaaatttcatctctgccgtgccgaatgcttcggcaagcagaccgaagtagagccatccctgcaggaattcaatggagaggctgttgagacatccattactgagtttggcgttgattccaggttgcacaggaaacagtcggaacctctcaaagcccttcatctggttcccatatcgccaggaaccagataaatagggcactgtgaggttggcagtctggagcttagggccataaatacgggggatgtgctccatggcaaggttgagagacgaaagagatcacagatggctcgtctctggtggtagagtgggtgacgtggtgaggatagacctcttcgaaagctgaaattgcgggccaaagagtgttaagcgccgttcgtaagctactaccaacctcataacatgattagatagcccagatcatggcacagccaccccaggttattgcatacatagaggacggtatatgacagggctgtatgggtgtcatggtttgctgtgcacccaactgtacttgtatacctagtggtcgctcgaaccggttctgcctgtagcgctactcagatggccaggtccggtagcggatggcgttaccatgctggctgcacagtcatgtttctggatctacggagatcaggtatgtctgtacaagctaaaaaacttgcaaatatacaaccgaggcactcttagctgtaccattgggccgccttaataaggacaataataataagcagtccctcttaaatctagcttccaagatgcagatatctcaaagctctgagccccaacgctgagcaatgcccgcagtcgtgaacttcctcaagcctcgtccctgtttctcttcttttatagccataagcccaatgcacggcatcctgcaggccttcaaattagggtcgccctcagaattccaggtatagcccgcgcctcgtctgctctccaccaatttcatgggcaggtctatgagttacccatgtaagggacttacgtaggtattggcaaagaaaagaacttggaagctgaatgatggaaattacgcagctaaaacagaagaaaaggaggcaggagaaaacaccacgcctacaagcatccttaagcaagaaattatactaacaaaagaaacccccaagaacaatgttggtgcattctaatcagtctcactgcccatgttgagcgggtacaaatgcatctatagtgtcagcccgaacgttgaccccaaccatccgactgcccggacctaagaggcgggagcctatcatctaggacacctgcagctggaacatcctctttgggtctctcctttgatttctccagctctcttggcatttccggagtctcgcctcaggtggattcttatcattcgaatactcatcgtcccatccttcaagccacggtcaacttacatgccctttcatgcgatagatgacacgtctgctcaaaatcctacgtaatagatgagatggaagcaatggttttatacatgatgaaacggttgcttaaatactggtagaggacggtgggattcatgtataaggaggagttataaggcaatattagacctgattccgaatttatcatttgactatctatggtagtctatataccctcaaatcgggctctgacacgccaggagatgcattcggtgttattggctatctatcggtatctcttcaatctataatgtgtaataaatttagctcaatcttgccatcttatcccgtcgcatctaagaatcatattgctcccggtaatcaatccctaccaatccctgccaactcgtaaactggtttcatagttgggttgcacggatttaacccaaatgtctgagttataaggaagttctgctcttcttggtctctgattgctcctcgttatgtgaccacttatctgaacactacccatactaacagtttcatagttccattcaatcaatccctagagtaccctgctgtctgaccccagcagtgagtcatggtcatataaaacacccttctcactaagcacaagtacctgcaacaagtctacaacctgattttgtgaatctataaatggaagccatgggtgggtgccgaatatcccgggagggcttccatctacaactcagaatgggtttgtgaacatccttcgtcatcttttatctcctttactgctggctttcaaatacgacatgtgcagtggcccagttctaagttgtcctgtactcgatcccatgagccgtcatgagtaattatctgtgggaatgattctacgatacttcatcggtgccatcagctt

SEQ ID NO: 261 - DNA, 484 bp, Emericella nidulans
aaattggcagcttattaaagaattgctttatcctagactctggagcttcaatatatatttgcaataatatctcaaggtttgaaaactatgatctatcagcaaccagaattcttcgtgctggtaatataataataaggatacaaggtactgggagtgttaagatctgtctgaattgtggtagagaatcaggaaatattattattaccttgactaatatagcctatgtaccaggtctttataccagtattattagagctagaagacttaaacaagccagatatagctgggattttaacaataatattattcagacagacaataatattgtcttcaagattagagattaccatcaggtctctaggttgtggagtaacacagcaatgatgcatatacttttgcaactatggataattaataatcagcaaaactactacttctgaaaggaaatatagatatttagcatcaaaggatggcttatacttat

SEQ ID NO: 262 - DNA, 1040 bp, Emericella nidulans
ctataactcctaaaaagttcttaatatataaccaataatataaaatatgatttgattttttgaagtaataattattataaatagctaggctaccaggaactagaattattattaccctgctttatattattattaataataatcaagctaagctagttattcgaaaaaatttaattataatcttagtaaatcctattcttttataaatcctattcttttataatagagtaaaacttttcttagcagcttagaagctttctaatttctagagagtattatttttttttttttggaattgtaattagacttgttaaacccaacccatgaaacccgccccaacccgccccgacctcccaagaaatgggttgggttagacctgctaataatctattaggttttagatatttttttactgccccaaaccctggtagagtaacctactaggttgccaagatatctaaataaatatattactatattataactagataaaatataataaagtattataatatagtattttatttaaatataaagactattacctatctaagtagttaatttatataactagtttattttagattatttaggctgggctaaaattattttctaaatctatagatagtttactgcttagataatttatcctaaaatctatatacatagagcagctggtcctgaaaatctgcctagtctataatttaataagtctaatatagactactaatataaggtatataaatattaaaaatgtaaatattacctatatatagtatttttaatatgattaggcatagaagaaatacttatactaataaataataattgatatgaagatattatagtttactagataattaaaatataagaaatttgatacagtatatagctcaccaatatattaagatttagattaagattaagaatctaagtagactctaattttttagatctgagtctttttagagatctttttaataaactataagataactcttctttgatagttatttataattacatttatttttttaacc

SEQ ID NO: 263 - DNA, 1846 bp, Emericella nidulans
tttttttagaaaaacaacttttggaacgcggggagcacccccttggtttgtaaaacgggaattgtggaaaacaaaaggcggattctggactggacgggtcagtacaaatatggttatttctactagggctgagttttcttattggtccggctaagcctcatgtagggggtaactcgctcaggtgtggacccaggccctgcattgacaaattttgctccttagccgccaaccagaaggacccctgttaaacctgttaaggccattaggcttattcttcccctctccctgtctaacttgattgaatggccctaagtaccgttaactatcaagtcaaagcctgtttcctgggtaaagactatggttatgttcctgtaattttatctagtactcactcatactagtataaaaagtttactcctatgtatttatttgaggaattccaagaaaacccgccaacttgttgctgaaatgcacactcccctcgttatcgatcctcccgaggcttggtttgaaccaggaaaacctttatctttccaagccgatatatggagccttgccagttatttggtctatctttgctcagcggccgctgtttgaaggatttctcgccaccgaggatgacatgacctgtgagcatgtcgatgctcttggtatcttgccgcccgaatggtggaatagatgggaggcgcgccgacataagtttaccaaggacgggaaacccataaaccgaaactattaccggtcctggggagaccggtttgaggacagcgtgcagcaacccagacgagataacgggatgccacccgttgacgcaagagagaaggaagctatatttgacatgctactgccgatgctctcattcaggccggagaacgtcctactgccaggcaagtcctcaagtcagagtggatggtaaagtgggctttgcttgaatatagtaagattcggagtcatgtgtgagtgttctggatgggctgtgtattgagttcaggatactcactataacaaacaagtttctccaatataaacgatgaaactcatgcgtatcccagtacagcttgatattcacttattcgcataacctggaaattttcatagaagcaagtctactggactaaagatatggtcaactctattggcggaccgcatgattagcccacatcagaagaagtccagccaacgaaacgaaaaaacaagccgcattccacacaattccccagtcatggtaaatgactttggaacccacgaccagagtgaagaagaatgacgcggttagaggtataacgacgttccgtatatcgtagtcccagccttcagtaatcagcagggcgtggaatggaatctcgctgaggtccggaacatgccactcatcaagtttctttagaatatccctattactgacattagctcagcttatttcgagtattttcgaggctcttacagctgactatatatcagcctctctccttggagaaggttgtttactttcgcaacgttccgattcgagaaggcctgggctagcaacggtcgcctggtaaggcgtagtagctgacgttgagagtcatagagacgcctttcaggacacaactgcgtatcatccatgtacgatatacaaatgtctctgaagcaggccaccatccctgtagacgaatcatatgggcatgggaactctttttcttcgtagttcgcaatatcaccctcaagtttactcctctcgcttgtcaggtctcgatataagccaacaaaatgggctttggtttctgctccaggaattgcgaattcgtaatctgcgatgagaacctagtgtatataacagcagaataagcgtgaattctcgtagtgttca

SEQ ID NO: 264 - DNA, 516 bp, Emericella nidulans
ccttctattatacatgctcttaacagataataaaggctacagccctgcttctttatagattttagtatacttagatagctcacagaccagccagggggcagggtatagctatgcaatctattttagccctatccttgtatctaagggatatagtcctacaggccccaggacagaagtctatgatatagaaattataggtactgtagaaggcctatacacagccctgggacaaccatgtattggctactctacctagctagttatcctcctagataacctagctgcagcctccctgctagcaagctataggccaacccctcacagacatggtctgttagagacctttagctaactagctgcccagtagatggaaagccctttaatcctaactatgcaatagaagccctttcaggtctgctggattccaggcactctagaattactgggaataagctggcagacaagcttgctaagctagggtcttctatatataccctaatatcccccctccccagc

SEQ ID NO: 265 - DNA, 559 bp, Emericella nidulans
gttttgcggttataagctatagctacgcatcacctaaaattataagccaatgatacgggggcctttatatctttggacacgccaggatgtgataagactggtagtacgtgacggtcgattctgatcgggggttatggtggcaaacagctggcaagacatcggtagcggccgttgaagatgcatgaccagtagtgcacggcaaggctgtggctgtattgtaaaaaagcgacatcttctgtccggctagggagaattaatcagcagttgcataaagctcccaggtgcgcttgacaactttactcttagaaaccggacatattttgttaacgagcatgcatattgtaaggatgtaaatgcgcgaatcactgcctagcaatggctggtgcgaacaagtctttataggactatagctatgatgtgtctaaaccattcagatgctaatgatgagctctcgagagggtattgaccgttaatacatgacatgatacattggcatgatgagatgatgcatagattgattcaagctcttttccattggcatatctgtgcaatggctgca

SEQ ID NO: 266 - DNA, 502 bp, Emericella nidulans
tatgtagaaataatcgctacacctcccgagcgccgccgtcccactagaacttcgattcctgaacttggccgtggaatgctccccccaagaagcacacgaggatatctatagctactcctatgggtatttagacttatactatctttgtcactacaaacctacctaaacccttctagagtattatcgtagtatagttaaacccagtgaagcccctacttgtaataaggtagtaggtattaaaaggaatagtaaattaacctacagacatcttctgtaatgctggtgccgggttatagggggtaagtatagcaggtgaaatatagtactagtagagaagctgccaagaagatggttatttgtttagagtaattaatatctccatccttaactcttgggcagacaagactcttatattctccagttgtgaacagcacgctggtaccctttattagtagctagggcactttccctaaaactgacaatattctctttgcttagcagt

SEQ ID NO: 267 - DNA, 700 bp, Emericella nidulans
attcggatcccaggtgtgcgtgaggcttcgaggaaagccggcattctggggcctgcaaccagtgcatcctatgaagattggaagtgcagtgaatgcttttcgctcggccttcgtccgctctttgggagaggaatagtactcccgtaagctttgaaatctaggatcctacccggtgcagggcaatggaatctgattgtttgtaaggtgacgtcgctagctcgaatcagaaccgccgtatggcaggctttgcagaagccctcagttccccaggttcagcgtgcgcgaaactgaatggcccgctcttcgtgtcacggcgtgagattccagctctggcctacatctcgttcactgtgggcatagacttagcatcgagctgcatggcgtgtcgaatatcttttttcttggacaagatacgatgtagctatgcaaagggaaactgtactcggcttttgggatagggacgaggggcgtatggcaccccgggttggggccccatacggtcagtcgtgcatttaccgactgcattcgcattatttcttgccgataccacaaacgaaaggcattgcctctgagggattctgagggatccctgatggagtatcaatctggtgataggatttggtctcttaaggggcctttggctttggatttttttttccgaaacctccttatcccgtcaaaaggttctgggtgggattaa

SEQ ID NO: 268 - DNA, 488 bp, Emericella nidulans
atttttattagcataattttctatattctattaagaaaatattatagaggcttaagcctagtctaggaccttcttaattttctatattattgaaagcttttcttttctagataagattcttggctagttctttacctagctgctttgacttcttagtagaaataaataattaaaattatatttataggttagatagaaggggttaatattaatttattattattaatatataactatcgattactagcttttataaataaaaataatttattctagtttttatagttataacaggtacagatataaagataggtttttattatttattctttctatttaatttattagtctaggggtaataggctataaatagttagtaattaatccctattaaagatatatttatatgagtctatgtattacttataaattagcttttttaccaaggtaattttaggggctatatttacttataagtacttatataa

SEQ ID NO: 269 - DNA, 4946 bp, Emericella nidulans
tggtatagcaaattttccatcagaccatcacgttgaaccatggaccagacgaagcatcagatatctaaacttagtacaccccaggttcagctaaggcgtttcagatgcggggacggaacggcgggtatttgatggagttcccctggacagggagcaggagcaagtagtctactactacctaacttggtatagtaaattcctgttttctgatcgaacactctaccccaaaggtagatttgttgctctgcacaacatgcagagcgctggtgctgtggagacttaagcatcctcttcatttaccgccgtcccgcgggtctcagtttgcgacaatgtgtgctctttggcaaacacctgctgtgcgagtcatggcaaggttcgctgtcagggacggatcgagattgaatcgaactagtctgtgcttggaacagtctactcgcctatacaagtcgcaccactgctgcatggggtccacctgggctgagggttggcaccgtactttacacaaactagcaagacagtcggcgatcgaaccctgcgcgagtttcagatcgtctcgaactgacacggccttctttctgagtccggaaggggagcgctgagcaaccagaaagtggtccaaacacagatctttctgcagcaagttgatgctctcaggctggtggctggcatctaggcccagggcactttggtggtatgggaaccgctccttagggctatctcatgccgtgccctccatcctttccggcttatccggcaagacgaactgtttcgagccatgttcatcctgaaaatcatcgggctggtttggcagcatattccccataaggaaattggacttgacaagtccgtatcggtgtacaccaacgagttacttacctcgaatctaacatgccacctgacctgcgctgaccttctggccctccggtaggaaagataccattgaacatagcacacagaccagtattcatatggattcctcaatacttcctggcgaccctctcacttactgtagaccggtgtcgcgactcgacaaggaaccgctattttcggtatgtgtttggtcccgattcagcacactcgtactcaatgaagtaggcgttgccccttggactcgcggtcaattacatgcaaagcgtaggggatctatattttcgtattgcaatgttagagatgcaagcaccggatacttcggcgcgaacagcatcaagagagcgatcactttctgggtgtaacaggatactgtctcgctccccgctattgtcataagcgctcatacattgagacaaggctcttctgtctacgcatcgtgtagattgacttcagcaccgcgcagctaagataggtagtagtcaccactggcaaatctcgactagatacatgcctacaattggcctccagctgtggcgatcacgccatgcgatttcatcagacaggtcagatgtgagtaaaaaaaagggatgatacaagatcatagtcatggaatatgcccaagtaacctcaaaaacggacagtccaactggttagcagcttcgtacctgccacgcataatggccttcagtctgggcgcctggacccgcgcaactgcatctcgggccgcctcgtcatctgttgcattgtctgctcgctttatagcagctagctgctgacgcctctgctcctggtggcccatggcctgctcttccaacgatttggcaatcttgctcggaactaagctgaccatgtcgggacacctcaaaacgggtgccaactcgtactcggtgccctaaaccgcagccggcgcgtcacggtactgccggcgagctcggtgctctcccggccacacatcacgccagctcatgggtttgttcccggcctgctcgtcagcaatatcgccaattccggttagatgctcatcagcctccatcgctgccatcttctgctcctgttcaacttggacgttgttcggaaacgcgctcgttgtgcttaaaaatagacagctgaggataataccaatgttccggtaattggcgatgtccagtaggtgggcgccgctgctggtctcactctctgtttgagcacctcgcgctgccgctcgatggaccactcccgccccctgcccacatctggtcaccacatgtatgggctgcggtgtgctgggggtcaccaacacaggaaccagaccacgaactccccaactcctcggggaggtgctggtggatgatatatatgccattgctggcgtggaatcccttatgcttgcggtcgccaacaccaccatgtcagcctcgacgaaaatgttgcgctgccagttgttcttggtagttgcatgctggattctcaatgggctcgggtactcatgcacagtcactgccagattctgattgaatttatataggctattgtaggtctggttgtatatacttgacagattctgaattcatacaggctattgtaggtctggtcgtatacacttgacatccagcgggatcaagatcattcggccttattcgaagcctgcacgaatgtcgacttgactcggatctgtgaggctgtatcggcaaaagcgccgtgttgtccagcagttacgtagctcgtaagcccaatttcatcatcatccgtccctttgatcatgcgatgaagaatactccctcctctataactgttattttgtccaactccggacccactacggaaggtccttgatttgtttgaggacgggccctgtcgcgagtgtgaatgcgaattgtaactgctcagaatcgagtgatgagcgatgcgggcgagaggcgcgagatgggggaggcaggcgcagacgattgcgacggatggttcgatggtcgaccagatgaagacggggcccatgagccaggtaatatcgagagcgttcatgaagacgctcaagtagtggattcggacgatgctggcgatgcagacactgccataccctgctggtcagcttcatcggcagttgggatatcggatggtaacaaagagctcctccagccggcacttacaagatccccacagccatgataccacaaatagcaatcttcttcctcagagtcatctgcagcttgataatgcgcggaaagggaatggcgaggataatgatgtcgttcaacatgttgataatgcccgcagcgagaaaaaaggtgttgatatcgaggcattcccctttcgtgccgctgaattgggtccagaagtagcttaatggccggcaggcagtgctcatggttacccaaaccattatagggtacgagagcgtgattgccccggaaaccattatggcgattttaagatatcgctctaggggcgagaagatccgcttgtagaagaagaggatcgagagtctggtgctggtgcagcacaaggcgtagataaatgtataggagaacagaagctggtatgggctagattagaagcattctataaaggaagcgtgggactgactctatataacgccatcaattctttcaatgacgatgcccagagatgctttccggcgccaacagtaccccctgctcctgttaggtagcgttctcatttgagcccggatggtagaggctcacctgcaatgcttatcccggttgtcccgcaaataccaaccttcgcaggaacgcgactgtcaggagatgcgcgcgatgtgaactgagggcagactcaccagcgctacaatgattgcccagtcatcggccaggagcggattccgaagagtcacgcgagctacgaatcgtagaaggacagccactgcagccagagaaagcattgctattacagcgccattgttaatcgccacattgctctcaataaggtcgacattatcaggcggcggtccaaaaatggcttcgatggctgggtcaacagtcatggcaagtgtggagaaaaatcaatgacaatgggatacaaagacgttcaggacatcatcagctttaacaggaggcctagttgttcttttggaatagacctacagactactacgtgacgatgaaggggccaaaaatcccgtccaccatgtgcaaaaccgtgatcctacacagatgccaagcgacaacgtgccatcttacagagaaagatgccgtcccgttaataacgccctcctacaggcgttactagcagacgttagcaggaagcccgcgatcccagttggctgaatgtttgatgagttgtggagtaacgtccgttagcggagcgacggacaacggatcggccctggtgacaaggccctaacggatgactcggcatccagaattggaaggtgtggtcttcttcggcagcacctcggtagatgacgaataggtgagcgaaagacgaccgacctgaaaggccggttacggcgctggtcaaataataggggctgcccttccttgggctgggcgtccttgctttcaattcttcaaacagccatgcaacaccactctgccatggactaccaagaagtttgcaagctcacagccttggagcgtattgggcctaagggctggctccgttatgtctttcctttccagctacaagacaactatgaccttaatgaagttgcccgagtagtccaggctgggtacgacgccctcgtcaaacggattcctgtggtcggctgtgaagcagttcctgacccggagtcacggcaggcaggtgtgctgaagtttcagagacaagaggatcaagactcggcaggcatcgtcgtcaaagacctccgcaattcctttccatccagttacgccgagctgaaagcaaaggcattcccattggctgccttcgacgctgaaaccctctgtcgccggtcagtgtggcctgtagcaggagagcggttacccatatccctcgtacaagccaacttcatccaagggggactgcttctgacctggtgcattttccacatggcgggcgacggcaagtccttctatctttggacaaaaatctgggcagaggagtgtcggaaggcgcagggcctcgacatcataaagccattt

SEQ ID NO: 270 - DNA, 3116 bp, Emericella nidulans
aagtagtaggggtcgtcctctacgataatgatatctggagtaggatattctgttagataggcgcttattcgggatgtaggacataccgaactcgacgcaaacctcgtagatctccttccttctctccctgatattgacagacctgtaggattggacccgacggcaacaaggtacagcctgcacagttagtctacctacccagctcaactagactggtcgcagtcggcacttacaccgtcggccttttcgcccctctgctcttttcatcccagttcgcaagcacatcccgaagcacgatggccgagattccctgtgcgtcagccgagacaggaacagcccttacccccaaagggatccagagcacctgcgcagacgggtatgtgtattcttcgacgagaatataatcgtcatcttcgcagagcatgccgacaaccttggcccaggcgttggtgttgccggggtgcaggagacactcgtattcacaagggggtgaatggaccttgtttgttatttctttacagagggatatgaggtgttcgtttccggtgccggagcctagttattagagtcaatatttcaacacattatcaccaatgaggatgagagaagtggttaccatattgcaggaactgcgtcaaatcgagttcgccaggacccgagttacgacctagcatgagggataccgggtcatcaggtgttccacccttgtcagggtctggtattgacgatgagggaggaagacagtcgaatctcgcagtgtggagagggaaaagggtggggtgggggaggcctgcatcgtatcagtggctgtctaaagccttgagaatgcaagagaaaaaatgattttcataaaacggttcttacctccagcaagactgatcatggtatcctggctcataaacctgatgatatccttgagtggcgacggatggcgagccttgctctttctgttgatgtggtgggagagatccacccctgagcctgtacctatgctgcccattactcagatctcaatcttagtctgcttcaagtatgataataagccttgctagaggcagaatgggcgtgggatatctccagcaagtacttgtagtgtcggagtcgctaacggcccgggatccggccgcgcgcggagtttggcacttggagtaggctgttcaattaaatagcccaatcaaatgatacagttagagatagcaaaataattggagatttatgttgaaaagattacgttcaggccaagaatagtggttcggtctttgggtgtacgcggtaagggatgtgactacatatgaaagacgctggtgtgctccccaaaccctaattcctctcctcaagtactcagccagcatcacaactctcatagccacgatgggcaacaccatctcttatacgaccacagcgattgacttccacctcagatccaagggcactgtccgcggcctttaattcgacaacaaagcccgccgctacgccgggatcccctacgcgcttccgccaacgggcgagcaccgttggcgcaggtcgcgtccattaccacaatcatacacctacgtcggcagcaccccagattcagcattcgacgcgacgagattcaagcccgtctgcccgcagaaggcgtaccacgtcggcggcagcaccgaaggcggagatggcgcgtatagcgaagactgtctatttgtaaacatctggacgccggtcccggacccacagaactcagagaagaaaaagaaattgcctgtcatgctctggctgcacggcgggtggttccagatgggcgatccgaaccaggaagcgggtatggatccgacggagctgatctctaccggaaagctgaatgcgatcgtggttgcgatcgggtatagactgaacgtctttgggttcctggctggaccggatattctggctgagagcgaaagaggcgagcatgggcagtccggcgggaactttgggctctgggaccagcggctggcggcggagtgggtgtatgagaatatcgagcttttcggaggggatcgcgagaatatcacgcttgctggacggagcgcaggggcttacagcgttgaggcacagatgttatatgagtttcgacattgcgcatctctagacagccctcggttgtataggcgtttcttcatggactcgaatgcaatccccgcacagcccaagtctctctccgacacgaaagagcaattcaacgagctctgtttacactttaacattgacctgcaagcctccagcgcggagaaactggctcgactccgccagaaaacggcgcaggagctcgtagctgccatccccaacctgaagaaccacacctttcgccctgtaacagacgaccacttcattcaccagggaatggccgagtacctagaaagcagagagttcgcatcggcgtttaaggcaagcaaggctcggctgccgattgccgaagtcctgaacgaggagacgctgtactcgacatacaacagccccagtgagcccacagttgaggcattgcggatgtaaattgggaactactacgcgccagatgtaacggagaggatcttaaaatgctatagcctaccggactcgaaggacctggatgaatgaaagaggttgtttggtaaggcgcctgccgctaaatcaacggtatgagtacgggatgcttatcgatgcctgcaaggccaagttatctccgacggccaggtccgcgctccttctagggctcttgtatcgaatcttgttgccaacggcgtcgacctcgccgatatatgaaggtaccagattgcctaccggctatcgttcattgatgtaagggtggcacccatctcgttcggtgttgcgcatgccatggataagcccttttggaagtatgtcacctttctatactttatccgacattcatgttaatgttgcagcttctctatctgctacggcccaactccacctgaaagaaatttgatggaagactggataaaaaaacctcgttgcgtttgtgaatgatgacgcgagatttgcttttgggacaaagactgttcaacagatgaaggttatttcgccagagggcgtgattgaaataaagaacgatgcgcggtgggaggagttattcggattggaagatttttgctcagtac

SEQ ID NO: 271 - DNA, 574 bp, Emericella nidulans
taaaccatctaagtaagaaaatataatctaaatacagtaatatacctattcagatatcttggcaacccagcgggttcgtccgcaccggctcttggggcagccaaaaatatccaaaacccaatagataattagaaggtctaacccaacccatttcttggcgggttgggtcgggttgggtcgggtttcgtgggttgggttgaacaagtctatctgttagaaaagatacagcctaatagataattagtagatagataccaaagaccttaatagatataaagagcttattaacaaatttgaaaacaaacaaagagcagaaacctatattaacaagaacattaattttcagtaagagggcatatattattattcatggttaacagacattgtggttgttattgtgttgtggttgcctaattctgcttaatgttaccgccttcgagcggggtaatgatcttttagctcctggtggcctaaccaccaacaagaacaggaacacatcatgagatcagaatcataaaatcatatcgcgttttacaatattctaaaatatattacctattagcatgcaaagagg

SEQ ID NO: 272 - DNA, 228 bp, Emericella nidulans
cctggctaacacggtgaaaccccgtctctactaaaaatacgaaaagttatccgggcttggtggcgggcgcttgcaggagaatgcagtgaacctgggagcgggaggttgcagtgagcagagatcgcgccactgcactccagcctgcacgacagagcgagactccatctcaaaaaaaaaaaaaaaagaaagaaagaaagaaagaaaaagaaaagagggtggagatggggg

SEQ ID NO: 273 - DNA, 972 bp, Emericella nidulans
gtcacggcgtcactttctgtcactgcctacgggaacgagtatacactaaagactttgatccctgcgatgacgccaattacgttgacaactttgccctgtcccggccggcactttctccgcaacagggtctcagacaatccccgacgaatacgtaagccagattccttcgattgccttctcgataccggatctggatggagtggccaaactggagttaaagtcgaaggacgacggcaaagaggttgcgtgcattgagtctgagttgagcaacggaaagtcaacggaagttcccgctgtgtcttatgctgctgctggtatggctggagctgcacttgctttgagcggactctcagccctgggctcagcgggacacgtcggctctgctacttctagtcccgggttcggagaagttatgggttggtttcacaccatggccaccactggcatgcttagtgtcaactaccccaaagtctacagcagttttgcgaagaactttgcgttcagcactggtttaataccgctggaacagatgcaacactcgattgacaacttcaggaaattgacgggtggtaaccttactcagaataactatgactactggaaaggtgttagctcatcatctggcaccaaccagaagagatctctgaatgcattatacggagcagctcgactgtttgcgcgtgaagttgatgcgtcagtgaacagcacatcttccggcaacgatacgtcgagcggcatagacatttcggtggatggattatcaagaatgagcaaggagctgcttattcctcagtcgaatacgttcatgacagtcctgctgattttcgccattgtcattgccgcaatcaccgtgggaatcttgcttgtcaaggtgatactcgagttgtgggcactcaatgggtcctttctaagaagctcgccaattttcgcgagcattattggggcctccttgcgagaacgatcaccaatttg

SEQ ID NO: 274 - DNA, 522 bp, Emericella nidulans
aatatacataataattctatataggctagtatagagcttgctaagtttcttagtatatttacttaataattagtaattatagtaaaggtaaatatagtgatgggacattagtttctacacccccctaaagagacctacctgctcaccgcctccactgccttcctgaaacatgctcaacataacttgctaaatatatattactttataaatatagtattaactacctattacgtacctttgcttcttgatttatagcctatagagtctctacctacctctttttatatcatagcacaatcaaaagagcttgtacgagctatttgtaaataaatatataagctgcatactattagatagggctataagtatatctatagccaatatccctatattctacctgctactatctgatatactattaaaaaggagtatgaaaggcagggtgtctcaaaggcttaatctaggcagctaaagaagcttactaaagctgagaagaactggattctaaatataatttataga

SEQ ID NO: 275 - DNA, 586 bp, Emericella nidulans
  unsure (1)..(586): unsure at all n locations
accatacgatttaggtgacactatagaatactaggatcatattgaccatagatagggttagcagcagccaggacactacaacgagcgtttagactggtatgaatgcctgctttagcaatggtgaccgtctgctgttccatgacttcgtggatagccacgcggtctacatcactcattttgtcaaactcgtcaatacagaccacacccctatctcccagaaccatagcacctgcctcaagtcgccgctcgcctgtctccttgtcggaggtaacagcagcagtgagaccaacgccggaagatcctcgaccagtcgtagctatggcaagtggggctgtattgaggacaaaacgaagcatctgagactttgcagtggaaggatcaccaaccatgaggatattgatgtcaccacgcaagtgcgtaccattgtcgagattcttttccataccacccaagagcatgagtagaatggctttcttgatgtactcgtgtccatgaatactgngagcaagggagctggacagcaattcgaagacatgcttcttttggagatcttgttgatgtttcgaatgtcggtgtcagtaatagt

SEQ ID NO: 276 - DNA, 1062 bp, Emericella nidulans
gaagtggtgtcacccaggggttagtgatatcctttttaaggcctcttatcttcacaagcattacagtcatacttctgctgctggttgctcctgccttggtagtgactcatttggtcaagtttgtgatcaaatctgtgaagaggcattagggaaggattgtgatgatctcaattgcgataaaggtcaacaaatccgatgtcgagagatctcagaagccaagcctatctctatatatattggaccagttgcttctgccgatacggtcatgaaatctggacagcatcgtgatgagatcgtcaaaacagagaaggttatcggctttgaaatggagggcgcaggggtgtgggagaatgtcccctgtatcatcatcaaaggggtttgtgactatgccgatagtcataagagcaagttatggcaagcatatgcagcagcaactggagcgtcaacagcaaaagcttttctggaatactagatgcctgccaatcataaaggtcagtagagagtctagttcagaggagtcttatgatattaatatattatgccctggaaagatgcgagaaaaacacgtcatttgatgatccctttcgcgagaaatccgcatttcgtgggccgccaggaagaaatccggaagatagaagatatgatctctatgccagatggacccaaaaaaatcgccatagctggattaggtggtgtagggaagactcaaattgcactggagttagcttaccgcatgcgagacagagaccctgaatgttcgatcttctggatcccgtgtaccagctatgaggctcttgaacaggctttcataactattgcacaaatgctagggttccacaagatagagccagcagaggcaaaagaccggctcaaaacttacttcagcgaaaccagtaagaagtggctacttattttcgataatgcagatgaaatggatatttggacaactggcagttcaacagcactactactcaagaatatcatcccccgggcggagaatggccatgtactcttcacatcccgcaaccgacagcttgcattgaaactggcatcaccaaatat

SEQ ID NO: 277 - DNA, 499 bp, Emericella nidulans
acgagcaagacgccggcctccagcacaaacataccaactaccgctctggcgctgcgactgccgtccggaaccgccagctggtggtgcagatgatctgcactgtgtccaactacgagtacatcttcgcttatatcttcgaccaagcggcaaatatcgagctggaggtgcgggcaaccggcatccttagtacggtgccttttgacaacgagaaatttggcacgactgtcccctggggcacgaacgtcgggccaggcgtcatggcccccttccaccagcatatgtttagtttccggatcgaccctgcgattgacgggcacaagaatacggtcatttatcaagactccgtgcccatggctgaagactccaacaacccgtatctagtgggctacacgaccaacgagacagtcgtcaagacgagcagttccgccgaaacaagcgtggagaaacaccgtgttttcaagatcagaaacgactcgcagatcaatcccataacctacaa

SEQ ID NO: 278 - DNA, 3989 bp, Emericella nidulans
atacgccggtgtttcatttatttgggcaacggatcatcccacaacaaagaatatgcattagaagtcattgacgagatatcagacccttagaatttctccttattgtctgaccgggctacaaaataataggaacgcttaaggcagattgagtgcgctaacccccacgactttggcctcacatgtgttgtctttgcataagttcgactattttcatgccaatcacaagccaaaagagccccctacagtgtttactggatttgttagtctgttcgcctgctgacttcttggacgtggtagccccttctcaggcccccccaccggaatcgaaccctacttccctgttcccttgaaacgataacctgcccactcaagcttggaaaaccggtggttcggtgcattgtttgaaagataccgcgccctgtcttccggatgggctgccggcagggtagtcaagaatttctcgttctcccttactgagcccggacaacctccagggtactcagccggggccaagatgacatataaggatagcttcggacaccccataacctctcgaaaagcaagtcttattgtcgtttacgcatacgcgcgaagaattctggctccagtggagctatggatcgaactgcacacttcccctcaaactacaagatcccctgttcctgtttgtcacctcgcttaccctccacaacgacctcgtatgtccagctgcgcgcagatccatgcttcctgttgcttgggccttttcataggcctttcgacgccctgactgccacttgtctgagtgggacccaagcggtatttcaccacgcatccttccttcgacattagtcggcggctgtctcggtacccttttatcgacctcgcgacgaacgaacactggtttcctaccttacccgccgaactgatctggggttataccccacctgtctctcctacacagcctgtacacaatctgccggaccttccttaaacaggcttttctaggatagggatgatgggcaatagcatgcgcacgaaaatgcatcccacgctggaggtctgagggatccctcagaaaccagtgtataaatacccctatggccgaccctcgaatctgctctgttcaccttccgcaagccctccttttcctcaacagcccagtctatcaccaatcttcgaacaaaccagcacccacctaactatctcaatatgtctccctgctcctgcaactgctgcgctggtgattgcagctcctgctcgtgcggttactgcagcgtaaggttccttttactgattatcttttgaacttttctgacaacccttgtttctgtgtagcactaagagccatcctgtcgtgtcttcctctgcccgtgctgtatcgccgcttctcctgacatctctcgcgaagagaccgaaacccttgcctgatcatctatagcgtcagatatcaggtctgtcaagatactcgacaacaagaatttgaatatatttgaccacaagattcgaggtgtgtctcggccaagggagatgcagagggagaaaatatagtcatgaggagactaaggactgtgctattctcgtgcactcatgtttgaacactacacgtattaactcaagtcactctttactgataacgtcgacgctattttggaatcaaattagccactgtagacagagaccgcacggctgcgcatagcatcacgtcttgaaaaagctcaacgctatacttgacttgagctccttaagcaaccctctctgcgggcctagctccagtagcatcttgaattaagcaatttcaagtttaaaggtgaattcctgcgtaaatggttggcccgcgacttcgtagcgctagtctcaaaaaatacacgagaaagggacggccagcaacttatctcatgaaacaaccctccatcaacatcctctccctattgctcattatgctcagtgactagtttatctcctcaacggacagcagccatcgcgcagcagatcaaggaaacgtcctcccccggtcgcgcttcaagttggccttcaataactgcgtggatcgtaattcgtcccctacttgctgaactgtattattggaacttgccaacagaattctaacttccctccatgttacgttatccaaggaactacctagcagcctacactccgctgagccgtcataccacattcccatcccgttgatcatacgcctgctatccggacgctgaataataccaaacgagaccattgtgatattgatataaatatttcatacactaaaaacatttcatacactaaaacaaagtctttcataccatggagactgattcgcgttcaaaccccgcttggttcagcaagccactcaaacgagtcgctcagataattatgagcgcgaacgtctccagaccgagcatggccttcaaacccctctgcccgagcagcacggccacacagacgaccgagttcgccactggctttcgcgtctgttacctcttggtaggtaacggtcttcagatatttgccgacccagaggccgccagtgaagcgcgctgcgcttttagtgggcagaacatggttagttccaatacactacggcgttcgtcagttatccatacagtctgaataaaactttggtatcgtcctagacggcgagagtagacataccttatctccatacgaaacgcacgtcttctcgccaaggaagagcgccccgtagttcttcatcttgaccagcgcctccctagggttctccgtcaaaatctgaacgtgctcactcgcatactcatctgcaagtttgtacgcctcattcagatcctcaacaagttgtacctctccgaacctctcccatgaaaccgccgccagcgccctagtcggaaggatcggtagcagtctttcaacctctttgatcgtcttctccgcaacatccctcgaatccgtgatcagaatggcgggcgtatcgggcccatgctccgcttgcgacagcaggtctgttgcaacgacaaagggatcggctttggcgtccgctacaataagcacctccgtcggaccggcgggcaggtcgatcccgatctcgccgaagagttgccgcttggcctctgcaacgaacggattccccgggcctgcgatgaagtcggtcttgttgatagattcggttcccaatgccattgccgcaatcgcttgcacgccgccgaggatatatatttcatctgcaccagctaggtggatcgccgccaccgtcgatgccgggattttgccttgaatagggggcgtacaggcaatgacacgcgaaacaccggcggctttggcagtcacaattgtcatgtgggctgaggcgaggagggggtagcgcccgccgggaatgtacctgagagcacaagacgagtccatacaagaacgttattaggtctggcaggggtaagtacatacgcgccgaccgcagagatggggatattcttctgccccagaaacacccccggctgaatctgatactcaaagtccctgatggacttgcgctgctcttcggcaaaggtccgcacgttctgctgcacggtcttgatatcctcaatgacctgtgcggggacagtgctgacgatctcgtcaatctgctccttggacagtttgaagctatcggggctccatttgtcgaacttttctgaatacgagcgcagtgctttatcgccattctgccggatgtcttcgatcacactgcgcacgatactagggacgtcaagggataggttgttggaggcgccactgctagggttggcgcttttgagggtgatgggcattttgaaaacggttggttagaagagattccaggcacgatacctactgttaatcaactctggacttccatctacctgcccgcttatatgtctgcacaatgatgaccatgactactttctccgcatcgacccctcaattgctgcaccggctctctggtctcacccgcgcagtgccagtccaatcaagtcgcagaaattccgtcaaatcaagccagagtcgacgttgtaggctct

SEQ ID NO: 279 - DNA, 3329 bp, Emericella nidulans
aggactgcagagcccaggacacctagaacgatgtggaaggttttcttgttagttaagattgttttgggcttgaaaaacaacgggtgggtcgaccaaccgcatccgatcagcgcgatagttcttggttgccattctgcagcaagggcgacgatagttctgctattggggagtccttggtcttcgcctgcttctgctcttggccctgaggttagagaatatgataaaaatgaaacaattcagctgtgtaattaacttgtcagtcttgttgcaatctactggctcgaggcccatgctaacatcaccgtcataatctacagggccttgccccgctgccccgtgattatatgtgacggacagacgtggagagggagtgggataacccggcggccgactcaacccatcaatccaggcagctttttttgtggctgattttcgttctgcgatcgcgtacattgttgaaacgtctatgattgggcttaagatagtggagggatgggaagaaaaagcgagggtatttcagccctttgctgacaagagggttaaaagataaagggaaagacatcagttaagtctgtctacttttccatattagtgtctctaggaccaatagttacccaccactcatgttggatattattttgattgtgcttgcttctaatgacttatctgaaacactgtatttagcgcaaatatgtagctaaaccagtgactcacctatttaaacctgttggcaacccagccggctgccccgccaggcttttaattggtcaaaaatatcaaaaccgaatacattgttcaggatctaatttaactgaactcttggtgtattttcacgggcggggttaacaaaaccaatggcttgcgattcctcaacctgtctcaagctcctttgtcgaccatgtacataactttttcccgatcatcttgcttggtcgtttctgtcaatacatatctgtccaaaagagatgtcatctcctaccagtgccggcgtcttccagaaataccaactcatcgagaatcatagcatcttgatctgagctgaaatatatggacaggttctggtccatgagccagttctcgtagagcttcttcaaagcccggagctgcagcggctgaaaggcatctgtcagcatggagttactagactcatgggcctgacaccgcgggttacacagcttgaatatttgtcggtgcatttatacttgtgcgaatagttggtgctataattgaaggacaagtcactactcttctccatgatgtttctcataacacccttaataatgtcattgatcacgccctctctaagcccagaaaaggaagttatcacaaggtgtacaagatacagtatcttaagacaacacagctaccagacatccttaccaggtatagaatttattagatatttcaaagaaaaactgttcatattagtagagatgctatcacgttaattatgtactgattacctagactatgcttcatgcgacgccatcggctttggcaagctttctatagaagatgccagaagggttgtttacttactaaagatgtttcccagtaatacagcaactcgccgactgctggttttaaagaaccccaatctagtactaatactttcttacctatatattactactgacaaagatgtctggtcaaatacggcccatattgccatgtatcagcgaactggccagatattatatgatttggtgggggcagagcctgtgcatgatatggcgttatagcaattatccaatgcagagttttggaccctgctctggcaaataacaagttctaggcagctttgtgctatcaagagactggaagaggaaggtattccagagaacaatggactttgactactacattacactaaaatttcacactccaaatacttggcaaggaggagaaaagcaaaccgcacaattgtcagtagttttgccaacgtggggctcagaacgatagcagtacattctcagtcgtagtaagcattgataatgatcattgccttatagatagctactgccgtctgtaggcactgatacaaagcctaaagtcttaatgtacggcagcacggttcaagctgtaaagtcaatgaatatgagtttcctatgttgcatgtgatcatgagcctagccgttctggcaggaaggcggtcgcaggtaaccctgaattgcagagcggctgcaaaagctggaggggtgtaaggccgcgatgaactcgatgaactcgatcagtttcatgattgcaggcttcaagattgtatagcctgatatgcctggcgccatggcagtggagtaagtgattctggcgcaagttggcttggcgatggggagaaggtcatttgcgacgctaagggtgcttctcagagtcgtctgcacggttgaaaatgtcagtctagtgtatggcattgggaggaactgagtaaacggcacaccgggagtaggaggccgcgattcccgtacggtgcccctaacattgacgtggtaacagtaaattcacatccaccagtatctgaagacgtcaacaaggtgtctggtaggatatctgggagtcgaggacgaactgacccaaatgaatggaccttcctcttccaacgcttttgtgcaaagctgcacacgggctatcgagaaaaagacatcaaagggtgggaatgcagcatgccggaacacccgatgttgagcgtttattatatctgctggcaagtcagttcattcatacctttagccgaaggggggcgcagtgattattcaccatccatgagattctttgtaggtgtccaggaatctcacgcccagataattgcaaggtcaattactgatgatgtaacggtaggaaaacggcatttctggaatacctatttgttgtggaagctcagaggggaaagggcaagagaaattgtatcaactatacaaacgtagcctactaaggattgggacaccatatgatgattaatcctcataattaattctctatcttgatggcgatagatatcttcttgcttgctctcaattacgatacattgactggtcagattctcaggggttagaaatcggataataagtggcattagtcatgagtagacttatcccgtacggggacgagctttacatgacgtttccttatcagtaataaagagagaaggcacagatagaaaagtaccaaagagaaaagaaaaacgcatctcccacacaacccctatcgaccatacctagcccttgcaacaaagctgcgaatgtagggcacacaagatcgtgattgcctccatctagggagcgaaacgaaacccgatcagatttacccaatataagtagcatatcccttagaattcc

SEQ ID NO: 280 - DNA, 915 bp, Emericella nidulans
aaggatatttctgaacagtccagttggaatagatccaacttggtgcagagcagctcggacatgaatgcactgaaaaatacacgagtccttaaaatttgatatttgcatcttggtcgtctgattccagagagtaattgcctcgcttcttgtgtcaatactcaggatcggtgctcagatcgttcttcccattccccgccaatgacgttggccagtcgaactgttgagacacgacaaaaagttcccttcgctccagaattctcagccaaacgcattttactcatccctgctgtcgtccctctggatcgacgcaatcaacacagatgtgggccagagctggttctaaatgttgacataaggacgctcacttcgtggttgaagttggaaatagagttggtgagcgaagaatgtcagtccttcggtcaggtcaagcgagaacctggcatagaccagcaaccaaatgcaaaagatgatttcaattccataatggatgcggaataactgttactgtaggtcttcagggaaatttgtcctctgtggtctggcaatcgttgtgcgccttctgagcgatgggatgtcggacctaattattccgattatcggagaccgaagaccgatttctccacccaataaagccgaacaccgaagtcctcctctgcagagtgccggtcgaagttcggtgatttctccaacggtgaatgtcaacacgagcccccttagctttgttcttttatttgcactgagatcgcctccacccaaagatctgccatggcctccgaggacggtccccggaagcgcagacgcccagcccaatcctgcgagcaatgccgacagcgaaaggtgcgctgcgacgcaacattccgtgtggcccttgtacacgcgcacgatctgttctacactgctcgtaccgtgacaaga

SEQ ID NO: 281 - DNA, 778 bp, Emericella nidulans
taatatgaccctgtcttgcagagcaaagacttattagaatagattatctcacaccgttgctgatcttgttcaccgtatattctgcgagcgcagctatttactttgtagctgcttcctgtcgatttgccttcctcttcccttggacatttgcaaaacaagaccaggtattctccagattctatggactttcaaaacagccagaaaaggggtgatgcacgagacaaatcagacggtcacaacaagcacactttgcacgtagctagaggatctagaggagagccagaaagaaaggactttctggcactatttcttttaggctcagcagtgggtccggcttttacagcctggcctgtgtcatctcttgacgagctcgtgacctttcttagtagggtagctaaagaaaaagtgtcgccattaagagaaaataaggtgagtgtgagtgtaggtcgaatgagcgatcactgtagatatgttgccgtaaatatgttgcgtattgtgcggtattgcgtatcgaggctcgttgggatgttggatgatgataaccccctatgggaaagcggtcggatatcgggcagataacaatgatatcatgtcagtgtggaaatcttgactcattaagactaatctggaaggcatgacgcctttttggcttagcgtaatattcccaataatttactcacctaggtaactctacgtacactttacccgtacggttatttacgaactagctatcttttgctgccaagttttaaccaactggtatctctgaattttggcc

SEQ ID NO: 282 - DNA, 548 bp, Emericella nidulans
agctaataatagcgggtaaaggcctataaataaagtactactctagaaacagggactttcctcccttctttaataaaaaaaatagaagtatattatttctctagaaggtagttgtagtatctccctataattaccctacctggtataggggagattatactatccttatatatatatgagtgaggagggcttttagatacaaagcttactttcaaagcctatatgaatttagtctgtagctggaggaaataactcgcctagtacctaaaaagacttaggaatacctactatagctgcctagtagcctctatatcgataatagttctataatatattctttaaacagctctgtatagggcactaggtttatatattggtaaacaataaagagagatggatagctcccctactttctctcttttatatagcagccctggctattagcctagcctacaagactcccccactgtagcactctttataaagcagacctactagacctagaagcttgtactaaacactttccttttgggagcatttttaggatt

SEQ ID NO: 283 - DNA, 996 bp, Emericella nidulans
ctgtcaagctccaagattatatatatgcaagaaagtagccggagaagataattatgaggggagatgcgatcaatggcccttgcccaagctctgcaagttgaccagctcgtagtaccggccctttttctggaccagttcgctgtgcgttccgctttcgacgatcttgccttggtcgaaaacatagataacgtccgccttttgaatcgtgctgagtcggtgtgcaacggcgattgtggttcggcctcgggcagcggcatccaaagccgcctggacgaccttttctgactcggagtcgagggctgacgtcgcttcatcgagaagaaggattttgggatcccgaagaagggctcgggcaatggccacacgttgcttttggccgccagacaacatgcctcccttgctgccaacaactgtattaaagccctccctattgttgcatgttagcggaccaggtataggatgaaggacagaaatatgaacttacgggagcgacatgatgaagtcgtagatattagcgtccttgcaagccttaatcaagaattcttccggtacgtcatcttcgacaataccaagtaagatgttttccttgatggtgccctggtacagtgtcggctcctggctgaccagtgacagaaagctgcggtaggagttgatatttagtttacttatgtccttcccatcaacaaggatggacccggcaatcgcatcgtaaaagcgctcaagcaatgcaatggaggtactcttgccacaaccgctgggtccgacaagcgcaacatattgtccaggcttcacggtcaggtccaagccgcgcaggacaggctgttctgggcgggtcggggtatatgaagggcacgttcctaaatttgatttcaccttccaccggtttgaggttcttgcccttttcagaccaggtattaatttgtgggtttcgggacaacaagtcttggaattccgaggacgcattctttgccttgcccatgaatggggcaaaggaaa

SEQ ID NO: 284 - DNA, 2719 bp, Emericella nidulans
gatcatgttgtctgcgtgctcgttcggatggtctgtggctgcatcgtggcatctattggccgttagggtctgttagtcgaattctcagagttctacatacttgtcacaaggaaagactttctgacagcagctgaatctgtaaggtgtaagaagacggccatgtatgaagagaagtagatgaggtacctgaaccagcggtagcttttgctatagtgcatgcatcgaccgcgtcggggtagttcctggcctgccacgataccaagaacttcctttggctgttatgactgtcagtaattgtgataccgagatcgaagagtaatgtaccttttttcgcgctggagcacgttctcgtgacgtgactgcgaaattagtactcaagagtcttaaccaatggtcagagctaactcacatgctgctgatcctactttgaggaatttcacttcaggaattttgaacactgcgatgattagtgaaagtgtaattgattcacagggcaccatcatacctaatttacgatggcattggcggcagttggccatggcgctctcccctcggactgcgactacccctggtcctggaaatggggtcgaacactccgcgcacgttgggatgaatccgctatcatggggtaagtatgcagactaataagccagattaataacgtacctaggcagaagatccactactgtgcagccgtccaggtccaggtagcctgcacggttagagttggggtgcatcaacaatcgacggaaccctacaaagtgagcaagtcatccatgcaaaacggaggtgttcctacctaaactcatagggtttgtgcattttttgcaaacctcgacctttggagatagtacgccgctgctgtccttggtctgaggtatattccttacatccagctgttctttgcacctgtcacatttgaccgtaatgtaaagaccaacaagctcaagaagctcaatgccgtagagctccaggaacggaaatgaaagtgcaactccatgttccgtagcaggctctggcagatctggaaccggcgcaccaccatccgtctcatcgtccgagcagtcgtcttccgtcgtggtgatatccgtttcttcgctgccacttgcaccattactgacagtccattccggacgccagctgaatcacatggatatgaggtttgtcctgattagtaccagaatgatcttccacaggaggttgtggttcttccaatactttggtttccagttcaggttgcttgggctcgtcaggctctgtgaccacggtcttcgcgaagttatggatattgctcgctaggtgattaacctgagacactaagttcagatgcaagtgatctttcaaccattgtgagaaaccagcttcaaccgcgcgcgcctcattgccatgaatgccttgtatctcaatagaactaggctcaagcggatataacaaggggacggaaagcttgactgtcttgactggtctgagcgcaattggaagccgatcaaccttcgtgggctggacgggtatgacaaacgaaaggctgtctctggctttctggaacagcggcaacctttgaagacgtgcttcaagctgcttcgtctcgactgctcttcgcctttcagcctgagctcgctcttccgccgtataaacagggcggacttcagccggtgccggtgacggcgccgtcactggcgctgggctcccgtctcgccttgattcggctccttgggccaatgctagtgaattcatattgtccactagagttttgctggactcctctttcctggcattctggacaaacttgagtgtcggaccccgttcagtggtagtaagcaaacgctccaggtgtcggtcaagactgttcatgtagttgagaagggtaccacgcccacccatcctcagtgaactatcaacgatgtcgtcaaacccccgtgagatattctcctggaatgcggctcctatctcagggttcgccactttgagagaaggccttccacgcgcgggatatgtcaagggaacatacagggcacattgcaagcgctccagttcgaatgggaagtccgggtctgaggggattaattcgaaggataatgtggttcccgattcatcattgctctctgtgggccggaagcgtcgtctgagctggttgatctggaatgctcgcggatttgagctttctgttcgcgaaattggccgctgactggcttttgtagtagtagttttgggggttgttgagccagacattgtgtcaaatgtttagcgagtctgtaggtataccaggcggaatctatatgtgagaaagcaatcggttgtgcttgaagagattatgtaatgcgaagaatatggctttaaccctgaataaggactccgatctagtatgctacatatattgggctcggaagatgaaaggtgaatcaagatgactcttgcgtgagtcactgtggctgtagaatatgatgcagtccgttctcaagcttgttggtgggttggtggatttggcactaagcctagtttggaggacacgtctcttagcctcaggcatctattatatcttgtccaactgtgcacgactttccatctcattgtctcctttcaccatccgagtcatccaatattccactgaaaacatcttgttttcagcccagtcagctcagaaaaacttgggaaaatcacgcttgataagagaggctgagatgactgcctctgaagtcaataaggccttcagtatcctgat

SEQ ID NO: 285 - DNA, 1619 bp, Emericella nidulans
  unsure (1)..(1619): unsure at all n locations
attcatttggatactgaggctaagaacggcaatcaatcacggctgcgggccttgagtgcctgaggctttcttttccagaagccccgcaaagagcggatgaagaaattgccgctagaacatcccaactctcgaatcaggaacaactgcagattgttttcgtcatcattgttgtaatgccggagaccaagtctggagaggtacgcggcaattgtagagcctatcgaagccagccagcctgcggccgaagcatatgtaagatacagcggtcgagtaggcacggcagtaggcgaggcggttgaggttcagtcaatcatcggcagtcagctgcctggatcccggaaagcggtttgctgcggcagaatcccaagcttgaggcgcagatccctgcatcacatgactacgcgtcgcgtttaccaaagcaggccgtgttgtaacgttctctctcttcctcttcccactcatccatcagctttcgcatcgctcccgctcaaccaattttctgagaagatctcgcttgccactgctcatggtatcgctaatacgtatactcgtcaaacaacacgtttaccgcgcgaaatctgtctttccgtgtccgaaaccccgccggtattcacctcttgcctgcaggcacccttacagacgtactgcctcatactccctgatttcaatcaagcctgctcaaagctctagtaggagcgccgacttgcctgattgaaattgggaatctaaccctaagctaccttcgtcggtcctgaaaccgcctcgcagtgaagcatgggagttgttgactagccgattcattttggcaaaaggcagctcttccagagccgaaaggcagctgaaagacggatcaccatgcgtttttcaagtccaccactcggacacgcgtcggtatcctatgctggatgctccatgcggatcaacagggatgggtttgtctatgctggagattagaaactgaggaacagccgtgcggattgatcgagcattcttggatgtatttcgctggctggcatcaatgcggacccaaaatatctttggcagaaacattgcatgtcgccaggcgaaatgtttctgaacacaacagctgtcttgaggactagcctacacgcggtcatacagttgggctgctatagggaagatccacttgccagaatcaattgaatcaaccgaacccagacttcggctaaacgcattcgattgtagcaaggttttctctattgctcctcacaagtatgactcttgggagttcaaaactgtccccaataactctggcctgttgtcacgttccggtatcgatctttccgccgacccagcttcgccaaccacgtactctgtctctaaagctagccacctcaaatcacggtacaagccatcgatttgcttcgtacatcgaaggtccgatccactgcgttaaccgtctctttgcatgtagattgcaaatgatcgcacgggctccgacacctatcctttgggatagaaacaaataaagccgtttattctggatgttttttgcccgcctccagtctcggagagaaaacganaaacttgtccctggagtactctgtcacacacgagtggtcatataccgagggttaaaattgcgacatgatttacag

SEQ ID NO: 286 - DNA, 826 bp, Emericella nidulans
catcgaagcaagtgccacaaccccaagttgaaaagattttgaaagctatggaagaaagctgcatagaaaaaggccaacaaaactagtattgcagttatcctcggccgaatattactagtagatatcaatattgtcaagagatatacatttgctggagatatatggttgcatttgaaagagacatacaagcaaatggactgagtccttagggtcaaatctctagaccaatttctcagctggagaataaagccggatcagaagatccttgctgctgtcaatgaggtccgacacctagctggctgaattcctgaactaggtggagaccccccttctgaggagataataattattatcctccttaaagggctgttgccaaagtacaagacctttcggcaaatacttatgcttcaagatctatcctttaaccaggctgttgagtctcttaagacagctgaatcaaccctacccaccactgctgctgaagccccttcatataccaacttggccaaccgtgcgaaggaaaggattaagtattatagatataggaagtatagtcatgtttaaaaggattgtcctgaggaatctgacaaggagaagagaccacagtctaagaagattactaaactaaagaaggagcaagccaagattgcaaagtagattacaaagcttgggctctctgattctgatagcgattctgaaagcttttagggccagggtaccgcggggaatggtgatccctgaagctgccctggaaacggatccatgacacccagaatgtcgcccgctatcctgggggaaatacaggaatcttggcctgcagaaaccc

SEQ ID NO: 287 - DNA, 442 bp, Emericella nidulans
gtgttgacggatgcccagagattgtatccttagaggcagcttaataatgatcccactgatccatactttgtagctggtgactgggggagaccgttagagaaggacccacggacacatctgacccagacgatggatttaatgcaacgcatgattggcctaatgaggacggtgaggaacattgattgcgagattgtcaacgacgagtgtacattcatgaatcatgttgtgccagccacagttaagactcgacctgcgctggcggcgaggctgatagcagatgggtagctcatgctcttgcattgtcactgagtatttgctgtaaatagttaagctgcgacatgcggtatcagcgcacttatagacgtatgccagtcttactgatgagccgggcttgacaccagtcttgacatcttatctaaaggggagcataggccaagaacct

SEQ ID NO: 288 - DNA, 1163 bp, Emericella nidulans
tatagcttgatgggaaccgcagtaataagctggcacattttctactctgatgctgagccaagcttgcccctggactagaagcgcgggcaccatgggcaaaagcttgttgtaagttgctggtagagtatggtaccctgtattatatcatgttttggggctataaataaagttgaagcaatatctcccattatccggatttacagatctaacctagcgacaccctgcctttggtggtttaatcgtctgatgattttccagggaaccctaacaccccggatatccctatttccggggaacttatactcaggtcataaatatcgcgttgcaagctaggccaatccgacgcaccgcaataagactggtcaatgaagaagcaagacattgtacctgacttgaacaagaggaaaatggtgggcttcttcttactacctatacccactgagcagtttgcattttgacctggcaagactcaaactcctacacccaagggtttcgctctaaaggcctggagaaaatggaagggcatcgacacagcctgccgaatctgtttggtgaaactggtatatctatttcccgccgcacaaatccttcattaacaaccccctaaacagcaactggatccatccatccgataaaaccaagtagcttgcactattcaatgtctgcgacaactgccatctactcacaggcgcacacgtgagcacctgctcatcgggacaatgaatcagtacgagtgaacgcccgggtctattagcagaatgttctgcggacgctgaggcgcgacagtgttttactttttaggaaacagggcgggattgtcaattgcaacggggattctgcgtgccctggaggaggtgatgttaggtgaataggctatttagaggacagcggagctggggtttgtggaggacggcctgaagtatgatagcgcgtttacagaggtgttgggcgaggtgggccaaaagtgggggagaagagtgcatgggggagttgttatttttccgggggtcctacggcggattatatcttatgcctatctatactgtgctttatttcctacagtatacactaatattatctagtctgtgaagtaatacacatctcgttgtgaggtggcgtttgcatccaaaacagatagcactgtcgtcgagataaaatctatc

SEQ ID NO: 289 - DNA, 3184 bp, Emericella nidulans
tcaacaagtgcatatagtagccccaatacgaaggctataaatttgaatatgtgcttcttggtcctgcgcactgcaccatcaagcgttgcgtcgcccgttcagtgtttccgccattgtagatttatcgattctgcttgtcccatctagatgtcctcagggttatcccgttgacgggacaaacgagcggacgtggcagttattatggagggaaaggtgttgttgattttgctaagcttggctctacgatcctaaagatgtcgccggtggggattagcgtacatcagatagcgatcatcaaggcattcaggtccctccagatcaatccttcgacaacttcaggtaattagagctgggggtctaagcccagatctatattaaaagaatatagtttgccctctcttgcaccatccatatatcccacacggcatctgtccctgtgtctgatatatatatattgtccaggggcaagaggaagtctagattatgaatcctgaatagcctttggactgtgtagcgtagcctttgattacaccaaaaatttcaataaaatgcgcaaggtgggcgaatctgagattcgtcgtcctcccaagtcgactcaacaggatccaagatttcagggatgaatctgtaatgggacgtgtttaaatggatcttcctatctagacgtgctgtacgtacaagagggattgctgtcacgaggaagtcttacaagtggcccaccgccttcaggacaacgtaggccttgcccgagtcactcaggtcaaggccttgtatggtcaaggacccataacagaatctgaagcatagtacgatccgtcccacttttctaagggggttgtatgggtaagtgctacctcgacgtcgacgacctgtatattttgcatggaaatggtgctatcaagctgctgcctgcaaaggactaggtgatcttatcaatctaagtgcccagtgcccacagagggggtaatgacggccccgggaagctcagggctgctagtttggtagaaaaacctgactcgaatgattcccatcatagctggttgtagggatatcgttggtaatccagtatatatctctgagaatgtactgcagaattccataaagtcaatactgtatatatgtcaaccggcgaaatgctcctccctacaaatcaatattcagcacctttttcgcgtgatcgtatgatacgattacaccgccataaacggattacagctattaatatggggtgagctatcttcagataccgagattcctgccttctgaagctctctaaatgctataaaatgtctatacagatcgtagttaggagatcaaggccttcaatacaatcattctgtcggattattgaggtggttatgtaatcaatttctgtaactaacggtcgattgaattaaaggtcttgatctcctaactacgatctgtataggcaatttatacctttttccaaggcttcaaaaagatggttctcgctatacgggagatatccttgccatacaaacggtgtaaagcatcaaacagacagataaacgaatgaggtgctgaacattgattagtatggaggaacctcctccggttgacacaaccacctcgagagctgacaataaagaaccatcggcccacgtgcatagaccctgagcttgagcattaaaggatctctgcaattctaagcttttttttatttttcctttcttctttatttttttttttatttattataaggagagtgtcactgtaccgagggatctacatattcaggtaaagacattgcggacatgcagtaggtgagggagcggccctggcctcgcgaccggaccgatccgtcggacgccgccagtggttgattttctaaaagggcttaaactggcccactagtcccgcagtagttctcttgccaagctgtcaagaatacaattgggcgtaaaggacatttctgcacgggaccaagcgcagatctccaggttcttagctcctctattgacatcctctccacatacacccacgcctcttgatccctgtcctcaccgttttatcgtcatctcgacatctggtcgtcatccgcggcgggaactgtctctcagcaggcccaataactgcaatggcctcatccgacagtatcaaacgcactggcccgtcgtgtacggaatgccgtaaaaaaaaggtaggtcgcgttcttctcgtcgagatggtaaactgaccgatggcagacaaaatgctgtggcgattgggctccatgtaaacgctgtgcgaaattgggcctccactgctccttacctgttaacactgccgctgccgggacgtcacgccgttcaaagaagtaccagaagcaccaagaggatcagcaagaccgtcgctctcctcttcctcgtccgaatgggtaccattctggcaaactccgcgatccaaacggtcgttttgcatcgaatttgcgcaaggagagcgtggatgcgaagaacaccagaaactccggcagggcgatgcgcgtccgaccgcgtcctgcgcgagacgcgtgtccgctgccaaccgttgccgccgccaccccgtcccgcgtccagggattgaaaactaagcagcaattatgttctgtaacgtatccaactccatctgagagccaggaaaccggcgacctacgaaactgggccgcgtcgccggccgctcgggccagcggccgcgatcatagcggcctcgtggcgtgcctcgccgaggccgccactaccccggcagaggctctggagctcttcactctgtttggcgagcgcattgcccccttcatcccgtcactatatgccacggatttcacggccctccctacccaaccgttgtatgttctggcagcgatatatgcggtcgctcggtacttgcccgactctaccgctctgcgcgatcgcaccggttgtattcttcgacgcttaatttccgagttgatcttcagatccatggcgaaccagtcaagtattgcaaaggccgagaacatgcagggcctcgtcgtgctgtacgcgtgttgtgaagcgaccggccccaaccacgaggaccagcaggcgttcccatacttcgacatgctctttcttaaagggattactgagacttatgcctcgaaaataagactcgggctcgattatacgctggacaaggcctcagacgacaaattgcccctggtgtgggaggtctggctgtacaccatgag

SEQ ID NO: 290 - DNA, 3107 bp, Emericella nidulans
ataaattggttgaatagaaggaagaaataaaaatagacataaaaaactcggattttaaagttgatagtagcagattggtaaacagttaattaacaagtgagggaaggaagttacatgtcaatgagaacccgggggaattaatataaagaggcctggtatcgccgaattaagccaggcttggtccaaaagaggttcccactagcaacgtctttgggcgagcttggtattaaagggaaaaggatcagttgagaccctacgccaagggtggaggggccgccggccaatctccagactgggtacaaaaagaaaatccagggaaggtcttgcctcctatagagagtggggaccaattaaatccggatattcggttgcattctaaatgggcggaatttcacctcatatggcaaccctgcaatttcctcacttcgtcaaatcctcgctagtcgctgtcaatgggccattaggctcgacctgaccgcacgcctggctcgatccgtccctcttcctggccctccttcgattagctcgaaactgatcagacgtgacagtggcgaagccttcctcccctgcttcctttttcccatgtctcagggttcgctttaaaagcggccatctcgcgtcgcccgtaagctgtatcccagcggcccatatcgctgctttgtagtgacctggaatgcgggcacctagagtgcaggcagattcacgatgggcttcgtctttgccaacatctacgtgatcacgaccattgcggtcattggtggtgccctgtttggtttcgacattgcgtctatgtctgccatgtatgtccctctgcctcctcccgcccgatcgtcccctctgtggggtgagaactgacccaacacttgcttacctctattctcagtctgggcactcaacagtacaaatgtttcttcaaccagggcggcatcggtgaagacgggaagtgtgccggaccgacctccagcaaccagggaggcatctctgcctcgatgcccggaggatcctttgccggagctctgtgttctggtatcctcaccgactggcttggccgtcgacgagcaatccaggtgggcgctgtgatctggtgcatcggcagtgcgattacctgctcctcgttcagtatcgggcagcttgttgtcggccggttcatcaacggggtatccgtcggcatctgcagcgcgcaggtgcctgtgtacgtctccgaactggcgcagcctagcaagcgtggaactgttgtcggtgcccaacagtgggccattacttggggggtcagtctgatcaaccgctgaaacagaaggaagatgctgactattcgcagatcatgatcatgttctacatcttctacggcagcagctacatggaggggcccgccgcatggagactgccatggggcctgcagatgattcccgccgtcttcctcttcttcgctctgttcttcatgccccgagagccccagatggttgggcaagaaggaccggtgggaggagtgccacgagacccttgcgctcgttcacgccaaggggaatcacaacgacccttttgtcggacggagctgcgcgagatccccgagatgtgtgagtttgaacgcgccaatgcagatgccagctacctggatctgtttaagcccaatatgatcaaccgcacacatatcgggatgtttacccagatctggtctcaactgacgggcatgaacgtaatgatgctgtacatcacgtacgtctttggtatggccgcctttccggcaacgccaaccttgttgcctcgtcgattcagtacgtgattaacgtggtaatgaccatttttgccctggtcttcatcgaccgctggggtcgccgcatcccgctgctgatcggatccaccctgatgatgaccttcatgttcgcaaacgccggcatcatggcttcatacggcaagccagcgcccccgggcggagtcgacaacgtccctgaagagtcctgggacatgtcagaggccaagtccgcagccaagggggtcattgcatgcacctacctcttcgtcgcatcgttcgcgcctacgtggggtcctgtcagctggatctatccccccgagctgttccccttgcgccttcgcggtaaagccgtagccgtgacgaccgcctcaaactggatcttcaattttgcgctttcttactttgtgcctcctgcattcgagaacattaaatggaaagtgtacattgtattcggtgtcttctgcgccgctatgacactgcacgtcttcttcctctttcctgagacggccggcaagacccttgaggatgttgatgcgatgttccatacgaatgtcaagccatggcagaccagggtgcagtatcgcgatatcaagaatgtagagcgaggcggtgttggggctcggatgctcgagaaggagaacgccgttggggtgagaggggaaaatttcccgggactgcaccgagaaccatggacgccctgcttccgagatcatcgccacagctcaagttctacctaaacgggactcccatctcactaaccagcccacatcctcgctggacactgctcgactttatcagatcgcaggacggtctcaagggaacgaagctggggtgcggtgagggcggctgcggtgcctgtacggtcgtccttcagacgagacagcatggaaagaagattcgccaccttgctgtgaatgcttgtttatatccattaataggaggtattgcctgctctacatgaccgagaatcaaagtacagtggatactgatatgtacagtatctggaaagcatgttatcacaatcgagggcttgggcaccgttgaccacccccatccgctccaagaacggatcgcccaactccacggctcacaatgtggtttctgtaccccgggtatagtcatgtcattatatgctatgatccgaaatgcgtacgaccctgtgacggggaagttccagctatccgcggatgatatcgagagtaaggggcatctagatgggaacctttgccggtgcacgggctacaaacccatcctcaatgcagcgaggacatttatcgaagatgatctgggatctgtgccgagcattgtcgagtcagagttggtaggcacggaggaagagacggagagtgatatgggc

SEQ ID NO: 291 - DNA, 616 bp, Emericella nidulans
aatatactaagtattttctaaaaatatattaactagaccctctaggaatatctagataaattttattttatattttaataatatacttatttatattaacagagacctctactagtactagagatatatataaatagtcttaaataaactagaaaaagtaggcctatacttagatattacaaaatataaatttaaataaaaaagacaaagtacttaggctttataatataaataaagaagagaattaaaataaatctaaaaaaataaaagtaattaaaaaatagaaaatttttaatattatatagaatatctaaggattcctgggcttcgctaatttttattaaatatttatttttaacttaaagattatatacctattaaataatttaatcaaaaccctttatcttccttatagactagggagtaccaggacagctttactctattaaaaaaaaaattactactaaatttattctaataatctttaaccttatttattatataatagtagaaattaatttcttagattataatatagagggagttctgtcctagtataataaaataaaaccgttatatctatatatctatttttctaaacgaacttccctagcta

SEQ ID NO: 292 - DNA, 4887 bp, Emericella nidulans
gagagcagataggggagggccaccgagacaggggcatgggagaggaggaaaaagcgaggcaggtgccttttcttacgatcaccgtattttccatgttgacaaaagctacagcgtggcagacgagcactccctcgcccgcgaatactcgcagaaaattgtcaagtaacgtacgatctcatgatgatgaggggcaggagattcgacagcgcgatctgacctcaggtgacaatgtcgacgggtacactgaaagtaatttaagttctcaccaacctaccgcaaagaactcccacacccgccaactgtcagcatccacattggaaaactccatgatgcgcactgtagtatcgagcggaaatgatgcactcaatatcctctttgaggcagctgcccatagccaggaagcggacctggccgaggcgagaatggattcgagggacaccagccgtgcagttaacgcgatgagctacgagaatgcattcagtcaaatgcactctgcagtcccgaccggaatattttcaatggcaatccggccggtggaaatctccaatgcgtcaaaagaggtactcaccacttgggaaacgtgccgatttgtgatgatgggatggtttacctccagagaagccgttacactcattgacctgtaagtgccctatgtttaagtatgtggtcagcatagtggttgatctcttgcgagccagattttacgagaacatgtcctcattgtccccaatcctgaccgacttctatgcggaccaccgaaatcaccgcgaattgatcacctgtgatcccgtcctgtgctgcacgatgctcatgttatcttcgaggtaccatatattaccggggccaggtggcgagtcaagaaacttctttatccatcatcgtctgtggcagcattgccaacagctagttacaaggcttatatttgggcaagaacggacctccaactcaaaacttcgaagaattggcacaattgaggctctcctattgatgtcggagtggcatccaagatctcttcactttcccccagaaagcgatggatgggattctgacctagtcatcaaagctccccagcccagagatgaggatgtgtcatcgaaaaaccggttcctggaggacatggttgaaccggcgaagagatccgaccaaatgtcatggatgctgcttggggctgcattgtccctcgcccacgagctgggaatatatgaggtcaacgaggacaagcggagctggtccctcgcgtatgaggggtatatccctagcgaccagatcaaacttcgacgacagcgggttcagcgactgctctatgtttacatcaaccaactagcatggagaataggatgtgtatctcttatgcctcagagcttgaatcatgccatcttaaataggcaaacatcaaggaacttgaagcactataacgaccaatggcttgcatttatggactcttggatggacctcacaaagctggctaaatccgtcacagatgttttttttccgtccgcagactttgctcggcaacagttacgtagtggtcggtatattgatatgttggaccacttccgtcctctactactaaaatgggaggaagatcatctccggccggaaggtaagctactagccatatgatgcatccacagaacacttgtcagctaatacattgcagtactcaacaaacgcttttataacgacctgttcatcgagtatcacttcgtccgagcttacacccactcgatcggtatgcaagcggtagtggagcgtgttcttgcggatagcgacccggacgttgaaatccgcgcggcgagcattgaccaagttgattatgaatacatccaagaagtcatcgacggttgttgccaggtcttacagaaagcaagtgagctgggcgaagccggggctctgaagttttccccagtccgtatcttccttcggatcacgacgtcctccatcttcttgatgaaggcattgagcattgggacccgccatgcgaaattgcgtgagtctctagatatcattgagcgctgtatacaggcgcttaagtccaatgcactggacgatattcacttgagcacccgctacgctgccctgttggaaacacatgtgtcgcgcctacgacgcaatttgctcgcctctaaggctacaagaagcaccaatgggtatacggtgcggtcaccattggcagataccggcgcagaagacagtacgccaacaatcggtgttcctgctgggcaaatagtacccgaactgggatctgttccaacatttcagaatatggctgctgacgattggctttctttgccttttgatccttctatggcaccatttgggatgagtggcggaggacaattcccagcttacgaaggaggtgccttgaactttatctggaacttaccttcttgaacgtaagagtgtggttgagggcaggtgttgtataacgggtggtttgacaatgcggtgggttcgtctaggatcatcgttacgaaatcgatagaccatggcaagcgatctccgccacttccggggcaaggaagctgaatgtttcgtagcggggctcgcaatggcgaaagtgatatcccagccaagtcaagtacaaaactttccgatatcgtcccccaattgactcggccttctttgagcacatacatctatgaagcatctccagccgcaggaatacgaagcgagtggcttggttctggattgcgagatcgaaactcgcgcataataacttgagattggatatacccacaaacatgatcaagggaatcatcgtgctaatgatctactggacaatgaaactcagcgtgctcgccattatcgttgacttgaagtttgctcaaagtcttgcgcacgctatcgaattggacgctcaagctattaagccagtatgcaagaagagaccaagtcgaagaggatcagcgactagcattggatgacaacacgatgaccccagttaagaagctattcgacatttaatgatgacaccggcagtgactgttcatatttccagcggctctgtcacagcctaaatgatcgcttcatgaacagccagtgacggagtcagaaaacgatgcaggacctttcatgacatacacgcagcgacaggaagagacagcgagaaggctttagagatccgaaacgtgcagtgcttgctacgtcagttttcctttgaatagggtcaaaagttggggattgcgcccgttgttattgtcattgctgccttaagagcctgttcttgaaggttattgcggacaaaatgctatctccgccaatacctctttaccctgttcaggcgagatgtcgcagcatgatatgatgaattcaaaaatgctgaagatgggttctcaactacctagaagacatattacggcaacgcggactccggcaagttcgtaccttacaagagtattgaagcggatgagcaagatgccctgattgcggctcgatcacatgtgtgatgtatcgaagtgcctccacgacaaagatgattgcactgcagacacactgagcttcaagccacgttcactctggcgaagaacatgtgcggcgacgttgctacgcatatagggctttagtggagttgagcacaggctgttaccacatgaggtatgttgtccaggtttctccaaataggtttctccaaatatctgttaatctcaaagacatggtcattaatacccatggcagttgcaattgtggggcccaaatttatctgcggtttatggaagacatgtaactgctttcaattaaaagagatgagattgtatgcgacctgatgtagccccagaagatcacttggagattatcgtgcgcagtgtaggtataatcgacgtcttcgacggtcgaagggcgatgatgtccatgcatatgtgagaggtgtgacgcggagcactgtatgtttatgctccaatgtcagaagtgtctctgacgcatgtcaacagtgtcgacgaggtcttcggaaagactggtgcaatgagccttaagtagggtggactgggcttggttgctgatactgttcacgaaaatttgagagaaatattcatgttgaataaagcgggccctctgtaccgcaataaatataaaccctgtcgatcgagtttgtaaaagaagtactccgtataaagaaagaataaaaaaagaactagatccctacatgtcccgagaccataacggatttctggcattcatgtatgccaaggatgcctgaggcttaggggaatgccggagtcgccgcaatcacgtgacagccttggtcacgttcaaggcgaaaaaaagccttcgaaaccagacgagccgtcatttctccatcggaccccagtttttaaacctcctcaaccatatcgccttttcagtcccgctgctgatatctctcaattctcgtgtctctttcaagagcttctacgatcgaccggacctcgcgttgtctctcctttcggcgtttgtgcaagctcgcctcaccttgccccgagtgacgtctctctgaccgtgaaccactttgagctggacgaagctattcctccgccctcgtttcgctcaatcctccaacactcttctcatatatcacatacgcacataacatggatcactccagagatccctgcccttgggttgccctgagcgacttcggtggtgcgttttgtatgggtgtaagtcttgacaacctgaatcctgcctggctatatgaattgagaactgacaatatgtttttgataggccatcggtggtgctgtatggcatggtgtcaagggatttcgaaacagtccgtacggtgagcgacggataggagccatcacagccatcaaggctcgcgcgcctgtacttggtggtaactttggtgtctggggtggacttttctcaacatttgactgtactgacaagggtattcgcaagaaggag

SEQ ID NO: 293 - DNA, 981 bp, Emericella nidulans
ttgagtatctactcggatctcgtcgagagatgctgcaagcacaccacgacccaattcaagtaaatccaatgcaacaacggctcctttttgtgcgttgagtgccacagctgcggcatcagaagcaaagcccaccattgcaccaagcaaatattgcttatcagagttctcaagcgatcgcattgctagccgaggtattaaatgaacagcagtatcagcagatttataagcttgctgccagttggagaggatagcaagattctgaagggcatttttgccagctgaaatccgagtgctaagaaaagcattctcttgatgtaaagcagtctcctgatatgatatagcctcataaagatctgctgtcgcccctgtgattgagtaacggtgccgtagttggtctgcaaggcttttcaaccaactagccttgcgaggatgatcttctggcgctgctttaataacctgtcgtcctattttaatagattcttcaatgtcagccattgctcctatccttgcaaatcggtcccccaaaagggtgccaagattattcaaatacatggtgtagttagggtggctttctggtgttgtctgaacagcttcgcgtccaagttggatggcctcttcaaggtcagcaattgccccgaattttgaatatcggtctgacagccgaacttcaaggttgttcagatgcattgcgcgactagggtgacctcctggtaatgtgtcaacaacatcccgtccaagttggatagactcttcaaggtcagccaacgcccctgttcttgtatatcggtccttaagctgacatgccaggttacctaaaaggagggtgcggtcagggtcatcttctgttgccgcattgactgcttcacgccaaacccggatggcctcttcaaggtcagccattgcccctattcttgaatatcggtctgaaagccgaattcaaggttattcaaaacatacacgacagggtgatctccgttggtg

SEQ ID NO: 294 - DNA, 964 bp, Emericella nidulans
gtccgccttatgcaaatgatgacgctcgtcaacgccactgctcctttagctgcagcagcaatggatgctacgaatggtaattcgaagtcgatatcttctggcgacgggagtaaagccggcatggtaacctcgacagaggccagtatgtctacaccgatgtcaaaaccaatcaggtcctatactcacgcaagcaccagaaacagataagcctctagcaaattcaaggtgccttactgccccgggctcgcatgggagtgattattgatctaagcgccagcaggaacacgagcgacaaacccgtccaagagatcaaaatcacgcgagtcccaccggaaaattggcgcgcggtcaagaaattgcgctctattgatccggaacaaagtattctcttgacctcgtcgaaagggagtagcagccttgtgttgcgtcaagcacgaggaaatagccaatccaccaccaatcttcagacttcggaacagggtgcagaagcgttgaagaaggaccgccagtaccccccatatcgatttgcaatcaatttgaaaaattggtggatggtcttgaatggttacggaaacccttttaccgaaaagaaaatgtcttggcgcccttaagaaccgggcaggtcagtccacattaaaacctgttgaagaccagttttgtgccggaaccaaggccaatgattcccctccaaaaaagtatttcggggttataacatgtcttcaattaagggaacaaaagcctctcttctctaggtctgcccctatgggaaacttttgatacacctatatgcccacttgggaggtcgtttgctcttatcctcacacgaattgcttctaaataaacctttcttcatcctatttcttacacctcaccttcttatactcttcccttttatcttgctcttatctgtcctatcatcccttatcacctctcattcttcttcttccatctttacttcacctct

SEQ ID NO: 295 - DNA, 749 bp, Emericella nidulans
atatactgccttgggatgcacatatagtctctaggctcaacagacttgacagggacaaggccttggtattcccttcattattaaacagccatgccagctcctagtctgccaccttgcctacccacaagccctgcttggcagctactgcctatatctggataatatcccagtactgggggttgagccataatatcttctatataataagaaagcatgccaccttcagcatgcatgagaggattagtagatagctgtcagcatcacgccagccctgcttgctgcgaccaaggaccaccattatacatactaacaggctcttgtacttgtacaccttggtcttctggttaagcagcttaatacagaaatcaaggcaggctgtctccaacagggtcattataaacacctcaagttaatcagtatccaagatcagatcagggctctggtataatgccagcaacctgcccacctcatcagatctgcaggcaagctgccacagttactgccaggtctactactatcatgcagtcatgatatagcttggctttttttattgctacagctacttagtctgtatataaataagaaacagcaggatctgctgccacagctgtgtatactttacaatgcttgtcttatccatgtatacctgcagcagatagtataggatctagttaagcgatgtgctcacagccattatataaatgctattcctatagtgttgcacgtgatgtgctgaatgcactgagccg

SEQ ID NO: 296 - DNA, 1999 bp, Emericella nidulans
tgtagtcgtgcgcgtatccaaacatggcgctgacgtcgctctccacaagctgccgctgctcaaggaggacaacctgctgcgcgaagggcggagaaggtaagccgcagggtggtaatgaccgcgccgatggtcgccagattccacttgacatttgtaaggagcaggatagacccccatacgccgcgactagcccatcgaacgtctcgaggtgggaaagtcgtttcggtcggtccttgaaatagagccacttgagctgcgcgatgaacgagctgactccatgcatcagcgctgtcgtatatgcggttgtaaggatggagatggttgcgctaagagaaacgcgcgcgttccagtctgacaggggctttccatccatggcaatgaaaataccgacaatggagaacaggaggcccatagccagaagagagctggcagcttcaaacagccattcttgaggggagtataccgggtggcgcttgtactcgagttttgaattctgggcctgctctgagtctgcctcagaggccttggaatcctcgtgtgggtggattttagggtcactttcgtctgcggccatggtgggagttcgagcctctcgctgtgaacctgcgtttggaatattttttcgagggctgaccgacagaatcgaagagagaaagggcgaggtgcaaggtgtgaggttttccttcctcccgctggcgcgattttagcccaactcccagccctcgacacctatattctgcacgaatttctgggctcaaagagaaccgtccagtaagcgcctaggaaagggctctcatgtgggactggctagggtccagctccctccctccaaacttggtccgtcctcgaggcccatgtggatcggcatctccgggtatgactatctggggttacatgtctaaattgcgatggtttactagcctagccaggtgcttacgtgcattgcttatctgaaattatggtagacgcaagacacgaatagaaagagcactaaatgtttatcggtgtcggtcagcaacagagtgaaaaggggctatagccctgccgctggccggcttcagaaatgtcgcttgtgcagtacagatcccagggctttagatcttactgagcgaccaacagtacgatatcctaccggcggataatgtatccagatataaacggccggggcggaccgtagttataagcaacatgagtcttagcagttgatcaggctgaggaaagagacgatcatggtgagaactccacgtcgccatctagtgttctctcttaacaatttacctggtccagtgatgcttgcggctgaggcaatgaagaaagggttctggcgggacgctgggcagtgctgggcagtcgtctcgtattcccccacccagcccccacaacaccagggccctgatgcagtagcccttgtaagacgtctgctttgagtatgcttactctggagtatctccgtctttccaagtagcgccaagtacgccaggcctattggagccgagatgtgcaagtaacgcaactctccgagctgacaaatacacaagggttcatttaggtgtcagttgccgggtagcgggtcatgagaaactgggaaggatatctttgggagtactgcgtcgtcctcatgggtatgcagccttaccgttgctggtgaaatgatagggcattggctgacagccgtggatccccttgagccttgtggcgcttctaccgtgactcttgactatgcggcaatcttcaggggacgacattcaaaatttcgtgccttatcgatttttacctgtcaacattaggtgcctagtgcttcaatgtccagcgtttagagacggggctgtccaaggtatgtctcctgcggagagtgcaggttttagtgggggccaaaaaaaaggaaaaaagaaagaaaaaattaagcaggagccgttggcaccgttatcttaacaatgataaaggcttgacccttatgactgaactcacatcaggtggtcggtatcatcaacggacccaa

SEQ ID NO: 297 - DNA, 1962 bp, Emericella nidulans
ctcagctttatattctgcttcgggactgtccgaacgcctgggctgagcctgggcgctactattagactgtgatgacaaacgccagtcccgtgttctgtgtttgcactcttagactggggagaactctgctgatcaccagacccgactctcgctaaccgcagcctgacagagtccaactgctgcactccacgctctctctttcttacactgcctttctctcccctacgtctgcccacacatacagcatcctcggctattcccgaccccatgaattcggaatcgcgcggatagacccctcccctaaggctaaagccagagtgcaaactgcaaggctatagtccagcgctaattctaggctccggcatttctcacacttctggtgggcgtggccagactcagtctcagcctccatctgtggcaccagctgtttgatggggattgagaccctgccggtgactgagaccctcgctgtctgagctgacttgtgctctgccctttcacctaggagtgagagcgaaagtaatcccctcgcccattgtccaggtcaatgcctatccaccaaaacggaggtatcctggggtaaattgtctttcattctctttttctttataattttgtatattctatataaatttttttccggttcaaacaaggattcgatttacacctcctatcgttacacaaattgaagcgcctccttctgtcgcatttgatcctcatcaggtctctttcttttttatctttctttctctcttcagcgctcgtccataaggtccaggattccttctgagtggaacggcctggatcacctccctcactgcacccgctgacactgcaaaaccacagaaccggagtggcagaaatggaaaccctcaaggctcccagcacgggctggaaatcctggacggccaagaagaaagctctcctaatctcgtcgattctcatcttcataatcgccctcgctgttggtctcggcgtcggtcttggcctcggcctcaacaaggggagcgataatgacaatgagagcggcggtaacaacaccaccccgaccacccccaacaacaccgccatttggcagcctgccgtcggcacctcctggcagatcgtgctgcgctatgccctgaatgatacctcatatgacgttgatgtatacgacatcgacctcttcgataacaagaaggcgatcatcgacgagctccactccgacggccgcaaggtgatctgctatttctcagcaggcacgtacgaggactggcgcgacgatgcagacaagttccccgaagacgatatcggcgataaccttgatgaatgggaaggcgagagctgggttgacatccgctcgtccaaaatccgcgacatcatgctcgaccggctcgatatcgccgtgcaaaaaggctgcgacggagtcgatccagacaacgttgacgggtacgacaaccagaacgggcttgacctcactcaggatgatacggttgactatatgaatttcctggcggatgaggcgcactcacgcaatttgtcgatcggactcaagaacgcgggcgccgtgatcccgcgcgtgattagcaggatgcagtggagcgtcaacgagcagtgcgcgcagtatgacgagtgcgatacatatgcggcatttgtccggcgcggtaagccggtctttcatattgagtatccgaagggggatgacacgaataatgaggtccaggttacggggcagaagaaggcgacggcctgtgactttgacgactcgaatgagttctcaaccttgatcaagaacatggacttggataactggctgcaggaatgttagctcttactgtctactctaaggttatgttgagaacgagcaggggttctgttgatcttgtatctagatactagtgtaatattcatacccgatattgtacaacattacattgtaaccgggctcgaaccatcatcagggacccttccatcgacaacgtc

SEQ ID NO: 298 - DNA, 1536 bp, Emericella nidulans
accaccacggcggccgcggcgccgtcgctggtagggctgcattgaagctttgttaagggcggctgaatcattgttgaatccatgatctcttgaagggtgtaggccgttcggaactgtgagtatgggttgcgctgagagtgctcgtgtgaaacccgagctatctccgcgaagtcctcgggtttggcaccatatctgcttgtattagcgtgtaccctatactgatgagacacatgcggtcctatactttttcatgtactccacaccggcgttcgcaaaatattgcgcattcctaggactgttgtgcttcccgtgcgtcttttccatcagtgccgtcgatgggccaaccgaactcggcctgtcatcccaaacgctcttgatcgacccgggacgcatctgctcaaacccaatgacaagaacgcagtctgcgcctccattttttaccattgtccgtgccaggtgcagacccgcggagcccgttgcgcaggcattgttggtgttgtagatggggatcgaggtctgcccgaactggtagaatatacgttggccgctggtggtatccccgtagcagtagcaagcaatgccggcttcgacatcgtcgtaagtgattttggcatcttgcattgcctttatgcctgcttcgtagccgagttctgggtattccctgatgcggcgaggcttgagaaactgcgtcatccctacgcctaggacgtaggtcgggatgtagggcttggtttgcggcatttttggtttgataggtttaggttgtattattgatttgtatgttttgaggagtgtatattctgcgcaggagactttttaaagcttcaaaatgcggtagggctgtgttcaaccgaggtccggctggtagacctggagttcccccgctttccatcacagataaccttacgagaacgcctaggtaaggattgcacagccatgtaccaatcaaatgctacatgggcgagagaatgcagtatacttaggcgggggtccgaacagtggccagttaaaatttatattgagctcgatccttccagctatggctttatgaggactcggctatatgctgacttactatttcgcgtagttctggtgccaggtataatccgggttttccgtcaacaacgctcttaaagcatcttgaggcttcgtgggcggcctcccaaggatttcacgcataagcgggtgtgtcgtgcgtagctcccctttcgcaatgtcctcccaccacgtcaggaccatttcaaagaatgccttcggctttcccccctgatcgttcgcgctgttgattcggatatattcctgaggggagacgatctcgagtttcacttgtcgctttgtggtctcgttgatgatatcaacaatttccttggacgtgattgtctcctcagctgtaaacagcacaatttggttctcatagctcccttgcaacataatgcgggcagttgcttcgcccagctccgacgtcgagtgtatgctatttccccatctgcgggaagggtaacggtcgtgctatcagggtaccagttgataaacacg

SEQ ID NO: 299 - DNA, 3950 bp, Emericella nidulans
acgacgtgcctgctgtacttccaccgactatgactacatcccgtcggattatatgggtcgagtcccaggaggatgcctggaatgcgtcggcagccaatgcagccaaggaaaaggctaatgtgagggcgccgctggccaagacagacttcattgtacaagatataaaagaggtagaaaattggagttcctgactgctagatgaatttagatgcagatttttcgctgctttatatgcagaagtctcgctatctatataactagtcctataatctcgtcccttcccttcgtgttagcccattcctggccccaatctactagcagaaagcgttgccgaagcgtcaacagtgccccggtggaatgtattttcgactgccccattcggccaattttcctggctgtattcgccgacacgaacacgaatcccacgaaagtcttgcagggattggaagtcaagccgtacctggtaggaccagaactagggcttttttggcgatattgcttaccgagcttttctgggatgaatcttacactatgtatatttgcaataccgcaataccggacccgcttcccgccgggtaattttggaagcatacattcttgttctatggaaccagcattggtccagggtctgtctgacacgaggccagttacgatagctaggctctcttttcctttcttgcaagctaatgtgatcatctctcgcatcccgccgaactctaccagagtcaaaaacccttccattctccgcagttcgctatctcgcgtcaactcatgagccgtaagttatgccaaccatcagcaagctcttcatctcttcattctaattgaccttgggagctgcctctgagctataccacgtatttaattatcctccttgtttaattaggtgaatttaaaggccaagttctcacgtcgccgctatcttagctccctcaatactgcttttccgaatctcgcgccgtcagtatctccgagaagacgcaacttttcaaaaagagggccgagtcacagggcaaaaactctgtccaatggtctacttcggtccatcacggggctgtgaaacctgcaagaagcgcaggaagaaggtccgtcctcccagtttcctgttagtccgtagtcttgaacgattttatggctagtctcggtcctgagttgcattgtccaaccttctacatttggacttgatgcagggcaaaacctgcggtgtcacacgttgtgagagcctatactgattcgtagggtgttggtacatgtgaagtgtgatgagactcgtccggtaagcatgatgcagttagagactggctagcagcacttctccggaatcggtgggcgtatgagcgtcgcagcactcttttttcgggtattttcctgggatgcgctcaatgctgtttggccgtcctgccttcagtcgagttgacgctctttcagcctcaaatatggagtgtagagaagagtagctgactctatacagtcatgcttaagatgtctcagaacaggccgtacctgtcgcgggtatgaagaaactggcagcctcatattccggcaacatgaggccccaaccaccaagtggtttccgttccatttaccgtttaagtccatggcacgcaagtgtagtttatctccgcgggctccggtgccaggcacagacaccatgcctgaggacggaccccccaaggatatccccgacggtctcattgaagagcttgccctgcgcgctttcttccatgactactgtgtagtacccgtcaacacggccctatcccggggttatctgggcggactcgaacctatggtccacagactcggtcttcaatctcccgtcgcaaacgcctgcaaggccgtcgccttcgcgagtcatgggctgaaactctcgcgccctttcctaaccaagaagggagagatattataccacgagctgctgggttccttagcccggtccattcagaaccccgctcttggagctggtccggatatcgtggtcactgcagtacttctggggctctacgaggtaaatttcgtcatgcattgggaccgtgctatatttcacaacataggctaatgcaggcagtagatgatcatggcgggggagagcaaccccggtcaccacaacgcgcatgccggcggcatggcggctatcttgcagatcgaaaatagtcctttgggtctcctgcaggctgcaagagcaggtcatcccctggttcttaaccggatggtgcaggtgggatatccatccttcatcccccgttttgcctgatgtcagggtcagggcagattctaatgtctaaggctctagaataatggaatgtttattagcccttcccctggtggagggggccagagtctagacactatattggtgaaactcgggtctctctggcagaaatctgaaactcttctctctaacccccaaatcccgctgttttttgacgaactgtacgctcttagggaagagaccacggcgctcaatcgagacctcatattgtggcagaaggcccagagtgacaatttcaagcctacaaaggttggctacttgagtccctcgccgtatcaactcagtcccagcgcgggcttctggccaggtcaagtcgatacctacgttgatctttacgtgggcggtgtttggaacgtggcgcgtgttgctcggtgttatctcatcaacctaattgtaagattatccaacatcttagaccccacaagcgatcataggcaatatcacaacgacgttcgcgaactggtaggggatatcttcgcctctattccctttcacttaactgaagatctgggggctttcgtggcaaagagaggcgcaaatccggagatagccaaccccggacgacccgtgggaggattgatcctcctgcacccggtctatatagcctctcagctacctgtcgtcccacctgatatgcaagagtacatgaggaagtgtctagcctggatcggaaaatacatggggattggacaggcatgtctccttgcaaaggtgataaccccctcctcccttgtcctctctcttgatggtcatctttttttgggtggcgtggggcattcctagtccagctgaattagcactaacttatataggctccacgagtcgagggccagtattttgcttgcggatgtatgcttgtgtgggcggggctactaatttgaatgaattaagccatgtcatatgcgcttgctgaatcgcagtctattatgatactttcgcaaaggcagggattcaaggatgactgtgactttgacttgaataatggaaagcttataaacatatatcacgatgaccctctgataatatttcaacaccaaacactatttttcaaccgacccctctgacgattcctgtaacaaagcagcttctctgttagagtaactcttgagtgtctctttgatcatttcatcgtagtcaaaatgccaaatcttataagatcgatccttcaactcctcgaaacaagtctcagccttgacccatttggctggatctgcccactcaggctggtgataaaagtcacagactcttcgactactgttcactagccactgactcctagtccgtctgatggcattgaaggtctcaaatgctgcactcagtgccttcccctttgacactctgctagcctgtacggagacattgacctgcttcatcagagtggcaagacacaacgcgtcctcgatcccaatacatgcaccggccccgtgatgtgggctagacgcatgggctgcatctccagcaagacaaatcttacccttattgtaaaagggagccgggtaatcccacagatcaaatactgcccacttatcgagttcttttgggaaaagattaacgacgttgcgaacgcagggactccaccctgcaaggctttcttcatattcttccggcaacccagcgcgaccattggctggcgttaggccatccgtcgggtcgagacaatgcgtggcattaatatctc

SEQ ID NO: 300 - DNA, 1708 bp, Emericella nidulans
gacgatgcggcattcggacaggaggaaacaaggatgagggtccaaatttggaggcggagctcgctgggaaggagaggaaagagggtgaatgaccgggatggacttgtattgggccctgtttctgggacttgcatgttggtgtttgttaggaagaggagaagcaagggaagagttgtagattgcttgtgcgggggaacttcaggatttagggagccttgaggaaggtaaataagaaacctcttgcctgtcgctaggcatggttagttcattttaatagcagttgcgtcagccctaagaatctagtagcgcggggctctggttctcaggctcaatccttggataccgagcttactttgcgctgaatttctactcttgaggtttttttttttgtggagaactacggaactgcgtctgagattgaatttgcttttgtcatgatatccaatggccagcgcggctagttaaaaatgagtcgagtaagttctggtcttcgatacgagcttgagccgtggacaagccagaatctctaaatgattgtaagaaggtagtatgagtccataggcggcagcctaagtgcctttctgatcatggcaactgtaattataaccaagaaaggaggccactactcctcctgctcatatgcctccccctcttcagcgtcatacgctccttctccatccgaaaccgtcgcctcctggtactgctggtactcgctcatgagatcgttcatgttgctctcagcctcagtgaactccatctcatccatcccttcgccagtataccagtgcaagaaggccttgcgtcggaacatggctgtgaactggttggagacgcggttgaagagttcctggacagaggtggaattgccgacgaaagtagctgccattttcaggcccttgggtggcatagagcacagagcagtttggacgttgttggggatccattcaacaaagtaggaagagtacttgttttgcatgttgcgcatttgatcttcaacttctttcatggcgactttgccgcggctggaggtgccgttagtgtcttgaaagcacgaatttgatctggaacagaacaatataaagggcaggggggctgagagggaaacttacaacagggttgagcaggttaaaaagcggccgttctggtagttggcagctgtcatcatgttccgtgaatcgaacatttgttgagtgagttcaggcacagatattgtacggaaagatgaagagctccggctagtcaaaggggcaaacccgaccatgaagaaatgcaaccgcgggaagggaaccatattgacggccagtttccgcaggtcagagttcagctgccctgggaaacgcagactgacggtgatgcccgacatgacagcagacaccagatggttgagatcaccataagaaggcgaagacagcttcaatgtccgtatgcaaatgtcatacaaagcatcgttatccaagcagaatgtctcgtccgaatgttcgacaagttgatgcaccgataacgtcgcattatacggctccaccaccgtatccgacactttcggcgacggcatgaccgaaaaagtggccatcatccgatcgggaaactcctccctgatcttcgaaatgagcagcgtgcccattccagagccggttccgccaccgagcgagtgcgtcacctggaagccctgcagacaatcgcagctctctgctttccggcgcacgacatc

SEQ ID NO: 301 - DNA, 571 bp, Emericella nidulans
aaagatatactatttaatctaagtgtgtcagaagaggggggagttggggacagacaattaattcatagtagtttatattaactatatattaactaaagaaattattaattatatttttcttaatataataaaatgggaaaagctgaatctctgcttagtataaatattctaatatatttagtaattctagctttagattttttataaacctagaaaagaaaatattatagctaatactttcttatacctactaataaaattactaaatactataactaaaaataaccttgaccttgattatcttctaaatattattacttaatatttagcttctttaattaaattaagtagtaaatttaagaactaaatttagtaaaaatactaaaataattactaagtaaagtttattatagaaatcttctaaaaagattaatatactaagcttttatatattatataagacagtatactttatcttaagaagaaagtactaaataataaaattattttaaaaccctagttatatctacctaaactaatatataagaagctatttaaactaatctataat

SEQ ID NO: 302 - DNA, 945 bp, Emericella nidulans
acgcaagttgattatgctttgagcactgcgcgatcatccacgccagtgttatattcgacaaacgagggtcgacgctgccgccgccgatatctgtatggaccccagagaaccatacctggagcatttcctgcccctctgcgttgtctggctgatgccacagcgtcggctgatacgcggtgcgttcctcgtccagcgccagcgcatggtacgcgtacctgacatcccgtgaaagcagggtgttgcgaaactcgagctgctcgccaaaccatcggcccagccacggcttatggaaggcaaccgtgtcccagacgccgatcagctcgacggtgaacctgggtaggggcggccggaatccgagccggcgccgctgttcgtcggtataccctgcgatcttcttgccgtaaaagtcgtcatacacgttggagaaattgtccatcccccgcggtgtcaacagaccccactgacagaccaatcccgcgatggcgcgtgctgtgtatgcgccgcgcgagaacccgaagaagtagatcttgtcgccgtcggcataattgtctgacaggaacccgtacgcggcgcgcacgttcgcgctgagaccgacacccgtgacgcctgctggaattagatcactgccgactaggacagaaggaatggtgatcaagaggtatcggtacctccaaaatacttgtcacccagcccggtgcccacgcctttctggtagtacacgatctgagggatctcgcgtagcacaccattctccttcacgatagccgtgcgactcagcgctcgagagagtcgagtcacattggatggaggttcgctcgcgtcgtcggtggaatcttgccaggtacctgggtcagtcagtacgtagagggaaatgggtgaatccgtgagtctcaccgtcgcagcagataatcagtcgttttgtcgacatgatgtcacagattactg

SEQ ID NO: 303 - DNA, 1256 bp, Emericella nidulans
catcccatcatatcaaccctaattccatgcctaagcctaacggatttataaaccgactctatttctcttgcttcctctctttccacagagcctttacagctttctttactggtttgtaggtgctcttcacttcagctttcattgccttcctttcctccttcgaccactgcccattcttcttcgcgtctcggatctcgcgcacatggccggttagaagaacagaaaacttctcaaccgtgcatttcgcacacttattctcatctgtgaggtcgttgagagcggcagtcaaagtgtgtattatatcctgtgcgtagggctgctggagttcgtggtcaaggtgtggagtctgggaagggccgtggacagtgcaggggatcttggatctattaacacaggcggtgtcagtacgtgcacgctccgagactactcatgatgcaagggacttacttctttccagtaatgtccatctcagaggactcaacagagataaaggacgcagacttttcgtgggtcattctgggtacgttgtggagatgggtatgtcgctgaaaggctaaatgtctcgtagagatatagatgtgtaaagtaaaatagagaattgcgtgttgctgagaattaggatgttagagattggatgcgcttttgtagctttctggtttatacgcatcggacagactcttcggcaaatcccaaaatggttaatataccggaccgagatcggatataagcaggcagctaagaactgacgtttctccgagtcggattaactatattggccaatactgttttagaccgggaatgtcgcgataagatgcgcagtggtatgtacatgttgattcgtatgtggtatatcggaggtacgctcggggatggtgtggattcctgggcgcggcggatgtagaaacatcccgtttttacgcctgtcgctatatgtagagtggcgttattgtcgatctgttggacgtggagagtttagggatgtgtcttggctggccacggcactctctcacgaggtggcgagctgcaggccccgagccgtgcgaacaatcttggtgtttcgctggagctcaagctgaagcatttgggctaggttgttacccggagccagatgctgccgaccggcacagatggttttagagccagcatcatatggattcaacgtcttgggcaagcgcaagaaagccgaggggattacagagagtagagctggacagtatactgaatttcgaactttataatgacagtagtaacaatat

SEQ ID NO: 304 - DNA, 1000 bp, Emericella nidulans
  unsure (1)..(1000): unsure at all n locations
aactcctcgagggatcaggccagggcacgagatcatgccatacagttcacgtgacacgtgacatgaggctcaacatgatatattcgtatcatatatatatgccgttcatgaatatgcattagcaccccgctgttcatgtggtcagctcactgatggtgcaaatcccactagcgatgcctgtctagattgtacacctatccttgagcttcgaaataagattcaacctcccagaaagcctatcgcccaattttgcaacatccgcggcgggcatccctctgcgcgctttggcagcctggccaaccttgacaacatccataagcgccagcggcgtctagcgattaagctaaagatagccagaggagcattttcaggatcgtcgaggattgtatagacgtcgagggccacattgcccgcggcacccaggagcgagacaatgcggccgatattcgcgagggagctgacggcgcccatgacctcgcccacgacggggacaaagaagaagatggcgctgaggaaggcgaacaagatagacttggcctttgcctcttcaatctcctcggcgatctcgacaatggactgcatgttttcgattgcgtcggagaccatgagcacgggcatggaaacggcgtcgattagctcgttgatatcgccagattactcgtcgttcttcgccttctcaacgacgtctgtgagttccggccctagggctttgagcttatcgtacgcttcggagacgacgtccttggggttgatcacatcttcggcgtcgtattcggtcggaaccgggaagttgtagtcccattgcctgtccgtgcagtgcttttcgttgggtagcagggaaatggttcacgtccttccacttgatatcctcttgcgccacgcccgcctagtgagaggtctgccagacgcgtngggtctcgagggccagacacagctgcgtatacggccgtcgacgggggactgccgcgcatgatgccgcggcacgtgcgaatgtccggac

SEQ ID NO: 305 - DNA, 776 bp, Emericella nidulans
gacagaagtttgcctgcacacgggtggctctaggataggtgacagcaatactattatacaggtgctatgcagtggatgacgccaaatgaatgtgttgttatcacgtcccgcgtggactggcgacaggtctatgctcacccggcgaatactcaggcagagatgcccggtcctgttgagcagcctgatagctcggcggcattagttcaacctcagaaacagccttaagacgttctttctcctttttccgatggcggatataaagcggtataaggacgaaaattattatgccggcaaacccgcttccaataccaataccagccttgtctccagtgctgagaccatgtgattctggttctgcctctttggcagagcaggtcttcgagccgttagatatgcttacgttacgaaatatttcttcttctattgcatcgcagtcaagggccatgtcggagtagatgtatatgccgtcagaagcccggcgcagactgggtagattgacgctgtggaacaaagctcagtcaggaaatgtcgctgacacagaaactgaagaaaatatagaacttgccttgagatatttccgcgtaattggagttcacggactcgaagtaagggaaggtcgatggcaagtgggtcacacgcgtttacttttaatgtcatgattgcgtcgaacatcctagcatggagaggctaagagcaatcatatatgtgtcagcatggcagctataataacgtcgggctcgagtacaaaaagcagtacctcgcatattaccgtttct

SEQ ID NO: 306 - DNA, 2294 bp, Emericella nidulans
ggcacttttcttgcattgcaataacctgtcagtatacctctgcaggctctccccaggccggagcccctgatgccctgcgtagcgcctcgggcatgactttgccgcctccccccttgctcctccccggccgcatgctggctatgggcatgtgctgacttgctaccagccctgtacaggctttcctcaagcttgttcctggcacatgtctagctccatgctggcttgatgctgaatccttgctggcaccccctgacttgattttgataattggctggccctcctggtccctggtgctgtgctggtaacatgccttcttggtctatgtgctggtactggctctagcttgatcctggacctgtataggtgctaatagtttgctgtagccccttgcaggtatttgcttgtactatgggcggtatacatatttagggcaactgacaggctgaacccagccctttcctggcctgtgctggcagcgcgctgcagcagcctctggagggcctctatcagttactagcctggccggctctagtggccttggtaccggttcctacaagttctggctggctttggataggttcctggagggcgctgcatcagtgctgcgccagctaggaccttgtcaaatactaggtctgtacaggctgggcgtgtactgcagtagttatatctactttgtattagcctctattcactgtgtgggctctgctattatgataatatggtgctgttattatattagtactctggctagcagaaggatacaggatggccagtcctgatcaatatcagagtagatcattgtgcagccaatcacactacaactacttgccagctggcaataactagtcacctacctctctatggcagtgcaactccctttgcattaatataatccctaatattgtgtcaaagtctcctgacaacagtgtatagtatttgtaataatccaaggatagctttactaacctggcaatgttgggtagtaatatatatatccttgtatagcatgtatctgttacctttggcatctccattactatagcagcacaacgcccacagcctgcaactactggactgtataatggcctgactacataactggccctactataatagatatacttcagctgttcatattgcaggctgatggttggtggggcaggatctgcactggattgatctgacgccggcatcttagtattgatcatcaatgcctaatcttataatacttgtacaaagcttgtctgagccggcattgtctgcttgtatattataccctaagctatataagatgctgatctgccagccaatacctcctgtctgcatgttgcaactgtgacaaccctcagccatgccttgttcacgacacgccggcgtcaccccggcactcccccagcattgtgcacaacattctgaatctgccaataccagttcatgcaagcatttatgatgtatgtacaatactgccgaccgagctatgccttaataattataatcttctcttcatgttgccagcattgcgatcacgtcatgccagcaagtatgacaatatattacatcatcaacaagcagaacctctgtagttcaatcagccagtagctgacagcaatgcaataccgtccatattttacagcatatttgtccagagtcagagctctgttgttgtcatgttgttgttcctttgctatcgtcgcgttgttgtccagtagcattgatgttagtattaggctcttgcactgtcaggagccacctttacatgtatcagaagtattgtatattgctcatccttgctggcgcatacacagctcgtcggtcgcatagtaaataagcttattacaatactgttgctggggatatgggcattgctatagtatggctttagtattgcattataacacagcttgcttgattcaccataacacacattgcacaatctccctttatacttgctcttttcttttcctcttgctcttctctcttgctgtgtcacttattccctctgcctattactcttatcttgtatattacttgttctattgctgttattgcttgcttgtatcataggctcctattgactgtactacttgctcaatcttctctgatcatctaccttgtgctatcctcccttttggctgctcaatcacctctccaaccattgcctttgtcctcccaccaaccctgttgtactgaaatggctacctctgcccccaaaaacactgatttgccgctgctcaactgaccttacaagccccctgagcccccgcagcctgaaacaaaccatcagcagtcct

SEQ ID NO: 307 - DNA, 1249 bp, Emericella nidulans
actggattagcatgctgacaaatgatgcggacgtggatcttgtcctggatcatatcgcctcatcagggcataaaatcctgcgcatctggggcttcaatgatgtgaatactgagccatcgactggccaggtatggttccagaagcaccaagggggcgtttcgaccatcaatacagggcaatacgggttgcagcgcttggatgcagtagtcagctcggctgagaagcgaggcatcaagcttattatcaatttcgtcaacaactgggatgattacggcggaatgagtgcttacctgaatgcctacggtggcagtactaagaccgactggtataccagcgccaccatccaggctgcctatcgtacatacatcaaggcagtcatagacagattcatcgactcgccagctatctttgcctgggaattggcgaatgagccccgctgcaatggctgtgatacgtccattctatacgactggatcgctgacaccagtgcctacattaaatcacttgatccgctgcacatggtctgcattggcgacggtgagtaagacaagtctactgcgaataaagcaacaactgaccgaaccttgcagagggctttggactagacgagggctccgatggtagttacccgttcagctataatgaagggctcgatttcgccgcgaacctcgccattgataccatagactttggcacctttcatctctacccgggcagctgttcgtatcctgaattttccttcctgaaataccgtttggcaaactgaaagctaacatcgacgatagggggcgtatcgtatgattggggtaatctctgggccatcacgcatggcgcagcatgtgcaacagcgggaaagccatgcctatttgaagaatacggagcaccgtccgaccactgtgcaattgaggtcccctggcaaacgactgctgtaagctcgactgggatagctggcgaccttttctggcagtggggagataccttgagcactgggcagacccataatgacggaaacacgatctactatggctctgatgagtatacatgcatggtgacagagcatatggagcggattgcggcaaggtagcaaggacgtgcctggactatgctgaaggcgtaattacggcgaggagtagccatacaaggaggtttgagtcttgcattgaaactcacatgcagcactttaaagacaaattgataagaacagtacttgatatcgtgcaacaatcgcaaaaagatcgtctcagtataa

SEQ ID NO: 308 - DNA, 1180 bp, Emericella nidulans
acgggggcgggccgttgggaagcgtttgcgtaaagattgtgtagtaatttgttgtgtctggggcgttggggactggcaatgtttccgatgatgccgagtttaacgtagaaggcgtgcgtgtgaaggtacgttgcgcaaacaatgcagacgggaaaatggcgcatgttctcctgttaggtctcgatggtcgaagccgacagaggaagcaggctgtcggcgttgatagcttgcgggttgtcgtgtggattgaacgtgcttgagactgcactgtagacgagactgtgagtcgttgaaacgctctctgagcgcggagagatgtcgccattactgatacaggattgatgtccgtacgggtaggtgaagcgataagacgacgttatgacgatggtagccacaatatatatatggcggtcggaggtcggagataatgacaaagctcgcaggggccgttacccggtcagaaaaaaaatctcaaaaatgaaagccgaacgggggggtcgaacccccaaccttgagattaagagtctcacgctctgccgattgagctagcccggctaattgttgaagggactactactattaaagcttatatcccagcactacgtacgatggcaccaacggcatagatttatcacacattaagacactgtagagctagctactttactagaataccgggaccacatgtctgtttattcaggataccacatcatatcaatctattcaatgccccaaagcttcactgtacggtcatgtccacagctcgcgatccactgcgcgttgttgctaatatcagtgctaaccaaattccagagtggccgctcaatgtcttgatatgcgaccagtcatatgccttgaaaaattacgttttgtaaagccctggtaacaaaaaccgtcccgatttctggctgtactggagcatgctccgtataaaaattcaacgggttgtcttctgaggggccaaaagacgcaaattcatccttgttcttgaacattaaactacctttgtggttaatccgcggttttaactgcgaggtcagtatttccaccttacgaccgaagttggaccatttccattaggctaattcctatttttcaaataaaaactgtctttgtttataaatttttttatttttccccttctagaggaacctttttgttcatttttattccgggagtc

SEQ ID NO: 309 - DNA, 1483 bp, Emericella nidulans
agacataccctgcactaatctgctatattagctggtaatataaatatataatactaactactttgctaatcctggataatctgctgtagattgaccctatactagatattctatatagccaactcctggctggcctgtataaatctgctagtttagttatatataaatatactaaatttgctgttcctgccacctgacaaattattccttgggttacctgatatattgataatgggggaccaacttggtcctggcttgctttgtattagcctggcttggtgctctgctggctattatacaactatcaaaaatcctgaccatgaaatcatgggctgtactaatcttgccaacttatcctgttatatatatttatactttatactaactactggtaaatactggataatcagctttggattaatcctgtacttgctactttatatatctagcctgacttactgccgccctgtatatactgatataatatatatattgggcttgcgtgcgctcggactggctctggtggtaatattaacaatcccttgttatcaactacttggcaaatacttgataactgcctgactgatactggctctggcgggctctggtaataactgtaataatccaaaccctggccatggcattgctgacctggctgcagatatctggcctgattagcactggcccttacttgtgctggtatgcctggctggctctgactgggcctgggctgcttctgtatctggcagctcttgctccctgctgggcctgaccctctgggcttgtctggctctgctggtgataattatcctgctcaggatctgacaattaatataattaaaccctaatcctgtgtcatgggcacagctagtaactagtaaataatatatatagattaggaaatatattgggttgggctgggctgggtgacacatttattttctctgcaatttacaaccctatgtgggtaaaaaacaaatagactggaaggacttctcttcttccgttatcatcatatttccattagtagaacatagtacccccgtctccaataatactttactctactctacgtttctctcaatttcaccataaattattcacctcatcaccatttcctacatctgctcttttttccatatcaatccgtacctcctcatcgttttatcatacctctctatccaccttatcaattccatccaccttacccttctttcattctatccttcacttctattatctatcctaatctatgatcaatatctttcaactctcatactaactatcatcttctcttcaccactatctatcacttcatatatcatctcccttgtttatttcctccccttcttcttccattacaacctcttttcactctccctccttacttatcttcttattcctcctacctcttcaatcctttcacacactccctctccaacttacccctattactctatctactatatctcactaccttcat

SEQ ID NO: 310 - DNA, 754 bp, Emericella nidulans
  unsure (1)..(754): unsure at all n locations
gcccattcagcctgaggtcccaattcccataaccgagtaaaatctacagatggtgtgctggtaccaaaaaggaacatcggatcgacaagtgtggccgacgagagaaactgactaggcaagggctggcagttcatcgactgtagcgccatggaatcgaggatcgatccctcattcaccataccgttgctgggccccgcctcggactgccagtctgacgtgggcgcgatgatatgactctgggccgggctcggaaatgctggcgccgggtctgtactgtcttgccggcgagcaggagcagatgttgtgctttccgcttgcttacacgcctccagctgctcctcaagtgtctctaagctctgctgaacggccggatgcatgtcccagaagccgacacatttcttgtatgtcaagtgcaggacctcataccgcgatttcacgaccgacttgagcgttccggggcgacaaagctggctacgcatcagttgtacggcagatgccagccagatcgtgctcgagaggaagggcatggtgtactgaatgtggtcggcactgctgcgctggatgatggtcagaattttgtctgccgcatcaaaatattccctgatggctgcatgctcgcctttcctcatgctgctgctcctatcatgattatgctggtcatcacaactcangagtgagaccccggacccggcctttgaagacatcgtaacggtagaccattagcctggcgaggtgggcatcatgttgatattga

SEQ ID NO: 311 - DNA, 533 bp, Emericella nidulans
tttctaaaaaaaaaatttaataggtatagattatctatagtacagataacctatataatctatagaaagaatctaactaaagttagtttaatagcttatataatatagctaaactaggcatagtattaaaaggtatagattttacagtatagactatttaaaatcttgcaggttatagtgcagtgcaggttagttttctagaacccacaaacctgcacaggttgatttctgaccctgcgctgcaggttgtacccgacctgcaccggtgcatccctacatcttatacagctagataattaagaacagataataataattaatttgagtagctaggtgcttcctcataagaattattcttaaataaaagactatatctagaggattagtactagaataataagcttttactagatttaggggtgtactcggtgcgggtttgcaggttctagataattaacccgcaccgcactataacttgtaagattttgaatagtctatactataaaatctatatttttaaatactatacttag

SEQ ID NO: 312 - DNA, 1442 bp, Emericella nidulans
caaaattgcctctagtccttgggatgggcccaagcgagcgagcgacggacgaggacgaggacaaggactaaggactacttcgtaccggcggtactgtacttggtatcgaccgcgtcggttgccgcaacgcaggccaggcgaattacagtactgtaattacggcaggccaatcgaccaccacaccagaatgtcgcttccattcttacaggttgcatcgccgcgaaaatgttgtgtttcctgaccatcgggggatgtgaaatgagaacgacgcagactaagacaggctaagacggccaagaccaactgcgattcgtggcgacaacaagccgtcgaagtctggccctagtctggccccagactggccatacagaggctcggttcagccccgacctgacagtcgggaggatgtggaggagaagtctggagtcggagccagctcgtttgggcgcagagcccgagcaggggacggacgagtggccaaccacgtggctgcctgttacggatggcgaatctggaaataacgggagttagaaaaacaaataggaattatagaattccgtggaatgattggactctgcgtccattgagtctcgcaatgctaccctcttgggtccaagatgtaaccctgccaataacgtgccgcaaacatccccgccaccccgggctgggtcgttgcatctccccagattctgccagcgaaaaggaaattattgaccgtctgaccggttgaccggtcgaaccgctcgggtaccgccgaggctcggttcaagtcttaatatatgtgaattcaggctctggtcctgttctgtcatcattgtctcactggtctcgcttgtctcactggtctcactggtctcactggtctcactggtctcactggtctcactggtctcactggcatcgctgctatgcatctgccatttgcgccctctcacgcagactcttggcgccagaccactggcctctagccagtggccttggcaagtaaagcattcggcaggcagaaacaagccgtcacaagacgcggactgagcgcctctgggtgactcgtcgaatccttcatttagattcagtcaatcagtcacgaccttcgcacgccgggtccgccgcgtcgccgcgtcgccgctggttgtcactgaatcatgaaatcaagactctgtgggatcatgggccacggtttgctggtgctagctgctagcgccacctcgaacgttgaggggcctactacggattacggagtctgctcagtctgagccttggacgtcccggcaattggccggcctggcgtttgaccgaccaggacaagctcacaggcatccccatttctctcatttaattctgtaatcttggtttcctggcccgaaataataaaccggacgaacgagcgaaatttatgttctaccagtgcatcgaatagttcagtagatccggagtcgcgctta

SEQ ID NO: 313 - DNA, 1177 bp, Emericella nidulans
tttattatcagcatcaggatcaaaagtatgccatacttcttactcatttgcatggtctttaatgacttgattttatgcgcgccaatcatcccatgagcttaggatggcttagaccttcgtggcgctgtctttattatatgcgatcgccattttttttgtcgtcaagatattccgatctcagcagaactcattgtatattcaaaggagtaggctccgggttgccagtgtcctttgggtaatgttcaaccacctcctagcttgtctgtatagctcggtacggggctgcagatatctttaatatgacaaaaagaggtaataattctgtatcccagtccctagagcaatgccgggctcataactgtggataattggggtggttatgtaatcaatatccgtagtaaacaatttcattgaaggtcttgatctcctaactatgatctgtataggcaatttataccttttccaaggcttcaaaaaaaaaggttcttgcttatgcaggagatatccttgccatacaaacagtataaggcattaaacagatatccctgccatataaacagcgtaaagcatcaaacagacaggcaaacgaacaaggtgctgaacattgattagtaaggaggaacctcctccggttgacatattcgtatcagttagaaacatttgggatggtagcctatctggaggcatcctcggtacagcgcgaggactctgtcctttatcaagggccatgcactttgagtatgcaggttggtaactcgtctgcccctggggttgtgttccccgcgtgaaggactgccttctcgacttgggttattgtgatgtctgggaagggaggtgctttagatgggactgctggtgtatctagagggatatcttctgcctcggcggtgttttgaaggaggttctgagttaggacttctctctattcttgcaaggccactgccgagggcctgtccggcctcagggggcccttcagcggcgggctgcggtaggtgccgcttgacttatgccatttagacatctcaacaacctccttgctcttggttcgctgttaatcttgtctctccagtactgagactgggctctccgagtaaccctccagaagtctcttcgcgtgctgagtccttcccggtaattttccagtgctttcttacattctgtattccaccggccgttc

SEQ ID NO: 314 - DNA, 622 bp, Emericella nidulans
atggagtccgtaatacggttattgaactcaaccaaggcagagtttcgcattgagagtattgcacggcccgcaaaaaagtccgggtcagacgcctgaaagtcggcagtgtggcaatgggtcatatctgctgctggaaagacccgctcgcagagttcctcaacagacatagacgcgctatccattacatagtccggcagctccaaggtaccatgcattgtattatcaacagacatgcgagcaagtaactgggagaataggcaattaatgccaactgacgggagacgcatattctgggtgagccgtaaaatagcccgtaaccttggccagatgggttagcggacagaaacacatgcatagaggataacaaacccggcaggtatggcagcgtgtcgcctgagatctccgtgtggcagaaaattcatcttcaggcttcgagcgcaacgagccgagccagtatctatagccctctacagcacgccgtgatctctgcggcctggaacggactgcaaccaatccgggcgaggggctagatggcggcggcggaggcggaggacgtgaatggagaactgagggaggcggatccaagaaattgtcctcaaacacagtaaccaccgggctggca

SEQ ID NO: 315 - DNA, 2404 bp, Emericella nidulans
tcggccacacccccggcatcaccggctgcttgtcgctcggtcttgctgagaccgtcgagggcgctgttcacgggcagcccggaccagctgtgcgagatgatgacgatgtcctttcccgcgctggcttcctgctcaaccagggtccggagcgcctcgatatcgggctgcaggtctttggtgctggtggcctggtggatcgaggggaaggcgatggtatgggtggtgtgctcggggaagtgggccgccaggggctcaaaagccgtaggcgggtaccaagccccagggcagaagatcagggtgggctttgagaacgtcatctggggcactgatggtagggtggaagacggctatgaggcggcataagtactcaggagtagggctagttcttgacggctgccaaccatcgctgtcagcatagtgctatatgccgatcgatccgagctgttgcggttaatctattgccggccgatggcaaagcccgctggcaaggcccgcaattgaggctgagggctataatcgatgtttcgataggggcaaagccagaccccccaagtctgccattcgacagaacaacgaacgctgcaccctttcattctcccccttcccaccgttgcactttgaataactgaagttatttgtccgtaagtgctctgctgcgaaggaaatcattaagagctacccgttagtctggcaggcatcaatctctcgagaggaaatcctcaattacgggttgcgtccagcattcacaagccatcgcgctcagctagggagtagtttgaactgcgtttccgctatgacggttttataattagctattgtaggtttgttccagcctctataactgctacgccctaaagttgattcatagagtgtacagcgcggaaaggcgcatgatacctcacgattacggaaacaaaccataacccttatatcgacgcctacaaaagattattagagagtgcagaaaaccttcggtttgtactgggtcgagatgttgataccttgacgtgaagggaaggatatggctacgacgtgactgccttggcttgctatgatattgaaagcaatgaagagtaaactgagttcatgcaggtatcaggttatagcgagcagggaacaccgagctggatcggatttatgtacattcgggttttcaaacgccaaagtgaatataaggaacccacaacgcttgcctcctttcactccggttaccggcgagatcgatatcgtttggaataatgtcccttacgcggtttgttgcggtgggatctatactgttctttaggttctcatgatgttctgatacatttatggttagtttcgactgacgctcgatctctgataatgcttcaagccaacggtctcgcatctccctggcagcgtaatgaagccctcgacacaccgattcatcgtccatatttccattggcaatttctgtgtacgtgattcttgccatatcgacacagatatcgtcattaacattccataaagtgccaataacatgtcgaaaccccgccagctggaaggcgctggtcaagtgaatactctcatcaattaatttatcgtctttgatctggccggtcccgcaagctgagaggtacgcaagaaacggcggattcttgtggaggttcatcttgaggagactgcctactgtgagagaatcgtcatcaccgtcccataagatcaatcgactttgagatggatcggtatgacttgtgtagccatggccagcaaagtggaagatctggcatactcgcatgtggcctataatatcatgttcgcgccgccttggttggattgtgtgaagagccattaatttgcacatatcacagagtatttgtacttcctcagcggcaaatggaaggtatccattccctggcgtatcctgcatggacaataaaagtgcaaatggtaaagactctgttgctaggcgttggcggccacgtatgatggctttaatagacgagctgtaagacgacatgacccgatcaagcacggttttggaattgccctggctgtgatatccagctgcatgcagaggaaatttggctaaaggacctgtagggatccaccatacatgtggccattcgcggttagatggtgactggataaaccctagtacttctagaatcggttccatagtcgtatcccacagccattcaagaacttgagggcttcctaaatcatcccaccttgctttctctgtaatatcggcaatgatgagcttgggtagaggcaaagaagatatcctgtgatgctcaacaatgatagcatcacagcgatactggctgatatttatagtaataatgggacctttctgcgcagcccgtaatatctcttcttcgcttggtgcttttaagaagttgttaaacccaggctgactttggatattcatgattagatt

SEQ ID NO: 316 - DNA, 778 bp, Emericella nidulans
tcgcggttaggtcccagggcctaggcgtactatacgtgcggagctctgtcctagtataataaaaatttttatattgatatatctacttttctaaaagaaagtccctagctaaagataatgatacaatgtataataaagaattatgaataattatataatatctgaaagtgtagggtactaagctatacttatataaaaaattctaagttattataaattataagaacttagggtacttcttctttctaagaaaattaataaaataatatatataataattcttatttctcagccagtttcattttaagctgatatataaaaaaaggttagttagttaattaaaatattaatatatgtctataaaaagactaagatatatctaataataataataataaggtcaagtcttatataatataactttttatagaaaaatacttaaaaaaaatagtagttattatcttctaactagctaaaaaataactataataaatatttctatatagatattagactaaataaaactaagaaatattatatctttattgattataatactaagtaattctagtagctggaagtggctgtttaaaccaccggtggaccgggtctaaggcttgcctagtctctatgggggtggggggggccgggccaccccgcatccggggtaggttcattaaaagggggccccccaagcaacattataggccctttaaattggccccttagggcctttcttacctgtcatatctgttttgaggtggtactttcagacccg

SEQ ID NO: 317 - DNA, 731 bp, Emericella nidulans
atcagcacagtgcatcgtacgcaggcttatcttccacctatttaaactagtgtactaactagttaccccaggcacacggaaacaaaaacgcctggctcacgataatgagctagttctatcttcaggtgaagataatagtattctttttagggtgagttcttcaggattcattcctccacgccgatctagttcccgtggtcaaggttcaagatctagatcacggggaagcaggtttgtactataaactagtccgaaactagtttatgatgattctaacttctaaaaagttctcgttataatacaccagcacatcagtcaccatccaggtcttcttcagagtatgctattcttacttgttgaaactagttctggattagttccgctgaccccaggttctacattttagaacacctatcctccagcaatcagctacagtgaatttacaggttcaaaaccttgagctgcaaagacaacaacttgaactagaagctcaacaagtttaaatatgaaaggagaaggcagaggctgaaaaattagagcttgaaaatatgcttcgttgacgagagttgggtctggactgattaagaaatcgtggaactagttagcaactagttaaaagacctcgttactctcggcctcctcttcatcctcgtaaggcacaaagagctcaaagtggtcacaaacatccagattagcctccctacagcagtctaaacaagtaagtaactgta

SEQ ID NO: 318 - DNA, 846 bp, Emericella nidulans
gtctgcaagcatattctggcctgtctgctggctgctctttgtcccagtcttggtgtgaatggaaaggatgaagagggccggtctgttacccttgacaaagaggagattgcggccttgtgcgctggatggggaggatgaaaacgactatggcatatcacgttgctgccatctggtgtaattatatacacactcaaccccgcacacgaccgtacaaggaaatatagacagttgacctatgaccaggtagtagatagcagagacttaacatgtgttataatacaggcaaatttatggtttgtcataatggcaaactccaccagaacttttggtaaggcgtatagggatatagaatcaaaattcaagtattatagacaatatttgggtcgatagctcagtttggtagagcaagcggctgcagtttcatgtttccgctaggtcctgcgttcgagtcgcggtcggccctagttttttttttttttcttgtggttgctgctgacccctaagacccaaacctcgccaactaccttctcaattcaaatttacacagaacatctcaatagagtcattatttgtagttagcatagttagtaaaggaacccagagctgtcgctccagaagccattgtccctgccctaaatggtatatataaagcggcgcgtgtgtcttatagcgtacgtattatctatatatcatcatcgtctgtctcccaagtctcactaccccagcgtgctgggccggtgagtcagtttaacccagttatctgattagtgaggactgcttatctaggctgcctggaaaacacccgtatgaccaaaaccggacgcattgtggcaggactgtcgagtc

SEQ ID NO: 319 - DNA, 810 bp, Emericella nidulans
cccgagagttttgctccatacatgacacatggtagtgcttgttggttctgaggcttgtgggattaaggctagctttttgcagaattgttggaacttatcatagtattgactggaaaagtccctgaaattaatgtgaaatgcagacttgatattgggttcttcatttaacttggtaggaatgcagtcccagaagcgacagtggcttctggtaccagaattgtcttgcaatataatcaccgtttctcctttacaagttcttcaatgcaaatgcgactcgcttgactaggtcttgtattgtcctctcccattcactatccacgtctggaggaatcatcagagtaggtttcctctgataaaacgcaggccgacccctaatgaaaagtcatgcttgttgcgataagctatgccaaaggcgtaaatatgcttggatacagatatgaatcagaaagcagaagagatattatttcaaggaggcgggatcggtttcaaacaatagaggcccttggaggaacgacctttgcgttaaccttgatttgcgctataatagttggagcatcagtacgattggactgtatcattggatctggttaacgtttgaaccactgagatagcaggcagggagaagggagcctgcaatccatttcttccacccgggattagctgccttgcatgctcctgttacccttgtgcatctggaccgtctcacccaccagccaatgccaaacccagaacaatagtccataatccatctattatcggtttgtatccctggttagtgtacatgattttgttttatattaagcataagat

SEQ ID NO: 320 - DNA, 2157 bp, Emericella nidulans
ccgggtgatatggaccattggcagtatgagggttctataggtgcagtctttacggtcgaaggtcgactcggttcggttgagggagatcgggaaactataggggcaggaaatctggccatcgtcatagctccaacatagctccaagctagggagaaaaattgtgaatcagcgatcggggatcgcagatcaaacaggatgatttaccagccaggcagcaacatgcgctatacctctagcctctagtctgccgcctataggctggttcagaccggctcagatggttgggcgcacagcacagtaaacaatcgacagtatgacgtggagagtccaggcccttgcagatacaggcacgtgattccccaatcacggtatagcgccaggtagtatggaccaggtacggaatcattcaatttaagaatcttcgagacaggggtgacgttctaagcttactagctctaattagactcacgaagattcactgattcgacccttaatccgaccctagacgaccctaggaatgctgactctgatctcctacaccagctcctcgacgcaggcggcagggcacagcccgaggtggggcgtacagatagggcggtcgcttacagagcagtattgttcacgtgctgtgggtacgtctcataagaggttgacaaccaatatcttagtcagaacttagctcaccaagggttggccctttatgtctgaatgggatgttcagtggaggtcgagaaagctcgcttggatgtatggggtatcaagaaggcttggcataatgcttagtaagctttcgaatgcaagaaaatcacaaatgaccacgttattgaccaagtacttgttccctagagcaattattccaatatcattcttggactcattgatgcattcctcaaaatttgctaaacgcagatgcacaggaaatctgccgtaactgaaatttggaaaagaccctcaacagctgcaggacacccggtctggactgggggccttcagcagtcaagataggagaccgcgaccaccgcattatacaggtcgtcgctggaacgtctgtcagtcgatctcgggctagacatgggaacagtctcctggttgtgattaaatccagacggccgcctttgatcatgtccatcagtgccgaacgcagacgcgaacacaccaagcacaacgtactgcattgttcctacggagaccaatctgacactctatctgtaacgcgtctgctttgggagttcggtgagacaataaggattggacgttcctgaagccagtgggtctgagctccaactcttgattctttagcagcggcaccaggggcctggggccgaagggcctgccagggtccacgagcaagctatctagacaatcgcttgtcggcccgccaattttattgcctttcctggaaagggggatcgagatcattctatagatggaacctgccatcagtctcaagacagttcaagcttatctcagactctagtccgtcactaggatccgaggtcgttagagctggtttcctgcggcttgactacacactgaaaggcttagcaggatcccactttggtactgatgctcattccgatcagtacatcggcgaattctgctgtgcatagagcaagggacaatgccgaaggatctagtttcactgccgcacactgccactgcacactccacactccacactacacgacatgttgacagccctgtctgagaaaacttgtcattcccagtgaatactattctacggtgaggcagaatcaacttgtaggagtgcaggtccaagcgatgggctgatccgacctggatttaccagacggttctgacccaaccgattgagactagctgtttcggattgatgatatcaggctagggtctacttcccatatcggcatcgcgcatcacggcatcgccgcatcgggcagccgcatcagttgcggatcaaccatactagtggttggatttcgagtatccaatcaagctaaccgcgttagacatgagaaggagagcaaatagtcatgagcaatccgaatcggcgaatgttcttgatagacagtccaggcgacttgccgggatggctggccatagacgctatactaacttctatatctggattcttgcaccctgacaaaagtcctaagagcagctctatagcatgtattc

SEQ ID NO: 321 - DNA, 1090 bp, Emericella nidulans
acgacgccgataatacgactactatagggatcctgacctccgccttttggacggctacacgcttggccaagctttttacgaagaaccttcgatcggccctgggctctaagacgccattaactcaggcatttttcggcacaaaggtcacctacaaggaacccgggaatgggcccgaccttgtcagcaggacccaagatggcgcggccgtgcagaagttgcaggttcaaaaggcactcgcagagaaatgcaatagcattgacccctctgcagaggttaaggtctttgcgactatcgaagaagctatcgattttacccgtgacctggcttcaagggaggagcaccgtatcgagggcgatgaaactccaatcatgcctttggactgaaagtctacatcttgtcgcaggtgttcttgatgttatcgaaacgaagccatactctaaaaagctttattcgggttgcacgcatgcggacttacatagcatgagttatgaccacggaccgtttatagtgttcgtcatttattccgccttttcaactggggtattggtgtcaggtttcaccttcttgggagggagtggcgctcagtggtttcaacacagcgcgacaaaggcgtatctcacaagtggctcagtaatgtttatacagggcagtgatggcattgtattgtatttagctatcacctaaccaacagattctaacacatctcctgaatacccgcggtatacgctacgttcgggccattcggcggacggaatggccggctcgttctccctgaggctgcctacatttttctcgactgtaagtagatctacgttgcggctaggttctggtcttgatattttcagcacctcgcacaaataaacacaattattacagattaaaataacagtacattgtagtagccaatattgatccattggcaatatcaccttgaaaagaacatttcttaaggttatcaaggatgtaaccacaagctaaaaatccacacccagacaccacaatatgcgtttaagccgagctagttcagtccgcacccatcgaaattttactacaggatttgcaagaatgcagcagaccgttaaggctgcta

SEQ ID NO: 322 - DNA, 497 bp, Emericella nidulans
ctctagtaacggccgccagtgaaagagagccagagtggctcaataaataaattcatatgtatgttcaactgatccaacgaactgtggatcaaaaatatctgggaagcttgcattgaatctgtagatcactacaaaagaaaaaagaaagttcaagaaaaaattaaaaaaccacataacaatagaaataataaaaatacaagacaacagaccacatacagtctcaaactgtttttttttttttgagacggagttcgctctgtcacccaggctggagtgcagtggcgcgatctcggctcactgcaaccttcgcctcccgggttcaagcaattctcctgcctcagcctccagagtagttgggactacaggcatgtgccaccacgcccggctaattttttttgtatttttaataaagacggggtttcacgcgttagcaggatagtctcgatctcctgaccttgtgatcacctgccttcagcctcccaaagtgctgggatgac

SEQ ID NO: 323 - DNA, 592 bp, Emericella nidulans
tgagggggacacatatctgcccctatcggccttccatgaccagtgcattaaatcgaggggagtatgcttttttttttacgatggaaaaggccattttgacggcggatgtgacggatgtcatcagatgatatgagttgagtctgcagtaacgatggacactaagagagactggatactataaatctaataacggatgatggacggatctcagatgaggcgatgagtggcattatattggaattcgattatttggcggcttagtctcactggcttaatggtatcaactttctgatccgatcttccacttctatcactcatccttaactttacctaattctaaattcgacttttacttatgaacatacttatgtcttgaattcttttatgcacgtacgaacacatactcatatactctgttcttaaatctcacctttgtaccgtctatttctatgtacacatcattcgacatccactaatttctttcttatataatcatcaacaatcggcatattcctgatactaaatctaatatatctaatcttcattaaactgtaactatcttgtatcatctcttatccttcttaccttaagt

SEQ ID NO: 324 - DNA, 1920 bp, Emericella nidulans
  unsure (1)..(1920): unsure at all n locations
aatatcaagctatattcatatatagcaagatgcatatgttgtatttctttattctttatttacctaaattattgttcaaggttcccatctgctgagcacctcggattctattccgaggacattctctgcctcggccgcggcaaagtggccccgtgctcggctcaaatgtaactttgagaattcatatatgaacaatgtttagagttcacagctgatttttgacgccaagaattcttaccatggggagaggcgggggtttcttgtaacaaacgatgatactatgagaactgcggtgaaatccgcggttggtcagaggaagttggcacagaatagagagaactaagtgatcattgtctgagagagcgatctcatggacttagctacagaaagaaagatggtagatacacgtgtcatcttatatagcccctcaatattggagtatcaacttactccaactccttaagtgctaagccatattcataacaagaacagtttctaccgaggccctagcctcaaacattcttctggtagctcattgtagaatctgtcggcggtctgcactgggctatcgtgccatccaatgccatatctatatagtgctgaaaaaggacacgcgcgggcacatgctagagaatcgcaaactcgcagcaagtttcgcagatgcaggcgcgcaatcacaagctgaatgtcctgtgtaccaatattacctattaggaggatacatagagctgtgtcgagtaccgtcgatgtcgaggacgtgagtggcaatagggctaaagctagaattagtccgcctgatgaatacctcggtgccctacctagtacgactcgttcgcgccgccttcagcagttctaactgggtattgccaggcaggcagaaattcgaatttctttatacagcctcacacccaagcacacgaagcgcatgttggctgcgaagtttacattcattccagacacatcccacagcccaagggtgctggggcctagtcagttgccggtacaggcgctacagcaaatactgccgtgccagggacgaagtcacaaaagcactggtgaatgatcattcctccattgcagaattctacttaattagtgtgaacgacttggagaagtaagctataggctatcagtaggatggtctgccaagctacagtatgcttgctaagatacaaatatatatcaatgttgtttgtcacagaatcgatagaactacaagtactgtacacgatagtctggaagcagaatcagaatatcaaatggcagaatcttgaaaacctctagattctatatgattaacgatcttcaatcaataacgaaatcttggctgcagataaaagcttcttcattacaaactttcagggatgagttgccgatcaagctaagctttcagcaccccagggacgaacgaacccaaaaacttgtaagtcgagctctactgctttttgcaacaaatctgactcgcacattgatggtattcgggatgcttcgtgtcttgatagacaccntgaccctttaagaaccgacggcctggtatcataagctgccctgctgaggccgagccgacagctgagcgacggggtactagacctcggcaggcccatgggctacccatgatgggtaagcccatacccacacatgggtgggcaatgggtagtcttcagatacccatgggtgggtagcctgaagctgatacccatgatgggtacctattaggtacccatctaacccaaactctaataaaaaagaaacctccataacttgcataacttatataatcttacttgtaattttaaattattctccttatactatatagctttaataacactcagcatgatattactctatttacatagctagaaaaactcaaaaccattatctacatactaagacttcttgtggttgtttgttatgctc

SEQ ID NO: 325 - DNA, 2671 bp, Emericella nidulans
  unsure (1)..(2671): unsure at all n locations
gggagctaagtgtcaagaaccatggctagaaaatgatatattgaatcttggctaggctgctatttcacggaaccttgcgggataaatcaaatcatactagggtctatctaggactcatttgcggtctttgcatttgcggcctcccaggatgtctggagacaaagaaccgattgcctcaatggagagtatcaggcctaggcccgatgaccctcaatcagaagctccggaaaactgcccggcattcttcggtcctgttactcatttcttcctaccagatatcttcctgtcatcttcctcgctttatgatgatgctgattcactgcgtaccgctggtactgtctcggccctcaggcagtctatcgctataatggaggccgattcacagagtcagagccagcctgcaatacttctgcgcttacttattcggagcctgagcttatacagcaactggtcgagttcatttttgattaggatcgaacagttctcttcgtcctattagtgtacaaggcaaagaatactcaatccctttggtatcccttcatcccctcttagtagcaagttctgatgatcaggcaaaggaccaacctatatatactcggcttggactcccaacaaccaagtacctagatacttgcgctatcgtctgcatgaagttggtggttgaagccttgcatctgcgtagactcagaccggacaagaggtgcctgcgctccggagcgggcatgtcctgcttccatgcgggttcttcatatgctcgagagttttggaagtggttaatggcacgcatcccaatatgcggatgtgagcaaagtaggccgtactcacctgagtataaaacgggaggtccgagctattcttaacatctatctagcaaagtgagctttacaagtaaaaaaataccagaaaaagaagttggcgccgcccggaatcgaaccggggctggcacggccacaacgtgacgtcataccactagaccacggcacctaataattgaaggatgttgtatattcttacaaatataagaaaaacataaagcgtaaccttccagcccatcgtcaaccgtcaatgttatggtcttttaataacccagcgagccgtcaaactttttctatgtcatgatttgataggccaatgcaacagcgcaggtggattgtccgctgaaacaagccctaacttgggcagtctgtagtcatattcaaagacatgctggcacaaagtcaanntacagttgaactatactcaatatctttcccatttctaaaggagccttccatgtccttcatgtccaggggatgggagtcctggccattggcctctagccgagcaggaaagtaatggtgcaagctgcagtctattgtttcttgcgggcatgattaatccctcaaggagggaaggagcaacgctgacggggtccaatgggcgtccgtcctttgcgtacagtacctctcagctacaagggagggcgtaatagctgaaagggctctgggactgactcctgctatgccgtaggcgtttgtcacggtgagtattctggcacgtggatacaaggatgttgccctgagtacggtagcctgggtatggtggagtatatactgtttgcatggatacagtggacagatcatggcagggctgattgactaactttgcactgttgtctgtggcaagcgtacaggcacatgccagccttgaacccactataaggactggacgctctggtatctgccgcgacgcttctcttggttattgttagtctgaacctggacgggatgctggcaccggttgtcgaaaatggtagcttttgacatggacacggtactacccgacgcatgtagaggtcgagtgatatatacagggtggtctggttgttatcagctttgtactcgctgttcaggtcatgtatttgtttgactttactggtgtaactgatcttgattctaccgatgtctctgtatgcatgtttaacccgcgagtttggttaccaggattcgattgactgggtgcatgggcgactttgacaccatatatatataaatgtggctggattatacagctttctcctgccatttattatagagaacacatgcacccaacacgagttggttaaaatcatcagcaaaaaagataccaagagcactaggcattcacaacaccgtagaatatggtgtgctagggataaaaaaatggcgccgcccggaatcgaaccggggctggcacggccacaacgtgacgtcataccactagaccacggcacctattagttgtaggacagcccaaactttgactatataaagcttagcagcttgcagcttatgcttgaagcccatttgcgtggatcgtgaagtccatgtccccgtgcgctagggtttacctgcaatggncccngaaatatcgattaaattagagagatatcgataatgaaacaccggnttgtgacgcctactcaagttgataagtccttcgtcagccatcgacttaacttgacgttggttgaataccatagtcgcgctcaccaagggagttataacttgatatcatctacaagcttctgacctacgctgcctactacgctgctgactgcgctcgctcggagcgtttgatggcggacctncggtgactagttgcctgcggcaccctccggggcctcccgaggcctgcgacttgtagcctcgcg

SEQ ID NO: 326 - DNA, 2943 bp, Emericella nidulans
gagtcggacctggaggtcatggttatcggaaattatctttagaactgaaggcaaccgcagtggttagcaaatccaccaaggggtcaatatcaggtcagggctatacaatatgactgcaacaccctgctttcataatccgtcacgtcgtcgatccaacccgcacgggtctgattcccgccagcgaacagactcttccatctgcccagtatcagcagattccaaagccattgaaatttaattcaagataatcagactttgaacctcttaccagtcgccgggttcgtgcgcaaggcgggactgtcagccttggttagcgaagaaattgaaaagcacttgggcaagtcaactaaactgaccccaagtcgacatctcaccacattcatcctgctcgacatcgccgtggagcggctgacaaaggtacaaggaggcaaaataaagaccccacccacgcagtcaatgtattggagagattgcaggaggggaacactcattaccagggatcgtagcaaatggagagccctttggaaaaaagacatccgttccttggtaggctacgtacgtgcagttggtacagctctattccaccctcttttggtatttcacaacgcctaaacatttctattatgatatccttcatcacgcgggccgcacaacccaccagaatcagggcttgaatgattcagctttatcataaccctatctcctattactataacattacttataatttgcgataactcctgtgaagtgcacttctcatcaatagagatcctgtgcattgtaacgactgattggtcagccccgggagcatgttctgaggtatccgagatggataggagcagggtcttttattggaaggtcaatatcaatccatgctggaataccaataacaaataccatcgacagcagatttctcttattcgagtcccggttcgcttctctatcattttcctctttgattttccacttggggcctaatctctttattcaatttccactcaattctcttcctatctttcttctcacctctctgcttgtctctcttctaatctgtctgctcatctccttttaaccaccttagtgtctgctatctcgcttttgagtctgcctgttgtccagtctccctacttctcaagtgttgttcagactccaaaatgaacatatggaacccacggtaaataccttgtaccttggtaaacgtcgttgctatccatgtcggaatcataccaaatgatgtctcgtggtaacctgtcgcttccaacatgccgaccacctaggttatcaacctctgtttgactcactgacggcctattgagacaatgatcacgaagtctccgggcagcctgatgcaggccttgacacactgattcatccttcatgtttccacccgccattgttttatatgtaatccttgccatgtccatacaggtttcgtcatctaccttccagagagtgccaataacatgccggaatcctgccagctggaaggcgctgatcaggtgaatactctcgtcaaggaacctctcatctctgatctggccagttccacaagctgaaaggtaagcaaggaatggtgagtactctcgaagattcatttccagaagattagctactgtaaggggcccatctttcccatctctaagaagcaaacaacttttggatggatttgccttgtctgtataaccatggccagcgaagtggaatatcctgcattgcggcaaatacggtacgagatcgcgtttgtattgtcctggctggatagggtcgagacccattgatctgaacgggtcatgaagtattgctatttccttagctgcaaatggaagcctggaattccctggtgtatgctccatagcaattagaagtgcatgtgccgaagttgactacttagcaggacgtcgacgtccatgtataatcgctttaacagacgagctcgtcaggaagacatgacccgatcaagcactgtctcctgtgtacctctaccatgatatccagctgcatggagagggaatttgctcaaagcacctgtcgggatccaccatatgtgtggccaattgttgccagatggggatcggtctaatcctagcgattctagaacaggatgcatgatggcatcccacaaccattctaggataataggacttcccaaatcatctgttgtctttgccttctcctcgatctcttcgctggtgaggttgggtagatgcagagaagatattttatcctgtgcaatcaggattgcatcacagcggtaccggctgacatttattgttacaataggacccttctgcgcacaagtcgcatttcatcttcactcggcgctagcaaaaagtcatcaaatcccggctgttttcgaatctcaatgatcaacttgtcaagttctctgtcagcattgtaacgctgacgcgcttgagcctgcccagaagtcgtgggatttgtagtcgtcaaaaattcattgcgcgtagaaggcttgcctagtatatcccgaagctgaacaaatcgcgtggccagggcagggtatgcttcctgtagatcaagagtgtctactcgtacctcttcaagagatgctgcaagcacgcctcttccatgttcaagcaagcctagagcaaccacggctcccttttgcgcattcaatgcgacagatgctgcatcagaagcaaggcccactacttcaccaagcaaatgttgtttatcagagttttcaagtgaccgtgccgttaaacgaggaacgagatgaacagcgatatctgcgacttcgtagctctgctgccagtctgaaagaatggcaagattcctaagtgcacaatgggcagcttgtactagagtggcaatgaaagagctttgttgtcctaaagcagactgctgatgggaaataacttcaaggaggtcggctactgctccatctttgctattggcacaagccctttccaggttgttaaatca

SEQ ID NO: 327 - DNA, 3614 bp, Emericella nidulans
tattgaaactctcgcttgctaaccgacttcgcccccttatgctcttcccaaagaccaccaacagccagggcacatgacacagcccagcggctatgcctcccagcagacttgctgcaggcccgtaccctagattcttaaacagctgcctggacaccaagggaaacaccccgttcatgagattccggcagaaattctgcgccgccagcgcagagctcgcgtagcggacgtacgtgtcagccaggtaattgaacacggagaggtagatcgagaagatccccatcgtcgagatccctacggctatagtcggcacaatccatgggatcgtatcgccgtgctgcgacgtccagccgaacataaacagcccggcgggcaagaggacgctctcgacacacgcgaagtagagccggtgctcgggaatggtgttccatctctcgtgcctcgaggcgagaatgctttgggttatggacaagagggtggaaacgatactggcggcgcaagttgcggtgaagatcgcatttgcggaggagaggctgaatccgtatgtggattggtacacgagcggaatcgcggcgaggttgatgtacataacggaccagctgaatgcagcccagagggagaagaagaagacgacgggctcggtgcagaggaggaggaatgcgcgggagacggatacccgtagtgtggtggctatgctggcgcgtgcttcgtgctcggcgactctccagcggattcggcgcacattgctttcatttctcgtctggtcatgggtttggccgtcattggcgttttcgccttgcgataatcgcatgccgggggacccggccttctcgagacgctcgtagtacctgtttaatgccttggctcgcttacggagtatgacaacgccgcgggtctcgcggaagaagaagagcagggccaatgcaaggatcccgtcgataatagtctgcatgtagaagatccatcgccatgtcgtatactgcgcgatgaacccgcaggccagcggacccaggcccgtcccaaacagcgcggtgccggtgaagactgccatgggggcattccgctcgcgcggcacgtacatatcagccacaatgccgccgaccattgtggtgaacgttgatcctgcgacgccagcgaagagcctggcgaccagcatcctataacttactgtaagttcattcctcgggaaagtagaggggatcatttcctacgcaccccgagtacagccttgtaacagcgcagcacagctgaaaaattacgagcactgctcccgttcccaagaagaccggcctcctgcccacgatctcagataggggaactagaagcataggcgcgaagcccataccgcagcaaaaggtcgtgatgcccaagagggcagcgacgcgactgacgccccattcggaagagatctgctcggccgccggactgaagcagctggttgcaaaggaagcgaaaagagtggtgaggcacgagagccatgtgataaagctcttttggaacgtggaccagtggtagggcgaccctaccttgtccagattcggcgggggtacgttctccctggggcgtgctgggggtgggagttccgagtcaaaggtcaggtctatgtaagtgatgccctcggccatcatgccgggattttcctcttctcaaatcaatagaagattgccagtgaagatgcagctctggagcatgggagctcagatgcgggatgacaaggcaaagacaagctttgtagttccatggacgctggggtgccgccaccatttgaccctaataaagcatcgcgtgaaaattttgtccagagagtgcgccggctgcaagaaagtaatcccagcctgagagagagcagcgagaacctagcatatctggaaccaccttgacgcaaagtcgctggcacgaattgttcaagcgttcgttctgtacgcgttgaaaagtctgtagtaggcctgatattctgaggtaggaggaatagacttaccattatccagcacgtgaatacgcctgcattgtcggggtgccctttctatccctctactggaaaggatacttagttagtggcggcgcttcaaggttatgaatcgcggattcttgtctattggccgtggaccatgagttgtatctaagtaatgaatagtctggtttacgctctgtgtagatatgtgcatcaagcctccatggaccgagtcatcctcaaatgtcgcgattgtgatcaatatctccctaagcaggaatcttcagtccggtcttctcctccaacagcttcacagccgtctcctgcagtccttcatccactgcagcagcaatctgctcgcccagcttcccctttggatcaaaatacggcccaatcaggctctgatcatagtccccctccgccaacttcacatatgtctcgactccatcctccagactatcgggagcctgcccacctccaagcttggtggccacccagcctggatgaatggtagcaacagaggtgacacctttccatttcttcgccacaacgttcgcgacaagattcacctgcaattttgtgtcgcagtacgccttgaacgcatcccactgcgcctccccccgctgggtccagaacatatcgttgaggttgttggggtcggcaatcttatgcagcgtggaggagatgtagatcagccgttttggcttgttcatcaggcatgtgaggatgtaaggcgcaaggacgttcacaaacacctgcaccggcacctgcgtgtcttctgtcctgcggatcgggccgagatagaggccagcattgtggatgacaacgtcaaagatgccgagcgcgttagcttcttccgcgaaccttttcgtttcagacaggcttgagaagtccgcgatcagggtcccggccgcgccggggcaggccttttcggcctcggcggcgcgcgaggcgctccgggcgtgcaggtacacggtgtggcccttttggacgagttggcgggctgcggcgaggccaaagccgtcagtggagccggtgatgaggatgcgggacatgctggttggcagctctcaaaaggtctaaggttgggcctgatggtgttgaaggggaagggcactctgatcactgtcttatatctttgaggggtgatgaaggtccctgtgggatattacgcagggcctttttataaacacttcttcctccacttggccttggtcgtatgctcttcggtccacttttattcggcaagacttgctccgcaggctccaaatatttgtcagccatgaatgtccatgaatgtgtatccagacttactgagccatgctttcagcagtttcagtcaagtaagttcagtcatggtagagataccgttaggtctcttgcccacagaatcaaatgtaagccaccgagacgcaggtctgcatctacacgatgcagcggcgctttgggcagctgccagccgtttcctagccgcagacttgcagacggcaccgcggcagggctctgattgcctatttgttggattaataatataaaatggcaatcggcctggcccgcgggtccattagagtccactatgccagtggcttcggctttggaagcggctgccactgtgcgctctcttctttctttagtagcgaccgttactagagatcgagatccccgg

SEQ ID NO: 328 - DNA, 648 bp, Emericella nidulans
ggcgacctacaaggctagacaggccaaagagttgcaaggggtattttagcctttttagaaaggctataactgctggggtagagtccctctctactaggtactttaagagtttggctataagtagtttaatattagtaatatactctgcttcattgctggtatctataattatagtatttatctatctatccagggactagagttgtttcaggaactaggaaataataacctggtaatactctgttagtattttaaagtatctatccccagctaggcttgcagccttctctgatagtaagaagaccttgccttatttagttgtagtaattatatatcctattaatattacttgcacctgtataatcctgtctagaactttccctacaagggtgatctagatactatgtggtctaatagcctagaggctagaggaggccaggaggtggaggaagatgcagtggttagtcttatttaactacttcagcttttattatgctggttgcttggcttgtatacagtattctggggtaatagtttgccagttcccctgaccagctcttggggctgtcagggatgcctaggttgtaggctgcaaggtttgcctcttcagggggcctttacaagcttcaggagtgggaggttggtttg

SEQ ID NO: 329 - DNA, 1937 bp, Emericella nidulans
cttgctcttatgcgcaactatataagctccactccagcaataccgccatgataacccccgtcactccaagggcaagactgatcccaaagccggtgtaatactgtggcttctcgcgctccagatacatgaaactcccaaggatcccaccgatattgccgacgcagttcatgagcgcaatgccgattgctcgcctagccgcaggggcaatgttgttcgcgttccaggacgccgccgctgcttggatggggtaaatgccaatgacggccagaacgactgagaaataggcgacacctttgttcgaggccagctctcctttcagcgagataatgaccgagtatgcgattataatgattgtcattggaattatgacaaagggcatccgccagtagaagtggtcggaaagtcgggcaaagattatggcggagatggcggccgccacgtacggaggtgcgctggtcagctgggcgtttgttcgattgaatcccatgctctgcgtaattgtgggaagggggaatttgatccctggacagtctcagtggggacttaaaaagggcttgggaaagggtatgataggcagcgtggttaggacaggacataccgtaggaaagcgacgactgcgcgaacaagaaccaggcctgcatataaacccgccaattcgtgagaaccatcgtcagatccctccatttgaaggcactctcatgctccacgcggccaccctgtttaatgaacatagagagctccagatactggatctcgtcgggttccagccagcgcttcgacaaagcgggcgtatcaataagaaaaaagaagcaagccacaccaaggacaacggttgctaatccctccaggataaagatccacctccatccctcataaccgccgatgccgtccatcttcgcaatggcggcagccagtaaacctgagaatgcgccgctcagcgcgtcgcgcagtagaagtacgagatccgcaaggcgaggtctttcggcatgtaccagtacgagcagagatagatggcgccagggaagaatcccgcctcaaaaatacctaagaggacgcgcacggccatcaggctgctgtagttattgacgagcccagtgcaggtcatgatcacgccccagcctagaacaaggatcccgaggtaggtggaggggcgcttgaatttcttgaggagaacgttggacggcacttcgaggaggacgtaggggataaagaagattgagagaacggtgttgtactgtaccccggacatgttaaggtctgtgaccatgccttcgattttggcgttgccgatattggcgcggtcgatgtgcgcgcagaggtacaaaagggcgagcataggaacgaggcgaatatcaatcttctgtatatcagctgcacagtaccacgccatggtagagagtggattgatataccttgcgaaagaccctcttcctcttctcctcgggatagttggtgtagaagtccgcatcttcagggctcaggcccacgacacgaaaggtgccgatttcggtgatagggctctcgatgtgcgagggcttctcgatgtctttttcggccattgtgctgtcagatttgtagagagggagaaagagcagaggttgtcccagctggtcaaggggggaggcacgcagatatacccccctctcccccagaggctttgactgaacttagatactcctgtccgaggtcagacctgatgggcaatgacagctaccccggatcttcattcactctacagcttcttccccgcttcgagtccacgccaccgcctcccgcaggccatggcatattggcaacggataagcagccaaccacgatctggccaaccgcggatgtgcgacccgtcctcgcagatcgctcggataagggtgtatggctgtgcttttccggcccgccgttcggcttctccgcatccttggccagcctttcggctgctt

SEQ ID NO: 330 - DNA, 1690 bp, Emericella nidulans
ctttatcatgattcagggtgtgtttgtctcagaattcaggcgtactattttcgctgcggaatatgagttccacgacccatagaacgagtatgcttatgccaagcgtgccgtcgattcggcagaactgcccaaggcgggccccaatgcgggcccgatagtatgtcagtggacccaatgcggcgtctcgactcggctacggctgcggcttgcagttacattactgtctgtttcagaatcagcctacaaaatagactattctataagtttctgatcgcgtcggggcctcgtcaggaccctcgacggagatcgaggtatctccatgctctgactcaaagggtcagtctactgtactcagacgccaccgtagtgcacgcattgcgcatactagagacagaacaggtttgtgcgtcagattcaggagcgtactttttttgtctcctgaatgggtcaggcgttggcgtgattgctgatttatctatgtcaacgaccctttggtcagccctgcagaggcagttggcctcgcattgaccgctacatgggctcgatgcttctatctaggaaacgtgatgtaaggtgataagctgctgcgtcggtgcggtgcgatcgccaagcgggcgcaattgatagatcatttgttaacaatgcatgctcagaagccactgtgataagcgaatgaatgggccattttgtctatacatgatgcgtattactgggagcggatctgaccgctcggttcaatggtcatgggctctttttggccgccgcacgagcgatgcgcttctggacttcttctttggaaaggatcttcacggcgtcttttgagaagacgtagctcaggcccgaccaaattgtggtcgcagcaacaaggtacctggcaagttagtttctgaaccaataaagaagagagagaaaagaagaaatgaaagtgaaagtaagaaagaaaaaataaaaataatgaagggggaaaaaaaaagacaaaaaaaacatacaacagctgggattcgcatgtggtcacccaccatactactaaccagccgggcgtgtggcttaagtacggctgagcggacgggaagccctgttctccacaccctgtggtcgtatgtacttgtagtacctcgaacatactacttgtaccgccagagcttccctgtgcgcccaaacataaaaacacggcgggaaatggtagacttactgaaatgcggtcattgtttccttcagctgccaagcgtcaataaacgcttccgggacaacgggaagagctatcgcgcttcccacaagcagcagctgcaacgctgtgttgactttcgagatcccagttggcttcacctccgcagacgggagcgaaaagtcccagtaccgggccatggtctttggcggcggaagcgaaatccaacggtagtagaatgcggaaatcgcgagaccaacgtcccgaccgagaatgatcacggcgagccatactacgcctgttaactttggactattgaggggcggacagactcaccaggtatcgacccgttaacggcaagacaagcgacgccaatcgtcatcagcagcttatccgccatcgggtcaataatcgtgccaacaacggtctggaggttatatcgccgtgcaatataaccgtcaacgaggtctgtgatgcctgcgtaggcaaacaaagccaaagctgccgcatgtgctcatgcaccag

SEQ ID NO: 331 - DNA, 562 bp, Emericella nidulans
ataatatacatactgactatcttataaataagttattgaagaactaaatccttcctgtagagaaactatgattacttaagtactttaaaaataagactattcctaatacaaagctcttcaaaagccacctttattagataatataaagtatatatatcttgcctgggccctcgagcatgtatattagataattaataaaaaaggtatagaaaataaagtagaagttttgtaattaaatctaataagacttaggttactccaggcttctatatacaggagaacagaagaagagctagataagatctataattatttatctactttaaaaaagtatagttagatattttagggattattttatagggatactaaagtcccttgccttttctaggagaaagaatagggttttattaatatagaaaattactgtaagtagattttacctatattaatatatatttttacctgaactggcagcaaggtaactatttttatcttatatataatagaatacctagatgctagtaaaaatactatagtagagcttaataagtatagtagt

SEQ ID NO: 332 - DNA, 199 bp, Emericella nidulans
tatacagggcttataatagattaaataaatacctataaaaaaaaaagctataaaaaattaccctagtactacaactggtaaaaagctatattgcctacactatggatatgacttcatatcaccatggcagctactcaagggcgtgttcgagcagcatggattctctgcccggttggatgctgaggtcgcgctctatttt

SEQ ID NO: 333 - DNA, 874 bp, Emericella nidulans
gactgaaggtgcactacaacaccacggcgccagggcatgtgacatggatggggcaggagcggctgctgtacaagcagatggaattcaccataggccagtttcgcggttttgtgcatggtgtggttgcggctgcgcgagagctgatgacaggcctgctgtgccagcccgatcaccagcaatagccggccatcccatgggatcacctctttgataatccaactgaaggcactgcgggctggagcttcctgcaggatgcttgtacgccgtggcctgtagcggggaagacatggctggtcgaccggatcagcactgaaccggccgttgctcgagccttcatcacccagggcgctgtcagtgcgaacaaggtgcagaagtactttcagcaggtcgcacgattcaaagagaagctggcggtggccgtgcacctcaccagcggggcgccagcgcgcgtgcccgagctgctgagcatccagcacgtcaacaccgacaacaactggcgtcgcaacatcttcattaaggacagcctcgtcgtgttcgtgacggcgtaccacaaggggttttacgcgagcaacgacgtcaagatcatccaccggtacctgcctcgcgaagtgggcgagcttgttatgtggtacttgtggctggtgctgccatttgtgcgccagctcgcggtgacatggcgccaggtgatgttcagcagcaccagccagggtagtaatgccagcgagctgccgacgcaccacagctcgtatctgtgggggccggatgtcggaacaggtcgcgaatggtccagcgagcgcctgcgcgagagtgctgaagcgggagagcgagaccagtatcagcgcccagtatgcggtgatcatcacaacttcgcgac

SEQ ID NO: 334 - DNA, 814 bp, Emericella nidulans
  unsure (1)..(814): unsure at all n locations
tcttcgaacattccggagagtttgtcaaaatactcattataatcctttgcaacttgcagaacaaccttgcagctgccccatataggctgcatcagcgagactgaacccgccaaggcatccagtgcccccgagaagcgctcgacgccccccacgaacgactgaatattcggcgctattcggcgcgagatggctgctttgccatgctggttatccaaatctaccagatcatgaatgagcttctctgagcaatctgtcgcctggaaaatgagcctctcttctgtgctgagctggctgacgaacgcctgcaccgtggcttggcaatcatgttggatggtactatctctagcgtcagccatgcctagagcgcacgaggtgccacttaccttgggccagcatcttttgtcattctgcttactttcaagttatgctctgcagcgagtgatcggtgaaaccgtggttgaagtctgggtatggggaatgttgctaaggaggggcacagctgcggctgagcggtggaccctggctaaggcttgttttgggatagatgggctgcttcttggatataataagtagcccatggtcctttaaagcgggtcttggagcatgattacgcgagacgccttcgcctctgtcgactagaaaggtatagtgcctttggcgcatcgccctcctgcaaagacaaagcccatcactgtagcggatgcctttgagggctcaatatataacaaagagcagagatcccgacagtgatatagagctcatacacttagctatgatgccattgaatcggatgtcttagcgtntacngtaccgt

SEQ ID NO: 335 - DNA, 957 bp, Emericella nidulans
tcccaatcgcatggccatatcgattagtgagttcgtagaaagcacacttgactttcccatgcggcagactttgtgtgctgtcagtaacaggcaatatacttgtaatccatctagactagctgttgtctcttccgacggccctgtaagccaccactgagctgaatacacccatttcgcctttaagtgcgtgaaccgattatcaattccactagtactgtctggatagaaaacagtaccgattgcaaggattaatactagcttcattaggaatgacatgggggagctttggggctccgtccaaaaggctctgtaactttcccagaaagacggaacatgcagcacacggtatatcggctcgaatgtgcgcaaatagcattgaactagctcgtcgcacacaggctgtgacggaatagtattgtggagatcaggaacagggtcatcgagtgccacggctctgtgagatttgatggactttcgaagggctctgcattccttgaccatatttgtcagatccgctttcagctctctgaaagaagcttcggattctttagcatttaatgattccacaacttgaagctgccgctaggttagttcttcgcaccgcaaagaatagggcgtgccatactttgtccgccttatggatccaatgagtcggcccaagaagctttgtcttaccagccgtcacattaagacgccgcggaatatcgttgacggttatatcaccattatcatttgttctccgtgtctgccgtggcgttgcactgagctgttgttcaatgttgcgtgttctctcggtgaggtcatgcaatgcctgttccagccgcctatcatctctgggcaagtgagagcccttctctaaagctgtcaatcgatctccaagtgattgcagccgatgaagaataagaggcaagtctacttgggattgaagattcgtatccccgaggtcgtcgggtcgac

SEQ ID NO: 336 - DNA, 1624 bp, Emericella nidulans
tatgtcggagcaacttaatgtgcgtacggatatattattgggtaatgattttcaacaatagcaatagtgggcctgttcaggctagccctcgtattctgaggagttagcggcagcaaccgcactatatagacaggaaggatccccacaaacacgaaggtgttacgccgctataattcgcaaatgcagcatatttgcttgttatttgtgcaatgcagacaatgcatgagaaaactactttctgcattgtactgaatagtctcatcaatgcacagtcatgtgaagagacaccaagaagctaagttcgtatttggagaacagtgtagccgacagtgaacctcgtggaatagccctcaaagaagatagtgagctctcctctagtgcctgttatacttctctgctggacatatagtgtgtgtcatgactcagtgccagtgctaggtgacatttccacgccgcatcataggcaagactcacctctctggtcaggacatgcaatatgtcaggaatctgcgccttctcgctggccccttccgtccatgatctaggtgtatgataagcaaggaagttggtgtcatgcagtttgttcatgctgacttaagagtttcaccggtggtcgttcactaaaggaacgcggacaccagcgacgaatcggcggcattgcaaagagaatacaagctgccagcgctgatggctctataagagtgttcctgacaatcatataactaggatcttcacgattcttcagtacgaatctaagccttctagtggtcgatcttcagacacatgctgatatattatagtcgagacgactaataccagataaagaccagacacctaaaaaatgccagataaccaccaggcttcgtgatataaatacagcttagtacataaaacagctagaatcttcttagcttgtgataactttcgtctgatcagcaatggaatttgttttttgtcagtcgccgatgtttgaagcgatgggttactgaggtagccatctctgatctaattactgtaagtgggtggcacaagagcttatggctagtagagggttatggttagatcaaataagtaggtggtcagcgaaatatgaagcaagtgagctggaggtgggaatctcagcctgtcttttgtgcccttgctttaactcacctgtcacgcgtcagtaaggcaattttcaaggaaatgtgtcaaggcaaggttacttccattggaccaaaaagggcacaatgatcagatctcatggcctgaccttcctggatcgcacctatgtagctagcttgcttaagacagtagtaatcaatcgctgtattgttgaactcaattgagccgaggccatctaggtttctttgacactcttgtactcctcgaaagtttcctcttatttctggggagcatacttgaggttctcgagtgatgatagcatatattatattaggcgtattgaatcttctaaaggatgctcttgctgtttcaactgctgcttgcatgttgatctgggttgttatttgcctcgcaatgcaatcctgaatgcacccccccaaatcgctctgcttatgagaaaaaagcagcgagacccacaaattaaggatatgaggatgtaactccgtgtaaagttcataca

SEQ ID NO: 337 - DNA, 1260 bp, Emericella nidulans
agtagaaatatatagctagggggctcaagcagtacctgcaggatagaaatcataagtagataacttaattacctatatttatgctaatagaactgcccctttattaggtcttatatactgggctattactaggaatatacaggattcctagttttcaagactttgatcctaagctttatacttactttaccctttgcctagtagctggactaataataagctagaatatacctatttaataattatatataactataagaccaaggaaaaggtataggtataatagaggcttctactccttgatagctacagatcttatactactatttattaattactatgataataataggattctttaataatttatctaccttattcagctcatttactgcagctgcttaataataggatccttggccctctttactacttacaacaagaatcttaaagactttttatataaattaataggccttggctatattactaaacaggacttcttccacctctttcagccagcctaggaacaagccttattagcaaaaaatatcctttcttcatagagaactgtagggatattactatcaaatatagggattattctagtaaaatttactaagaagaaggattcctagctattctcaagtaggctgcggcataaccgcggttagccgcggttaaccatcaccataaccgcgcggtgaggtgatggtcatgagattctgataaccttgctctgcagtaaggttatggttatagctaggttataactgtggtcactacagttaaccttactagtataaacaatataaacctgccaagattatgagaatgcatagattatgctattttttgtataattatttatatacaaggatatatgtactgtgctgcagattagtaatttagggctttaagtaagtaattacttataatactttagtatatattctattatactgattattttatactcttattcttatttctaattatattagttattaatattatattctatctatcttaaacccagctggtagctttggctgcttttaatacttttctagttgcccttccttacctagtaatatataaggtaattgactatatatactatttagagttttgatctgactgtaagcctgcttattctaggcctgtacttgcttaatatatactataggctagattataggtaatatttgcttagaggctacagtacctaaatcaaaatctaaatctaaattagtaata

SEQ ID NO: 338 - DNA, 1174 bp, Emericella nidulans
ctgggccagtggctcaaggagcaaggtgtcccggccattcacggggttgacacccgtgccctcaccaagcggatccgccagaagggtagcatgcttggtcgcttgctgctccacaaggccgatgttgctgaaaccgatgcagctctggcccaggatacctggaaatcatcctttgaacagattgactgggtcgaccccaacaccaagaacctcgtcagcgagggtgagctgccttctatacctgcttgctgatgatttctaacatgttcttgctagtctctatccgggagccgaaactcttttcccctcctgagaacgttgctttgaagcacccctctagccgccctattcgtgttctttgcctggacgtcggcctgaagttcaaccagctgcgttgcttggtcgctcgcggcgtcgaggttctcgtcgttccctgggactatgatttccccacacttgctggcaaggactacgatggtcttttcgtttcgaacggtcccggtgaccctgccaccatgactacaacagtcaacaacttggcgaagactatgcaggaggcgaggactcctatctttggtatttgtcttggacaccaattgattgctcgctctgttggcgctcagacgttgaagatgaagttcggtaaccgtggtcacaacatcccttgcacgagcttggtgactggaaagtgtcacattacctctcagaaccacggttatgccgtcgattcttccactcttccaagtgactggcaagagctcttcgtcaacgcgaacgatggtagcaatgagggtatcaggcacgtcagccgaccttacttcagtgtccaattccaccctgaaagcacacccggtcccagggatactgagtacctctttgacgtttttatcaacgctatcaaagacaccatcgcctcgccagaggcccttcagaagcctgtcaacttcccaggcggcgctgtggccgaaaatatcaaggcctctccccgggtctcagtcaagaaggttcttattctgggaagtggtggcttgagcattggtcaagccggtgaattcgattactctggaagtcaggccatcaaggccctgaaggaggaaggtatcaacacaattctgatcaaccctaacatcgctaccatccagacctccgagggtttgcggataaggtgtattgc

SEQ ID NO: 339 - DNA, 1343 bp, Emericella nidulans
agtagaaatattatttaataataatatttatatactttaaaaaactgttagtttatagatagaagactattaataattattatttaataacgtaatccaccacagagctgcgcggccaaatgtagaaaaacaatgttcagaaatataaacaagaactgcaggcttcaggcaatataattattatattttcctatcagatagaacagtactatctattagtacatgacaatctattatgtctggtctgattatagttgctgcaggttagtggcctatattgctttggtatctgttgggcaagttctttatattcttgagccttttgctgcccttcactgcctgtcagactgccactagtctagataaaataccttaatatcttctacttctttttttagtatattatacctatataaagttactagatctcttgctatactagaacagtattctgcatagtaatttctatacttttgataatcttatctactgcctactttattatactaggagatattaattagcagctttaaaggtatttaatttgctgcttctacttttctaactaatatagatttgctggagtcttgcctataccaaataattagttacttttagaagtagatggtggtgttggtattttaggctttggtaaccttgataggactttcttaggtataagtaggataagaccagttgctataaaactactctggatacttgataaaaatatagagcatttaaaaatagaggggaagatatataggaaatctttcttcttaattaagaagatcttattttctactattcttacagtctagttgctataaaaatactttaatagtaagaagcaggttatatcaagtagttaaagataataagataaataaggaggtatatataatagaataattatcctttctatacagaacttatcaaatcctgcagtagtataactgctatagctatctagaattaataggtaatatcttctaactatttatagagctgtataaatcttgaagtaattttgaagccagtccaagcctaatttattatttatctacctatttttgctaatactgagttgatagttgcttggtatattattatactactaagactaatagttctctgcagccaggataatatataatagtagagcctatctagatatatttactataataattatagtagtctactttttattcctaggctgaacagctttagtatgactatctcttatatctactctacagataatctttgcagttaatattatacctatctaaaagctagttttatctatattatagatatcctccttagtaatcctatac

SEQ ID NO: 340 - DNA, 1732 bp, Emericella nidulans
tcggctgtgcaaaaaaaaaaaagataaaatagatccattacaatctttatcgccataaccgcacttcaacgcacctggtctctcctgatgtttcttcgagcaatcacaagccttgcggttgccagctagagaagcttgtcagaggtgcttcaagccaatcgcttttcatataccgttcggtcaaagtaaaatgagcagcgatcgcgccgcggaggtgattcaacccactaacctctcacccacttttcactgtgtctgttgcacacaaacccttctcacccactgtcgcgcgaccacaaagcggcgatcagctgttacccctgaaggctagactaaatgactggttagcatgggcttttggcatgggccttcaatgcggccactagtcgggtgcctgccgaccgggtgagaaatgggtgagagccgctttagcgtcgcgcgaccacgggtgagaagggtgagtgtggaatagatgggtgagagccgggtgagagccaggtgagaatcactactggacgcacggccaccgcactggccctctcagctcatctgaagtgtagcacgattggctttcctcgatcttcttgaaaccgcggtctcttggcacctgcatatctcgcccaatttcggcctagtaatggccaaatcagcggcgaggccgatcgtcgacattggcttgggccaagtgctcttcccatctggaccacatttaacatcacgtggacgcacgtgtggtggtccgaacgatgacttaacatttcacgcacgtggtcttcggatcatcacataagagcagcccacccaaaaggccatactaaatgcgatacagcagaagacgtaccagtgactacaagttaaaagatgtcttagcatactaatgttttcaacttgagaaggattttagttaaattggactgctgatgatgatgatgatgatgtaaccgctcctttagtggtgtcaagtcggcccgaaaccaactagccgcggctttttccggctcgacccatcaagtaccaagaagccgaagtgctctgcgtacttagacagattaatgtatgcaccgagattgctgccctggtttctcgggggaagctcagtcatgtgcgcaatactgagctgtaccaacagcgaaccaacattttcgcggtcgagagcaaagcttctttggtggccaacatccatcatgctgtctccaatattggctagctatatgagcatgtgacaattatttggggtaattctttaagctcacctattttgacggctccgtcatgacatagaagagtattgttgctgtcgacatttccatgagcaaccaaaagggtttcatggatatactccagacccttcagtacactcctgcagatgctcgctaggtcggattcagcgagcctaatcccaggagttgaacagacttgggagaggctaacggcaaaaccgtggtagttgtatgccaggtaaatatcggcaccatcctggaaggcctctatcaaccccaccaggttttcgtggaacgcacgttgtagttttgggaatccagttcgtggcttgacaacctctctttttttgatgaagacagtcgagaatccaaagtagttgccaaggctaagccacccgccccctgcctggtccgtcttccaacttaaagaatatttttgagagggatgccctaggtgaggaaacccatacctgaatgaacctttagtaaactgtatgaaaaaaaaaaaaaaa

SEQ ID NO: 341 - DNA, 1974 bp, Emericella nidulans
tgtaatgggacgtatttaggtggatcttcctatctagacgtgccgtacgtacaagaaggagtcgctggaaaggagaaaggaaaaagggattgctgtcatgaggaagtcttacaggtgactctccgccttcaagacaacgtaggccttggccgagtcactaaggtctaaggtccttgtatgggtaaggacccataacaatcgactacgatttcaagctgtactagcggatagaaagttgaaaaaaaatattatagttgtatttctttatcattcattattgtactaatgtacacaaggtagggacagtgcagatattagagacttcagcacagtagagacagaaaggtaaaagttcgaacagcaaatccccatgaactatgctatcattgcaactcagtgaaagttggaaagttggattgttgaatgttcggaatagcctagacatccagatcgaaaggcgaaaaaaggtcggcgaaaaagtcggaaagtcgtaacgtcgtatcagacaatcgtgttgattgttcagctcaggacggcctgtggtcggctcgtgctgcattcaaaccaccttactgaatggtgatctttttagcagtcggaggcacagccttgggcaccacaagagaaagaataccgtcctttaagctggccttcacatcgtcctgattgacacgagttgggaaggtgaaggtgcgctggaattcgccgacagagcgctcgctgacccagtagcgagacttgttggcagccttcttggtggatacctgcttctcgccggtctttgcaacttcgctgctttcaccccgggcctggttctctgtatcggcctgatcatttttgttgtcgtcgctggaggagtggtactcgcgctcggagcggcccttgatcaccagggtctgtgggtcggtgaactcaatgtcgatattgctctgaggaataccagggagttcgccgtcaagatggtaggcctcgttggattcgcggacgtcgaagcgaggcgcaaaagactgcactgaggcgtgaccgcgggcggagcggtggttgtcgtagtcatccaggagacggaagagaggagcaaagtctccgggggtaggaatggttctgaacagagacattgtgatagtattaagaagtgaagtgtttgtgttgtggttccggattgttggctttgttatgttcttgagttgatacttagatgattgcttgctctgcttgatgatggtcgagctagatgaggagtccaggggcaatttatgtcctcgggtggcataagagacgtcttgatgacgccagatatcgttgttctcgatatagggcgatacttctggatggaccgtgatgtttcaagaagcgccaagacgcctatagataaagcctctcggaagctcccgataattctgggtccttcgaccaatcacgtgacaacaaagaagctcgccacaacagagctgatcgaaggatagggaaaggatgaagaaaatgaacactgatctcctcatttgatgataaacaaatgattacttcaatgtttttctgacatttgggcacatgcatggaaaagcatgaacatttccaggcaggggggttctggctgagcaccagctccaagtgcatatccgtagatgaagacgcctactcagccagtagcagagacttctaaactggtctatcgctcgaaaaaccagaaatctatagcctgatccaggcgtgctgatgccacaagccggcctgcagtagagattcttgatgtaactacatcagccaggcctgggctcgccagtcgttttgaatgtcaccatcaggtggcctcaaacctgtttccctccgcatctcctccagtaggctgtacatgtccagccagttgttcaataatcgtatgcggcaaggagtcatccggaagcgaaggcttgaattcgagtaaggagaacccagcagtggagcgtatgtggtgtatggatgatttactcaatcctc

SEQ ID NO: 342 - DNA, 872 bp, Emericella nidulans
ttactaagtatatctgtaattagttaattaccttaatatagtatattaagaccttattaagctttcttactctaattactagtatagtagctttatctcttcttaatattatttatattactattatagttattctatttattattagtttagtatctctgcttgttattatagttgctattagatttattattatatagcttgtatagcagtttaaaaggtattagggtctattttatttatttatcttatatttctagtaagttccttctgttgatttgtttattttgttgtatttaaaaaccatggggtctgcttgtatagcaagcaaattcttatattataagctagagttgttgatactaacagagtagtattagactagaagaatttgctagagaattaaaatatagtaattattaagcttcctataagtatcacagactgatattggcgccaaccttgattcatcattctggaagtcagcaacaattatacgagaactggcctgtacagggcttatcccagaccagagattcaatcggtagttggttcctagtagaccggctcgtcgcaattcgggcaatgctcgaatcaagacttcgggcgtagctcgtcacaattatttatattgctgttatagttattctatctattatcagtttaatatctctacttattatcatagttattattaaatttgttgttatatagctgtatagcagtttaaaagatattagggtctattttatttatttattttatatttctagtaagttccttctattaatttgtttattttattatatttaaaaactatagggtctgcttatatagcaagtaaattcttatattacaagctagagttatta

SEQ ID NO: 343 - DNA, 4163 bp, Emericella nidulans
ggagggaagaggatcagcaagaaatgaagagagggaggagaaagaagaaaagaggaaagaaaataagtatgaataagaaaggataagaaagaaaaagaagaagaaaaaaggaaaagtatgagggaggcagggtgggggggaaaggattatacgagatgtaaaaaagaaaagtgaggaggatgcaaacaaaaagattaagagaggacttacagaggagggagcagaagatagcaaacaaaaaaagaaaaaattagccaagaaaaatagattggagggatatgtacaagaaaataggggaaagtcgggggaagcataagtagaacaacaggaaggtaggacctacctccattggtagacagggcgatgaatatgatacatggggaaagagtgaaaaaaagtcttgacggtatttgccacaataaagggtaaggtggataccgataaaaggtgcaaagtcaatcagacgcttcacactatgcaggtgtctgtctattgttggaggcaccccctccataataggtacagtacgtcttgttgataacggctattctacccaatatactatttgcattcaaaagactggcccagcatcccgtcagaccaccatggtttgggttcctgggcgcgtgtccagaccaccgggaccggcaggatctgccaaaggcaatatatacgacatcttggctttccaccgaatgcgaacagagtttgatggggcgccttcgtctctgcattcggtgattgccagtgaggttaatgatcccccagcttaatcctggtatatcgcgtctgtcagtcgcctcataagattgcatgcaaattaattgtactttgtttatttgtaattttttttattattattttgttctatgataaacctgccgtcaagccgctttctggttctctgccctcaaatttgtctgcaagaaacagatacctactgtggatgttgacatgagtcgaactcgccaccctctaaactctgtacaagaaaatccgcacatattagcgcatccaaatttgcacacgacctcatgtgatatgctgtccgagcgaatacggcagttcaggtttttacttatcggttgagcggttatttcgagcctcatggaaaagcaaagcccacataacatgcttcgaagtggagcaatgatttggccggtattatggctgttgtcgccatgtctccaagaaaagccaagatggtcaactcagtctactcttaagataccaatctccccagatattgacctgatctctggccttcctgcatcgctcacccctagtcacgtaaatcgtgcttgttgcttggtcattagcacggtcctcgatcgagtttccacaccgtatcaaacccatggccatctccgcagatgatgcgccgaagctggcgggaagtgtgatcgccttgacttcccttgccctgatcacctattccttgcgggtatattgtcgagtcagcaggagactgtgggcggcggaagattggatcatgacagcagcagtggtatgttggtacccagaacaccttgaccagaagtctagggagctaaccggtccaggctcctttctgcgtacttatggtaggctgtcttggaggcgcttttaatggcgtcggcattcgcgcctggcgattgcagcaacctgaaaatgtgaaataccaggttcagggccagaaggtattgttacgggccattatacatgatagttcaccttcggctaatgacggaggttccagtttttcctgatattcgaggtcggctattgtgccgccattattccaatcaagctcagcatcagctggatgctgatccgaatcgctgaagggcgaaagctctatatatacattcagtatatcattatcgctctctttacgattatgaacgtcatagctttgatctttattctaactgactgtattccagttgagtgggtttctcatgttggtgcagaagatagaaacgcgaagctaacaaatgcaaagggctgcctgggacaagagtcttctaaaaaatggtggacgctgccaacctcctcaagttttggcagatgtttactatgcttgcacagctgtcaacattactacagactgggtgactgccctaatgtcagtaccaaccaattcttgtctctgtcctgtcacgacttaaccttcaaataggccaatccccctgctctggaacgtccagctcggccgtaacagcaagctgtccgtcatgggtctgatgagccttggtatcttgtgcgtactctcagctgcagattcatgatttccgacgactaactgaaacagagcctcactttcagcatgcgtccggctcaactacacagtcaacctcaccaatcaagacgagttcctatacgccgtagccaatgtggtgatctggggatttgccgaaaatgccatcggcatgacggttggcaatattgcaactctgcgccccttgtttcgcacactctttgagagcaccggcagatccggctacagcagccgtccctcgcgactcgagtctgggttcgagttgagccagcagggaaagggcaccgcggcatatacatatacaaccaccctcaccgaggtcaagggggcgcaggctcagagcggcagagagagtaaagaccaggacagtcaattgagcgacagtgatagccagaagatgattctggagggaaacaaaacgggtcagggtaacaatattatggtcagccggcaggtcaatgtgtcatatgagtgaggtggggaatgcctggggcgcagcgacttgccgtctaccttgtattcaacaaataatcgttcttttgacttccaaattatgctggattgcaccctgtatggcagaagggcagtatcacatggcttactagggagcatattcttccaatgataagcactttatcactagtcttctccattcggtggattgctttataaaatatacagtgatatatagttatctattgcatatattctatatttaacaatttggttgtccggtgactgtcaggtgtgagaaagggaggggacatgtctagtgctgcaacgtacttcaagcacctatcacggcagccttcttgttttccactgtttgccagttacgggcagaatacaaactgtattaatgttgctatggtgggctcagccggttcttttctgatgatatctgagaagaagacgtttatggactatagtgtgctgatggcatccgataaaggagacgagatctcgagctacgagagcgtcgtgagaaggtgcgcatgcctggggcctcgatccggtgctgcactacaggtggaaaatcatagatcaggtccagcaatgctcctcgtccagagtcgtatgacctccgtgaagccggtggcaccatcccgagttagggcaacggatgcaggccggacctctggcgcgatagcgtccattgactttccgtgagacgacatagtgtacgatactgctatcgagcctttgtcgagaaggttgggtggattgatcttctctgcatcatatcggatttcttgtcctcccccccccctgacagatcagattcgccccaagacccacggcacctgcactgcaagcttattgagtccgtcttggaggggctgcgtggctgatgctgcgattgctgcacgaaagagcagaagaacccggatgtaattctcggcatggccacatccagcggcgtcagccgctcaatatgggccattatcccccttgttctggaagaattcagcacgacatctccttgaagatataaaggtagaacccatctcgggtccgcgggcccggacggccgagattagaggaccacggagaaatactgctaaacagggtgtagcacggagacccaccaggtctgtgactcgtaggcttactaggtttcctgcaagcatggtgatagtacaaggctagaagagtaggcgtttaaatgtcgttatggtgctcatgtgccggcacacttgggagagctatctttcactactgatcaataaaaaatttgcaaggtgcctatttcgttctaagcataggaaaaggtaaaaaggacacttgtcactgtctaagaatacttcctttgctgaactgagcagtatcatggaagacgatgtggcaatattccaccatccacactggaaagcattatctagcaacgctctccctgaagtat

SEQ ID NO: 344 - DNA, 208 bp, Emericella nidulans
ccaggcgtggtggtgcatgcatgtaatcccagctactcaggaggctgaggcaggagaatcgcttgaagcagggagacagaggttgcagtgagccgagatcacgccattgcattccagcctggatgacagactgcgataagataagaggggagaggggagagtaaaggagaggagagagggaaggagagtagagagtgtatcgagagga

SEQ ID NO: 345 - DNA, 5790 bp, Emericella nidulans
aagcagacgggaaacaagctcttttccttcactgaattcaccgaccagggcagttgtggtgccgggctcgcagtgaaatgtaaggccgttcaacgcgcctacaggcgtcgtaggagaattcaacattgtcagatctaatgtctcccttacaaacccccaatggtcgggcgttgggttggttaacaaccgtaggccttgccctgaacagtccagcacaaagtccattctctgccagaagtctggcaaacggttgtttgatacgcccagaagcctttggctactgcgggcgccctcgtcagcgagtgcaggcctctaggcgccccaagaacagtcgtcagagaggtgagaatcccatcttaggcagggtgcccgtgcccagcttcagtaacagttgaatagctcggttgaacttctgatgatggctttggcgtttacggagttcgaaggctcgaaaactgacgcagaagctgactcttgccctggaaatggtcgagtatgtagacatgaacaacgaacgtcctgtggtaaaagtatcgcaccacgacattatcgcgacatgcttcttgtatgttgtgtaaacgccaagataaacctagtgacaattcgatagatttattggcttgctcgactatcgaccttcgctcgaacccaatggggacccatgttatacaagatagctttactgacctttcctcgttctgtgactggggtaaaagaattgattgcaccatagggcacagtacatgtgcccgccggcaacgcagacaaaatccggccgccattgaacgttaattgcgagtcgacgagcatagattccggcttaatacccaaggaagttcatgtcagcatttgaagagttccccatacgtaaaatcgtcgataagggtcgatgtacggccctcatttctcaaagtgtcacggtcattggcgaaaggcagagcgctcagtcatcagcattaatttacgcctgaccacattcaaaaacccaagcgggcagtggcttcctagacttcctggatcatatgcaacgagcgagcgggaatcatttgagggtaatttcaagctgaagacacgctcggtcgattaacttgggtataatgcccgaccgcatcgtgcgattggagacttcttggctgggaggcttcattttagatagagcattggcggaatcctgcgataagcgaggtacgaggttgatattacgtgcctgatggcacgacaataagcgatggtccaagaatccgataagatgaggtgacaaggaccaactgaatcggagatggacgccgagagaggttacatcaatctatatagggtcttggcattgtaaccttggcgggcttccacaggattccactccaggcccgcaacacgattcgccaagaatgcaggcgtcggcccctccaaatgcttggcatgtctatccctgcccgggaaggattagccttatccatttttggaaggtcaataggaaacaaaacatccagcggcgcgtgcggagatgccgggggagctgtctggacctggttatcgccggcgtcgcgtaaattgcaccatccgctcgtcattataaatattgccctgctccctgttggtgaactcagccaggaccgcttatattcagcttcagtatgggtgctctccggtggctttcgctcgcggctgcagcttcgtctgcattggcattgacccccgagtaagcagacactgtgctactattgactcgcattggaattgggagtcgacgtgactgactccgcataagacagttgatcagtgctccccgcagatcggaggcgatccccaatccctctggggtgagtctggcgttggcccttttttttttcttctttcttattcctctgttatgaagctgtgcaggatggtgctgacaagatagaacatcgccgtgttctcctcctcccaatactccttcgatacgcacgaatcgagctccgcatggaatctgcttgacctccgctcagggaagatcacgcctctcaccaacgacagcaatgtctctgagatcgtctggctgaacgactcgaccctgctatacatcaatggcacaaatgcccagattcctggcggctccgagctctgggtctcagggctgtccaattttccttcagggtaatttatatgcattgggaactcggtgtgcaaaagctgacccggacaggtacaaggccgcctctctgccggcgtcgttctctggcctcaaggctgtcactaccaagtctggtgatatcaagtttgtcgcctacgcccagtcttaccgtaacggtaccgcgtacaacgaggaactggctgaaacctatttgtcgagcgcgcgcatctatgacagcatctacgtgcgtcactgggatacctacctcaccaccaccttcaatgctgtgttttccggtacgctgaagaagacccagcacgcgcggtacgcttctgctggaagtctgaagaacctggtagcgcccattcccaacgccgagtctccctaccctccctttggaggctcgtcggactacgacatctctgcggacggcaaatgggttgcgtacaagagcaaggctcctgatgttccccaggccaatcacactactgcctacatttatctcgtccctcatgatggttccgaaaccccggttcccatcaacgggcccggttccgcgcctgagggcatcgaaggcgactccaacaaccccgtcttttctcccgacagcaagagcctcgcctatttgcagatgaaggatccgacctacgagtctgaccgccgcgtgatctacatctatgatctcgcgtccaagaagatcaccccgctggccactgagtgggaccgatctcccgactcgctcaagtggacggataagagcaccatcgttgctggctcggaagacgagggtagcggcaacctgttcctgatccccgtcaagaaggccactggcgactttattcccgagaagctcaccaacggcaagtatgcatccgctttctacctcgcctctggcaacacccttgtcgtgaccggctccactctctactccagctggtacgtcgacctcgtcagcttgaaccccaagcgcggtaccatcaagaacttggtctctgcgcacgagatcgaccccgagcttagcggtctcggccccgaggatatcagcgatatctggtttgctggaaactggaccgatgtaggtagcttattccatttaggtgatcgcgagctgacaattccctctagatccacgcctgggtcatctaccccgaaggcttcgacaagagcaagacctacccattggctttccttattcacggcggaccccagggcgcatggtacaactcctggagctcccgctggaaccccaaggtcttcgccgaccagggctacgtcgttgtcgcgcccaacccaaccggtagtaccggctacggcgatgaactaaccgacgccatccagaacaactggggtgcgcctccctacccaatcgccagtcaagccaaacacgctaacgtaacatctaggcggtgctccctatgaagacctcgtcaaggcctgggaatatgtccgcgacaacctcgactacgtcgacaccgaccgcggcgtcgccgccggtgccagctacggcgggttcatggtgaactggatccagggcagcgatttgggccgcgaattcaaggcgctcgtcacgcacgacggtacattcgttgctgacgccaagatctccaccgaagagctctggttcatggagcgcgagttcaacgggacgttctgggatgtgcgtgataactaccgccgctttgaccccagtgcgcctgagcgtatcctgcgattcgccaccccccatttgattatccacaacgatcttgactaccgtctccccgtcgcggaaggactgagtctgtttaacgttcttcaagagcgtggtgttcccagccggttccttaacttccccgacgagaaccactggtatgttcctgccccgcctctgagccttctacattgcagcatgctaactggtgcagggtaacgagtcctgagaacagccttgtgtggcaccagcaggtgctcgggtggttgaacaagtactctggcattgcagaggataacgaggatgcggtcactttggaggatactgttgttcctgtggtgaatatcaatccccctgcttaaggagggtatgtatagttatttggcgtgtcacgtagcgtgcgcctgaagcgccatgatgtacatgaacgagtccacggacgatacttgatgcattaatacaggatatggtcaacttgttttgtgtccttaacgatcacttgcaacttgcaactaaatccttattgtgtctgagcaatagcccacggatcctcaaatttgtccggtactcatctgacaccttgcatgctgtaatagtctaaatgctttcttgccattccctacatcatcagaaatgcgtcccattgtcaaagccgcgcgtgatagctgcacatgtcacttctatgctaagcgagcttcaggccatatcaacgcggaaaccctgaaaaagccccatgtaaaacatcagtccctgtcgagatcatgatatcatttcgaggcgatttcaatcaaaagcccggatctcttctagaatatgaaggttaagatcagtctgattgatttctggcacagtcggtattactgattatgttataagccggtttctttcattaggtcgatctacatatgcaccttactcctctctgtaccagcagctacctcttaccctctcaattggacctgaaaaatacaagggtcaaatgtatctcttcctttccgaagtacgtgcaagaccatacctgaagtgacgggaacagatcctgatattgcaagaggacatgagcagccatggtagagcaatgctacgccatcatcagaacaccctaccaaatgcctgctggtgcccgcagcgtagggcgagtggtctagcggcactttgggcagtctataatgcaacacaaggtctcagaagagggtagtcataggattttcttttaccctatcccctgaggatgctgagcgttcgacagtactcgggtaatccgctgagaccctacgacgtcatccatctttatctaacattcgacgaagcactcttataccgaatgctatgtgagccgtagcgcccgcatttaagttatgagtataatttcctatcagtgatgcctcgtgtgatggctgaaaaatccctgccagtctccttgctctaatccaagaccgtttctctgaagcgggttgaatgcgctgctacttatgttctttgcggtgatggtgtcctccgttgtatctgtcatcgaggagccgtattgtatataccagcatcaagattcaagtcaatccactagaaacgagtcaacctataacagaactcgctgcaatataacaggacgcaatctaaaaaaacgtaattgaagagcggagcaacttattatcgcagtgtatatactagtacctccaccttcctgcgaccaaaaatagtcaatcactgcaaatcagccgccttaccttccttcaacctgtctctcgcaacccttgtagccttagaatccgtcaatctcgtcccataaagcacgtcgcaaaacccaatggtaccgaaattgcccacaaatagctcgtgatgcatgtcatggacctccatattccagccataaataggcgggagctcatatccgcaatgggcaataatagcaagcaacaaagaacacgttaacataaaccaaaaggtcacaacgtgcgctcccagcaacgcaggcggaaggacgaaggggagg

SEQ ID NO: 346 - DNA, 788 bp, Emericella nidulans
caaacatgagaattcgcggccgcataatacgactcactatagggatctcagcagcatctacgaggacgacatggaggacgatgtagaaagtcctagcatgaagaaacacggccaccaaagccgtggatgaccctatactagcatgtgaccactatgctattacaggagagtcgctcgctgtggaccgctatatgggtggaatgatatactacacgactggctgcaagcgtggtaaggcgtatgctatagttcaaaccggcgcaaagacctcattcgtaggccgcacggccaccatggttcagtcagcaaagggagcagggcatttcgaaattgtcatggacaacattggcacgtcacttctgattcttgtcatggcttggattcttgctgcatggattggtggcttcttccggcaccttccaatcgcctctcctcgccagcagacccttcttcattacacgttgtctctgctgattgtcggagtccctgttggtcttcctgttgtgacaactactacgatggccgtgggagcggcgtaccttgccaaaaagaaggccattgtacaaaaactcactgccattgaatcgcttgctgtacgtttgttactcgactgctaatcaaagggggtgcactgacattcatagggtgttgatatcttgtgttctgacaaaacgggaactctgaccgcaaataaactgagtatccgcgatccatacgtagcggaaggcgttgacatcgactggattgtcgcagtggctgccctcgcgtcctttacaacatcgattcgc

SEQ ID NO: 347 - DNA, 3536 bp, Emericella nidulans
  unsure (1)..(3536): unsure at all n locations
cattgaatcaaggagagttatgcagtagagacgacacaccattaagagagtctgctttcctgggcagctcgcgagggtattagtctacatgcccagctcagcgctaggtcgcgctttgccactcaacatgttcgcaatcttacatatcgtctgacgtggtactgccgctgtcacgcagagtgctggatctacggactggagccctattagggattgggtatggaataatattgaacaagcggggattcgcaagggttagtctcacgcagctagacactgcggagctacgggacctgcagaagcaatgttcaaggtatgcgctgctcgacctgggatagtgacgcactgtctattgatcctgcttgatccaaacaaggtaacagcaatttggcaatgagagggcaaaactgaccactgggtatatctgagttgttaggctttgctgcggaagttaattcgcgtagtacccgggctctttcaagccattgcatttatatcctcttgatgacagatagtgtactacttagtgcgatgttttgcgggtgccggttatctaatccagcttcgtatattgaacgttcaggatgttgatgggcttacgcgtaatgaccatgtactcagtgagtggcactcgggcttaactctgaaattggttcaatctgcgctatggcctacttttatgggcacaatgattgctcagcaccagtcttgttctgcgttcatcgatcattaccgctggtagctggcctgtgtgacatgcgaatcttgtgtcagggtggcagcctggctgcagctgtacaatgacatgcatctgagagagagtactgaaaagcactcttcatataactgctgcgaccactactctaccctcattgatcgggttctgtacccagctgacctaagcttgagcgatgcgcagacagccatcctcttaagataatttccgccggatctgcggcatctgcctatacaaaagatctcacttgcagcagttgggttagcagttcagcaaactgaccccagtatcccaagtatggtgtctattcaggaccttgacctgatgaaagggttacgccaacattaggtctaagcacgcacgatggatcggttagggccttgaaccggaccacctgactgaaatacgcatactgtcaaaacatctcgttgtgacccctgttctcttggtaaagatcctggctatgaagggtcacggctgatttctggacctgtgttgtgcttgtccgtagatattcaatagttgcgccggattcccataaggtgatgcttgtgttggggttgacgatcgcagagacccggccaatggggttgacggagacaaaggaggttgcttcgtttcggacactacaggaaccttagcttgatggatgatagctcttcgaggatcatgcggactttcttttggcccgacggcgtggggaaagctacatggttctatgcgtgagaaataagagtagtgttgatggagagtgttctttgaccacggatctagaaagaagcggtcaactgtgtctatgcatgtagtatttttgcagccttttggaacgccactgctggtctctaatatgaatagcccggtaagatctcaaagctgcatggcgcggttgcttagacgatgaaccgctatacaggaaactgtactttgttgaaatcattgtcatatcgttatatgaactatttccaccagcccacggtcacacgagtttatagctttaagggcttgaaccggcacctaagcaggggatttatcgcgcttcatctcagcactttaggccgttgacaaattttttttctcttttttttttgtagcagagtgcgccaaaatctaataggttctcacagctttcgctaattcgccattcgccaaagtcttattgaaaacagtagggctcgttgccagagtctaggtagaagcagcagccagagatgcagcacttcattcgttcatgtacttaatacccaccaatttcggtgcaacatagatgggtggagcactgacagccaccttaagggcaataacacgtgaatgacagtctttgtggataatgattgtttaggttgccggctctgcctcgtgagatagatggacatacccatccattctacatctttcatcctggtatgctatacctcaacatcagattgaaaaacaaaagaaatctcatgatggactattcagcaaaacttcactgcgtcgcagaacttgctttgttagggtcttaaatgtcttaaagagtatgtgttgaagtgaatttgacattgataccttgacaatacctacgactatgacccccatgatatctttagtcagagaactttcgtttagtttaaagagattttgtcattattgcccttttctactccagtgctttccctcccagggagccatggaaacctgactgaatatgtgctttgttttctgcacccaccctatgttcttgcgcttcaagcaccataagtggtacctcatgaaacgagctatcctgtaagtaaaactaactaagtgggaatcagagtccactgatctgagtccccgagcatcatggattatacaaatgctggtatgaccagtcagattctgaaactcgtatgatactagcaagagtctttaggtctgaaactcttcttgggctaccccgcgcgatcaggacaaatcctgcagtcagggctcgagttagctgtggacatttgaaggacaatacacgatgaagtatcagatcccctccgtgctgccggtcctcagtccactttcctcgtcctcgaaagctaagtttaatgagttcgatttcctcactggatctacggcgcccatagcgggaattggactgctgtgactatggatggnggtttttttgcctttagcaggcttcgaagctcagtcccgtcgagaaatccgatacacgagccagcgccagtctcggtgggtgacggaataagatattcaactccggtttcgagcgtcttgtcttcaattcgaacgctttcgtgtacatcataccgtaccatcttgcgcggttgatatactgactgaatacagacttgtccagctatttattatgatcttagaatacgttctccgaataagtaaggcatcgcgcggtgcacttggaactcacagactggaatcgaacaaacagatcccgcttccccaatgtcggatctttatcaccacagccagggaagagatactcgacaccgagctggactactttaccaaacatcaactcgtgggcgacagtctgagtctgggtctgtgtttggtgttgcacactcgagccgcgcccatacatccgctgctcagcaaagatcgtcggattctcgtaaatctcatccgcgtgcgaaatcaggataaccagcttcacacagcactgcatctcatacgtggcagtcaggtttaaaatctcagttttgtctaattcgccaagaacccccgctcagcgcagctcaggttgggtgggggaaagggtcaaactggtcaaaaagatccctatagtgagtcgtattatgcggccgcgatt

SEQ ID NO: 348 - DNA, 2618 bp, Emericella nidulans
catatgcttggacttcatgaagtgaaaccagcagaggtgaaagaacgggttaagctgtacctgagctctcagcgggcaggaaagtggctgctaatttttgataacgcggatgatgcagatatgtggttaacaactaccccagcccttgaagagatccttcccaagagcgaacagggccgcattctcttcaccacccgcaatggggaacttgcggtggagctcacgtcatcaaatattattcatatcccagatctggacaagaaaacagctcatgatatgctggacaggctagtattacaaaagaacctgctccaggaccctgtcaccacaagttctttcctggaacagctggcatacttcccattggcaatttctcaggcatcagcatacatcaataaaaagcgtctaagtctgtctatatactccaagattttacaacaagaagaatgagacgccgtggaactcctcagtgaagactacaaggatccaggacgatataacgatattcagaaccctgtcattactacctggttaatatcattcaaacaaattcagcagcaagatcagttagcagcagactatctatctttcatggcctgcctcgacccacgaaacatcccctcatcacttctgcctaaccaatcaactgataaacagaaacttgacgccttaggccttctaaatgcgtactcatttactcaatgccagggcacacaaataagcatgcacaggcttgtgcatattgcgatacggaactggctgagaaagaatgggcttttcagcctctggatccagagggtggctgatcacctggagaaactctttccgaacagtagccatcataaccgggggctgtggcgaggatacctcccccatgcattagcacttgtgcatgaaaatgagtttattctacaactaggacagtatacagaattgtttgagagaatatcaggttgccttacaagagatggaaggtattccgaggcagaggtactatacagcaagctcatgacgataaaccaggagaaaaatagctatgagcacccggacactctcagaagcatggcaaatctggcatcaacctactggaatcagggccgatggaacgaagctgagaagttggggttgcaggtcctggagacaaggaaggcagtactgggtcctgagcatccagatactctcagcagcatggcaaatctggcatcaacctactggaatcagggccgatggaacgaagctgagaagttggagttgcaggtcctggagacaagcaaggcagtactgggtcctgagcatccagataccctgaccagcatggcaaatctggcatcaacctaccggaatcagggccgatggaatgatgctgagaagcttgatgtgcaggtcctggagacaaggaaggcagtactgggtcctgagcatccagataccctgaccagcatggcaaatctggcatcaacctactggaatcagggccgatggaacgaagctgagaagcttgatgtgcaggtcctggagacaaggaaggcagtactgggtcctgagcatctacatactctcagcagcatggcaaatctggcatcaacctactggaatcagggccgatggaacgaagctgagaagttggaggtgcaggtcctggagacaaggaaggcagtactgggtcctgagcatccagatactctcagcagcatgcataatcttgcctatacataccattcgatgggtagaaacactgaagcctcagatttaatgacacagtgcgctacgcttcgtgccagaaatataggctctacccaccctgatacattgtcttccagcgatgctcttacggaatggcaaaagctggaccatcatagatcatcaaagccaggcaaaggccgaaaactaaaggccttggggcgtgttctcggttttaagtagggactattgccacgatattgtactcaactactctccaatattttgctaaaagaagcacctggaacagagtttcattaattattctccttggtcaacctgagtcatgcagttagtccacatgattccacgtcggaatctggcccttttttgacttcaacctagtggtacacacataaaatgcctgcaaaataacctgtcaatataactgagattacccggaagaagttgttccgtcccaaaatcagaagcacaggagtctgctatggtgaaaccagttcccgaaaatcctgtagaggctatgcacactgtgctcagctgtctcgcagtactaggatgggtaacagtttttggaattaagtatttttacatacaagccagtagatattgaccgtaagcgaccacctgccatacatgctaccttcctttactgatatcaacagccttcagttaccagagtctggccgagatttctgcctttatcacatactcgggggttatcgctcctggcgccttacctaagaggtgactcaagaaatatttttcagaacaatttgtaaacgtagtcggtcgtcgaaatacctgcgtcataatgaacacggcctcttccatgtctaaatgccgtgagcttctagcgggtttggtcctcgtcagttcaacattgaaggcttttgttctctctaactattcaggctagt

SEQ ID NO: 349 - DNA, 4906 bp, Emericella nidulans
gaccacgcagctttttgtccataccaactcatcttccaccgggccgttcgggccattgttgatggacgtcgtccaggagtagagttcctctgacggctctgcgggtagcagatcctccgcgataaggaaagaaatggccgaggaatcgtgcaggccgagagaccgcaccgtagacattttagaggcggcgttcatgtattgcggggagaaagccgtcgggcagtagacgccatcgtcggttcgatccgaatgatccgggagaagacgagaccagtagtaaaagaaagtactggcggcaagcttgagagaagaattatcagagaaatgaaggaatggtcgtgctgggaagctggagtttgagctctgcaactgacgcggtggacgcggtcactgaagtccgtagtaaatacagaagacgctcggcggcatttttctttctccccaacaacactgtgccaaacaccgttctctcccccttctcatctgaacgcgctctctctttcttgcaacattgaactttcccgttattataatcgagaatatccctcactcccgattattctcgtgatacccgtgtaacccgacgttgcccttggttcattcaacgaaccgggtgattgattaagtattgggcacaatgccttcctttccctctcgtccactcgtcagagcgagggatgatggtttacagctgaggtccgtactaaatattcgcctgatgctcgtaactctggctaacgtgtctcttaatctagcttccagcttcctcatcgtgtatacaccgctcaaggctacccgatccccgcccccaacggctcttccgttgtcgtctatggctatgaagatggactgaaggttatttggcgaggaggacgatcattttcgaataaaaaactgcagacgaaacaggaaaaacagcaaaagccaagccgaaacaatgacgatgcggtcatgattatagactctgatgacgagagcatggcagatacacaaaaagcggaggagccggtggcagatacgtacgagtttgaggatgaggatcccgaggttgaccctgcagaaccttatgaaggtgttttgcgtcagatcgatatacccctaggaagccgggtcatcaatatcgcagtgcctcgcgtgcttcccgaaactgcgcgctcgagtctcgatcctttcccggcaatcctagaccagctcattatcgtatccgcaatttgtgcagactattctacgcgcgtggtaacagtacctctgactcctccgcatcctacacaaaccgacattgctgcactgggtattcaaacttttgcgatcggcggcggattctcgcatcaggagctcccacaaggagtcagcatcactttcacttaccaggaaagcgatccgcagcagggtggcgaggggcgatgggaccttctcgtggcaacccattctgcggaatcgtctggcttacttgtcattcatcggatcccaatcacagaagacaaaaagaccactaataaagtatatcgtctgtcggcagaagacgttgaatcaaagcgccgctatttgccttcccccgcacagaacatagccttcaatccctccagctatcctgctgcgcgacattcgactctgctggtctcgttccattcaggctgtgtcaaggtgtactcctgcttctccacgaggccttccaagtcctcgcgaagagcggttgcagcacagaacgattacgaaacattaaaaacagagggagaatggctaatcagtctttaccccggattcgagcagccattgtcaaaccttccacggcgcaagtctattacgagtgccgagtgggttttgggaggacgggctattttggttctcatggcggacggtgagtggggagtctgggaccttgaaggagccggtcccggttcagccaagggtccgctccagggacagtccagcgtgcaaggtgtaactggtggttcattgactgcattttcagtcagcgggcgtatcctcagcttcccctctggtggaaaatcagaaacggcggttgagcgccgcccaaagttcgctccgatgacgccttcgacgaagcgaattcgcgaggacactctgttgaagggaaacgtagccgggacctctacttcgtccctccgcggcgggatttcagtataccagatgaattcgacccaagacccactgcctgatgaatctattctcattcgacatggtaatcaaagcgcggtaatccccagtctactgactctgtggcggagcgctgtgcggtcgacaggaaccctggacgcatccaaccgttgccgagtgaccccgcttcaagatatcgcgctcatgggtgaacctctgaagggaatcggccatgttccagcgccttctcgccgatctcactcgcagatccgggcgtttgacattctcgttactgcagaacatcgtcttctcattctcgcaccgaagctggctgaaccggatgcggcttctacctctcgcacattggtcactgagtcgcctactcgcgcggcagaccaactccggctgcgccagggagaacttgacgtagatggaatggaccgtgtactgagtggaatggcgcataaccgatcccttcacatgggaagcccgatcaagcggacgcggatatttacatgatatactcgacagctaatataattagtcacagatacccggagagctttcctttactttgcacgatctacgccgtatctttcttctattccacaattcgcgctgtaaggtggagcgcaaggcgaggatcatgccttgaaatgcctctttgaggtataagctctgtatcggctgcgatatatcgacaggggcgctccacagaatacctatgcgtcccggccatgccacagtctggtctctctaatgcacttgaggggacgggcagcgcttgcaagtggtgtggacatcaagcgttataagtaagcctgcagtttttcacatagttcctgctttggtcgcacaatgtcatcgtgattgttcaactgtatcggaaatagactcaatcttaaaatcacttacataatcaaccggcgggggggatcggagatggatatcgcgcaatcgatcgaaatcatttggagtcgcaaactcctgcccaattcaatccttttactctgtccccatgtctttatagcaccactatggctcgtacatcagaaccaaagctgcaaccaagaaagggtatcactaccacaatgcaccctccacctccatatccgcataaacaagaaccacttccctaacaacaatcttatccaaagtctgggcctcgctaataacaaccctctcctacctcccgggcctcctaacgctgcaccactccctcaccctctccaagaccgcctacccattcgtcgctctctacacgccttcctttccaccatctggattagaagcactccgccgccgcgggatcactaccctagctgttccgtttgtgaagccgaagtcgacaccgaaacacgggtatgcgcatgacccacgcttcgaggatgcgtggaataaactagtcgtgttttcgctggagggggtgtttgagagagtcgtgcttctcgatggggatatgctggttaggcggaatatggacgagttgatggaggtgccgctcgatggggatgaccaaataggtaatgagcgtgatggtgaggtgaacggagcaggggaaaggatatttgcagctagccatgcgtgcgcatgtaatcccatgaaaaaggcgcattaccctgctcattggtacctatttctttcatcttagtacttgtcttacctctcgcaaactaatctactctaggatcccagaaaactgcgccttcacaactcaacatcaggccccggatctcgcgcaaaaagccggcgtcccctgcacctccggcgtcgggatgctaaactcaggcttactcgttgtacgcccctcgcacgcacacttcgcaacaatccagcgcttccttgatgacgcgggaaaagttgacagctacacattccccgaccaggaactcatctcagaggctttcagggaaaaatgggtgccgctgccgtacgtgtataatgcgctgaagacgatgaggcctagggatgtgcatggcgcaatatggcgggatgaggaggttaagaatgtgcattatatttttgcggtgaagccgtggcaggaggtgcccccggcggtagatcaagagacgggagagagtacggatgttctgaattcgtggtggtgggaggttaatatagataggcagaagtacgagaaggagcgagggattgaggatggctattgatgaattgattgagccgtggttattctagattgctgcaggcgctcgaggtgaatagatcgtcttgtatttgatacacatacggtgtagtttgatgctgaagaaaaccaagtgcgcgcagctgtatgttagggtagatttacacatgcatgcatgcaatatgtacaggctcaactcgtggcctttgactcggctcgactgactttcaactacgccgctccagtgtagccaagactctccaattccttgcgcaccgagtcctcggtctggattttcttcatctgtgtatcctccaacttttcacctccggccaaacgcatcttcaggtcctcgatcgcgcggattttcttcaagagtccgcgaattttcttatcctggacagtgggagcaccctcctcgacgggctccggagtcgcagctgcagctggagcagccttggtgccgtttggctgcttctgctgctgctgtccgttcttacgagctccctccttcttcttctccccaggcgggctagggttgctgttggcaccctcctcaggctggccctccttgagcttgcgggcttcacgcttcttcttgtttcgtgccgctgacttggatagcttctccggctggtcggcacc

SEQ ID NO: 350 - DNA, 3989 bp, Emericella nidulans
actaggcggggtacagtatggcttcagccttcaggtttgaaattccggattaatttacaacgccacgggagggagggggtttaccttaaatcggctcataatataattcttcatcgacttcgaaaacgggaagagatcttcccttctctatcgaccaaaggctaactctttttacgcagtgtcgcatctatatattctatcacagacaccgacatccacgcagaatcatcttcagaacgatcttaatgcgcagaccgaaaatccagccttttattcccttcgtccttcgtcgtcctcaggtaattatccttctcctcagagctcatggcattccagattctgtcacgcgacttgttccgccagatataataacacttgatgaaaatggtcatgaccacgttccaggcaaccagtgcaaggaggaccttgtttcctcgacggtagtacggcttatcgtcttcgcggtaaatctacaggaaggttagtggacttttttgagtggaaggagaagatggacttacgttcgaagagatgatcgaacttgcctgacagatcatgttatacagggcactaccaaccgtccttgtgcggacactgcctgcgttgcgagatgtgaggctgactgtatcgatttgttaggagtagtgacagatatcccgtcaaagcgaggcgacataccattgatagaatggatatacggaaacccgatcaatagcactgtaacagcataccagctccagggactcgccgaagacggcatcagctccagagccagaagcaggggcagacaccagaaagaatagaatcccaccactgccatccgattgttgattctttctgagacccacgaccaaaggacaagctggatcaagaagagcacatacgcagggatggtcagcagattcgtctcaaaggtgtcgaagcccagcgacttgagattgagcgtcagatacgccgtgaccgggctcgtggggatcagcatcgtcaaactgatgacgtacagcggccaaagatcgtagtctgtcaacggggcccagaggagctttaaagtcagaccttgacggttgtgcatcccgccctgtacacattagtatcggagtcaagtagaggtgcttgatgagcatactttgcttgggtcatccctcagcacccggttgaccataatcacctcctctctctcactgaaccacccattgcgccctcggaaccagctcgccgtctgcgtcggtcctgggggaagatagaaccacgagacaaagcccactaccatcgtcaatgccccctccagcgcaaacaaccaccgtcatccctcccagcctccaatggaccgcatatgcaggatgccaaatgccaaaaacgcggccactatgtacgtgaagtgcgaggcgcagtagaagaagccgacccgcataggtaactcccggttcgtgtagaaatatgacagatagagcaatgcatcagggatgaatccgcctttaacgagaccgagcagcgcacgggttgcatagaaactcttctccccggagatcagacactggagaataccgatgaggctccacgccatcatctgaatggggatccagacgtctggacctagttttttcgagatcatctgggaaggaacctcagcgcagagaaaacacaggtagaagatcatctggccgtagttgtattggttcgtggagaggcccaagtcgttgagcatcccgtcacttagggcttgcgagatgttgccccgatccagttgcagggcaaagaacatgaggcagacccaggagcaaatacggtaatcgagctgttgctcagtcaggaaaaggaagttcgagatctatatccgggttgaaaaatgtacctttctaaccaacttcttctcctccttctccgtccactccgcactgggatcataccggtggcgcccttcatactcgggaatcggctcgtagagctctgttgaaccaccgccgacaaaggcatcgccttccttgtgtttgaaagtctgcggaaatttctcagagatggactcctgggcctgcttgaaggctagaactggcttctccttctctgtcatggcgaacctgaagacgtccgtcgaattggagctgcttttgcatcttgagcggaagctcacaatttattcttgcgagatacattgaatacgtgcaagtaaatcgaaatgatgccataggtacgctggagtacaatggcgtgcgataccctaaatacgtgccattcggatcctgtttgagtgcgatctccgcggaccttgactgcttgccacgcgcaaaaagaccatgctagcaaatcttgggcaatcagtcgccgcagaaatatttgtgataatgattaaggtggctttgtggaaagcattgcccagacaaatatcaaagacaatagcagagtgttagggttatgcagtcaacgaccctcggatcccttacccacgtatctaactgcccaggtataaaccgctacgccgagcttgtaatatgtcagaagaagttacataatgatatctcattataagtatgctgtgtatacgctaggtaagtccgaccgccacgctagtatagtaaatggtgatgtacatactgctggcggcgatcgtgcataggaatcgttgcccacatgccgcggttatagattaaagcattgagcacaccacctctatccttgacgtcaaggccatcacgacacggcagcagtactccataatggatgacccaagtttaactctatagaatcttctcagcatccggcctgcaaggtggaatcagccaggtttcgagcctgggtggcatctgaaaaccctttgtcgagtctcccaaccagatccgggcaagactaccccacgacatcacatcgcgccgtttcagggtactgcaggattcgacactgttcaaggcgggaaccagttgtataccggagttcgatgtataggatttgactagactaagtacaggatgggtagtgtaactttgataaacgctccgaaacaccgggcccaaaccagccaaccatgctatacagacgattagacaacccacaacgccagtagaatgaattgccagccaagaaaaagaaagcaaaatagagcagaagaacaagaaaccgagaataatgtcatgtctgggacagaacctcctcaacaaccacctgtagcaacttcaactcatggaacttcgccacactttccaaaaccttcaggcgcttttctatatcagcccgattcattgtctctgtccactgcccactacacgagcaatgctccataaactcgctgatctttagagtcccacacttcgagcacttgaggtcctgcgtctgccacgcaacgaccattccccaaacctggccgatgagcatctcctcctgtgcgaggcggtcatactcagtttgacagaaggggcagcaccatggtcgggaagaggtagcgctgtcggggccagagccagagccacgctcggggaggacgtcttcgtcccggcagagatcgaggtctcgaattagacaacaggcgctgcaagtgagttcggggatcttgagactgctgcctggattttcgaagcggccttctttgctgaactcgcggacttcgaagagggcgagtaattcacggcggaggaggcgggtttcaagcgccgtcgtcttggatagactgagaacctgcatgaggagcttgacgagttcaaggacagggttgcgcttttcctcattggggtctgtgaggacgcccggaaggatggggaagacgtaatcggatgccagctcaggatgcaatagttcttcgcgctgacgacggatgagacccgagatttgtttctttagcggtttggagaatctatctgatagggctgcggaaagttcctcgttctcttggccgggttccggttgtccgatgggaatctgcgtcaaccgtggagttgatgagtcgtcactttaaggtcaattgaagctgtgcatgagttcgatgtactcgacaacccggtctt

SEQ ID NO: 351 - DNA, 1137 bp, Emericella nidulans
gatggaccccaaatttccatataaactctcttcctcgttctcgaagccctaggtactttggcgggactctttatcttaatactctttgcctgtatatatgtctcacaggtcttcagctgctcaattacctctttaccaggtaagagccctaatttctttgtcatctgtctgaatctggcctttcctggatgacctagatattgataaagcaactcccaatcaatctgctttacaagtcttgtatatttattattttcaggcttcccaacccctttggccaatgcattccggctttttacctatcctagataacttgtacggccgatattatatcctcttgctaggatctttcctctcctcttaaagaatcagtacttcttcttcacatgctcattccagatacccatatcttgcaatgattgggttaataggagagtctgtatcatcctgggtatgtacaatgtattccagatcctagccacttttccactgcttaataggatcctcattgttcctctgccggcaattttaatagatttaccagctgttcccaagctgcctctatatctctgatccagagacttaaataaattaatcttactactgcaggtacttgttgctctactatcaataataagattattgctcccctttaacctgtatactttctcattttcttcaagcaaatattcaaatcaattactgatatactctctgaatttgacttggtaggcattctcagccgctcagtgggctgtttgtttatatacttgatatgtactatgtctggtagaacctctgctgctagcgcttgaatcactatctgtgtctatatctatttcgttatttgccgtacaggcttttcctttctggcggctggtatgtcctcttcggctcttatctctgccatttctatgcaatctggccttgccatagcccttctagtgactccttccctgagggtcctcctgggaaatactttgctctcagtccttcagagctctgcaatctcttgcaaagtagccttgcttgccacaattaaagcattttctctgctctgcctaattagctaatttactaactccctctgcaggtctctctgcttaaattgacatttctttctcttctaatcaagat

SEQ ID NO: 352 - DNA, 1974 bp, Emericella nidulans
ggtctctgtgtgaagctcgcgagaagctcaaggagtcgctcaaggagacgttagcagagttggcgaagttatttgtccgaaatgaggatgggccatttattttgggggggaagccctgctatgcggatttcatcgtcggtgggtggttgagaatgttaagtgtgtgtttgcctgcagatgagtgggaggaggttcgagggtggcatgggggtgtttttgggagagtgtttgatgcattatcggtgtatatggaggttaaagaataagcataataacgtaattccacaagcgagcgacacacccctccgtagtccatataaaatggcacttttttataccctgtaacctcaacaacaagcagattgtaagtaatactatagaactgagatggaatatattcttttgtttgaggccagcggtggccagcagtatctacaataccgacttgctgcgctggaaaaaagccacctggaacgagctctacatagtcccaaaatagtgataaccatcgttaccaaaaggaaaatttcttagaattacacataatgcgcgagtattcgttattgtcgcagggatctttttctttttattttctctgtttaatgtaatggtgtaatatgagaatagcaggcagggagaatgagctctgcaatgaattgaaaagagaccttgagtttttcttgtattagagcctagatttctacactgtgttttgaaatctcgttctactttcggttaaatggtattcatctcattatcacataagtgttatgtctttgcgcagcttcactagcctgagacatatcgtctaagcctacactttgtaccgtattaccaagtctaggtccctgaagtgctcttttctagccccagaattacatcaatgcaatttgaccttctttcagcaatctttacagcaattccatgcggccaccggcgaacagagtactttttggcctcatcaaggaaaagagggccgagaccgaaggcaataggaaggaagaagtgttcgactggcactgttgtcgtgccgattgaacggtgtatctcggggatataacagactgtgggtaacattagttcatgtccatcagcatagcttcagtacaccattggcttcaaggtgtcattgagctggtttactataggggattctccagcgaaaagcaccagtaaaaacaaaagaacttacatataaaagcgacccccaacgcaaatatcatagccgggaggaaaagaaacagattttgcgcctcattattgaagattggcggctgtcggaagatctcaaccgatgagttctcacagccaggaggttgaagaattgcaaaaaaaccaggttaataaagtagatcgatgaagcttcatttgcaacttgcacgacaaagtcaggatcgtatgcctgggccaagcaccgtctttaagggcccatcgcgctgaaggggacaccccttctctataatggccaatcgtagttgctattagtttccagctgatttattgtagttagaagtggtaacaggaaactgacctccatatgccaaatgctacaacgtatgaaagagaacactcgtacagaccgatgaagagatatgcatggccgaggagcttggtgtcgacgaggtggtccttcttcgggtttcttggtggacgaagaagaaggtctgattccggcttctcaaaggagagagcggtcgctccggcgcagtcagttaaacaattgtttccggcagtggactgggattgccatattcaagcagcaaatttaccagggatgatcatgaggaagggggagaggatttgcggtacaccgagaataacatcggtcatcaccgccctaatatgtcagttcagcgtcatttgtcttggtcaggataggctaacaagctcactgaaactacctgctggcaataggtgaatgaccgtattcatcaggttgtctgggatgacaatcagtccgtatgaagcctctgt

SEQ ID NO: 353 - DNA, 1449 bp, Emericella nidulans
ccggagtaagggtcatttaatggctaggtaaatcatttgagcactaagcatacttgaggctaatatcttcagggatcgtctttattctttatatcgagagctggcacctgctgccgtacgaagacgtcttcaagatcttcagcgagaacgtggtgcttatgttgtacctggacctaactttatctggtctatggatggatatctcaagcttgctccgtacggaattgagatatacgcagcaattgacgcctattctcgctatattatatggatctacgttggaatcacctctcgtacggcagttagtgtactacggcagtttctagaggcggttcagattatcaaacgacagcctcggatcgtacgatcggatcgaggaacagaaacaatattattagcagaagctcagcataaactacagcagtcaagacatcctgaagctcagttatctgactgttatatttatggtacaagtactgctaatcaacgaattgaggcctggtggaattaactaagcaagggcttactttttcgatggagagtatgtttattatctcttctactagttcgtacgagagctgacaagaagcaatagacttattttcaatctcttcaagagacaggagccttttccaaggataaactagctgatcaaattgtattatatgtagtttatatgccagttctccgtcttgagataacatcctttgtacgaatgtggaataatcatcctatttgtatacagaagaaccggctatatcttgtccctggcaagccattcatgaactttaactatcctaaaaatggggtgcttaactatggccttgaatttgacaagaatcttctttcttccttgcaggaagatgtacaagaatggggtaagcaacctatttgtctttagaaatattactaaattattatagaccctgaggaatatctgccttcagctacctataattggactaaggtctaattactggagctcaactttgatcctgaaaaccctccaaaacatgctggaggagatgtttttaccccttatcatacaacttactttgatttgcgggctaggatctcggctcatattacccaaaaaaatgagccagaactgggtctatctagccgaccagttggaggattcaattgggagccagcaaccaatcagaatatcccccaggtggaagttattgatcttattgattctcctctacgtccaactgcaattactgtctttgcctctcctggatcctctccacaaacaactcgattttctcattataatcgtacagatggagctgagcagctacgacaggttgcaattgctcgtacaaagccaaataaaccaggcagtgctttacctgtcttcaatcttctaatccacttctatttgttaaagcaacatgcttatacaggtataaaaaagtgtgactcgttatgtaagttacaagc

SEQ ID NO: 354 - DNA, 809 bp, Emericella nidulans
cttttttataataattagtttaaataatttacttaagtagtaggtactaggcctatagtaaagctagtcttatgaaaactataaatattttttattataatcctgtactgtattataatgatttatatataagtaattttttttatttattcttagttttagatatttaataattatatcattacggcaaagtccttagtttattataatatttaataatgttatatacccatttttctttaacttgttaattagtataattttatattaagtaggcagaatattagctatttcttatatatataaaagtaaattagagggtagtcttagtaatttaataataaaattttattatataagtattggttttttttaggtaatctaatatatatttctatataagatttctggctactaagttaccctagagtcttatttacaaaatattataacttcctgaaattaaagctgaaatagtaaaagcattttctcttatcagaggttaattattttaatatatttttgagaatagcaagttttaaaattaggagttttaactacagctaaaatataggtggctgttcttattaggtactacctcgggttagttttttatgagtatttaggttaactttttttatgtaaacatttttaagtttacaggctctgttttttttaatttagaatattttaagtccaacgcctccggggacctccgggggttttgtttaaagaaaatacattgggggcggggttttttttcacccttttgttagttcgttccccgcatttattcaaccgctctttta

SEQ ID NO: 355 - DNA, 5942 bp, Emericella nidulans
  unsure (1)..(5942): unsure at all n locations
ctagtaacggaacgcgcgcagtgtaaagccaaagcagaaagttactactcacccatagaactctggtatattgtcgctagctatcaactacatgatttcagtatgtgaaggatggtcggaggacgaacttctagtatcgggctctcagaaactaccaatccaaagagctcctgagggtctgctcaccaatgtaatgtgccgcagcgcatttccatccatccagtcgggctggaactccttccaagccgctcgtcccgacagtccaggcattaccgagcacaacgacgtcctcgaaatccgcggcactttggtttttgaaggcgcttttagggcaggtttcctaggcgagacggctttggtggcagggatctttggagcggcttctttccgcggccattcgttcggtttggtttcatgttcccgtaggtgcgtgatcgatcttgcagaaagccgatcatgagtggtggacacttgaacttcaggctcactcgggcgtttcggtttggtttgtttgcggcgatgattgcgtttagaaaatgaccggaaaacattgtcatcataattatccatccaagcagcagtcgcagatgcgcttcgcgacctggaaagaattgtctccttcgggttggtcatgttccctaggaaagaccctggccgtaaactgtcactcagttggtggttgaaatgggaattccgccggaacgacgtcttaggcggtacgttcagactcctcgacgtaatctggtcttctaggagatacggtatggaaatatttgactgctcactctccatgacccctcccatctggatctcatacatgcgcacacgtgatttaaagagctttgattttttagtcacagtaaacgggatgggagcatttggatccttcttcagaattcgtcgagactccctatatgtctctgggttccagtaggaaatatccaaccaatgcgggataccgtaactccaatcgttcgcgcgtgtccaaggcccgcggggaccgctagcaggagacgtgcttgagaaggtcgatttcggagagaaatgcgtgcggttagtcagacttgcaaaggggtggcgcatctccggtgaatatcctccgccttgaatatcgccgccatacgagaagctggatctccctcctcggtttggctcgcggtatttgaacaacggcactgagtggagtggcatcgggctcaggcagaccagatctatagcgattccgcgatttgtgagcgcttctgtggtagaggctagagactcgtacgacacttcgaagacgccacttcccggggtaatgacaatgatggatgttccagtatggaccatgtcacgatcaatgtggtcgaacgctagatgagacgacgcaaggtgaattgcttccagaatattgccgcgaagggcagtgctagggcgtcctccaatagtcgccttcggagtagtgctagcacttgttgacgcaactgggtcttctggtaccttcaatatcgacacatctcgtaggaacgtcctaaaatccttcttcagttcatccaaaatcgttgtccagtggccacttgccatatcgttgaccacaacgcgataaaagtcccgagtgggagcatggttgggctcagatgtattcttcaagttttctgagttaagtgttgatgggagccccgtgatcgatgcatcatattcgacccgagtaaacagcacgatcgtaaccaagtgcctcgcatcggcgttcgcccaccgcttgaacaactctggcaaaaacccattaatcaccctgctaaataggatatcgcccgtcccctccgagtcgaaatcccacatctctctcgacatttggatgaacaagacatatttcgcagactcgctccggaacaccgggatagtctgcggcgagaagaagcccgagagaaccttcttcccccgaataaagatattcttgacagtcgccttgatgctccccataaacacaatcttctgccctttgtagacaatcttacccgctaattccgacatgacaagtctccacatatcagaccgaacaagaaattggtcgcggaatgagatatccacatgagacgcagcgcattgtgtctgttcaacgatcgaaatatacaccgtgctccgattcttgaagccaaagatgttcgcaacactgctcgtaacagacaactctagcttcggatgcttcgtcctaatctcattcggcagcggcttcgcgatgaataagcagcgggtctgaaggggtgtcttgaacttggacatggcatgcgaccttgatgacgaagccgtctcaacatgagagtggccatggccatgcacatcgcgcatcgatctcgtcctcatatcaggcttcacagccagattaaacgaatgcgactgtgactgtcccgacgatggaccgtccaccactgtcctcgccgacagaatctcaataagatccccatcacgcactcctgtgtccgcgaatgcagcctggttaaacagaatctcctccttggagaacgtctcgtcatgaacccaaagagagcactgcctgcgatctagacccgtcgacgaaaacttataggtcttcccgtctgagctagacggatggtcactgagctgcaatgcgtcatgctgtgccgtgtccacagagcgagacgagaccgagtccagactggcggcgctgacctgtcggaggtgtgagcgcctcatggacccccgcatggacatggttcagcttccccgggattgcattgcttgggttatggcattggcactggcactggcgcaggagcactgaatctcctggcgtagtatcaattagtgttattgtggattaatcttcaaggactgggccgagaacgttggaagtccaccggagtcctccacttgcagtcccttatcggcacatcacgtgaagagcagttggctttatcgcacgtgatctacgtaatgtgtgggaagagatcgatggttctctcattggtggccggaatggcctgcctatctaaacaactagcttactaaatattgactaattgaggtcgaaccccaggggcaggcggtactgaagggcagtatgccccgacataatgctcaggtatggtcgggttaaggtagcttgcatcaacagtatgttgtggtttgagaagaagtactagtaaaaaatagtgctatccactgcacgaaaaggtaatgaggcttctgggcaaatggattacagacagaagcccattttcaattttaatggcgtatggtcatagtttgcacacaccctacctggtttctgtgggactcaagttccaacaacttctgacgtaaattcgctgttccggatttaactagctctagacacgctgagacttgctggagttcgactgcatttagcacgacgtcatctgcaagtgctgcccatgttatttacctggtcagcaatcaccgtgatgagcctcaagatcggaagcgtaaacgctagtcaatgccagtagagcgatatatgagcactagaaatttgtgcgcaataatacacgcttgaaactaagatcttccctcagttggtaatgaatgaccagcattcctttgttgcgaggtggctcgtgagcagtgaagtgccttgcaagcattcaagaagaacagagaaccaagtgaggttgctcaggccctacgaactttcaaatcatgaaccgtcctctttcaccacccaatagggtgacaggagttccaatctcgtcacgcatagttgggcttcgccagccacttgagctgcggagtcccttgcgtcttcagcaaatgtcgaaccgaaagagaatgccaagccactgatggatcataatccatagtggtcagtccaccgcctatagtcatacatctaaactctcatggatctcaattctgttttggcttggtgcagtcaatgattgactgataacgatgctgctactatctattaagacagaccataaaattcatagcagcgaatggtcagctgtagcgtgcgtggagcttgtatagccccataggagacctgctcggaaacgagcgccggcgaatggacgttactcccggccagctcgacccacttgttgcgcatcagccaatataggcgggatcgatgcatctgttttacatcagcgagccaagcaatgattggtttgatcaatagagtggttgcggcacgctgcctggtggctggccggccactgaaaagcatcaatcaaggtgaaggcgctaccagattcggtatcagtatcgtgcggactgtacctgatggtcttactatgcgcagcccaggtaactgcgagtggagaccggaagagacgcgatgagtggctgtctgaggtcggtgcaacctggaccgtaatttagagcactgcgagttgaatacacaggtgggtggataaaagactgacaatttctgaatttattgaactccgccagcgcaccattcctaatcgtgtgcacaaaactggtgatgagggatagggagaaatacatgagcgggatacggcgataatcgcagattgagtcccgcgaacttagtgcgtcaggttcggctagatttcatcacagtctcgaatccgcggtgagccaacaaatcctggatagcagaccaagctcgttgtgctgatgggtctttaacggccaagacggaaagccagtcggctgctttggaaacattatcaatagttcttgagttctgaccagcgttcgctttctctttgatcaacaagctaatcaggagaacggtgatggcctgcatgatatagtgcactatacaccaccaaggcgacattcgacagacccaagcaacgtccagagtgttaggtaggagatccaacacttgactagccatatcgatgcacatagcagccattgcagtgcaaaagctctcattctggttatcccatgaagcctgcgaaaggatgcggctaaggcatggttgggtgatgagtatcttggtgctataataggaaaacgcaagattgagtcgttccctttcgcaagccggtgctccttggagaaaacgaaactcagctggaagttttgcgagccagctgtctgctcgactgtttaacgcagagatgaccatctcaattgagcgccatgattttcgccccgctcccggagcatacagggcttcaatagaccgtcgcatgatcagccctagttcgacgaagtggagaaaatggagtgaaacgtttggcgtaagaacatgggcagcagccgacgcaatccgatcactaagcctgccagggctgggagtttgccgcctggtcaactcaggtatcaacgctctttctgccgattgcgttgaggaccgcgacactagattctgcatgaaaaccgttcgagcctcatggtctgcaattaactgctcaacttcgttgcgtgagaattcttcttcggcaaacggcaccggaagaggcgtggtacaggagtcttcggtgctgttggggagacgaccactcatcacacatagtaagacgtgaagaacatatacagcccaccagaccctataacgaatctctcttgagctatagaagataatgttgctctcatttcggagattcaaccccatcgtaacagctgattggactgaaatccccgacaacctccaagaccttcagaggatattagctcttggcgcctcctgaacctgaacgcaaatgctgaaaacaaaacaaaaaaaaaaaaagaggggaggggggagaatgactgacctattagcctggcccaccgtcatgagataaaaagcgcacatcccttcgacttgcacttgttgaagatttgggtggtccagaagagtaacgtcgcccatactgagcttccatgctcgagagaaatatattttatgatcgtgtgcgttcgcttcggtatccttcgatgaatcatgaacgtacttcgtagcaatggcgaatattagattaagaatngctaaccaccgttttccgggtcggaccgag

SEQ ID NO: 356 - DNA, 1203 bp, Emericella nidulans
gacaaacatatagaatggcatcctgcagctctcgtacccaaagttgaaattgtaaattgcgtataccttatcagcagccaaatcatacctatgtgtaataattgtgtagtggctaccagttgctcattaatttgatgatccgtatatagctcccagtcgagcacaaacgaacctactggaagatgaccaattaggctcgttctcttccgcaatttaggaaaaagtggtgcttgatttgaacttaaagacacattaaccgcaagcttacggtaatgatatggtgaatatcaatggaaaatatgtatattagacaattagattagattgtattgccttcagcactgtacggaactataggaagacagtaacaggaaaaaaaaaaatattcagttactataaatgtccgcgaacgcccataccaaaagcctcgcctattaaaacagaacaaatcgtgtcactcattagctggatcggaatgaaagtgctcaatcggcatcgatgcctgattcaaacctcattgaatggtaatcattgaatggtaatctttttcgcgttgggaggtgcctccttcggcacaacaacagagagaatgccatcccttagactcgcgcgcacgcggtcctggtcaacgcgagacgggaagctgaaggtccgctgaaactcgccgacagagcgctcgctcacccagtagcgtggcttttcacttgacgcggatttggtcatttgcttttcgctggtcttagcgacctcattgcttgagctttcgttttcatcttcaacctgacgttgctttccagtgtcgtcggtgttgccagagtggtactggcgctcaacgcgacccttgatgactaaagtctgcgggtcggtgaactcgatgtcgatgtctttttgcgcgacacccgggacctcaccgtcaaggtggtaggtgtcactagtttcccgtacatcaaagcggggagagaacgatcgcacggaggtgtggtgcccccagtttctggaggccaagtggttgtcgtaatcgtccagcaggttgaagaggggggcgaagctgctgacactaggagtagtcgtgaacagggacattttgtaatttgttctgacgagatattctcagaagatagcttgagttgaaggattgagtagtagttgttggtgatactgcttgaagcttggtgaattgatacgggggatgggaagagcgtt

SEQ ID NO: 357 - DNA, 1607 bp, Emericella nidulans
atgcagaattgattctcgaagctctgagcaacatgctatctgtttctttaccccctccctgtccgagggggggtagcatccttcaacgtggctttaacccctggattgggaccacgtaggcattttaatatgccgattaagagcctcacgaggcatcaaaaacaaccttggaaggccagtactgcttattatatagtatgtactaggcaaggatgtctccttactgttgaaatacaccatcacagtaagtataaaggtgtatatagtctacagagctgtaattcctgatggttgctctagacttttacttcctattggaagattgagagctttctactatagaggcttatatattggctccaagccactcttctagcagccatgttgctgcaatttacaccttcttacctagagatagtgtgttttcccaggctctgggctgaggcctatcctgatcaaactcatgctaaggaagtcctttcttgttattattgctatacagaataacttccgatacccatgggataacctgaaaagcccctgctattaccaaaggggagattttaacatgacattcactggtcttgtctatcaactaccattgttcgagcctccaaattcaaccagccaacgagccagaatcgaccgtgccgacgagccagaatcgaccgagcctacaagccagtattgccgtgccgtacgagcctgaatcaatgcagccaacaaaccatgatatcatcacaagccagccagttctatattgcaagacccctacctttcgaccgagatacctgtaggaaggacacaagggatattatattacattggacatgggaaaagggatatagatcctttgagactatattgaggcctttacaaactatatgggatattcagcatgtacctagctttccttttgatgcttccttgcgcctgcgcagcccgagggggggtgtcggagcatgagttcctcccctgtccttggggtgcccggtctgcacagtcttagtcagcatctcattagtatttagcctagcttccttgtgcatccgcacccctgaataccagactccttcatgcttccacattttccaaggtgcacctgacctgtgtactctaaatcctttaacgccgctaatcccacctgctatgtcagctccttagtgtggtttaggtccaggatgctatgatgcaaagtaccccataaaagtgatcagttacttcagttcaagtacagttctagtataaatcgctggactctctattgtaagacataaactggatatcatgtgtatcaataaatagaaaacaatggggaacagaatagccaggaaaacaagtaactaagcgctttatatcgtaaaggattctgacccataggccgtaagcaaacaaccaaccaatcaacctctcaacaccaaccacacgacagcctgagtcaccgcatgtctaggggttgtaaggctgataagacgtctcaggataagccgtccgcgcctgcatgcccatgctccttcacgaaacctccgaatccccgtctgcagttgaaaccttggaataagtcttcccactcttaccccgagtggaccaaaccgctggtccactgg

SEQ ID NO: 358 - DNA, 2032 bp, Emericella nidulans
ccgtcggcttgtcttcccatccaggcgactaaaggccttcgcagcactgtcaggatagcagtttccatcaactataaacttcgtacggaggttgatcttgaaagcaagatagtcatggcgttttctccattgaacgctctgacatcaggatgcatcggacgggggcgcgaagctagggtatgggcagatgttgcagcaggggcagctagctaagcccgtaactgttggagctctgcactctgttcaataacgtgtgtgcgtaactgatgtaactctcgccatagagtggcaataatattttcctgtccttccatctcgtacgtagtaggtcaccttactacttccaatccagtccgtcccgttaagagtgagcaaaccctaatgtaagggggtaatatgcttgttctaagctatatactgccgtatatacaagaagggtttgctaaggaagagaaaggaaatatccagtgagtgagttgaaatagggaaagagggttacctcgtacgagtaacccataacagccctcgttgctatatatgcgctggatgtaactggtcttttgatcactgtctaccttggcaggagtcaggcctaccagcgtataggaagattgggccgtacaagaatcgatattaaaataaaaatataaactcgaagtatatgacgtaagtcaatggacaaatgtacaaaaacataaaaatatactacataaatatatattggaactgcatggctatgcattcaaggcccgtgcacgctctcattctccacatattggcgcctccactgctccaactctcgctgtccctgagaatatacgatatatatgcaggctgctgatgcatgaattgattggtcgctggctgctagttgtaaatagaggtatcccgcctgccaccaaggtattccgctttcttcatacaagatcagactggaattgctcctgctctacacggaggaatccgagaaccgagtggagcacagagaaaccgggaaaaagcaattcctaagaatggaaaagtacagtggagtcttgctggtcagtgcgggaaacactcaataatggccccagagaactgctggtctatccagcagttgattctagattacagagtgaaatattcctaagactgctatacaggtaggccgacacacagtcctagtctttacagccatagcactgcgtgcgaatttcaccgatacgtgtggagtgcgcctgaggaatgccacttagggcactagggcagaattgttgttagtccggccgtgagggtgagaggaagaatgtgctgtgtaactttcggtcaccccaattctaccagtcaattccctgctatttaccgaaccatcagttcaatatgtcgcacctcaatggctccgagccatcgcgagctcaacgcgaaaccggaggtcggtgggaggagaaaaacgtgctgtgcgaccagattaaggagatcatcgcggcgcttaacgatatccgcacgcagctggcagagcagaacaagtacctggacgttctcaccgagacatatgttcggaaaccggcgcctacacatctcgtctttgcccaggagctcgagacgggcggctgggaagagggcagcgattggggtgagtatgccgactttgcgcagggagagattctgcctgctccggggttggaatatgaagggagttgtgaacagaattatgaagggaaatataaaggggattatgaggagaattatgaagagaattatgaggagaattatggagaagagaactatgaagaggtaaaagggcgttacagagaagaagaaaaagaatccccaaaagtggattcttttcacgttgtaagcagccatgcgcgtgaagagagcactgctaactagagatcagaatgagaccgcggcgagtagaaaccagcgagaacctatcctggctgagtcgaagggagatatgcagaagcaaaagtgctactcgcttgaatcgaccggcccatcattctatctgcccctaggcctggtgatcgtgagtcggctcctgaacgat

SEQ ID NO: 359 - DNA, 413 bp, Emericella nidulans
attagactattactaccataagagtagttggaaagctcctcttaataatttataagtttattcaaaaattaaattataattagatattaaataactatattctagctgctacaaagctactttatatagtttaagctataaaaatcttataagcttttatatatatttatatatcttaagaaagttagagttattaatatagttatatctaagtcttatccagcccttaataaggtctctagagatataaaattatgtgtcaaaagtctcccgacacccgccttacaacgaaaatgtatacatacttcaacgcttaatattttgacaactataacaaattaagacttctaaatacatacaaattaaagctatttagtactttggtataccagctacaagctctataaactact

SEQ ID NO: 360 - DNA, 3045 bp, Emericella nidulans
  unsure (1)..(3045): unsure at all n locations
gagggatgatgaaagtattgagagtgatgtaagagaggatacaggttagggtgatgcttggtgaagagagaggagaggaagagtagtgtgaagggagggagcgagttgcaacggagagggtgttcccgctggaggtgtgattgaatagagatggaataggcagatgaggacgaagtaatgagagatagaatggtggtacagggaagtaggccgatgatttaaagagatagagcagatgggagacggatgagagaaggctgaaaagcggattgatgtactgagttgtatgcctccggggcatttctgtagggtggagggagtactgagagcctagctgcttagaaatacaaggacctggagtggaccatatgctgaggcctaggatgcaagaaacacaggcttattggcaccgaaaatatagtcatcgatccaccgaaagtctcacaaccccattcctccgccgactacctgaaaccctacttggatcctgctccgcggacgtaatttgatataatgctgcgctgaagcagatgctaaagcgcaaaaaatgtgcagacctgactggtgcgtcaactctattttcgccgcagtcctggtacctatcatgtgccttcggtacgatgtgcatcgctgcaggtagcttcatggtaacgtcaggcccgcaaagcaatgggtgtgatgcggttctttttccccttacaatccctccgcaccgcgttggcttggatagtcatctcatttcgtcagcttggggttgtgccgacccgcgttcaatttacatgcccggctttgaggacctctccatagcaaccgataggatgtaaactgttcaactaggcattatcatctgagctttgaaagagcacgcaatatctcatgcttgatgacaactgtggctctaaaatccagcctactgttgtcttactactgccatctattctgtcttttcttttctgccctccctcttcctgtttctttatatatcattgataagtgcacttattgcgacctttattgtttagatatggtgctttagttttttgattcatttttttggctacccgtgtttcacagtttctttggtaactcgacttggtcctacataatcttgaatcaagggccccttaagcctcacggcactaaaaggcgtgtaattgtgctttacatatatacccagctgtttctttagtgtccaactagacaccagcatttaagctttcctttgtcggtatcggtataggttgatatttggatatagatccaaaggatcattcagatgcaagaggctgagcggactccgctgcatacaaagagaataacctgtgattgatgctgaccgtcatcttgagtagtttggcgtcgctaatggagtggcgactaaatgacgggagaaaagtaggtgcgataaagggttacgcaccttgcaaaagagggatactagtacaaagacatataaacgaagcctagggcccacgccatacatgcagaggcgggaatttcaaggccttatgagtgtacaggatggtatcaattccagtctgataataaatagaggcagaaaaaagcccctccaaccgggcatggcagatcatgttatcctgaattaagtctaataaaaggtatgtacatcagacggacgaaaaatccacacatctacaagtaaacataacagaacggcccagcagtggtatcaagcagctcacgaattgtcttagcctcagcaagaacgtcgaagtactgcacatcatccaaagtcgcgttcggactaggacctcgtcccggcagtagagttggcccgtagacgacgaaagtgcgcctagccgggtcaaggttctgccaggtccagaacacacggtctatagccgcgtggtgcaggaagaaagcaggatcgcctggtgaggcatagaagtcacccgcagggtcgccgccgatagtgtaatggccgccggtgtggacgccgatgtagccattaacgaaatcgccctgcaggcgatcctggaaggaggagatatcacgatagttattgatcaggtcgacgacttcctcaactgtggtccatctagcagcgtcagggttgatatcacggcgcaggcagcgcgggttatagtcaaggccggtgccattctgcttctccacaccagggacgttaagagtcacccagagcgggccgaggttgacggtgaagctgcagatatgggattagccagagtatagggacttcgggagagaatatgcaagaaacctgggtaacacacttcttgaatgggccagaggtgacgcagccaccgncgtttccaggcttcaggaagacgccttcaaacactttcggggccatcatgaggtatgtaagagccatcgccggacatgctatattcagaaccgtcgaagataggcgagcctaagaggtcgtcaacgtatttgccccacgaccagtatggctggtagccagtatagccgcactcgttgcggagggcctgttcgtaggcccaggtaaagtaccggtgccaggtcaagaagttaccctgttattatcattagtatttccacgctggtagagtggctacgagtatgcaaaggaacatgggagcgaaccgtggtgtggattctcagggtctggttgatgtggaccgcaacaaagtcatcgtaacgagtccgcgcgccgggagcaagggcagggtcgatctttgaagggctcttagtaagacagatcacagcatcgatgtactccttccgttcttgcttggtgagagatcccctagagtgtcattagctctgcgagacattacatgactggaccaaaacgtaccattcccgacggacggcagcattgaacggggtgcattcgctatcagtataccggggcttggtaaactggtagagcacctggttcgctaaagcctttcccgccagaatatcccattcgtcaacgtccttcaaggtggccgtagcgtgagggatggcagcaagagctgccaccatggtagtcaaagagaagcgcatattaatgagtctgcgattctgcaagatgacagagaggcaaagccg

SEQ ID NO: 361 - DNA, 1846 bp, Emericella nidulans
gccgcatattacgactcactatagggatctggacgtcgagtcccttgccacccagcctgtcttccacttcagtagctgcctgtttgatagatgtctcgttggtgacttcaagcttgatgacgatgacccggcctgcagactgcttggccagctcctccaactcgggagactgggatcgagccgtcgcaaaaacgatgctgacttccgagacaggcagagcagagagcctttggacgaaggcaaggccaaggcctctggaagcgccggtgacaagaaaagaagacatggtaagaggaaatcagtagtgcgcagtgaggaagacaatgaatgggaagaagtagatactgtgagcgaagagcaagcgcaaccccaataacctgcagcgagagcgagcgccttcaaaagcacttagagctagacgggccctacgcacttattgacttaaggaaggtccggacataagaaacggatcaaggcttaaagccatacaagccatgtggatcctaactactccaaccagcggtgattacaagaactcaccttcattagtaataagacagctgacaaatgcaggatatagccctatgaacattcagcagaaggcccgtggctctggatgaaccgttggtgtctgcgccagatcgtatctcacctgtagtgccgcgggcgctgacggggaggttcaagaagtgactggagttgcaatgattcattttcgaactacggtagttaatgccgtgcttactgacgacagaatgacagtgagggctcaatactgactatggagtataacatcgacgaccttttgaggctgagatatatggtaaaacgacgtatagtagaaagtcgccaacccatcgctcgcaatatcgcaattgattttgacgagctaattgagccagtccgacgcgtctcgaaagcaaatggattgttgataaagcgagacaggtcctgttcagaacgcagccagatgactttcagtggtaccctgttgttgcagggcctttttccagcgtaattcatctattcgcttgacattatttatataatagaaaaatgacaaataaaacctgaagaaaagtaataatattgaaagtacttagaaagggatattaaatgataataataatacaataaataagaagagaaaagagcaaaagagaggaaaaaaaaaggttgactggccgctgtcaatgaggcacactgaattaggattacactgtttcatgttaatcccattatgtccgcagactagtcgacactgcagcagtaagctttgctcttgaaaacatacaggctcttcggccacttgctcaatctattgtccttgacgcttttccctcaaggtttatccgctttttgcaaataaatggatgtcccgtcatcggccgcattgtggtaggcatggcacggcatatggccgatgaagggcaaataatcatatttttctgctagaatacatcaaatacatacgaccatagggtgtggaaaacagggcttcccgtccgctcagccgtacttaagccacacgccggtaggttagtagtatggtgggtgaccacatgcgaatccctactgttgtatgtttttctttttggcaccactaccaacgcgatatgttgaacgagccctatgttgctgctttcagaggtgatagacactaagccaaaggtgagtgcgaatgagatgggtgagaacaaggtgaggaaatcacccacttgagcgagtggtgtgagaaggctgagaactgactttagcccactacacttgttctcggtatttattatgtctattataattgtgagggctccttcgatttctggccatgaatccacccacagcgccc

SEQ ID NO: 362 - DNA, 1300 bp, Emericella nidulans
caggaatagatctggtaggagccatggcagaataatagcataatcaggattagattattagggatattagccaagctagcaggatatatatacagagcagcaggcaagcctaataatagcaggtagatacaaagccggcagcacagctagtagtagacaggcagagtatatccaaggtagagcatataagctagatccaggcggatataggccagaaacaggcagataggccagatataggtagataggccagatataggcagataggccagatatagatagatatagccagatataggctagatacaggccagatatagagcaggtcagccagcagttaaagccagttatgtaatagtcaggggttagattattgcagttagagcaccaatccaacagcaggtaagatcatggcaggttatggccaattagggcaaggcagatcagcacagcacagtaggagcacagccaataattatcagtgccagggccagctagatacagaggccaagtatatgcagagggcggcagagcagatagcaagtccactaataggcaggcagggcagccagtacagaggcagggcagcaggagcagaggcagattagaggcaggcagggccaggtcagcagtagagcagaggtaggcaacaggaaccaggccagagtacagcaggcagagccagcagagtacatagcaaaggcagtggttggcaggcaataggcaggcaaggtcatagtcagggttagggtcatgcagtagttggcaggcaataggcaggcaaggtcatagtcagggttaggattattaggttataggccaagcaggcaggatatatatatatagagcagtaggcaagcacataccaaggcaggcaggcagaccccaagccagttcccagccagatacagggcccaatgcaggcaatcaaggcaggtcatgtcatggtcaggttttagttattacagttcatggccacagcaggcacgggcagcccataccaagccaggtaatataatgccaggtaatatgatgccaggtaatatcatgccaggtaatatcatgccaggtaatatcattcccggtttatatcatggtcagggtttacattgttgtggtttatagccagcccggcccatacacagccatccagaggaggaagaggcaacagagccaggccagccaagcccagcagagcccccaagccaaccagacccagagcccgatgcagggaaccagagccagcatcaccagtaagaatcaggggcatcatgccgggtcatgtcatggtcagggtttt

SEQ ID NO: 363 - DNA, 669 bp, Emericella nidulans
  unsure (1)..(669): unsure at all n locations
acgacaccccaccccctncgacgacctccatgtacgcctgtatgtgctcgaactcggcgtccgacacccggtcaacccacggatcaaggtcgtcccagccctgggggtgcacgatgacggccttgcttgccaagccgtcgcgccctgcgcccactctcctggctatagtcgagcagcgtccgtggccgacccagatggatcacgcaccggatgtcggggatgtcgatgcccatgcccaaggcgctcgtcgcagcaatgatgcgggtctggctgctctggaaccgttgcatcacccccgtctggtccagaacagcactgtggtacgcctcgcagcccagctcgcagctgatggcatcaacctggctcttgatgttggcgtacacaatcacctggccatcaccagcctgctggatgcgctgctggatgaatccccgcacgttgggctgtgtcaaccactggtgtggcttgcgagggacgcctcggggcagcgacggccgaaccatgcgatacgcgacattgcgccgacttgtccgcgcgcgatggatgccaacctcgctgcgttgatgcttaatgcgtcgcaggaaccgtgcttcctctatcgggggcagcatcgctgtcaaaaacaccagctgcgtctgggcactgacaagacgccaaggcgcgccattg

SEQ ID NO: 364 - DNA, 6297 bp, Emericella nidulans
cgggtatcccatccgctttaaaagataactgggttgggccaatttctctccagccaaaagccgcaattgggtaaaatctccctctgaaatcaaaaacaaactcctggcttcaacttctgaactccaaaaaagttctctcccgaaatatgttacaagccaagcaactgtgcgggaaggaagaatagtcaggcatgaaaacagtatccccggcagttaagctgccgatcataaaacaacccaacgggtttctacaaacatataaaaggttttgccgtgcggcgctctgaatgaatttcggctgctcatgtgtatcctgttgggataatagctctagaactctgccaccagtggtgatggcttgtacatgggatcagattgcaaaacatacagactaacccagcgaccaaatagattcagcggatggtgccccgcacatttagtatgaaatgtaaccctttgctttcttttgttcgtatccaatccaaatgctctaaagtaatgcttctccaaccacaatactgcagccaaggggagtttaggctaattttctttaaataaccggctttggagaaaccccgcgtcctcactattataaatagcttcacaatgctcttgatctatgacaacatgcagttccacagcatctgctgtatttccaaatatgccacccctctgcaacccgattctccccggattcaacgcggacccctcgatcgtccgcgtcggatcagattattatgtcgcaacctcgacatttgaatggtaccctggcgtccagatccaccactccacagacctcgcaaactgggatctcgttgtgcgccccctcaccagagcatcccagctagacatgcgcggggctcctgacagctgcggcatctgggcgccgtgtctcacccacgatggggacaagttctggctcgtgtacacgtacgtgacacgcaaggacggctcgttcaaagatgcgcataactacattgttacagcgcccgcaatagaagggccctggtcagatcctgtgcacgtgaattcgtcggggttcgacccaagtttattccatgacgacgatgggaagaagtggtttgtaaatatgctctgggatcatcggcggcgaccgcgcgcgtttgctggaattgcactgcaggagtttgatcccgtctctgggaagttggtcggtcctatgaaaaatatctttcgtggaacggaactggacctcgtcgagggcccgcatctgtataagcgcaacggatggtattatctcctcacggcagagggtgggaccgcgtacgagcatgcttgcacgcttgcgcggtcgaggagtatctggggcccgtatgaaacgcatcctcagacgcacattctgagctccaaagatgcgccgtttgcagcgctgcagcgtgccgggcacggcgaccttgttgatacgcccgatgggagaacttaccttgtccatttgacgggccggcccgttggacagagcaggaggtgtgtgcttggtcgcgagacggctatccaggaagcgtactgggataacaatgactggctgtgggttaaaaatgggcctgtaccttcgctgtacgtcgatgtgccggggacccgcgttgagaagcagtactgggtcgaacggcgatatacgttcggagatggcacgttacataaagacttccagtggctgcgcacccccgagccacagcgtatattttcgatcgagaacggtgctctgtcgcttataggccgggagtcaattgggtcgtggtttgagcaggcgctcgttgcccgacgccagactcatttctcgtacgatgcagagacagtcctggcagattacacacctatcaatgagcgccagtttgcgggccttgttgcgtactactgccggtacaactttttctacctcgccgtgacagcagacgaatacggacagcgggaaattaatatatttcgatctgaagcctcgtatccggaaggaaaactcgatactccagccccggacccggttcgacttccaaatgaggggagggtcaggctggcactgagcatccgaggcggactgactttgcagttcttttatgcccttgaagactcggacttacagccttttggaccagtctttgatgcgtcgatactatcggatgaatgcggagggcatcaagcgcatgggagtttcactggtgcatttgtgggcatggcttgctcagatgtgaatggcacggcattgccggcgaagtttgagtcttttgtttataagcctatcaaggatgttgctgatcgatatgaggtttgaggcgatggttttatacaaagtagcctgtattcctttgtgccacttacagaggtccaattgctaggatgccaaagaaacatttaatacagcgccaaagctacctttctaccgggtttaaccagtatcgtccagcgcataaccaccaataaatagtattacagtggccacccgcctcccaaaaggcctaattcacgagtttttgctcaactctggggcttagagacaatattggattgaaatttgagtcctcgggctccttggtctaggtctaacgtccatgagctcttggtcacggcgcgcagagccgctaaaaacgttctaaaacattccatgccagctgttatacacttaacccgatatcgacagtctacagcccattccaataccgagagacctgaacacagagaggtgcagagagcatgttccgttcgccagttcccacaacctcaatggcatatgttcctttttcactcagccacgcggagcgggccttcatcccagaaactagttgcaacccccatgggaacggtaactgaaatctctttggtctccccaggatgcagcatagtcttctcatatcctttgagctcgcgcacaggacgcccaacgctggcagtggtaggtggccgcacataaatttggacaacctctgcacctgcgcgaggaccagtattggtcacccaagccctgacgctcatggatgacttactgatatctgatgcctgagggtctgtctcttgcacattgagaccggacagtttgaaagttgtatatgaaagcccgtggccaaagtggaagagcggcgcttgtttgaccttatcgtagtaacggtatcccacgtagacgtcctcactataaaggacccttccacgctccgagcggtagcttagatacgaagggttgtgcgcgatatcacgggggaaggtgagggggagtttggcggactagttgtgcatcgctggtcagttaaggaaagatagtttgatgattccccaaagctgcggttcacttacaggattcacgtcaccaaagagaacatcggcaatgccattgcccccctcgctgcctccataccaggcctggactagggcctttgcttgatcggcccagggcatcgtgactggggtaccactctgcacgacaataaccgcatttggctgagcctctatcacagccctaacgagattatctgtccccgggggaaggtccatatggggtcggtcaaagccctcactctcccagttaccattcatccccacgcacacaacgacctgctctgtctctgctgctagctgtactgcctgcttgatagcagtttcggcgtctagctttcggcacccgccgagccgtacgccacccggaccaaacgagactacaccgtgatgtttcaagttagaagtcggggccgtgctgtactcaacaaagacgtgatgttgccttccggcctcgaggtatctctctccccgctcctccactgttccaataccaaagaaggatgtgccatgtcgttgcttggtcttgttatctatgaccagttcaccgtcaatatacagcaatcctgtgccggccacggtgagtcctaattcatatacaccactttcggttggttcaaacctcccctcgagcgttgcgtagtaggtgtccccagagattttgggatggctgtagtccatcaagaaagcgcagctgttggtcatgtgcagcacatcaacaggctggcggtcctcgtaggttgcaggctcggtatagacccggaacgtatacccgcgctccccagtctctgttttcagatggtcgccaagtagcggcagctccttgtgtccgtagcagccctgtgagaagaccacctcctcgcacttctctgcgatcccttgtctaggtgtgaccgtataatacgccagcagtgacgccgacccacccccgcaataggcggcgatatccgcgttcggccctataacaagtgtctttttccgtgggtcgagtgggagtacctcattggcgtttttcaacagcacaatcgaatctgctgcggcttgtctgaggagcacacgatcctcaactctgtccaatttttgagcgggcgcatactcggggattccagctctggaggtgagctgcactagctctagcaccttgcggacgcggtcatccagtgttttctccgacactttgttggaggtcaaggcgtgcatcagtgctgggccgcgaaatcgcgttggcccaggcatttcgagatcaagccctgcattgactgcactcgcgacgctgtaggtaccaaacctggacgttccaatattagcacaaggccaaaaagaataaaagtcaacaaaccagtcactcattatcaacccctcaaacccccattccttccgaataatgtggtttaacaaaccaggatcctcgcttgcatgcaatccgttcaccttattgtaggaagtcatcaaggcgcccggcctcgcgttcttgattgcaagctggaacggcatgaggtaaatttccctcagcgcccgctcggtcaccatcgcactgaccgcaatccgctcatgttcctggtcattgcaaaccagatgcttgagcgttggaactatcccaagatcctttacgcccgcgcagtagcttgccgccgaattccccgagagtaccggatcctcagaaaaagattcaaacccacgcccacctaacggcccccgctggatattaatagtagggcctagaagtacgtgtgcgcctttggccttgcattccgctgcgagaagacggccgagtttgaagagaaggtctgtgtcaaacgttgcgccgagcgctgttccgcacgggagacaggcggaggggacgccattgaagtagcgcgtgccgcgagcaccgttcgggccatcagtgattcgcatcgccggaatgccgagtcgtggaattgcgaaggtgtgccaggcgtcggtacctgtataaggcgtcgagttagttgcgccgttatcaatcaggcgtgtggagtgtaggacgtgcctgagagcaaggaaaccttctcggtttgggagagttgggaaatgatatgatcaatggccagttcgcccatactattagtatctatggaacccatggtagtattgcttcgttgggctctccgactagggcggaaggcagaggtaaaaccagaaatatcgaaggcaggggcaggctaggagatgtgagctttatataaactgtatgatgaagactcatacggtagttctggcttagatacagatgtctcagacgacttacccagttgggcggtgcctgcgcgagaattgtaacggtagtagcctcttgacttgcagtccctcgaacatcagctccaccagctctggattaaccgatacatcgcgaggttttcgtcaagctaaggcagaaacccagctgtcatccgccaaacatggaagtgttcgcatagatccctggaagcattgccagtacgactggcaggggagcagtgctatggtgggtgagtggcgctattagtgcatgagtgcctagccctagatcgaagccgcggaatatcgccttttcctctgattcgtcgcgatttatgtcacctggactgcgcagttcccaggtatgcatgatccgttgttctcaaagggaaaattaggactgggagcattgagtagcatgttaaaaagggcaccgtactgtgtactgagtgcgcgaatttgccgctcagtctgcttacagcctaatatatgcaacccggtaaacaccgctgtgctctcttcttgtactatcttcaactgagaaatacataaattacaagagccaggacctggacaagaatgctggtatataagatagtagttcttttgcgcgtgtttctaccaccggtttagcttcgacttttacaccagggagcagtggttgataaaaatagaaccatattgattagtaacagctacttcaaagtatctcattgtgccagcataaacccagttgggacatgggcgaaaaattactgccagatacaggcccggtaagaggttaga

SEQ ID NO: 365 - DNA, 590 bp, Emericella nidulans
  unsure (1)..(590): unsure at all n locations
aactgccacgcggggcccctcgatcttagttattaagatctctaatatcaaattttcttctaatctagtaatagactgaaatatagttatgttagatattatctaggggatgatgaagtatttattatattatctattatatagactttcttagcaaacttataaccagggttaaagaagttaacctagtaaatagtctatattatttatcttataaatataaatagctattatttataatgaactagtaaactatactttgcatagccaggtagttaggaataaataacataattacatatattaataaaaaagttagatactttatataataaatatttaaaaacagaaactttacctagaaggttagtaattaaattactactagactaaagaattaaagttaaccctcatatctagataataaatgtgatgggcctctaataactttaaaaagatctttacttattattataagcctataaaattagctattattaccttctaatcttagatagntagtaaaactatttaatatctaaatttaactagatctataaatatttaatattattccaatctatatacct

SEQ ID NO: 366 - DNA, 1346 bp, Emericella nidulans
aaaaaaactaaaaaaaaaacagaaataaagaagaaatagagagacaagacacaaatagataaagaagtgaggaaaagaaaagaaacgaaaattggaaaagttgcttcccatttttcacactggagttggtatggggcctaacgtacgagcgctagcccaacgggcgtcaggcactcaagtacgttctaggctaacaacggcccatgcgaaggattaagtgagttttcagcaaaataaaacagagtcctcggctaaagtggaggatgactcgatacagaaccctcttgtcgctaaagcaccaagtccgtaatatggttggactggtctcatgtatcaagctcaatttagggttcctctcggtcaacaaactagcttactatatcccaacagtctgagtaccgtatcctacgggagtggtctgcaccgagtcggctagccagctctgcctgcagataccactacatagaaagtaacgctcttgatcctacacgagacctagcaatgcaacaaagcgttttaccacgcgatgcaacacctctcctcggagatatacatagtatattccgacgcactggcaaaaaaaattttcacctgttacattggccgcggtcagccctgataggccactataaattggcaagttgtcaagcgtcagcactttaatcctttagaaccgtctcaaaccatgcatcctgcagggagtgaaaaattttctcccaaacatgtgaagaaacgcacgctaaatgggtaggggtgctaagccacaagccacagcgtttttgggtcggttatggggagcgaccgaaacaaagtgatcatgaatcatgagtgggaagtagaagctgggggtgggtcgatcgaaccagtcccccctacggggtcggactgttgagaccgggttctggaataccgacaatatcagattataaattatatgattaatatacgctactaagcatcatgaaaaatttcttgtcaagcaagtcgagaatagaagcgaccagaatctttgatctctgaagccgaaggatatgaaagggaaaataaattaccgtacctagcgatacagaacggcgggaatcagcgaccagcagccgaattccgaggagtgtgtcggccatcgggcactccgcacatgcctaagaagtcaggctagccaactgactagtaatctcactagtgctttgcctagtgctctgactattgctcttactagtgctcagcctagtgctctgattagtgctctgtacaggtttagatgctttacaacgccgatggagacgacgactttttctagcgttgttcgagaagccttccttttcgcttttttcgcccgtgcgtgacca

SEQ ID NO: 367 - DNA, 2077 bp, Emericella nidulans
  unsure (1)..(2077): unsure at all n locations
tcttatccaaccgcatatcatacttctacaacctgcacggtgcaagtgccaccgttgacacggcttgttcttcctccttgtttgcttccacctcggcaaccagacgctgcaggccggcgaggcgtccatgtccattgtcctgggatctgcgctgcacttcgaccccaacatcttcattaccatgacagacctaggtatgctctctactgacggtcgttgccgagcatttgacgcagacagatcaggctacgtccgcggcgaaggcatctgtgcgattatccacaaacggaagagccaggccgagtttgacggcgatgtcatccgagccattgtccgcgggacgggcgtgaatcatgatggcacaaagcagggcattacgttgccatcgtctgagtctcaggaagcgctcattagacaggttacgagttctgcattgtatccttaagcaatataggggcagacagcacagaacactgtcgaggacttatttccgctcaagaaggaccagctgcctccatgggccaccagaagccgtatcttggtttctccgagcttcaggccaagagtgtgagatcccttgtcccacgcatgttctacgagcagattcactcattagggcttcagtacggagtaagctttgcccttatgtctggagggattaagagtggttctgtattcgcaacagcaccgctcaggtggacatcacactggttcaactccgcagcaccctcacatgcaactctgatccaccctagcctgctcgatgccgcattgcacgccatctttgcggcagtggaaagacggacggggcagccaatcaatgggccctatgtcccgactttcatgcagtcattgcaggtctccggagtctttgccgatagggcaacgtgtgcctgcaagctggtgaccaaaccggcaggccgtcgctcttgggcatccagagtcttgagctgactggcttttggagccgcctcggacacgcccagccgccccttgttcttccgcacgaaatgggacatagcatttgagttcttggataggctacagacgccgatcctggatgaccaggctcgcttggtagatctttgtccaccagttcccggactcgaagatcctgcacatcacctccagacctgaaccgtcgtacagggaggctttgcagttcctgggtggtcgaaatggtgagcagcggcggttttgctccctgacgctactgcaaatggctgctgaagaagtaatcagctccactgagcagctgcagttggaattggcgtctttggttaagctcgaagagctcaacgagggtgaatatgatctcgtcattttagacgatgtcgtagtcccactggcttacgatatcaggaactacctgaaacctgatgcttttgcaattaattcgggtaagcacagctctatgagcaaaagagaagctttcacaccagtcttttcgcctgcaagataccatgtctggagaaaagatagtaccaacccctttcccggcactgagctggctctggccacagcagcaaattcaagcgccagaacagttgctatgacattcgccattgcctcagctcatttagagagattgttcagggtattttttgacaagcttttcaagataaccccagtcccaaaaaatatcgtcatccttgctgccttagacaagaaccttaagaactcgaggagttcaccgcgaggtttggctgatatgttcgttactgagaagaatatgagggtcgagacaaacattacaataaccacggcagcctgatataaaataaggtactttttttttaggggggggcccccgtgttaaagaccccccacattgggcttataaatattgagaaaaagggggtctagggggggccccaaacacccttcttggagaaaaaaacaatgagccctttttcccccccggggggtgtagaaaaatatgattttaccgtccctttaattattctttaagggtaaatatttcttttttctctaattacgccttgaacatatggaaggtggttgtttttttacaaaantaaattatttctattttatatttcctattttcttttaa

SEQ ID NO: 368 - DNA, 1809 bp, Emericella nidulans
tccaggttctcctagttagcccttctcgctctagctctgagtcccattctccactctgtcctgtggttgaccaaccctagttagcaataaatccagacatggctcttaccgtacttaatcacctgacgcccatccccacctgacgcccgtttttgacgaccaccacaagtagaaaaaatgaagtttttgaagcagatacagacaatattatacaaagatcttttgtcagacataatatgacatgctgatagagctatgcatatctttcaagagtcgcgaaagtgtgtggaagccggatctgccgtcctcgacgattgacagtggtaggggtttctaggacagcttcagctgctggaggtgatcgtttctgtttttttggagcctttggtgttgctggcagcttaggtctcctctgcttaacagttttgatatcattttgaagctgtatctcagctcccttggctatacgagcctcctctttctggtgctccttctcaagcttcttcttctctgcttcctgcaaccgaatttgccgttctacagccttcattctccttctctcctcagtaacttgctgcttctcttccttctcccgctgccgatgcagtttagcctcctcttttgcagctttagcttgctggatagcctcatctttctctttctggaggtcacgcgcctgctggatcttcctaggagaataaaagactgcatttcctgcctctggtgcctgcaactggaatataagaggctttccacgctgccgtcttttcttttcgttaactagcgcttcctcgaggccttggcagcgtgccttgagcaggatattctctgtagagaggtaatgcattgtaaggcttaacttcttggtattttcatcatgcaaatccgccaccacctttttaagaagcctctcaatctttctccaatcctctgcttgcagtatagatcgtgaggattcactggaggaaggtctttgtgttgtatcctccctaaagcgcgctaatataacctcaggattgaaaggtctcagcccagttgatctccataaactcttaatatttgctggagataaagctttgttccagcttgcccaaaagagcctgaagaagtctcattttgtaattgcgctaaggccttgagaagcatgcagaaatgcttctaactcgtcactataggccttggatagaggagagaagatcccaacatcaagaggctgcaatgtatgagttgaatgaggggggtatgtagccaggaggatcttatttgctttgcagtagtcaagaaacttcatggtgatatgcgagccatggccatccaggaataagagcctccaacgcctccttgcctttgctttggtctccctgtcaaagatatctcgaagccatgccagtcctatctcatcattggtccatccagaagcggaagaggtaaagaagcagctgtgtgttttatattggaagtcttgaagccaggtatcttgtagtttgtttgcagcagattgatagacaaggcctggagatagtgaggttccatctgcacaaatacaagcaatagtagttatctattcatgatttccatcctggagacgctgcttggatccctcagcaatataggactccttagagaagattcttttgcacttggagagaatcctaattaggaaacccttctcatccatgttgtaggtatcctctggctggatatcatattcctccatcttctgcttcagagaatcaaaatatagcgaatatttaaaggcagaatcagccttcttgcgtgatgaatcaatgccagttgtgtaggcactca

SEQ ID NO: 369 - DNA, 1040 bp, Emericella nidulans
agatatactggagcagttctgggcccactgcaagacgcaacccaatcttccaccactcttactcacgcaaacccacgctctagacaggtcgattgagggtctgtaggcgtttcatagaattgactggttgaagtacagtgcacagtcaataaagaactattctttcatggtacccgttttccggcgtagagcgttaggatctctgtatgatccttttccagagcgaggtcttctgcggtacgtcccatgggatccttaagatgggtgttagctcctgcatcggccaagaaaagcgccatctctgtgtatccatctgtagcagcctgatgaaggggaattcccatatcattataagactcgtcacccgccgggcctttgatcccgacttcatcaatatcaggcccctttgagaagggatattgtaccatatctaagttattatcaattgctgcctcaacaattgcattctgtccttcaactgtgctccataccgagacaacaagtctaccgtcgcgaacctaccagtgtagacagcacatgccagtgcactcagatttttcaacaagattccgattggggtctgcaccgtgtccaaggcagaatctcacccagtcaagctgattattgggggcctttgtgtcaagaatatttttcataccaaagcacatagtaattgatatcgaccgcttttattcgacttgcaaacggtaagtaaggagttgttaacaccaccgaagtattaagcctggtgagctactagcatttcccgagagtagctggaatctggcccttggagtctggacggccgcaaacttaatagtggttgatgttttgtacccttctcctctgtctataatcctcaaggttctgctctttctaaaaaggccggcccctctgccccagaggggtcgtaattaatggctgtctttgggttcagggcgctctctgtgggaatctttaaggcaactctcctcttgtcttgtttccctgtattctctttgcatcgtaaatatctgtggcaccttctacctaaggtattc

SEQ ID NO: 370 - DNA, 1237 bp, Emericella nidulans
gggtggtcgccgtctgcaccaccgagccccacgagatcgaatgggcgaagagcaatgccgagtacaccgaattcggcattgcagtctacgacgactacgacgatatgctggcgtcccaggcagatcttcacgcggcctgggtatcgacgagcacagacgttcacgcggttcagtcattaaaggccatcgagaagggcctccatgtactgtgcgagaagccaatcagtacggatctagcgaaggtatctccctccttcacaattcttctcctccaattactcatcggaccacggcaaataactgacggggacgcttgttgtgactaggcgcaatccgtcgtcgatgccgccaaagcgaacccccaactcaaagtaatggccgggttctcgcgccgcttcgatgcctcctatagggatgccgcacagaagatccagaacggcactattggcagcccctttctcgtgcgatccaacacctgcgacctgaaagacgaaacaggcttctttgtccgttacgccgcgcgtaatggaggcatcttcgtcgactgcgcgatccacgacatcgacctgacgctttggtatatggataaccccgtccccaaggctgcatgggcagcgggcaccctacagcaccaccccgaactcgcagaaaacaatgacgtggacaatgctgttggaattgtcgagttctggggcggcaagatcgcctacttttactgctcgcggacgcaggcgcatgggcacgatgtgctgaccgagattacggggacagacggcaagatcatggtcaatgtaatcccgcgggcgaacaatgtggtcgtagcggataagggagggatgagacatgaagtacagccggagtactggcagcggtttgagcatgcttttgccctagaggcaaacgagtttgtggatgctgtgcttcaagataagcccgtgcctgtcaacctggagacaggcatgacagtgatgaagatcggacaggcgctgcagcatgcgttactcagcggagaggttgtgaagtttaacaagaacggagagagactcaactaggtctttattacttcacacctatttaggcaaacgcccagacgatgatccctagtagcctgtgcgtttggagtctggattgatgatacaggataagagagaataggttgatagtacctacagagcacatacaatggcggattgatacatctcgcgttatagcggcagctatttcaaagaactaggat

SEQ ID NO: 371 - DNA, 1794 bp, Emericella nidulans
attctgccgtaccctgaacttgatggccaaatactctggtgcgactatgctgttgccatctaccaggcctctcagagcgcttatgatgtacgctgaactcttccatttcgcatgttctcttgctaatctagccacccaggtctttgacaaggtcactgtcttgtatgaaggaaggcaaatctactttggtagaacagatgatgcgaagcagttcttcattgacatgggcttcgaatgcccagagcgtcagactactgccgatttcctcacttctctcacaagccctgcagagcgaattgttcgaaagggctatgagggccgcgttccacagacccctgatgagttcgcggccgcctggaagaacagtgacgcttatgcgcagttaatgcgggagattgaagaatacaaccaggaattccctcttggcggcgaatctgtcaacaagttcatcgaatcccgcagggccatgcagtcgaagaaccagtgagtacaaattgctttagttcactccaggtaactaacactcaaaacaggcgtgtcaagtctccatacaccatgtctgtcatggagcaggttaacctgtgcatgatccgtggtttccagcgcctcaagggtgatgccagtttgacactgagtcagttgattggaaactttatcatggctctggttattggtagtgtgttctacgacctcgacaatgacaccggtagcttctactcccgtggggctctgctgttctttgctgttttgctcaatgcctttggtagtgcgctcgaggtatgtcttatcttgcgattatttttgagcttggctgacagtcttcagatcctgaccctttacgcacaacgccccatcgttgagaaacaagcacgttacgccatgtaccacccgttcgcggaagccattgcatcgatgctgtgtgacatgccctacaagatcactaacacgttcacgttcaacatcccactttatttcatgaccaatcttcgtcgcgaacccggcgcgttcttcatcttcctgctattctcattcgtgacgactttgacgatgtcgatgctgtttcgtacaatggctgctacttcccgtaccttgtcacaggcacttgtcccggctgccatccttattctcggccttgttatctataccggtttcactattcctaccaggaacatgctgggctggtcgcgctggatgaattatatcgaccccattgcctatggattcgaaagcttgatggtgaatgaattccacggccgcttattcccctgctctgagagtgaactcgttcccagctatggtgatactgccaaccgagtgtgtgctgttgtgggtgcaactcctggtgaactgatggttaacggtactacctacctccgcgaaagttatcagtacaccaagagccatgagtggcgaaatctgggtatcatgtttgcgttcatggctttcttcctgttcacctacttgaccgcgactgagtacatctccgaggccaagtccaagggtgaggtgttgcttttccgccgcggccaggctcctcccagcgtcaacgatgtcgagacccacagcccagcaacagcaggtgaaaaggttgatcagtcgactcaagatgttgccaatatccagagacagacagctattttccactggaaggacgtttgctacgatatcaagatcaaaaacgaacccaggcgcattctggaccatgttgatggatgggttaaacccggtacttgcactgctttaatggaatgtttggtttccttcatcggggctattgctaatttgatagggagt

SEQ ID NO: 372 - DNA, 1636 bp, Emericella nidulans
aatcggtattataagcatctcgagaggaccgaggaggccgtggattgaaaagagaatgaatgacgaagttgaagccactgtgaaagcgcggcagaatattccactcaagcggtaccccacaggcggtgagatgtcgctagctactgtactataatactaccagcaatggcccatcactagctactatccgtgacttccagcccacccacaccgcttcccgctgtgggtgagccacaccgtaatttccaaccacagcgtgattgccaaatttctatattttgacgattctaaacatttcattcacccaacatgctgaaaacctctaattttgatgaatcttgcatggttgaggcctgcaaagccgcctaagctgaagaaaaacccaatatcaccttgattgcacgtgaatatggcgttccttgtcggacactacaaaaccgcgttaggaagggcagccagccttgtacagcttggaaactagtcaataaggcacttgagaggtatcaggaggaagccttgatacactagataacctttatgcgtgatatcaacatgccagtgacacctaggctactagaggaataggtaaatcgggcacttaaacgtgctggtaagcctgaccaacaggttagcaagatatgggcatatcactttgagagacggctcccaaggcacctcaacctaggcccggtgaagcaagaggcaaaggaatcaaagcatatcctggctgaggatgcagggttgttagcacactggtataatcagctagcaaatatggtcaaagatacaccagcccggctggtatataactttgatgaatatggcttccagcctggcaaaggaaaatcaaggaaagtgattagttcaaaaggtactcctaattttgctgaatctgagaagggtaagaatattacagctattaaatacatagctgcagatagctgggtaatagacctattctttatctttaaaggcgacggcatcttcatggaatcttggtttggtaagagtgaggctttattactatatatggtaatagctacttcacctaatagctggatttcagataaactagcccttcaatggcttcaatattttattgaggcaacaaataagcatacaaaaaggggagagaaacagattcttatatttgatagtcatggcttataccttaccattaaattcttgcaaagatgcaaagataatagcattataccctttggattccttcctcatacaactcatctttgtcagccattggatgggaagctatttctaagttataaataatactttcacaaaattagtaataatctatcttactgggccggcgagccagttaggaaatcagaattcctataagtaatcagtccggtacaggagaaagcctttaaccaacaaattatctgtagagccttcaaagatcatggcatctggccagttgaagtagaagtaagatagtcgacaatcttactatcctagcatgggaacaaatcccagatatctacatgcctgatttgtcaacaccctctctgccaataacagctatattatcatctagtattaatatcttgcctccaaggacaattcagagccttgagaagaactaggcaaagatatataaacatgcagatct

SEQ ID NO: 373 - DNA, 1558 bp, Emericella nidulans
ggtggacgatcgaaggaccgctctcatcgtactcctgcttggagatccacatctgttggaaggtggacagagaagccaagatggaaccaccgatccagacggagtatttgcgctcaggaggagcaatgatcttgaccttcatggatgagggcgcaagggcggtgatttccttctgcatacggtcggagataccagggtacatggtggtaccaccagactatcgattcgttagtgccgcccagtgcagtagagcgaggctaagagtgatacataccataacgatgttgccgtacagatccttacggacgtcgacatcacacttcatgatagagttgaaagtggtgacgtggataccaccgctttccagaccaagaacgctgggctggaagagagcctcaggagcacggaagcgctcgttgccgatggtgataacctgaccatcaggcagttcgtaggacttctcgaggctggagctctgagaagcggtctggatctcctgctcgaagtcaagggcgacgtagcagagcttctccttgatgtcacggacaatttcacgctcagcggtagtggagaaggtgtatccgcgctcggccaagatcttcatcaggtagtccgtcaggtcacgaccagccatgtcgacacgggagatggcgtggggaagagcgaaaccctcgtagatggggacgacgtgggtaacaccatcaccagagtcaaggacgataccggtggtacgaccggaagcatacagggagagaacggcctgaatagagacgtagaaggcgggagcgttgaaagtctcgaagacgatctgagtcatcttctcacggttggacttgggattgatgggggcttcggtcaagagaacggggtgctcctcaggagcgacacgaagctcgttgtagaatgtgtggtgccaaatcttctccatgtcatcccagttcgtgacaacaccgtgctcaatggggtatctgagtgtgaggataccacgcttggactgtgcctcatcaccgacgtaggagtccttctgacccataccgatcatgatactaattcggacgtcagcggccacatctctgttgatggagatacagttaagggatatttacccatggtgacggggacgaccgacaatggaggctgtgcagcatagttagcagccggtctcacacttgacatgtaatcgcatgatagagtgatatgttcaccgcccttgagaccatcgtcgtgccaagagcgcggtgaacacattttatcgagtaggttcgatgacaggggtgacaggttcacgggggaaggaaggggttgtatataagggaggaaagggtgacttacggaagacggcacggggggcatcgtcaccggcgaaaccggccttgcacatacccgaactagggaaccccgagtcagcatatcaactaatccatgtattcatgtattctcgacgcagaacagccgtgctaatcgctctgaatagctgcttgccatagcgaacgccaatgcccaaccaagataccaaggacgagtaggtcgttgcgaccagcggcgagaccaggcgagt

SEQ ID NO: 374 - DNA, 3855 bp, Emericella nidulans
acaagcagtggagggaccaacgcgggttcggcaggtatacccatttgcataagagggcgagcaagctctagtgttggggtttggagttgtagtgtatattttgtatagtgtgtatattttatcttctctgctgaatatgtataaagggtatataggttacacagattgtatatatggctttcaaatcatcataccgcatcagcagcagaggctcgatgacgataatacctgtctgtcgtctctttggcttctacgctggccagttaggactttcaacctaaattctcggaaggggccgatttggctacgacggcagtttgcgagtaagcacgataacaggatcccggatggaatgctctaacggccaatcgctcttgatccgcctttgcgtgctaggtcggcggcgaggggaacattgacaatattcctgttcgagctggccatgcaactgaagaaaaggagacgcttgctggatgctgtgtttggatgttaaacgccgcgctcctctcccgtagttccccaagtggaagtatatcaagttcaagtaggaaactgtctagaacgtcgtaaacaaaaaagatggctgctcgcgagcaacggcaaatgtagaggttgactgcagtgacattattctggcatttgagctctggaaccgtcgcctggttatatttgaatttctactctgttcgggtatttgggctctggagactgtattatatgttaggcgtggtaggtttacggccttttctaccctaattggtaaacctgattggtacactactgcattgtgcttcagcatatctatgatcagggcttgatgtggggtatttcaggctatgcacagtcctcccttagctatctatgcacagagagttcatatgagcattgttgcttgatgctcatgcttggtttgatagtctattttcagatggcgtcagtcgtatctaaccctctcctgcattcacgaaggctatgcccgttcatgtcggtttcgtacctcctttgccctcactcactgaaatcaacaaacagtggcaggccctaacgttgtcactcacttatcctcgctggcgctgacaacagcccagttccctaatttcatgcgtatggtctaccccggccgactgcgtctgctgtagagggtagacttctttagtgatccttcacgcgcaagtgaccgagctcaattccgccaaagacgcggcagactctcaatgggccccgatattcggggggttttgggaagagggtgcgaagaggcatgctaccctgcactgcatgctcgcagtaagttgtccggctatcttcttataatgtgggtagttggtcatacactggcctattagattaaccagtaacattagtatgtttcggtggttctgtgattcctgaggatcggcagttggcagtggcgtgagaaaccctaacatcctggccataccgtgcgtgaacagtagctttgacatatccagtactttatatcttatgtccctgctattgtcgtgctcccatctccaaggataaaagaaattaaaataaaataaaaatagatgtagagaaaggaatgaaaacagataaaaccaaaattcggtcctttgcaatagagaatccaacgcaggagctgcttggacccgcgattgagcacaacatcggtggtaaactgacggcagaccagcaaagctctgttcgtaaccacttagtggtttgccaatatactgtaccccatatgaggctctacatattccgtttagaaagcttatgattggctcggcgcagctgaaactgaatctccagcgagtctaggctggttttcataaaatcatctttgaaaggagcctagcgtaatagaaccacgccacaattccctgaatttcctatttctttctcaatttctcctttcttttctccaaaatgtaagcgggccttgatacgacgcgggcatcttgatatattatggccgttctcggcatcatcataactcacttatttatcctgctactatcagcatgggctacgacagcttccacccgctcacgaatcggcgcactcatacagctactctttgcagcctcctggatctgggagctgtgcctcaaactggtcagcactcttgttagctacagccagtcgacgccgcccttgcgcggatgatgtggtacgatgcgctaattgagtctggtgcccgacaaccttcggctggacaggacgagctgtccaaagtggactctttcaaacagagcatgaaactagatgcgctggagaaggagattgatgtcgatttcgcgaagctgcttgctggcgttccgccggcctggtttctggctgttgtgctggctgtttgggtggattttgtgagtctaggggtttacctggctaggttgtgctggaagggcgcgaggggattgctgaggggtgtgataggtggcacgcctgctcctcctagtgaaatgagggtggatgggctgaaaggaaccgaggacgccagtggtgggactgatgtttttggtacccaaggcgttcatggtgtccaaggagctgaggctgtctttggtatgagtggtagcccagaaaatgagggttatgagaatctggcgggtgatggcgtggacgcagctcaggacagcgccaggggggtatggattagttggggatactgaatcctagagtataactggttcttctgtatttggtatcgactctcaattatactttttctttgtacgtgcagataaatatacaaaaggagccagcgcaaggagttatgcaacaaaacccaggcctattgcaagcaattactcattacatcagtgtagtccatcaagatccatctgcattgcgccccattctctatgtccagagccgtgcagagaaggagcacaaacctacctgggctcatctgcacctcgcccactactacggtgagggctctcataggggtggaagggggatttaacgctggtgacgctggcgttaggtacgaatccctctcgcagcgcttcttactactggatagaaaacaacagaacatagcacaagctcagccggagttcgcctacattgagactgcgaatgcagccggcagtggcacattcacataattgctcagcgtcttgggcaaatatcagagctgtaccctgctcggtaagtgtcctgtccctggtagattgttaacctcgcttagatcgacagcctctaggcgcctgaactagcaaagaacgaggacttccttttgttgaactcttgacttacataaaggatatgtgggggtcaaatttgcggcgtttattagtgtggtattatggcgaggttgccaagctactttgatttatgatctagggcttcgccaggccttttaccaccgcgaagcactcttcttctaggtatgatctactctgttgtctgctgatgtccgcatatacttgttccagaaacaaagtgaattcaatccatcagaagataacaatagtaacttgagagaacaagagacaaatacttttcctgtgcttgagtggtttgctcatcttgccacacaatccttgatcagcaacggcgttctctttgaagacggcggaacttttgcctctctccatccaagcgagtatccagggaacatgtagaaagcctctgcactctccctatccgtcgtctggatctgcggcggaaactcatatcccataaccgaaagcggatttcgaggtccaagctggacacactcctcttctttctcgagctctggtgcaaattcgtggcggaatcccacacgtgcccgagctcgtgcaagaagatattttcaagactgacttgtcccgctggatgctgttgatgacttgagatactcaagcatctcgttggaag

SEQ ID NO: 375 - DNA, 1483 bp, Emericella nidulans
cggtgatgaaagcttcctgaagcatcgcagctcattcaactccagcccacttttggcacctgtgttttccccctcctataacttctgtcttctctttttgtccaactctattcgccctctagagtctgtacgtctttgcccgctctactccataacaatcttgcgtctaccgccatcatggccgaatctaagcgtacttcttccggtttccccgctttgagctttaccaaatagcagttcactcacataactctcaattcaggtcctcgcgtcttctttgacattcagattggccagcagcagactggtcgcattgcctttgaattggtgagtgttgcgctaaatctgaattccgctgcagcctttgctaacggccccgcatagttcaacgatggtattgcccagtattcttaaacgagattcaagtcttttctgaccatgttctagtcgtccccaagactgccgagaacttccgggcgctctgcacgggagagaagggaatgggaaagcagggcaagccattgcacttcaagggtacggccaacataacaaaacatgggcatgcgacaagctaactgaagtccgcgcctaggttcgatcttccaccgtgtcattaaacaattcatgatccagggtggtgacttcaccgcgttcaacggtaccggcggcgagtcgatttacggcgaaaagtttccagacgagaatttcgagctgaagcatgaccgtcccttcctcctttccatggccaactccggtcccggcacaaacggcagccagttcttcattaccaccgttcccactcctcacctagacggcaagcacgtggtcttcggcgaagttatcaacggcaagagcgtggtccggaagatcgagaatatgccaactcaggcagataagcctaccactgacgtgaccatcgcggagtgtggtgaactcaccggcgaggactacgacaacgcagacaagcagactcccgacgctaccggcgacccatacgaggatttccctgacgaccaccagggcgaggagctcagtgctcctgtgtgcttcaagatcgcttcggagctgaaaaatttcggaaacacggccttcaagaatggtaacatcgccttgggtctcgagaagtaccagaagggtctacgctatctgaacgaatttccggaacccgaagagaacgaccctaaggacctggagcctcaaatgaaatcactgcgtttcacccttcactcgaattcttctctcctagcaaacaagctgggacaattcaagaacggcaaaacctgggctacatacgctctggatgtgctgacgcagccagtgcaaaagatgccgaccgggctaaggtctactaccgccgcgcagtcgccgaaagcggactcaaggaggaagatgaagcgctgaaggatttggagcaagcttccaccttggctcctagtgacgctgcgattgcggcggagactgctagagttaagaaagctatcaa

SEQ ID NO: 376 - DNA, 2368 bp, Emericella nidulans
ctcccttgttttcagttgtggagcccactgttaatgaaaatgactgtgtatcaatgcgtatttggattcagctttgtcattgattccggacgaaccggccggaccccttactggccatactcagacaaccccgagataaatcgggatcaataacgacggttgcgtagcccatgaacgtcactgaaatattcccgaagtgaaagattctggggcaatgggttcctgcttgcccttcagaaattggctaccccgtaacagaggaccggatgagaggctacgctgagactacttttcatggaaactgggaggccgagcggatggactttattctgcttgaaccagagtatacactgtatagtcgaccatcaaagtgaatcaaaaacagtcgccgatgtcttcctaagcccaaaatgactctctccgtctttcggatcgagtgtcttcttctccagcttgactacatgtgcaagtcgagggccattattgatatccttgagaaatttttggataccctcttctgagccttgtgcttcgccttcgaccttcatatgcatttagtgactctgacgagcgatgcaagacattgcaagattgttagcattaatagggactacaaacgtacccttccgcaatcagtgttcttcacccagccgctgagaccgtattccgcagcacgcttcatggtgaaatcactggtgtaacgacatgatcagaaatgtctaatgttgacctgtagaaactgtgcctaccggaaacccacacctgtagaggtacttgttaaacatagctggctaagaatgaaactagttagaactgaagacgtaccctgaacggtgccatggactttgaacgcaatctgagaaaagtcagcgacaacagtcgtaagtataagcttgtagcaataaatctgacagccaaacatgccctttgagttgccatgtttattttgtgatattctcgccgacgatcaagcagaggagtgttaacatgtcatcctggtcggtaggtgtaggatccgaaggagtctagagcggttgaagctgaggttgaccagggcccactgcggggcttcaagcgagctgcatataacccgcctcaaccttgaatttgggattaacatctcgttcctaatattctcttgctttcgacagttggatacttcattcgccacatgtgatctaaatcacattgcagagacttccaccgagaattgcaaggttttgggcggcaaatttgctgacttgaatgggctcagaaacacaaaattatcaatcgagttttagcagctgacttctgaaaaacaaatatttctaactaggtgtgggatctaatccggtcatgaattatggagaaaaatggcaaaaaaattacctgggactcgaacctggcatctccccgctagaccgtaagaggtgttacccttaaagcacccggcctttccgacgcaattccaaagattccgcttatctactatattattccagagatacaactgtgtcaagattcaaaacaactgcactacctccataactagtacagcgaggagatgacgatgctggcggcgggtttagcgtgctgaaggagcctttcgagactcgccagatccgccacttcgctccaggaattccgcgacctggttataactgcttttcggtatatctctggtctcatactgtcaacagtgaccatagcaacacagtgtcaaatccaagcttcttaacgccgacgatcgataatgcggctcctggacatagaactgctcggcccgctgcttggcgctcgaagtgggtctgtggggtcccgccagcagcccaggactctcggcaccagatggcaggtgcgctgtctcaccagtgtccgcctctgcattacatggtgcccgcattctactctccacacatataaatgtaagagcacttgacaatcataaggaaatatcctggtaatgcacctaagctgggtctgtgatttaactcttagactcgctcgcaccgttctacggggctgacaggaaatttggagtcccgtatagcgatctatagaaggaaagtagggtcgcatcgcgatgcaagcaccacgcatggaaatgcttaattactaagcattttattttacgcagtatttgggcaagatactacctgggaatttaggtaccctacactattccaccggtattattgagccatacttactgtacgtacggatcccaacaatacgcgaggggctatgaccccgcggatattgaggtgggccaacttccaagcttcccaatgaaaccaatgtgagggggatttcccatacccattttattttctcggcgagcctcctcctagttactgctagacctctctccctcgtgacatcgccc

SEQ ID NO: 377 - DNA, 1456 bp, Emericella nidulans
cactctgcttccgttgcctctcaacctcctcctcgaaccgatcctgaagtttcgccgtctgccacggtttcacatgggtgtcgaacataagatcgatctcttcaagacttcgctgcgctgtctcgggatacatgaagaaaacatggaaggtcatgaccgtgcagaagacaccgaagataatgtatgtcttccactggatattcgtgaacgcaggtgcaacaaagtacgccagcgcaaagttgaagatccagttgccggcggcactcaatccgacacccttggctcggtactttagtgggaacacttcggacgcgtagatccaggctgcaggggcccaggttagaccgtagacgccgacgaagatgtacgacatggcgatgacggctttgccgctcgcgccggtgatttcccacttgagcgaggcgttgccattgatttcatcgaccgggttgccgcgtgtagccatcacggccgcaatggcgtagtggatgatcatgcagataatggcgcccgagacgagaaggagacggcgtccgatgcgatcgatgtaggggaggatgacgccggttgtggcgacgaagatcacgtactgaatgatggaggagtagagggaggtgtcgccgctctaggtcgtgttagaacggtccccagcagaggcgggtcggcgtgcgtgggcgacttaccattccagccatctggaagatccaaacaacgtagtacatggccacattcccgccaagcaactgctgccagacctggcaactgacgccacacagggttcgcttccagatgcgcgggccaaaaagagcaaagaaagagacgtccttggcttcagctgcgagacgcgcacgctcttttacttcctcaaactcgacctggacgactggatcgttgcggttgccctttccgtggagggcggcaagaacatcaagtgcttcttcccagcgttcacgactggccagccaccgcggagactcggggaagaaaaataacgcgaggaacaagacgagaccagggacggcttggacaccccaggcgactcggaaggcggagggtccagcgatgcctttgccgcagccccacgagatcaggtacattataaggataccccattctggacccatcagtcgagtacacgagaagagaagtaggggagaaggctagcagtcttaccgatcgcccattgctggattcccacaatccgtccgcggatacgggctggggccagttccgccaggtaaacacatacttgggaagaagtcacaccgactaatctgcggttagagttttagacgacattcacacgagaaactgacgcaccagagagaccgctaatgactcggccggccacgagatgggctacattctgggcggaacattggataactgcgccaatgatccagacgagagaggccacatcaaactcttacggcggcatacgtggtcagcgatgaaa

SEQ ID NO: 378 - DNA, 3761 bp, Emericella nidulans
gctgctcgcaaggccgtgctgtgtaatgacttagaccatgctttgcttaatgagcgaagctgtgttcgtacgtcctggatcttaatgctagatctgatggagacgcaatgagggtacttgatggatcgctcaaggagtgcatagagactgccagggaaaaatccgcacgtccaaaattcaggatctctgaactcgtattggccgaaactgggcccgtcttgcggtacaatttctggatagccgataggtactcctgttggtttggtgaagaccttgggatcgtttagtgatgcagatgctgtccggaagacttttgcaaggatattttcgtcgaaaagatcaggaacgtcgtactgaggggcttgatctcggagtatctgaggtgttacgggcgtttcatcggaatcggtctggccatcggagagggaggttatgctatcggcctttcgtttcttcggtagtggcgacaatccatcaggtgaggaggatgtactggatgtacaagatatcgaatggccgttcatactgggggagtaaggtggctggaatattagacgcgcagtcaagaggttgttctggtcctatttcctcgtgtgtgggaaagtggctaattagggcgacgactgaagatttatcgataagtacgctatagcttcgttcaattatattgcaataacttcttctcgtaacatgcattggagagcaaatagagcgtctgcaaatatgccgctgccaatactccgcagcccgtccagaaatccccgttccccggcgattcccaccactcatctgacggcagttggagagacgtgcggagtcggctattatcatcccgtcggccgacgtagagcattttctgtattctgaaataattgttgtgctcgcctaaacttcagagactaaccagtctcagcctccagcacgatgccgcctctatcaggcttctcagacaacgccttcaccacacgatcagacctagtctgcgctgcaaagtccctgctctctgcgctcgagtcctacaaaagtcccttcaaggcccgaatcaggctctcagtcgcaaccgcagctggattcgacgagaccgccgcgcagctagaaggattcgcgcgtccgctatgggtcgtcccgtttctcctcgaagacaggtgcgagaccctcgatctccagtcgtgggtcgacggcctgcgcgctggagtagacccaaagagttcggaatactggggtgatcttggggactttgatcaacggatggtcgagatggagtctattgccgttgcgcttctggctaggcccgatgcatttctcgataaattgaatgatgttcacagaaagaaccttattacatggctcagacagatgaacagacacaaaataccacagaacaactggctttggttccgcgtatttgtgaaccttgctctcatcagatccctcggcgtccctagagatgaactccaagacgaaatcaccgctgctcttaacacactcgacacattcaatattggccagggctggtcgagtgacggactatgggatgatgggcggaaacaagcagattactattcaggcagcttcgccatccagtttgcgcagttgctgtatgtacggtttgcgggtgaagaggatcagcccagggcaaagagatattgtcagtctgccaaggatttcgggtctgttttctggcggtattttgatcctgatggtatgctactactccccgctggtggacatagagcctcgtgtactgaccgttagcaggcgctgctatccccttcggccgcagcatgacataccgtttcgcatttgcagcgttctggtctgctgcggcttgcgcaggtgtccagcttgacgagcccgtcagtagcctaggagccatcaaggggctgcttctccggcatctacgctggtggtcaaaacagccgcacatcttcaacgtcgacggcacgctgaacatcggctacacgtaccccaacatgtacatggccgagaactacaactcgccgcaatcggtctactggtgtctgaaggcatttatcgtcctaatgctcccggaggcacatccgttctggaagacgcccgagcttcctcacccctccgcttccaaaactgaaccatcacctcgacaggtggaactcctctggccgcctcgtcatatcctggtcaacagtcctgagcaccattttctcctctcatccggtcagatgacaaaaaagggacataaagcacgcgaagcaaagtacgggaaactggcatactcgtctgcgtttgcgttcagtgttccttgtgggatgctccttgagcaaacagcgccggacagtacgctcgctgtgagtttcgatggcggcgagagttggagagtgagggatgctccagtccaggaaagggctttggacgtgcactgcagtaccggccagaaggacggcacggtcccggggctattcagtgtttggcagccgtggaggtatattgagatgagggtctcaacggtgttggttccgctgggagaggtctatccagggtggcatgtgagggtgcatagaatacaagggacctccgaacaacgaggactgtcggaggatattcaacttgtcgactcaggatttgcaatcagtagcgaaacagcttctggtggttttatcaccgcggcccagccgaactctcaaactttcgaaggacgctactcagagccggggagttgtttgatcatatctcgtgctggagcgagtggaatcgctgatttaacggctaatactcagttcctagtctcgagcagcggcaaagagatggtttatgtacagagcagagtgttttgtttcagacctgatccgaacacgaatctcatcgcgtcgaggggttttctcccgtcggtacgccatgatcttcctctcagtagtttgggtaacagtagggaaatttggcttgtctctggcgtttttgcagttgcggcgtccgcgggcttagggcacgaaagtgtgcgtgatatgtggatgaagcggccgaagctgtttatccgggcagctggggatgatttggacattagtgtcacgtagatcagtactcccattaatgctacgagtatgtgcagtctgggttagaatctgtaatatcaatattttgctagagatgcaaatacctgctcatgaagccacaaatcacatagaaagatacccaaattatccatgctctacataagacgatcaagccaataaaccctaatcccaccccagtcggtacatttcatacataggtcaccagctaggctgttcaatctcgtaactacttgactagagactaaacgcgaagggacagattcccccaatcgtcattttagccgaacccagccctcgggttgagatcatccgcatcccatcagagatcctccgagcaagtgtccatccctcgctgctccagataccccgcaatccacgcccagagtctggggtggcgtggttggctggatccaatcatactttttacaccgatctatcgagcagtggctcctatataagacgtcaaaggcatggatataccgtctggacgcttctcacccttcccctcaacactgcgtgactcagtagcacaattaagggcaccatgaccgaccaagtcgctaaagggaagactagcctcgaccagcccatggccgtggatgcatcgcaaaacccagcattcgaagatgttaagatcgccgacgccgagagagatgccgctcctgcctctatcagttccggccacaagcccaagccgcgctctctatgggt

SEQ ID NO: 379 - DNA, 1251 bp, Emericella nidulans
ctaatcccagaagacttattcagttttcagttttcttgtttttgtttctcatgatggaactcggggttcattttgggtagcttttactgcgtatgcgtgagttatatttcacgcttattccaagtgactattgatactcgcataattcagtcacaaggttccctttttgcttcaaaacttcgcaaaaaaagtcaactcaatcccattcaagtctcccttcgctctccatgcctccaggtatctcacgtagctcgcgattccttctccccatgcagctagacgggccgcgttgatttgctgctccggacttaatgacgaggcatccatcccgtagccattgagatatccaggcgtgcagccagcgatgccgcggaatccagctgcccgctgcagcacctgcatcgcccaggcctcttctgacccgggtgtcggctcaatgataaccctcgcgctgtcgctggggcgtctgtcaaacgcattggcaagtatataagctacatgggtggcgttctggtccagtgcgtagaccagattgacacaggcaccagcctgcgaggttcccgcgaaaaagagatttggcaggtcgcgggtcatgaccccatgcagggttgcgaggccattcgcccatttggcctccatggtggtcccgttgcggccggagacggcaatgtttgcgcgcgaagacgggcttgcacgcgtgacagggacagtgtaccccgtgctcaggatgatgacgtctagctcatattcaatatcgtttgcgaccaggccattggctgtgaagtgggatattccattatggcgaatgtcgactagctccacgttgggcaggttgaatgcagaaagatagtcgtcatggaagcatggccgcttgcaccacccaggataccagggcgtcaggagatcggctgaaccttctgactgtacaatattgtgtgcacgcgcgcggatcttctcttgtctattcatatcgaccgcgcgcatccggtcgacgtagtcgggatccagtccctgcgggccgccaatcaggatgctgaaggacggcattcgagtccagccatcatccactttgttcactgatggaaggggtttctcgttgcaggtgaaagcgttgaagttctcctggcggcgcttctgccatccagtgccctcggcctgcgtctcggtttcccaccacaccgggtctgtgggacaattgttgcgggcgtctactgcagctggggtccgttgaaatactatgagtttgttgct

SEQ ID NO: 380 - DNA, 2491 bp, Emericella nidulans
gacaggactatattttgactattcctcccgaagatggattgataaattatggcaatcagctcctataaattgtagattagctagaagagaattatcaacttaattaacagcttaactggcatactagggataagtacagtaataatatcagcagttctgccaccttgcaacccaaagtcctaacagtaatagttatacaagcaatgccaaccagcacttccagagatataatagactaggagccaatccctgtactggcctgcaactaataataacaagctaaataggttaataaggctgagttagacaagcaaagacaggatagcaggtatttacagtatagcacaactaggcatcaagtctgaaactgttaatatactcctgctatacctctgctattataccaactaatattacagacagttataccaatgcttgaggataaatctatagccaatgataaggatacctatagtaaacagggaaacaaccagtccttgtaaaaagtcccttacaagggccagttaaacagttgatagggcggcctattaagtactcagataagtgtgacttaatgacagggttccaatgctttcaacaagctgtagggtttaataaccctaaatttactgtatctgcaattataaacaacttatactcaggaaaagcccttgtagatactggttatatattatatataattatatcaaagtacttggtttacaaacttcaactagaatagcaaaggattataccaatacagctggagaattatagtagtataaatagtaatactgtacaggagatcacctggtttgcattagatattggggggagttatcaaccagttgtatatgcctatgttgttctacaactaggagataatgttgatcttgttgtcagcataccctggcttgaataccagaggattatggtagagcctaaaggcccctagctgcgccttcctgatggtggaactgtgaaaaggacagaggacaaaccatatcttgatattagaagaatcagtgctactaggtttgcagcatggtagagaaaaggctgacaggataaagctatacaggtctttgcagtcttaataagggatattgagaaggcattacaagtaaagaagtatactgatccctgtgcaaagctacccaagcattactatgactaccttgacatctttagttgtgaataatccaataagctgccactatattgtccagatattgattataagattgaactcaaaactgcagacagcaagaaggcagaacccctatggggacctctttacaacatgtcacgtgcagagctgttagttctctgcaagactcttacagagctgcttgaaaagaactttatttatattagcaagttgtcagctgcagccctagtcctctttacttgcaaacctggcagcagccttaggttctgtattaattattaagtattaaatatgatcactaagaaagactgatacctattactattaatcaatgaaacccttgaacagatatcacatgccaaatagtttacaaagcttgatattattatagtcttctataaaatctgaattgtaccagggcatgagtagatgactgtattcagaacttgatttggcctgtttaaatggcttgttatgccttttagtttggctaataccccaagcaccttccaatagtatatcaactggatgttacaagacttccttgacaagttcacattggcatacttggacaatatacttatctttactgatggatccctatattaatatagggaacatgtatactgagtactagcctgactacaggaagctggcttgcagatagatatcaacaagtacaagtttgaaactaaaagtactaagtatctgggatttattattgaagcaggcaaaggaatacagatagatccagagaaggtcaaggccattgttgattggcaaacccctatattaacctatggagtatagttattcctagggtttgtaaacttctactaacactttatataaggattttctgatttaatatatcccttagtggccctaatacagcagggtatactatttaactggaccaacaggtacatgcaagtatttgagcagttaaagcaaatatttaccactgcaccagtactaatgcagtttgaccctgatcaagaaatagttgttaaaacagatactttaaactgggctactggtggagtgctcttacagtataataataatagcttactatgaccttgtacctacttctccaagaagaactcaccagtagaatgtaactatgagatctataacaaggagctactggccattattaatactttaaaggaataaaaggtagaacttattagactaaaggaattccttattattacagactatcagaatttgcattactttatgataatacaacagttaaataaacaacaaatgtattaggcagatatcctaagctgctttaactacaaagtatat

SEQ ID NO: 381 - DNA, 2433 bp, Emericella nidulans
gtgggcattcaatacctggtgagtaccttcccggcgaccacagactcccttgactgctaatgtgagaagcaaatccaagcaattgcaaacaacgaatacggatacgcgcatttgccatctctgttcgaggatctcgaaagaccagacagtgtctgccaagccataaaactggtgagcctggtatccggcttctgcgagtcgaccagagaaaccaggcatcctccaacatatccacaaacgctaccgcagagcttggagtacgtctttgaggaaatcgtcaactgggagtcccagctacaagggcactggaaaagatagctcgagcatatgaggctcgacactgtcacggggaatagggagccgccggatcaaagcgctaacatatggacggcatgtttcatggcactcatcacctccagcactctcctcttctacgtccgctgcctcgactactttccagccttcttccttaccgactgcgagtctaggccagcagatggagagctctatttcccagtcttctaccgctacgacatctatcgtcgaattgaacagtcgctcaacaccatctgctcttcggtgcgatacgcactaggcgacctggatgtgtacggcacgtttcacctgtttccagaaatcaaccacggaatagcgtacaatctccgatggccgatctcgctggtttcgcaatgcggcttcgcgtccacagagcaggtcttgctctgtaccgaggtattgcagcatacgtactcggcaactgcacggcttgattcagttcggtatagcccaaagtagcgtttttcaccaactggggcggttgctgcatacagccctatttgcggagaacacgctgggtctagccggtctagccaacggcagtcttcgactgactcatgaacagaacattactcagacgggcagtcgcacatgtccttgctgagtaccaatttagtgaacccacggtcttgggccagacttgcctgtccagcctcgcaggtatggagccagcaacagcaccccgagtcaaaggggcccgtggctcggtagtgacttcccaattcgaggatattttgcgagcggctccacttttgataatcttatcgccgagggtatgctccactttgcttcctgatttggatcctagggtttctcgcaccattcccggtggccgaaggatagccgagaagggtagcggcgaagattcgatccgttgatgccagaggtaaacgagtgttttcagggatgtcaatacacgactggttggcagctgactatatactagactagcccagttagatccaccattactagcccgaaatccaagtactgtaggggtttggtctccagacaataatcaaagagagaaatcctagttcaattcaataaagagtctcatctcaacagaatgaatggctgagttgttattgctatatctaagataaagatacagaattagtattccctttggaaccatcaagataggccttggatataattaatgcgtgtctgattataattgcctgtcatgacgttatgggtccttgcccatacaaggaccttagaccttagtgactcagccaaggcctacgttgtcttgacggcggtgagccacctgtaagacttcctcatgacagcaatcccttttcctttctcctttccagcgattccttcttgtacgtacggcacgtctagatatgaagatctatctaaatacgtcccagtacattaggaatcgctcgccaatctcgataatagctgaggagaccttttactatggcaatgaaagaagatagtgtcacattgttgctgcagcagctccaggagctccgtacggagataagaacccagaaacaacagctccaagaagagaataacagcttacgggtagaactacaggctgtacggaactcgcaactcagaaaccatccgccagttgcccctacagttacatccggaacacccaccccctacgaacgaagctatccccgtcctcgtcacccagatgttgaacccttcactggagaagaccctaaggattatcctcctttccagatgaacctgcgtacaaagtttgcaattgacgccgcctgctaccctacagaggaggaacaagtttactatgcctacagccgcctgaggggaaaaaccagccagcgtgtgctaacattcattcgcctcagatatggtagaatgaattgcttccatgaaggctgctggaaggagagatttccagcgcttataacctcctgcaggcgtttcaaactacgcttggaataacttgcaagggcacttactactctgttcctggcagtcagaaaatgttggtgtaattatgcgcctattagcgccttgggaatagcacaaagcttggtattacatgagccttttctgtttaggcttgcagactatggcacgacagtttgcctattcagc

SEQ ID NO: 382 - DNA, 2652 bp, Emericella nidulans
tctccgaatcaatggcagaggcgtgcttagggcattcgaggcaagagctgtaaagacgagagccaacgttgcgaacatcttggaccttgtttggaccttgtttgacaccgagatgccgctatagaccagtcctggaggcggataatatattctgtccgcggtcacagcagcggagggagtctagcgagaagatatagcagctgcatcgactcatgcatcgcataatatgtgacaggcccccggattattacagctacctccagccattatagtctgtttgttttgtctagccctgtcgcacagatctcttcggaggaagctctccctgcaggtctagccggcaattagccagaataagcaagcatggttggctactgcaaagtgatgtttgtgggcaccgatcctttctgagttgttatcttgctagcggctgcaccttatcgagaaccaagaattagcgttcagctaatacgagagtaggcaaaagcgttggccatgattcgaccagcggggagttcgatctgcgtggacaagatgcgccccggcgggccatcagcctagttctgtccatttgcatggtacgagtcagaagggagggtacggagagagcccttcttggataggtttcagattgttgttggtgtgtctctataccccttgttggatttcggtagagcttcccccaaatgttagggcaacctggaggaatccaacaaggggtatggagactgcacagaccgctgacatgtcatagacctcatcgatttgagaaaattcatatcggctacggatatatggatgcactatctcatcccgtgctgatcccagttggaaaaatctcggacttgtcgccgacggtacaggaagctgcagccctttcgaatagtaatcatacagcaaacaagatttctagttacaaggaactcttacaaggcttcttaatgacgttgtgaatattgatggtatcactatacgcctgcatctttgttgaatgaagacgccgacaattgaccagtctactttcactttcacttcctcccttccgtccctaccgtatctcacatcaccattttgataaacccgtgaagtgggtctcccttgtcggatacgtcactcgctaaataagtcaattgaaccgggtccaggcttcgcataggcagaagccatgccgagtacggaggcgtgcaccaaaagtttttgcgcgacgctagtaatttaatgcgccgacgtaacaagcttacatacaaattactatagcaacatgttttttgacccacaactaactatatccgcataaaccccgaaatcaaaaacaagagaaatgaagctattcaggggcctctattggctgtagagcgaggtctacacgtggtgatagtcgccctttaatccgcctgcctgcccaactacgcgtatcggatcctcacggccctccttgtattcattacccccttctagctcgataacaatctgaatatgacaaattagacgctcaatccagtgttgtatagtctcctgtgggagatccgcccaagcctgcctctattctacttctcctgtcttcttatcgcggggcgcactgcgggatattgtatgcttcttcatccaagcccagcacggcttaattgcgttgagatctggtaaattgccaggccagtcaaggatcttttgcatgtcttctgctttatagatatgctgctggatttggtgacagtgggcaggtgcgctatcctctaaaataatagtatttaggcgctcaatcatgcattcttttgcaaatagaataagaagaggtttaaggacttcctaggcagtagaataagtaattagcacgtgcttaactactctataatagagaattatagagataagggaacaaactgtttaatatctctactaattaatcccccctttacctttatatataagcttaccattcttctcgttccaattccatttaggaacacggccgcgatttgggcgtaaatgaacacgagaaagacctgtagccaactcctattcctcccggcatagaggttccagctcatgattcatggcttcaatctctatatctgcctgcttctgcatggcagcagtctctggcttgtagatatgtaaagggcccttcttattatatgagaagtaaccctataccatgaagtcagagcaggcctccagcacctccgtacacaattccttgtatatgaatctttcacagtcctccacactcatattgctccgcggtagtggccaagaataataccagtcttgtcagtaaagatcacgcgtttctagtcttctaatgtccaatgttggtgggcaaggcagaattcaagatgcctaagacaagcagcttcagtcagaccaggcttccaggaaggttttgcaataacaaagccatgagaatgaaggatacaaagaacagaagaatgggagataccagctttataagcaagaatttctgataatttcttgtgccctgcttgatctgcagttactgaagtaataacagtattctaagtagcttcagtaatctcaacaggccggccagattgctttctatcctcaacaaattcaagctgcacgcgcaggcttacttccggccgaaagcaacgatctctgcctttctttacgatgctctggaccgtacga

SEQ ID NO: 383 - DNA, 1624 bp, Emericella nidulans
gactggctctggaaaagggctacgaccctaattcggtgccgggccgcttaaccgcttgatatcaaaaaaattggcacccgcctggccgataaaatcatccgtggcgaggtcacatccggacagatggctcgtgtcgcattcaatgccaataacgatgggcttgaagttacagcggtcgcccagggcgaggaacaagcttaaattttctttttattttttggagtttggcgaacttgaatattcccttttatggacttggtttatgatatcgcatagatggatggtctgggattggacatttgccttatgtacaaacttgtattaaaattgtatttctagtttctcctctcctgtatatgtactcacgctgaacatctcccagcttacgatgttaataaacttagttaatacctacccaaagacccaaagtcacctcggaacggaaattgaaatggtccactagctagcgcagtaagttcaagtaagaaaggttcttatagaagcttggggcgtatgtggaaaatttgacaggtatattggacttggtcttctctcttccctttctaagttttcttagctaatttgatatcaaggtctaaaaggacgaattggagaagaactttctgggtctctatacgtcggtaactcacgaagaaagaatgccggttggattttctgataaggtggaatgaagtgcctaaaatatatcgtttacgacttgcgtcacttaaacctaagctaagactgtctaccaattccagcactcggattatttacactaaaatgacttgaacatttactcagttaaagataagtgctgaaagcattaaagcgcgaagcttactttaggatactttaaaacgtagtagaacattaatgaaaaaggaataacctcgccttaagcttatggtattgtataattttcggggtctaaaaatattaatcaaaaggtaattttgatgatatttagtcaatatgggggcagaaaggtaatggcggtaactatttcttttccttgtcctatttttgctctgcaaagaaaatataatgatagacaagggtatgtcaacgtttcaggttcttggagagcaaaggcttgcaatctatatgtgacgctgctttttgattgagaaagggcagacaagaagttgtatcatgaagttctatatacacatgaacctgattctcaaaacacactactcaaacgcctggtgatacatagccaaggaacaaccgggaaatagaaggtcaagggaggatgcgagcaactaaagcttgacactcttgaccaggttcttcttaataccggtaagttcaccggcgtagccaccacggccctcaccacccttgtaaacctggcgaacgctacgaagcttctttttcttgtcctcaaagcgcatcctcttcttgacacgtgggttgcggttgagcttgttacgcttaggtgcaagacccttgttcttctcgatctggtatgtgatggcacgtttcccgtcgggaccaatctcttcttgaatctcgacatggcctccttcacgagcggcttgggcttgggcttcggcgaaggctttgttatccgctttgcgcttgttggtgcgggccgcaacatgtcatagtagtcatc

SEQ ID NO: 384 - DNA, 552 bp, Emericella nidulans
tagttaaaataaatttatataaaaaactaaataaatttctagaaatatatttagttatatagtataactatctcctagatctataatcttatacttagtatttttctagtctagttttttatagatataatttatataaatatttttcaggtttaactagattttatcttctacttagtagtttatagctaggcttttatatttattagcctgacctctatattatattaaaaatagactataaagctaatctagtctaggactttctttattttttatataattatctttcttctagataaggttcttagctagaagggttagccttttctatctaagctataaatataatcttagtttaattattcctactaagcaggtagagtaactagctaagaaactaactaagaatcctgtctagaaaaagaaagctattatatagaaaattaagaaagctctagactaggctcaagcctttatagtttatttctattaaaatatagaaaattagactaataaatacaggagcctagctatcaactactaaataaa

SEQ ID NO: 385 - DNA, 2279 bp, Emericella nidulans
tctatatcataacagattatctaaatgaattaagatattcaagagcataaaccatatattaggaagttatgtgatttgaataacctgaataagagctcttacgtcctttattatcgtaagatatgagattgaactgggctttgtaaactgtaagacaagactaagcatgatttgggcgtaaatatagagaacactggaatggcaccatatctatatatgcaatggtcgctcaagaagcactcaagatgcaagcaactcttgtatataactgaccttaatgcagctcctaatgttcgaataaagagagacaacgcctatgtcacaggaggcacaggtagattggggtcagttattgggccgtcatcgccagtatggtccttggtagcacatttgttgtaccatgtctgagctgtgttgttgatggaattccagatactatgcatgtctgcacggccgtcaccatccagatcaggaaagtaagtgcatgagccttcaacagcacctctgtatctgggtcccagtggtccccactcgtatctggatccgttgatatcacgtcggccaagattataccagactgacccgtctcctgagaacttgtcggtccaaatcaaatctgcctttccatcaccattcacgtctgcccagtgaatgtttgccctatccttctgctcggagtatttgaactgatcaatatactcccatccatcatccccattaacccagccccaagtgcgcccatccttttcaacacacagatagtcggctttgccgtaaccagaaacatcagcaaaatggacgggacggtcaaagtaaccaaggcctcgatgctcagggcagtatagctgatccacagcattgctattatactcccactcaatgctcccggtttccttgaccttgttccgccacacctgtaccctattttgattgttagggtctgtccaaataatatcgcaggctccgtccccgtcccagtctgccagatgcagatcgcgccggtcaagcttagttccgatttgctcccgtgttgggtcaaagatgatttcgttggctccccagaaacttgacccgtcactgggcacttcaaccagtcccttattcggatagagacgcatatagccggtggaatggatccaaacgtaatccattcgaccgttctcatgacctttcatattgcaatatctatttccgtcggctgtaatcattagctttaatctttcatatggggcatgacttatacaaatcataccttttatctttgcccctcctgcccccttattcttccagacatgtacgttatacattggcccagaattctcgtcagatgtaccttctcgatgaacacgtagtcctgtctcccaagctccccgaaatccgctacctcaccgtatactctggcgaagtaaacctgatctcgtaatccggaactaccaaatatcccactcaatccagggtgtgtcgggccagaattagcatctttgtaaaatccctgccgccaaacaacatttaagccatcgccagcctgtcctttgatgcagcttcgggagttcgtatatgtcgtcgcagcgccatcatcatccacccacatccagtcgtcgcgaccgtcgccgttaatatcttcgaatctcacgccgcggatgtcacccatgccttttccagtgaagcgctttccgagaggctgccagtatgctggtttgtcttcaatccatccattccgccaacatgtgacatcgccattatctgccaaaacacagtaatcggctcgaccatcaccgtcaatatcagccagacgcacatgcttctgatcgtgctcttctggactcttccacagtccaatatcggtaaaggagggaggcttgttactcccagaatcgccatctccgttgttgatgcttgcataggtagtcccatccaaggcaatgcagacgtagtcatccagtccatcacctgaatatgtaatctcgcattagtatcagctgttcctgtgtgaccagaatgatgcgtgcctaccgttaacatcaataaaatgcacaccccctgggttacagttattatgggtcgagaaagaaccacccttggtaaacccctgttttccagtgtggacattattcgtgtaagaaatgaatgtcacatctccagactcactatctttctggaatatgatcaagtcattgtacctcattgtatgaagccttacaagaaaaaggacaggtcataatcgaggttgatggatcaggtgcacccctgccgcgcggatctgacactgaccgacatat

SEQ ID NO: 386 - DNA, 2840 bp, Emericella nidulans
gaagctccatgcgaagccaagtgtctctgagtgccttatgcctgtagacctgcgcaagttcgtgaacctcctctcccccatgactacatggggaacgctgctatcccgctacgtttcgaggtcagttctcaacgacacgcctctccagacttccatcgggcagtccgagaagtacccaccggtttgaacacgtcattcttcctcgccatcgcaaagacggcttatacaatccgggccaaactagcgagattcggcgaatcctacatcgactcgctaagttcctttctgaacgcccacgaggaacagaaggctgtgaacatcctcccggcttgcgctatcgtctcaagcttgagacacatcaagacatacgagctacaatttggagcggagctaggggaaatccaggccttcgaaaccggaataccgtgggtaaatgggtcctgtataattctccccttgtgcgcaaatagctcggatgtggcaggttccgcgccctggaatgtgcggataacgctggacgagagtacgatgtattgcttcaagaatgagccggctctacgttgggcactattggagcaaggaaaaagcaaggttctaggcccatgcgactgcaaggctgacgtgtagcagcacacctgtcggagcttgagcaattcttgtgagatgttgattccaggatttcaccggcgaggtgtatgtatgcctcattatcgtgaagtataattgtattgaattttgtcgaccggagatagcctctccttactaatcaacatacagcacctcgctcgtccgctcatttgatacatcatattgcctatatgacaggcacatctgcctatacaacctgaactatctaccgatatcgagaacattcttttgaagcctttgaaaagacataaatagcctatacagattgtagttaggaaattaagaccttcaatacagttgctcattacagatatcaatcacatgattaaaaatcgacgctagcaaccacctcaatagccgacaaatttttataaggaaatgtcatgtgactcatcgtgtacgcccggtgaaggaccattgacattattggatggcctacgtggccgccgatctataaatctagcttactaaataatgactaaacgggcaccacccgaagggcaggcggcatcggatactgctatgccccgacacctggcttatgccacattatgcggcctgtcaaccagagaaagtccctccttactttcaatcagatccgctgggactagattggattatgtatttcgaacaggataggtatactaaaaacaccactctcatagaatgcttctctatcaaaactcacgcgtttcaactcaattacgctgatcttgtcgaccatgtcggttagactcaaaatcaacggattgctcgtagtgcatgggatttcctttagagttttctatccgcaagtctggagtttctggctatgaaagtgcacgcacaagtatgtatcttgccagcggcgtacttggggtcatacgagcccttacagtggccttaatgccagcacaatggtcatggtatgtttgtttattccaccgagcagaaaagctgcgcataattgaactgcgggcaaacagacaaatatcctttgtcaaattttgtcagacgaccttcccgaacttcctccttgccgggaaccaagcaagggcatgatcgtcggcaatcttgggatgacctctaatacaatgacaacagaaggcccagtaagtttgtatgggcagcagttgttaaataagcggttgcacaactatttccaccgtactgaccaacccatctgtctttgctctaccctactcgatccatcacctcaactcatcaccgaaagaatgcctcctacacgcgatgagctcttatgcacggctttaaactttgtgggtcagttcgccaaactcgacgtcgaatcagtcctatcgttcatgtcacccagttgcaccctccgctcttttccatccagcctcggcaaaccagctttgcaaaccaaagaagaaagcaaggcggacttccaagggctaaaggattttttctacaatttccagctacgcgtcaaggacggtgcggagccagtcatcgacgagcctgcgaggaaggttgtactgcatattgaggggaagggggactccctggttggtcgatttgagaccgagtacgtctacattctgcagattaatgaggaaggaacaatggtggaggactttttccagtttgcagattcggcgacgagggatgcatgggggaagaaaattgaggcgcatttctcggcgaggaattagatcggttgtgtttgggaatggctcacagatgatggaacccagtacaatgagaaatacctcgggctgcggtctgccgcctcggttggataaggcaagaagagtgtaggctgatgtacggtgatacgaaggcaactatgttctgatccctccgtataggttgaccaaccacaccgtatttagtgattaatattagcccctgcttcgctgcacaaaagtgatcagcattgaggcatggatgggaagccacacctcattgggaagaatcaatgccatgagaggcacgctacgacgtgagcatatgttgtttttcctggtagtgcaatccctgcatttcacagtcatgcttgtaatactgaagtatgtgattcctaggagggccagagatatattcctagtaatggaattgtcgtaactaaaaaggtacggctcgtaacttaattcatacacagcgggaatgcgaacaagacatattcaatcactgtttacacgagtttcaagtgcaagactatattaatatctgcactgaatttgtga

SEQ ID NO: 387 - DNA, 3648 bp, Emericella nidulans
tatggtacttaaagttacaggattatagtgatcaggtatattcctgaccaaggattcagactgtctgaactaagcaccattgagtgagagggcaaaggacatatcacgctgccttaacgccgctgtccggagcgtcagcgcggcggagtcctgagatgatttctcacggtaaggaggctcgcttctcgggttcagcatagggatgcgacaaatgtatgttatatccctcttgagatgtccaaagactagtgccgcattagccctgtcctccaatagattgcatttttgctcaaccgtccgcctgggtgcggtctgtaatgctggagaagttcacttgactccctacatgagacttgactttcatttccatgttcacatttttggaatggcgagccttttaagaaccaatggtgatcagagagccggcgtgtgctcaagctccaatcaccaccatgtcttgtgtgtagttcgtttatactgtgcattgatgcggctagtcagtcacaaccgttgaggagctgattgcatggtgaatcttgcatatcccttgagaccccgaataacatctccagtatttgagcagaaaaggcagttctcttgctccaaaagcgatatccatgccagtccttgtctattgatatgacgcatcttgagctcgcttttgtaggaatccatcataatgtccataaattcgtacccgtttatttcattgcgtttcggacgatgcaaggtagcacgggaaaagttgctggaaaacccgaggatcaagtcccggatggttaggcgatcatgctgagatccttcgagaacaagtccgccattttcctgaagcactgatagcgcagctgccgctccgtccgggttaggtctgatcaatggtacatcagcttgttggtattccgttggaattgatcgctgatatgcaagaagcatttcatgaaatacgcatatcaagggaaccagtcacgctctgccgtcctcaatatcatgaagaatgatttgctctttggcactgccattcaggcacttgtatagttattcgtggcactgaatcgcagggtgttaattgaccgatcaaatgaggccaagctgagctcctagctgtagcggagcagtagacgaggctaaaaattgcaggtttgctcccttccaagtccaggtagagtgcttggccttcgccgcagaccattgtacagtgttcaacagacccgtgccaagcagtgtaacagcttccgggcgccagccaagtaaagcctttttcttctgcaggtcttccaaatcggtggtctttaaccaattccccttgatcccccggagttcagtcgtcttcaactgggaggcattgcttgcggtctctaagtgccagagtattgtttccgtgtcaacaagtttcacgggaatcaatgcggttgagtagctcatgaggaccaggccaccattgactaagacaggatactctactgctgccagttgaagtagcatgcggaaattagtttccatgaccatttcgctattgttccttctccccggtaatactacaatcattgcgctttcgaaaataccgaaccagcagcaggtagctgcaggtgttgctcgtgatagctattggagagtagcatttccgttgatcatcttataggttgataagcaaacttccccttgcttaggttgacggaatgtcaggaaaagccacagtactaattcccacagaactggttcagaatctggttcggtaaataccacggagacataatcctttgacgtcgtaatattcatgctatcactttctgttactagtcaggactatgaataacacatttgttgcttaggtatttctcaccgtatccgccgtcataacgctccagtgccgtcaagatattcctgacgagatcaaatgccagccgtgccatttctctcattaccaatttcctcgcacggcaaggctctcacactagttctctgatatcgtcagtgtcacgctttttagatatgttagccgctgcaccgggggaatgctagaaaaaaccagcggtgactcccaactgcacattcgggggcaggaagctaatctgaacagttcttgtctcccaggttcttctttcagttttaatccatgcattgaaatgcccccatctggcgagagataggctgaagtcgggtagtttagggttctcaacggcataccttcgggtatctgctctgcccttagcacatgtgagtcatcttccgcctcgttgactccatccgcaggcatgggactggactccttagacatgctcgaggatggtaagccaaaatcgataatcggagcgtaaccagccgcgccatcgtcctcatcatagtgctggccacatcagagtcctccggtaccgcaccatgctggcagagacattcgataaactcttcccaggtacttgtagcattagcacaatcggcaactggacagctctgtggtggagatatttgttgggcgaatgtcttgatttgctgaatgcttaatcttctgtaaccgcgttgtcccaagtgtaacagatatttatccttcttcaggaaccacgctgaagccgaaatttgactaaggcaaatggatcacagatatcgtttgctcaggtagtgcacggaaaatatgtgccttctgaatgttcccctgttctttgcacgcaaacagcaaagaacacatcgaaactgcttgccctcgtcatttgcgtttcgctcgtgcccctggtgcggcgaaatcaatatattgactatccacaatgccttttcgagcttctcatgcaaatgccccaactgcgagttgctgggttttgggcagccattgtatatgatagatccaacagagattatgatctgtacgagcaaaatcagcaggtgacgcagagatgtagcattcattaccggcggcgtggtcggcagcctgataggccgactctttgtgaagacaattcccggttcagtggatttttcaccttggatttggacgttttcttcaggtgagggtagggaaagtggtgattccttggacaaccaagactcaacaaaactactgtaagagtccgcctcggatgagtttctaacctattgctcgaacgagagtaagcacatccaggttggatgattctagttaacattggatccgatggttggtgactataggagttcgagacgtagcccacggctagtgaatcctcagtgttccaggtaggggtcttatgcggaggcggcctcatagatgttggatggctcaggttcttatactccgattatgctgatatcgttgaataggtggatatatagcgagtggaagagacgatggaggcagaggtagtggtgaaagaggagaaagatctttccggataagctcatttcaatatattgattatgggtgccgtatatttatatattgttagcggcacctgatctacatcgtacgccaggactgttctaataaacgtcgtacagcccatgacaaaccgattccagccctgctccttctttcatgattccagctaagcagttccacattatattcgtgctaaacgatcactttcgcagtggaatggccaagaattgagtagcccctcactaccacaattcgtgcattgtaagaagtatattcgtttgcgtgataggtcataataaagatcc

SEQ ID NO: 388 - DNA, 2539 bp, Emericella nidulans
aaatattaaagcagaagatagtgccattcccgagccctcataacatctcgccaatgaatgggttgttgcttgactcgttgcgcgccaacagccaacgccggagacggatagccatatgcgcgtcgaattcaaaagccgacgaggaaggaggcccaaggagcccagacgtgcgctcagtatagacaggctcactgtcgtcgtcggaaagtttccaagtctcctgcaggacggaatacatgcgtccgaaactgccaaagtcgctgcaatcgcccaatgcggcaattcgttgctcaaggataatgcgaaagttgcttgttggcgttgagaatgcgccagtgattagcattggccacacaagcgagcggtcaaatccaaagggtcctgacggaatgtattgcaagagttctgaaaccttctcgacgagatctacgatgttctgctgctccggatggaagccgggcattaagctgtataggtagatgcgggctgcaacgcggaatatggcggtcatgttcttcgtgagtttatcgggcctggataatgcccgtggcggaaatggggttttcgagagtcggattgacgaccacttgctcggcatggtcgagctgggctgttaatgccgagacgtggtggcagactgtgtagtcattgatgcggccttcttcctttaaagaatcaaggcaggcgatttcagagatcaggtacatgattcggtcgtcgcaccccattagttcgcgtaaaccagacgaaattccgttcaggtgcttatgcctatatgcgtgtgcgaattggggagatcttccgagcattgtggcaccaaaaatgtcaatccatgtactgagagacatgctaaatgggggcggcgtgaatgggtttgcctccatgagccctagcttgttgacgaggtctgtgacggctgtgaagtgctcgttccatcctatatccggaaggccgtccacttcaggtgatcccaccgagcagtggaagaagatcattgccagcgttgcgtctaggattgtatcgtggccatgatccgcatataaggctttgtggagttctgagatcgccgcgtaacggtggcgcatgatgtctctttctactcgtttacctcgctgcttcttcacagtcctgaggtggatagctgatacgctgagacagccgtggtaatatgacttgttcgagtcaagggagcgcaggatctcgcgggctctggatggtccctgtttatggaggtcgagaatgggaaaaaccagccggaggacattgtcgacaaagtgatagagtagggagcgctctcggtcatttgaactcatcttcccttccagatagaaagatagtggtcggtccgggaattcggaagatccaagagagagaggattctgcacacgcggtagggggtcagtaaatccttgataccattcgtcactctgtactgctggagtcgtcatcgctgtcgttgttgttgtcgtcgctgtcattgccgctgaactcgctgatagctctgaaattgaggtcggtgtaggtattaacggagttgctgttgggtcaaaccaaaagacactagtatcttgcaatggggttgtatcaggtacgtatgtggtatcagggatataagtgctgctaccaattccagcatcaaagccatatggggtagacattagtgcgctggttgcaggtgctggtaagtaggacgtagagggatcatatgtggtggccaccattggttccatcgggggcgtttgaggcttgctgacagggttgtcgcgaggtttcgctgatgggaccgcacgtttgatgtattctacccagtgtcagccatgtctacgagccacatagagacgcataccctgaagcgctacctccttttgcagtactttagtctccctgaccttctgttttatcttgtccttttgtagcattcgcgcctgagtacttatccaccaactcggctttcggtattcgcagctgacgcccagactggtgcatgccacgcaattaggatgagtctcgtcgcatttcttccttcgtaggcggcaggtatagcaacctgcggaggaacggtcagtttccatgctgaataaattggccgcacggcgcaactagtcgagtatgctcccgtcaacactaaccgttacgcgaccgtttgtatgccttcgtaaccatatttgcgtggtccttgataacggatgtctgattttggcttttcgggtctgcccttgttcgcgccgactgttgtggcttcgcctgcgtactaggtccggcgagagctgacatggtgtactatcggttgcggcgacttgactggaagacacgaatatcaagtccagatatctgcgacaggtgaacggcgtagtaccgcgacacaatgaccatatatccaagcagtcctcactgccttctctgtgtcccgcgtcgtgttgtgttatgttgtagcgcaacagccgagtcgagtgtcgagagaccgtctgtcgaagagacaactgaacgaagccgtggtgaacatgatgctcttaatatcttggagataagacctacaagc

SEQ ID NO: 389 - DNA, 3679 bp, Emericella nidulans
ctggtccagtttgcgtcattcgcccaatagatatcgaacggcgcgaggagatatcttcgtttgtgatagctattctttccgcgaatttcccagacatatacagtgaagatgtcggccaccaggtcgcctcgtggtaattgcaagaggagttaccgcatattgagagtctcatgcagcagattgggcatttcaagatatttggatctacgaaccaatcttttgcagaactcttgcttcgttgttcatggtataatgaaactctcctcttcatgattgggttttataacttaccggcgcaggtatctgtacgagagagaactacagcatcgcccgttcatatgtagaagtagcactgagaaagtttgtcaatactcagtctctcacctatgcgagcgctatcgattttcagagcttaattgacctcgacattggccgccctgctgctgcccttcgagcttttaaggaagcatagaactccgtacccggatactccctgataaagctgctttcctagccgccaaccaggtgaatataggtcttgcttatacagaacttggcaaattcgaaaccgctctggattacctcaaacagtcaattgatcttcgcctgatacataacattgacaggataaggaattcatatagtaatatggcaagcctattgctgcgaatgggaaagcccgacatggcagaagcaatgttagaaagatgtccgtctctgaaagattcttcagatgaaacattcctcagaaatgggaacccgcggttttctgggttcgttaccctgtcaattttcagagctctcgttcttggttaacgaaatcagggatatggtactgctcagtcggatcaggctcgcacaaggtctccatgagcatgccctgaggcttgtctcaagagccctgagctttcgaaaggagtgcctgggtgagcgtcttaaagtttgtgattctctctatcaggtcgccgtactgctctcgctcagcggcaacagcgcccttgcaatgtaagccatcgcaaacatcctgtcttagtgctgaccctgttagtcaacacctagcagagtgtatcagaatatcgagcaaccttccacaagtcgaaggaattgggcatcaagctagggcggactacaggctatcccagattctaagagaccttgggaaggggattgaaactatggctttcctaaagagggcaatttcccttcgagagagcttcatcaggctccacggtgaagatgcagacttaggaagggttgagtttgatgatcttgttccgtggatgctgtggtgatacgtgtgctcaggaaaagccgtgatacacgtgcggtaattcaggggtataaccaatagactcagttattcaaagcacagatcaaacatagcaagcacctgctactagtcggcaactggggcaaagcacaataactgccccatatggagagatccagcggctggtgacaaatatacttgactattgtcaaatccagtacatacgaccatagggtgtggagaacagggcttcccgtccgctcagccgtacttaagccacacgccggctggttagtagtatggtgggtgaccacatgcgaatcccagctgttgtatgttttttcctttattttttttttttttgcgagacctttcaagcttgcatagcaacttatgctggctttcaatttcggctaaatgcgggaggtttggctttgagcctaaatgaattgagcccgagggaaactatctacttgaagactttcgagtctgcgatactgaatagtagtcctgcaaaattgtttacatgctaccgtcccctgaatgttggcttagctgtggagggataggagagagtcggcagactggatgaaattgtaggtggtgatgatatttggagttttcggaaccgttctggcgcatatgcaggtcgtttacagttcgtgcaactgataatgtgccgtggcatatcctaacctgctcttggtagatttggaatcgagtatgccttacgtacgcgccaatagaggcgtattgagtgactgtaagctatactggaacaaatcaaaatactcgacgacgctattctctgcgcacgaagaacaggatctccctggatctcccttgctgcccagctttgaatgactccttcccgctgttggctcatattctcgtaattcgacagcatcacccccgagtaaatgtatttgcctgggagagcggatccttctttgcaacaactatgtccgtccatgttaaagcttcgaagtccgcgttggaaagagactcgtagaagtcacggcagctggcaatgtcggcgatatgagtaagcgtgataacattctaccgagataaggcctcccttcatgaacagtacaagacagagccagtttgatttgatccgcagcgtacttgctccagcatcgcttacaaccgcatagaggttgggctgtcgcggaggagatgccggaatatcacgtagtgggcctgcaccactttaaatatctgactaactatattatcattagttgctagaaggcatacctgactatgcgcttgactccatttctatcgggctgttagcataacccatgtacagcaatagggtatgtccgtacctttgtaacaggatcatagttctccagtccacgcagtccatcagtggctagtcgaagatacagattttagaccactaagacttgtcagtagccagaccagcaatcaagagggacgccatacgatcatctggcttgatatgcccctgttgagtgtacccgaacacggccagaatttccgggccgtcaaattaataggccctcacaagctcagcccagcactcgtctacagtcgttgaaatgtcttcaaatacttcggtccaggtctgcccgggttcttaactggatccccagtgatgtaaattgacggagggtcgttgggatcaaaattgaagttgcccggggatatctctgagaggagtttgccagtcccatgaccaaatatttcatgcagcactatccagatggaatatgcgttaggtcgatgttgcttgaatatttcctgctctgattcgggaaccatgtatagaccccttgctcggtgactttctgctaacatgcgattagagaagataatattcttgtagccgacgttttgtcgaatatcattgtactttgcatgctgaatttgtcaaatatggtttgcaagccagcttacgttgggcaggttaatgccggggaatattatactcgagcaataagcaagacctaatgagagttagaatcaattccaatccaaaaacaacaccattcgtactctggacgctggaagtctagtgcctcaaaatagcttttctcgaatggtccgctgttgccgatatccccagctatccatgggattctgcaaacaaacctgtctgcctcctaggacaactctctcaattttttgcgtttcgctgctgtctggtatgcccacaataccctcaaactcactgcggacgcccagtggatctttgtaagactcaacaaacccaagcgcagcttctacctttggcgctttgtttgtcacccatatgctctgggactctttataaactgcaaggtcgccagtgatagagctatccgaagtttaccaatcatctcatgctgttactgattagagacatattcaagggcatttcaagtgcgcattaat

SEQ ID NO: 390 - DNA, 2173 bp, Emericella nidulans
acatgtagcatttcaggaatctctgagtcagaatacaataagaactaccaatgatatcatttaatattctgccagacggcagaccacatgggtcagcatgggcatcatcatgcgagccaggcatatgggcatggcaacactaggcctgggggatatccactataaataatagggctatatagagagcctataatatacagccttttgcaagatatgggtgtagaggccatggtatggctgctagatccacggggtttaaatcctatcaagtatctataggcgcatataaaagcaaatatttataagcttcgtccagggttgtagaggactctagacacagaaatcaccctacagctgcttatcaaagcagctatgggacctggcatgtgattaataagagaactcttcgaaatctatgccatacagtgcctcatcgcgtaaagacaattctttaagcagatggtttgtatacaggttactgagctattatttgcttcagactaggtaattaggaagacggaatgtgttttcatactagcattaactgtggggtgtttagaatcagcaatattgatgttataccactaagtattggtcccttcccttgatcgttccttgatcattagttagctgaatcattccacgagccgcgccttttgctactgagcgcgcctgtcctaaatctctattctaagtcgaggaacgacgttaaaagtcaatgaaagagatccatgactggtgatgatgcatagtgtgaattgatttaagttgtcaagcacaatcccagttggcaaaatcgaggtactttgaccaaaagcgcaactgaagttcgtgtagatttcgtcaatgacgtgcttcaaaacgttcttgacagttgggtcttaatatctcccaaagcagacaatgtctgacaaagacactatcttgacggtctgggatagcactgtgaccaacagtactaacagaatcaccggggtcaaccacaatatctgggccaggtcttgatacggaagaatgccgttccaatagctacgcaccaaacgagatgatcattgagccgatcatctcagttactgtggaagaaatcaatcgagaacgacttgcagcaaaggttagcaaactgaagagcatctaaaattataaatatagggcaagacagataatcatggcaggaatagcacacatactaagaagccacaacgtcctagacaaagccagcaaactgaagtcttgaaaaaaatcccttctgcggaagtcccagcaaacgtaataagcaaccctatgtaccctaaaacttcagcgggaactctcagttctcaatagacaaacagagcactgaacctgcgcgtttgcacgttgctacctacgatgacttgaatgattgcgaggtctatagagcgctcttaatcaccggcaactgattccgacacctccgcacaacttactcgctcccctccctcttttctctcccttacatctccttcttccctctcccccctccattttccaccctcccaagaattctactgacgatatttcctcattcctcccttcttcttctcacctattcccactacccactcatttacccttctcttctcttctctctcccccccctcatttccttctcttccccctccatcctcactccacattccatcctactccatctactccctattcctacacttcctctctctatcatatccactctcctaccttatctccaaccaatgccccccttcatccctcctttctcctatccatctccacctccatctctcctttaaactcatcatccctctatctcctaatatctactatcgcctctccatctcttacctctccccattcacacttcgcatatttcatctctcccattcttccttccctcctcaccacttaccctaacttatcctcctttttcccatatttcatctccttccccctcctccacaacctccttctttcactccctccatcaacctatccctcccctcttacatcttccactcaatttatatatcattactcttactgatcaccccttccatttcacttcctacccctttcatactctttcatatacccttaactctccaacacctaccacttacctctccagtatcatcttcctcccactctccactcaccatcacttcttccccatccc

SEQ ID NO: 391 - DNA, 1927 bp, Emericella nidulans
tggctagcaaggccaggcaacactagatggcttattatatttgacaatatcgaccagtattctccagcccaaggccatggtcactgtggatatgatatctacgaattctttccaaaggctgatcatggatctattatgatcacttcccggctccaggggctcactgaacttgggaagtcatttccagttcggagacttatgcacaaagatgctacacagctattgtttcaaagcagcggcttctcagctaaagatattacgcagatgggtgctgaacaaggtactgtactattagctagacttgaagaacatgactaacatcaacagaccttataaatcttgctagcctgctggatgggctctcgctggcaattgtcatagctggggccttcatgcgtcaaacaggaacaacttttaaagagtatttagagctctaccagacttcctggttcgacttgcagtcacagtcagcacccacacgccaataccagcaaggcaatattgtacaaacatggattatcacctataaagagatacagaaacgtgatcccactgccgcgaaactcttgctcttactcgcattttttgataaccaggatatctggtatgaactgactcaaaacgggttggactactccaacccgccaccatggtttaaagcagcagtgtcaagcaagctggtctttaggacaaagataaaagcactagttgagttctcgcttgttgaaataaaacagcaggagggaagctatactctgcatcccgtggtacaggactggtgttatcatattgctgcctccaatgacctcacaaaccaactacaggagctggcgttcatctcggttggatatacagtccccagtcgggacaccagagattatgcaaggcttgagcagcgattacttcctcatgcaaataacctaatccaaaggaatataggctattggcttgatatacagcctgaagacagaatcaacatttttggagcctttcatggcttaggtaatctctacttacatcaaggaaagctgaaagaggcagaagggatgtatcagcgagccctggcaggcaaggagaaggcactgggtcctgaccacacatccgcccttgatacagtcaacaatcttggtcttctctactctgatcagggcaggctgaaagaggcagaggagatgtatcagcgagcactggcaggctacaagaaggcactgggccctgatcacacatccaccctgaatacagtcaacaatcttgggaatctctactctgatcagggcaagctgagagaggcagaggagatgtatcagcaagcactagcaggctacgagaaggcactgggtcctgcccacacatccacccttgatacagtcaacaatcttgggaacctctactctgatcagggcaggctgaaagaagcagaggagatgtatcagcaagcactggcaggcaaggagaaggcactgggccttgatcacacatccacccttgatacagtgggcaatcttggtcttctctacagggatcagggcaagctaagagaggcagaagagatgtctcagctagcactgacaggcactgagaatgcactgtgccctgattactcatactccctgattacagttatcaatcttggtactctctacttttatcatggctggcttatataggtcccattatatgtttttgttataactgttctattctttaaaattttatctgttacctgcatcctaatttcccattttttttcttaataatttttattaatttcctcattattttatagtctacaccttattttttctcttttatttttttttcttatcttctattctattaatttttttcctgttttattatatttttttaaattccctcatatctttatcctatctttttacttcttttaattatcatctactatttc

SEQ ID NO: 392 - DNA, 2711 bp, Emericella nidulans
gctttccaagggaggcgcaagagtggtggaagccgcggcaaaagggggaatacgcggagcttctgtaggcgatgcttgtggccggcgcggacccgaaccagacctttcggtctgccacgccgctgcatttggctgttgttgctgggaatgagcatgcggtgcgggttctgcttgaggctggggcggatgttcatgcgagaacagaccggggtcggtctgcgtatctgcttagctgtctgtttcactatgttgatatccatgagcagctctgcagcgcaaggaagagagggagagagttggcggatccacctgctgtgccagtcaacccggggcgcttcagtgcatctggccgttgattttcgccagcaccatcgcagtgcaatcccgttcctcaatttcgtctgttcttcgacaaccagggaatctttgttgcttcactccctctttattcgctcgtttcaaggcgcacggcgaagtaggaaactgccatggttagggtactctgagaggatgtagaatgcatgtttgctctttgtcgagcgcagcgatgaaacccgtgcatccgctcagagccgcgggcctgggtgccaggattctagcactcatctccctgctcccattcctattcctatgcgccgtggcgcagggagttggagagcccggcggaacgtgctcagattccgtcccatgtaccagggctgctgcagtaaggactactcaagcggctttacgccggaacactgtgatactggccgcataagcgactgcaacgcaacggcagagtacgggcagtacgcacttccggggcaatccgactgctagataaatatctgttgtaggtaggctctgtgcccccagtgagacatacacagacccagaagctatgctaacagccagacagcgagttccgatactgaggtgtcacctcggatttttgcggcgatggctgtcaaaagaactccaacggcgttggacgtggccagccagagtaggttgatatcatctcctcctgggagctgaatgccgacgaagatatagccgtccgtcgtgctccgcaaatacaggcgccatgtccttcaagcggcgcattgggtactatgagctgttcaactactacaagggttgcaacgtgatcgagcccgagagtctcatcatcgagccatttactcacataaatctggcgtttgtaaaccttggcgacgactacacgttgatcgacgaatatggcaatatcgccgactgcgtcttgttcctcaagttctccaaccctggtctgcgcgtgaatatcgctgttggaggatgggtatttagtgacgccccgacgcagcacctgtggacgcaaagtaagtggccatccgcctgccattggtgcatcttttggagagataattatttcgccgtatagtggctcgctcgcacgagaaacaacagacattcatcaactctgttgtaaagtacccccaggactaccccagggggtgtaggggtacgagcctgaatgctaggctttgaaagcactggcaggatcaatggcactagtcctgctgctcggaaactgtttctgattgtacccggcctaaatgtgctgatctgagcttgtggataggctgcaaggaaatcaagtttatcaatattttcagggatacactcgtactatagctcctcctagaccctgacctcccccagcatctgcacagtggcaagaggttatgaatcggttgtggcaacagtcagagaagcccctatcacctgagtcagtcccgctgctgcttgatcaacgatttatactagggcaaagcaacccatcaactcaggaatttccccggacgcatgaatcgcaatgacgacatgcgtctagaagccaggaatcgcgagatcaagagaacggtgagtgtcagcaatatcctaaccagcagggaagaagacaaggaatccaagttattcctcggcaggcgtacccacggcgagcaggtacctatcgtgaccctgctagcttgaccaaaacaatcgtccgcagaatgaatcgccactgactcaccacccaagctcctgcatctccacctacccttgccgtcgtgacctcgagaactttgaagagtaaactcaacttaaactcactcttcttctcccctcacctcttccactttccgcgacaagttctcaaaaatatttttaaccccgcacaagcccttcacatactactcccgccacaaccacccagcatgtcaaacccgaatccaccaatggaaaaaggaaaagaaggtggatgaaagagaggaaggggataagaccacaaactacccagccgcgaagtcacagtctccaaagcactaagcttactcctacaacacgccgcgagggtctcaatatcaattcgcaggggaatgcgaatgtcacggatgtagtatatctggaccttactcaagtcaaaacatcatgagttaggagcggagggaatagaaggtataattggacatgccaactgacaagatgtttccagctcgcatggcaaaaaactgaaatcactcagggccacattccccagaatcataagtactgtcaagatgtcagataagaagcagtttgcgctgctataccatcttccctctgaacagactgatacattaccaacaaagattgagaaaccagaatccgcccaacataagcccatggcagcaactggatcaggaacagtaaccatgcagacctga

SEQ ID NO: 393 - DNA, 574 bp, Emericella nidulans
gatcccccctggagaatcaaaaccaaaaccaaaacaaatcaaaagtaacaaaataaaataaaataaaaactatatacagggatagacgtgggacttcctcccaagtgagcttgttttaagtctctagcttgactcctcacactcattaggctcaaggagggtgatagagtagaattgacgtctcctctccttccttagtagatacaacatcaaattcagcatgctctcgtgacaagtatgtaattgagtactcaatggccctttcttggtaagctcatttttcatcatctggataatcatcttttctatactattctaatgtgaattcacatccttcttttctaaccataggaataacttcatcatttgggacgtccttgatgtcgagtggtgcttggttggctttcccatggagctctttgacttgatccttcagctctttcacagtgtgtgttagctctcttatagctctgtcatgccatttagacctctccttgaattctaaccaatcatttgatgcctcatgcttgactttagctgtttggttgagactttagtcgagtacaattgagct

SEQ ID NO: 394 - DNA, 1468 bp, Emericella nidulans
cgtcgacgacgtcgcggccgccttaggtgatcttctgttgacaaataagccggcatactctgtttaccatatcgaaaaccctgtgcgacagccatggcctgatatgctcacaatcctcgcagacgcgcttgatattccacggacaaacgccgttccgttcaaggaatggcttcgtagagttcggcattttcctcccagcttgggattttcagagaatccagcagcgaggctggcggactttttcgagacggactttctgcgcatgtcgtgtggtggtatgattctggatacaacacgtagcagggagcattcggcgactttaagaagtttgggtcccattgaccaagacttggtcatgaagtatgttggggcgtggaaagcgtctggcttcttgtgatactaggataaccttcaagcgtatttatgcaatattcgcgaagtctgtgagtcacttgacgtatcctctttgcgtttttgaccgcgtcaaataccttataattcggctaccaaccatgcctccagagtgaggtcaaaatcaagaaatctagctaagcagaagggtaagatcctattagaaatttcagcatgttgcccaaattactaagctgcgtgtttttactgttgtggaataagcgtgtgctcaggtgagagatgtgatgattctatctttagctgttatgatcttgttacgctgttaataagtcatatttcggaacataagatagctgttatgattcggctacctggtgcccctgcgcatacgaagtaaccagtgtactgccgtactagacgacgttgtttcgctggcacacgaaatcaatcgccactctagatatttaggagagtgaaaaacgagctcaaaaatgattgattgtccgatataggcacaaaataccatatactattgctgatgcggtaactaaagtccagtaaggccaagttcggtgccattcttgagaaccacagggttaatagagtacatgacactaaccatgcgtgcccacttgtccttgagatgtgactgtgcgcctagtgggtgggggagggggtgtacgaatatccgctgcaggcagccgcagcaagggcttggactatattccattactctccttgttgtgcggcaccgatatcaccgcctgcgttgcgggcaattacgagcttgtccagcttctccttgagcgggggcagaagtcaacgtgacgggcgggttctgcataaaagccctctatgctgctgcgctgcggggaaataagcatacctgtaagcccttgatgaagcaaggcgccgtgtggagtctcgtcaatcagagcctgtcgcatttcgccccaagcgtgcttaactatgccgacgagatactgcgggaggtcacgaggaccaacagaacggctggcagacaatgagactgatgaaagtgacgaaaatgaagaagacggtgtggatgagaatgagggcgagagtgaagagagtg

SEQ ID NO: 395 - DNA, 1482 bp, Emericella nidulans
gcgctcccagcgtccaaattcctggagagcggccgggtcggatgatgagtacatggcgatgcggccctcggcgtgcttgtcgttggcggaagaagtccccgtgctctgaatggtccattgccactcggtttctgttggattgagtggcaccaggtcgagaaagtactcccgcgtcgagtcggcgcacatgggcgaatgactgagcatgtcgcggatgaccggcgagaaaccactttgtctccattccggattaagactaaaaagtgtctctatggccatgtcgatttcgagcgtggctggagcaatgggcgccgtcttcgcgataacgtgggttgcaaagagacgctgatacttgtctgaggatgtgttgatgcggaaccgagccagcttagtcttcttcttctgcttctggaagcccaggaaggtccatatctcaagagacttgttgttgacgtgccccttctgagccgctattccatcctgtactttagcaatgttcatagcttgctcgattggcgacttgagctcgagccagtgccgtgtcttttcgaactggtaaggcggcaggagaagctgcgcatactcgtccttctggaagcggtggtgggcccagaaggacacccgtaggccctgtttccaaaggtcgaccgttgcatcggtgagcctggcgatgcccttgtttgtattggtgatggagatggactggaagtgatgcgtcgacttagggttggcaagggcccgcgacgccatgacggtgatggtcgagttggacccagcttcaaggaagatggcatcgggatacttctctgcgagtcgctgtacagcgtggttgaagaagaccggccggcgcatgtgcgagccgacaaaggtccagtccaacgtagcgtcgccgctatgctcagtagctcgttctatggggatgacggcgtcatggaaggtgacttccttcccaacctcccctagacggtcgacaatgctctctactaaggcggagtggaatgcattggtgacgtttagacgcttgctcttgacctcctttcctggcagcgtacgtcgaaatgcgtcaatggccttggttgatccagccacggtgaagctgcgagggccgttgtagcatgcaatgcctgcggttccgtcggatcttgcgtttgattcctgtaacagatcttgcaccacggctccgtcggcctcgatggccatcatggaaccagagtcagccccccaagcggtctgcactagcttggctcggccagcgatcaacttgactgagtcctctagactgagcacgcctgaaacacagagggctgtaatctccccaaagctgtggcccaccacagagaccaccttttcagcaattccacagtccatccaggtcttggctgaggcatattgcatggcaaagagagcagtttgtaacttgatagtatcctgatatggctcactggagaagatgtcaggatagatatctccagactgtgagag

SEQ ID NO: 396 - DNA, 2683 bp, Emericella nidulans
tagcagaagacttcaaaaccgggcacccattctagcagccagatactgattctcatgctgtcacacctggcgcaacaggattattagactggtttgatgcccatgagctggaatttcgcctcgagccaggcacccccacccgtggaccaaacaccctagaccttgtcttctctaacctaccactaagggccctagtagaagaccatctaaagactccaagtgaccatgcaacaattggaataatactggaacaagaagagcccccgcctatatacaagcttggatccaccaactgggagaaagccagagccctggcaagcccgcctgacccaaccctaccaattgacctactagccaaacaactggtccagacatcccagcttgcaatacaaggcgtatcaagatacaatactcgcagactccccaggaccctatggtggactccagaactaacagacatactacaccaaacaagacagcaacaaaaccccgactataaacagctccggaaggccattgtacgggcaaaggctgaatactggaagcagcgaattgaacaagccacagcacctatagatgtattcaaacttgctaaatggatacaacatccagaccagctcgctgctcctcccctgaatatacaaggggcacaggttactaccccacagggcaaggcagacgccttccttaatcacctcttagagaagggggccctgcttccaaatcagacagaagagggacccccaaacaagcccctcggctcactacacctgccaacaaaagagcactgctgggctgctctctgtgccccacccccgtcggcccccggggaggacggacttgccaccactgcttggagggagctctggcccgtactaggggatacaatcacacaactgtactacaggtgtatggaggaaggctgctttccactgagcctgaagtcagcaaaggtaataatgttaccgaaaccaggaaagagggactatacccaactcaatgcctggcggccaattagcctcctctctaccctaggtaaaggcctagagcgcctcctagcacagcagatagctgtaagagcaattcaggcagatgtgctagccccctgccacttcggggccctgccaggacgctctgccattgacctggtccaggttcttgttcacagggtagaggaggcctttcaacagggaaaagatgcttcactactcctactagatgtgaaaggggcatttgacgctgtaatacaccaacggctcctttctcacttacgcctgcaaggatggcataaaggcttactccagctacttaaggactggcttactggccgctctgtatctgttcatatcaaagaaggcactgccacagcaccaattaaaggcggactcccccagggatcccccctatccccaatactcttcctgctatatgcggcaagaatagtctctaccttagagggctccttctgctatgcagatgatatgggcatattattaactgggaataccctggaagagagctcacaacaactggtagaggcctacaagcaaattactgctctagggacagagacaggcctccctttctcaatagagaaaacagagatacaacacttctctagaaagcagcagcagcatctccccacagttactctacctggtataggggagattacaccatccctatatacacggtggttaggagttcttctggatacaaagcttacttttaaagcccacattaatttggtctttagccgcgggaaacgactcgcccagcacctaaagagacttagcaatacccagcgcggctgcccagtggcctccatgcgggcagcagttatacagtgtgttcttccaacagctctgtacagggcagaagtcttctatacaggcaaacgacaaaaaggggtagttaactccctgctttctctcttccacacagcagccctggctattatcccagcctacaagaccacccctactgcagcactcttccgcgaagcagacctaccagacccagaagctctactcaacagcatcctccggagggcagcagtgagatacatgagccttgatactaaacacccaattgcccaaatagccgcagagactaccgcgggcaggcccaaaaccaggcttaaaaggatcctacagctcctcctcagccccctgccagagcgcgctataatagagctgcctctccctccattatgcatgctcccaacagacaacaaaggctatagccctgcccctttacagatttcagtgtactcagatggctcacggaccagccagggggcagggtatggctatgcaatctactttggccctatcctcgtgtccaagggacatggtcccgcgggccccaggacagaagtctatgatgcagaaatcatgggtgctgtggaaggcctacgcacagccctgggacaaccatgtgttggctactctacccagctagttatcctcctagataacctagctgcagcctccctgctagcaagctataggccaacccctcacagacatggtctgtcagagacctttagccaactagccgcccagtggatggaaagcccttcaatcctaaccatgcaatggaagccccttcaggtccgctggattccaggccactctggaattgctgggaatgagctggcagacaagctcgctaagctagg

SEQ ID NO: 397 - DNA, 2267 bp, Emericella nidulans
cggataaactatagtccatcctccaaactcaatcacaaacacgcaagcccactataatgcaattcaaacctgcagtcggttgaaagtcgatgggatattggaagtcggagattggcggagattaggagtcgatattcagtggaaaattgtagtcgatggtaatcaatgaaaattaaatgggtagccggtggaggaaaagtcaatgggcgcgacggaaggtccagatgccacacgccgacacagcatgtgcagtggctgagtcaaaagccacagctgcgccccaaatttggctgtggttactcttaaaagagcgatggaaaaaatcaggcaggtgttacagccaatcataattatttatttaccctaccaatcacgatagtccacctggcactcagtggaaatttggaggctagttccagccgaaggatgaacggcgtctaagccgatcactctgatcacccagtcgtgcgaccctcacccccaccgctcacccactcaccctccccaactcaccttgctcacccagatcgcgcgacttcagggcggcaatgctcacctactagaacgggaagggcaatggtcttggcgtccgtagatttttaataggtagggttatgcatctccatctccagtcgctacccctcgcatgctctatgacgttcatcgttaagacagtaagtagatttatcaatcgaggcaatgcaatccgggtctgcgatgattggttttccccgcattcttgttgtggtgtcccggcgacgatcgccagagtcttgggcggcagatataaaccatataaacgatttcagtaaaacatacatagccaaacacctcattctgttcaattgcttgatctaaatcatcgtattctagcttatatcttgtgcttccgcgtcatcagaatggagatatctgaaaaagaatcaaaccatcctagtcctacccctgacacctcgcacaatgacacccagctcggcacgaaagaggatatcgccagctctgatggtgcacatctgcagcgccacctcaactaccggcaggtgcagatcatggccatgggaggatccatcggcaccgccttgttcgtcaacattggcggcggtctcgcaaagggcggtcccttgtccctactcctaggcttcaccatatactccctgatcctctcctgcgtcaacaactgcatcgccgagatgaccgttctccatcccgcgccgggcggttttattcgcatggccgggatatgggtcgacgacgcctttggcttcatggcgggctggaacttcttcctctacgaagcgctaacgataccgttcgagatcaccgcattgtccatgacgctctcgttctggagagacgatattcccgccggagcagtggcggctgtctgcattgtatcttattcgtatggttctttgcctttcagtgggcgtttccaattcccattattcctcaactgtccattcgcaagggtcagaactaagtgatgtctgtctagttgcttaagcgtcttcgccgtcaaagtctacggtgaagcagagttctggggctccggcggcaagatgctgctcatatcgattctgttcgcattcacatttgtggccatggtaggcgggaatccgcagcacgacgcctttggattccggcattggagagaccccgggcctatggctgagtacctgagcgcaggcaatctcggccgctttgaggggttcctgggatcattatggatggccagcttcacgactgttgggccggagtacgtcaccctgatcgcagcggagacaaagcacccgcgcacatacgtgaagaaagcatttcagaccgtcttctggcgtttcctgctcttcttcatcatggccgccgtcagtgtgggcattctcgtgccatacgacgatcctgctctgatcgcaaactttgtcaccaacaccgccgatggcagcaaatccggctcctccccgttcataatcgccatggggaatctacagatctcgggattgccgcatgtgatgaacgcgctactcgtcacgaccatcttctctgcgggaaatacgtacatgtactgcgccagccgcagcccctacgccttgtcattagaaggccgcgcgccccggatcctctcgaaatgcaccggacaaggcgtgcccatctattgcgtcctggtgacgatctgcttcccgctcctctccctcctgcaactcggcgacgcctcgagccaggtccttacctggctcacgaacatccttaccgctggaggcctgatcaattac

SEQ ID NO: 398 - DNA, 2112 bp, Emericella nidulans
agtcatatatggtaggatagaagtgatacacaggtcacgcagaccaagtcgagcagccatatggacgttcatacccatcacacagcgtgttgcaggtcctgctgtcaatgcagtcgcaataatagtatcagcgagttcccttaacgatggtttacagagcagcctccatcttgtcaagaacggcacgagtgaactcatgagtggtggcttgtccgcccatgtcacgagtccgcgttttactaaacttgtcagcgagccaaacaatgtgattgcgcacagtatactcacccttcaccaatcacgtcatagacagccttggaaatacggtttgcatggtcgtcgagtccgagatggcggagaagcatcgaaccagacaaaatcatagcgctggggttggcctgatccttgcctttgatatcgagaccaacgtgacggcagccaggctcgaagacagcaacatctcgtcccatgttgcacccgggaacaacaccgggtccaccaacgagggcagcgccaatgttggaaagaataccaccgtacaggttgggcataaccatcacatcaaactgctgaggacgagagacagcctgcatagaagcgttgtcgacaatcatatcgttaacctccagggttgggtagttttcggcagtcttgtggaaagtgctgcggaacaaaccgtccgcaagcttcatgatattagctttgtggatgcaagtgaccttcttcctgttgttggcaagcgcaaagctgaatgcaaacttagcgatacgctcggacttggcgcgagtgataatcttaagtgactcgacgactccttgcacagactggtgctcaagaccagagtattcaccctctgtgttctcacggatgatgcagaggtcaacattgtcatggcgagtcttatagccggggatgttcttgatgagcacgacagaagcgaagatatcgagttcctgtcgaagagcgacgttgaaggactggtggccagaccgctcaactggggtaaagagaatacccttcaggccaagcttgtttcgtcgaagagaagcaattgattccttgaagagttcctcagagtgcttgttgccggtgtctacgccactgacatcaacctgctcccactcaatgggtacattgtcggctttgaagatagtcttaactgactccgcaacttcggcaccgataccgtcacctgatgggcagagtaagacgttagttggtcggtgaatcaagtacgcgtcgcgcaacgtcgcggatatggtgtggatttagtggccgtacctgggataagagtcacagtgtatttgccaccatacttcgttggcttgaagatatcctgctgaactgtcgcaaaagctgataccggagggttaacaccatattcttccgataatcggatataatgaggtgaacgcacatcttgccgcaatgggggagcggacgatggaaggttgagcagcagcgcgtcggaacagcgactaatgcgacggtgagtgattcgaatcgagaaaatcagaataacaacttgtcaaacacgccggacgggatggacgaaactggaagaacgcaaaccccctcaaaaagctaagggaaaatctttgttccaacgtaccttcgcgggctgaactgtcctggtgccgaacatcttgactaaataaagaacagtgcaatggggagaggctggatgcggaaaacctggcggagggaggaagagaaaagagagaatgatggaagaagactgagatgccgcacgaggcgccggaaaaaacggcggatcctctcggcatgctaggccaaatgacatcgcacggcccgatcttatctaaggatcatctcaatctgcaatcaacctctatcgccaacctccatatcaataactcgggctcattgacttcgactcgggccttttgccgcccaactgtcaccgtttacccggaatttcctgcagattctgactcgcagcatctcaacaataggcggtgcaccctccagcacatatcacgcttcctatttggggtatcaataagctcttttatctgtcaaataactattaatctcttatttactttcaagaaactctatttccagctttgaactgaccttaatattagc

SEQ ID NO: 399 - DNA, 1615 bp, Emericella nidulans
ttctcgtcatactcttcttcttccttagcgaaacacgcggtagtgtacttttgagctgcaaagccaaaacattgaataagtactacgatttgctcgaggaagcgggctactacggcgtggtctttgatgccaatgagacaacggaaaaggcgcaagttcagcggatcagatggaaggttaagagtgacgaagagcgtgactctctggctaagatggtttcaatttcttgctacagaccatttcgtgagtgccctttgacgtccactgaacaaaaggagcgggctggaaccgactgacacgtataccaaaagatcttctttccaccgagccagttgtctttttcttctcgctctgggttgcgttcagttgggcaattctttaccttaaattcagcgcagtacccctagtcttttcgacaaaccatcagttcaatattgagcagaacggggcggttttttctggtatgacttaccctagcacttactgccagtgctaacaacagtccatagcggtttctattgctgcaattgtaggcacagtgctgagtgtaaaccaagaaagattagctgcgcgattcggcaagatatcaaatagcccagaaggacggttatacttcgcctgcgtcgaatcaatattgatgccagttggcttattctggtttggatggacgtcatactcctcgatcccttggatcgttccaaccgttgccatcggttgctcaaccattggcattctgtccatatacctggctacgttcaactaccttgccgatacgtaccaccgatacgccagctctgctattgccgctcaatctttttgtacgcttatttctctccagcctgagtttcggacgcggtggtgatcataggtgctaacgacttctaggccgtaacgtccttggcggtatttttccattggtcacaaatgccatgttcaccaacttaggatatccagccgcctgcagccttttgggagggattgtaaggaagcgttcctaatgctagtgtttgccgagctgacatggatcagggtatcctattgacgatcgtaccgtgggtattggtcttctacggccccaagatccgcgcacgaagcaagtttgcaagtgtaggtggttagacgaactattgactggcgctgtacttaccatcacccaggaaattatgcatcacgactgaattgcctatacttgtggcctttgcacgggagttgctgttgccgcaatagcacaccgggttcagagctcgcatatatcaaccagcgagaccttggaagtaccgaatcctccaagctggtggccagaatacttcataaagactgaactaggcgatgtggtacctatcgtagaaaataaactccgtgccaatgtgttctgcagttcaacagcatctgtcaaggccttgatcaccgcggttttcatggtttcaataccctcctccagcctgggctccaagctgatgaattcgttcgagcgatggtgtgaacagattgcgccatcggcagtgatctccattggccgccaggtttgaactgtcggccgagccacgctcctcccgagtgaaaatcggccgacaaatgcgggtgagaagaaagctgagcaagtgaaagagactgg

SEQ ID NO: 400 - DNA, 3051 bp, Emericella nidulans
atacctacagataatttctcacggaaacaacgcctgcggataaattatccgacaatccaggcctatcagaaatgggcctgagtttactttcgtctatgaatctttaagcagaaccctgtctctgccgctgctgctggctggcccttttttttttgggccagctgtccgggagaagatttggaattcacaagatgtggataaccgatatatgtacacattatcgggcatgactaccgagcgactcgcctgaagacttcgggatatggacatccagacgtctactctggtataccccggtaagaatgttagtccggtgggccttacaaggatatgactcctttggattctgccgttcgtattaatgctaatatcttactaatattttgtatggccaccctctgcctcgattactgcctgacatctggcttgcatagacccaataaggcctttcaaaaagtctgtagggactgcatcccatgaagctcgtacaatttctcgtagggcatcataagatagctggcggtcatctggatatctctcttggatccagtctttcatccagttccataccatctcaatagggttcagatcaggggagaaggcaggccaactaataggatagatactacgctcatgaagctctgctatagtatctttgctggcatggcaggtgctccatcatgcataagacaaagatagttaccttgctgtcggttcaggcgaagatagccgtcaataataggcataattcgctcacagtaactctctacattgatagagccccattctttctcccagaaaaggcaagggcctttagtatctccataaaatgatccccaaaacatccaaccacgctttttgggggtagacaaacgaatacaggtctcatctagctcttctcctgctcttctggtaacccagattctggtatggaagcctggagtaacccaagtctcatcagaccaaagtattcgattccattgctcaattgtccaattcacatgctcaagggcccaggcaagacgtacacgctttgtatcgtccgataaaggtggctttcgaagagctttgcatcgggaatagcctcgttttttaagtgctcgagcaagtgcagtttctccgcagggaagatttagttcttcaataactcgtttataagatagtcggcgcgtacgttgtgatgaagagataaaggtaatgatattgtccatatcctcttctgatagcttcgggcgctggccaggaggctttcgaggagtagattgctcattctggcaggtatattgcacctgacgataggtaaatccaagctgagaagagatctgttgataggtaaaaccagcatctcgtagagtcaaaatgcgaatccgatcatcgcgacttagccatctagaactttggctcctttcagatatctcagtcacctccaaaggcgcctctggaggggtgctaggtctggggatagccatattagcaatgctcaccaccatggatctcaggaggatggcgatattggaggttttactagcttcaaaactaggctgaattaagaaagcggtgctttgaaggcctcaccgcttcagaggagtcatatccttgtaaggcccaccggactaacattcttaccggggtataccagagtatgtccgtatctacaacaacatataaagatcgtcaactgatatattctgctttatactttacaatcactgaccgacatacgctcgccttagggaataagacccagatatacggcccctcggtttgtcactggatttagatcagctcacaagaaacgagttgcacggaagcaatcggccataagcctccgaatcgttgatggcaaacataaaacacagtaaacataaatcgtcttgttgcaacatcagccccttgtcgaggcctgcaaggcgactattcacaaggtgaaaatggaatgtcctggtccactcccgaccgttacgatcacactcgaacttgaaaggtacgccggtgcgttcctatggaccatttttaggtttcccagcaggctatatatatacattggcttggaagtatcaatggttatggataacccagaaatgaaccttcaatgtcaatggtgtgagaagtctggaatcgtgttttggtctgcgatggcattggacgacaagtattgttgaggcctctctacagagcttgctcgtggcctttagtaaaaggctttaggccttgcttcttgctatgacgagtcttaatttgtccgtcgcttctgtgagatcatgcgtcaggtggtgtttcttggtcgcgtttccgtgtcatttgtgaagaacgggccgcttgttgagtgtcgagcttcggaggagaggtatgaacgtgctatttgtaatgactctgaaaaagagatagatttagtcagtctggtctggcgctgtatgcatgagatgcacttctgcccttgtccaactaaatgaagcggcgttcgggagtaggcagtacaccatctctaaccatcaagatggcgcaggtgtactcagactcgccaaacttctcaagcatttatttcgcatctcgtggctgagagggtgtttgggagcttgacgagaccgtctgcaaggcgggctcatccaaggtaagggtaataagccatggtcgatatccgtcgaatgatctcgtctggaaatatcagcttatactcttatggtctctaagtctctgtaccaatcgggtacagtttggttcgttttccagttcacagatgaatgtgttagcatggacaacggtcgtaccttgccgacgaagttgtagatatgcgagtaaggtacctcaaaaccacgccaaagcaaatgttgatggtacatcaaagctgctcaaaatttgccgctatgagaaaattgcagaaaacataaacttgtcctgctgaagatcccagatcagtggaacttggcgccgtgaagcgtctcccaagagtctgacattttcatggcttagagtgggaaaaatatatagaactagctatattgaacgtggtagtattggggctttaggcaaggagaggcggcgaagttttgc

SEQ ID NO: 401 - DNA, 2644 bp, Emericella nidulans
atttccaagatacaggtcagaatgctatctaatttcctccatggcaacagcaacggcacaccacactccatgcatcagtctcccgaggcctcagattccgagccgagcaaccacaacacaacaactcgcacaaccaccaagcgccgggccggcgcaagagagtcgtaatcggtatgagtggtgcaacgggcgccctgatgggcataaagctccttatcgcgctacgccgcctcaatatcgaaacccacctgatcatcagcaaatgggccgaagcaacgataaaatacgagacagactaccatccgtctaatgtcaaggctcttgccgactacacctacaacatcaacgacctggcggcgccggtgtcgagcgggtcctttaagacagacgggatgatcatcgtcccgtgtagcatgaagaccttggcagctatccattctggcttctgcgacgacctcatctcgcggacagcagacgtcatgctcaaggaaagaggagattggtccttgtggctcgagagacgccactcagcgagattcacttgaggaatatgctggaggtgacaagagcgggcgccattatcttcccacccgttccggcatattatatacggccaagtagtgtcgaggacttggtggatcagagtgtgggtagggtgttggatttgtttgatcttaatacgggcgatttcgagcggtggcaggggtggaagaaggaatgactctgagccttgttgtatattcactcatgcttaatgaaaacccactatgcacttcaccgtatcatgtctaatgtcggcttcggtcaacttcggatacttcggaggcttggagttctcggagagttcggcagtaggcttgcctgcggtgttcttacccctcactcctgaccccagcggaatctattccggtggggtatattagcctcatgctcctaggagaccgaatgctgcagtttcatattgaaactcacccacagcctccatcagcatgttctacaaacccggcgtcaccgaccatggcctcccgcatgatccattcaaggtaccgcagcgatctgctcagaaactactttacagccacccacatcttcccctgctctccggcggcaactccgcaaatcctattatcattcaatttgtcaatagaccacggcactaactgcaatggccattgtttgcacgtaacaggcctgcgtgatcccccgtccaattggctggataagcaccaaatcagctggccccagcgggaccgcaaacctggccccctactcccagttcaacaacctcactttcgacccgccctatgtaatgttcagctcgaaccagaccccgtcaaatgaacgcaaagacacggtccgcaacgtcgaatccacgggccaattcgtctggaatcttgcaacgtacccgctccgtgaagcggtgaacatcaccgctgagcaggtcccgtatggcatcgacgagttcgagcgcgcaggtcttagcaaggaggatgcgaatctggttgacgtgcccatggtgaaggaatcgcctgtgaaattcgagtgcgtgtatcattcgacgatccgcttgccggggaatccgcctatggggacggtggacattatcattgggcgtgtagtgggggtgcatatcgcagatggagtgatcaatgagagggggctgttggatgtgagcaggacgcagcctattgcgcgatgcgggtattatcagtatgcagtcattcgggagacgtttgatatggtgattccgggcatgagtgaggatatcctcaaggggctcgaggggagtgtgaaggggaatacggagatggggttgagaggaaggcgtggagaaggagaaaggaatgagaaagagagataaaacgagatggagcttaatggtattggggcaaaggatgttatgcatcgagtagaaacattcggcgagccttcattagagggatatgtttatatagaaccaaatttaagggcaaccgcttaacatgacatttatgaatgactaagctcatgctcatacttcattccacttatacatgatatatgggctagcacgtcagtatacatgagcaaggtgggcgttatttttcagaattgtcactagacaatacagatgctctatagactgcctacaaaagcctaccagaccctcacgtccgctgctcgacattaggcttggacctgcttcggataccacggagtgttatatccactatatatttcaaggacctgtgattccttgtgcggagattcaaacccacttcgttgatgacgcattcatcactatatataattgattcacaacggtttaacgggagattggataaatagattatcaataaagtttgacagaaataacagaaatagcagacatgaagtcggcagccttgactaacttttatggatgcaaacctatacagccttactgagctagctactcgttgaaggccatgttggtgactttcccgggaaatatcgaatcaccaagctgccacaatggcttcttttgtcaggttcttcttgatgcaacccttatcgcccgtcagtgtactctgatatactctttacacggtctacaaataggaacatcagggcagcacgactcagtccagacgtctgcacctttgacggcagcacgttgatgaga

SEQ ID NO: 402 - DNA, 2575 bp, Emericella nidulans
tatctcatatatatctgggacgatgcgtgcgttgcgcagttcatgcgagtctttaagccggatcttgaggcgaagttctatggcctaccgagcccggttgaacggtcgcacgtccttcgcgtactagtttgcaaatggattggtggtattgtaagcctcctcttcagtgccactctataaagcctgctaataaggccagtacgtccgacatggacaccggaaacccctgcagtcccccactgagtggatcaccaaccaccgacctcctccctggacagacttcaagaccaacaaactctaccactcgacacaagccgtcaacgccatcgtcggcatcgaagcggacacggacccagataccgacgcctactggcgcatggggtacttcttccctgtccaactcacgcagtgggcattcgcgttcgcaccccatcaacccatcctccaactctttatcgaccggctcctcgagactatcaggctcgcgcgcgaccagcaactacccgactccgagcagcagcaagcaggccacgttctcgaccggatcgaccccgtgaacctgactggcccaatcgcattcacagacagcgtgcgcacatatctaggtcagaaagccgacctgcggtggaacgcgctgaccgggctgcacgacgacggcaagacaaagttaatcgaggatgtgctggtcctgccaatcaccggcttcagcccaggccgtccacatttccggaatatgggttccaagccgattaccgatccctcggcccggctatatcatcacgctgagggttcctggcggcattggagtctgcgagttgagattggcaagttctgccggacggcatttggcctctgcagggattggtcgaaagtgccggatgcggatagttggattttctgatgccagtgatatcatgcgatgtgcctcttgacaacctctatactctttctgtttactggagtttattagacattctagacgcttgatgcacgaatgacgtagagtaataattgctacctaagacctaactagcgaccttgtaaaccattttgcggatatctcctctttgccttcggcccttagaccagcattgctagtgtctatatcaggtctctctggctgttgtatgcagagacttctccaagcaatcctctccgtcataactcaaatcttgttaatcaatactcagtcactgctttgttgttgctagagaaccctaggtgtattcagatgtcttatagttaggattggtcgtacctggtaacctttaattcagtacggctatgggttgaccagaagctcctggctagggagggaaccacattagtactggcttagtgcatgtgaaggacctcgatacgcttgggaccctctagcagcgacgaagcggtaactgatgatgactgaccgactgcgagaagacttggattgaaactagaaggattggtttaatttatttaatcgacagccagagaggcctgatataaaggccagcgctgctggcccaggcaacggtgctacacctctgctctaggtcgattgggagtagcagctagtgggattctgggaggggatgaaccacaggcagcccccttcggcactcatccaacctctatggtctcagaccactcattggtcagcagagcggaaccgggttcggcgctgtaggctgccgatccacgggatcttgacccacgagctcggaagctggggccgcatcatgtaaagcctaagcttggcagggacagtcagtcgagatacagatcgcggggagagtcactaagagatatcagtcatgtgacgatcggccgggttggcgcaaagacatcacttttcgctgatgtcgctcgtgacaccagggtaaatgagatatacctagttctataggcgcagtaagtacagccgagatgttatacaatccgcttagaaataattggaccagaagacccttaaaaatgtatgatagtccatggctgccctaaaaaatgtatcgcacctgttctggcataagatcaagatggagaagagacgaattcaggcaaccagggcacccagggagctcttatcccgctcttctgctcatctttctctaccggggccgacagcgtctctagcagcagaaaggccgccagcgagatccaaactgtgtgtataccaaacatcattctgaagcttaaagtggcaggtgctaacgcaacattcgtcgtagtgcccttcgtttaacccacaccagaatcagtttcggcacttggattcatagcgctcttctgttgatatgtgccggggataggaatgggaaggtagtaaagtggactggccttggctccgtcgaagctcgctattcagctgaggtttttgattttaggccgcagatatccttgtgatagagcatctcatgatacattttggtgtgacagccaaaatggtctaggtatgtagataagagtaaattttcataaaacaatatatcgaatattttcatcatttttatccttaaacaattaataattctgagccgaacgcctggtatggaacatcccggacgtgggctcgcatcaagcaccgcagaagagt

SEQ ID NO: 403 - DNA, 313 bp, Emericella nidulans
  unsure (1)..(313): unsure at all n locations
gccatgtctgacactgaataacagctgacatgttaatggtacagccacgcaacagacactgccgagatgatantcgaactctacagtggtgataagtcaatctcagacaattcaacgagattgcccgaggactagacctacagatccaaccagacgtagcaaacttgttgggcgtcgcgagggagatctcgaaccatgtcaacagtccggaacgctcacgttgagactacttcttcgctgaagtccaattctctgatacgccctatgtcagtgattcagatcacaatatactatggctcgtgcgggacccgtg

SEQ ID NO: 404 - DNA, 2325 bp, Emericella nidulans
tacgcatgcgtgtatgcataaattatgcatactatagactcgaaagaaaccaaacgtaagccctaagatgcaatagtagtatttaaattattcttttctcatgttaatggtttcacagcatctctcatgaaccatcaaatagtaatacacatcacaccctctctaactgtatagaaggtggaacactcactcccgaatctccacaggctccggcctgctctcctcaccatgctccgcctgcccaaggccctcagtcttgttagcatcggaaccagggtggagatcacggacgatgctctcatcgggaacccaggaagcactcttccaggggacaacatgcaagacatacatggtgtcgacttcctcgagggtacggccctgggtctcgttgacgaagaagaagacgataaggacaccaacaacacagcaggaggcaaacacgtagccgtaggcaaagtggatggagcctgagataaatggggtgaagaaggagatcaggaagttccatgtccagttggcacaagtggcaatgccaatgcttgtggcgcggctgcggttggggtacatctcagagcagatggaccagacgatgggacccctaggtggtcatgttagtatgttagatttgtagcggatgtacgaggtgactgaccatgtggtggcgaaaccggcgatgaagaagcaggtgaacacgatcatggcggctccggccttgggggtgttctgcgggttgtcaagatcaagaacggagttgcccactatgagacttgttagccgatgtctttcgtttgagtggcaggatggatttattcttaccagaagcccagatgtagaagcagatggccatccaggcaccaccgaccatcagactagcacggcgaccaaagtgctcgacaatgtacagaccaggcagggtcataccgaagttaacggcaccaagaatgatctgggtgacgtaactgttgttgagaccggtggaggtgaaaatggagttaccgtagtagaagatgaagtttgcgccagagagctgctgcagggactgcagagcaataccaagaagagtacgatagagcatacgggggccagtcacaacctcgtgccagggagcaacaccagcagcgcgctcctcctcgagcttatccttcatgtccttcatttcttggacgacaacgcggtggttaacctcaacaccatagagcttggccatgaccttgcgggcctcgtcaatacggccaagacggtaagcgtaacggggggactcgggcaggaaaagagctccgagacctaagatcagtggccaagcgaaaccgatgcccatggtgattctccacgaggcagtggattggatcgactcggtaccgtagttgatgatataagagatgaagataccaaaggcgacgaaaagctggaaggccgagatcatggcaccacggacctggcggggtgcagcttcggattggtacatggggacgacgctggagagggcaccgacaccgagaccggcaacccaacggcccatggcaatctggacccagttggagtcagtggcgatctggataatgataccgacgatgtggatgatcgaccagaaggacatggagagtttgcggccaatgcggtcggcgatgggggcggcgacgagggctccgatcatggttccaatgcagagaagaccgacgattagaccgttgcggacgttgctgaagacgtactcgccgtttgcttggcgctcggcgaagcgcttcttgaaatctgccattgttgtgaagccggaaatttgacctgcccagtcagcgggagcactaacacaatcatgatgaagatgctaaccagtagagtaaccgaagatgaaaccacccatggacacaacgatacccaggatgaatgaccgccatgttaggtacttgacagggctgtcgtcgatgatgccattgtccttctccgcaattgagtcggtccttgaaggcgttgtggcttgggagtgttcttgttgttcagctttgggcttgaagaggcccttgatgtccacacccatgatgaagtattcccacttgtatgtggtgagaagtctgcagtgagggaaactgggatgagaaactgggaggagacgcaagggaggagaagctgggaaacgttggagggcggagggggtttatatggaggtcggagtatacgcccggggaactcagggacaacgtgacaagagaccacgacgtcaaaccggacaacagatttagcgagacatttcatatcgctcaacactacctactctgtaacgaatccggagacacgcatgggcgaatgcacgcaccagaccacaccggg

SEQ ID NO: 405 - DNA, 2356 bp, Emericella nidulans
cccaccaattatggccttccatccacttcgaccctttggcgtgatccagcttagtcctagatcttgtccggtgcggccaaccaggccgaaatctaaagcgaaccgaacatacaccgggttttcattgcttaaccctaggaacggtgtcgctaacgcaatgaagttaataggtttgatattgtcgaaaaatcctggagagtgtttttgaatgtaggcaatagcatatgtttgcacaagtcccccgagagagtgtccgatgaagctgatgcttgttatttgatatgcgtggtacccctcaatgtgcgattcaacttcgtcgaaatcaagacactcaggttcgccatcgcttaactccgatgttctgcaggggttaacaggaccagagaaggtcctagacttcgattttttgcgtggtaaataaggttgatcaggataggtcattaaaaggatgtattttgcaagacgctttcctaggtactgtatcccacgttctgtgcgggccgcattcccagggaatcctcgaacaataacatcctcattctggcaatcatggtcatctgaaacactgccgctaaggtgaaacagttgatagggtcagcagaaggctcaaaacaatatgaatcgaaagacttcccagtaatcagatcaagttggtgcttacctttctggcgaaaatggtgactttaaaggagactcgtttgttggtgtccgggatttacctgaaggtttgttcttcttgacggcagcatcaatgctctcttttagatacagcatgtcggctcccagattgctgtgcaatccatgagttagcacgacgagatggatttttctgcgaggtttggagtgcctttctgtggcctctgattgcaaagtcccggctgcaggactagtgaactttgggggggactcattcgtcaagatttcatcggacctttgatggcggtttgaaacggacaattgtggggtattccagagactagctgtatcatctattagaagggtgactgatttcgaatacacgcctttggtagcaagcaattgctttccgtctgatcctgagggccaatgatcccgcaggtcggcgggtgtcaaaactgaagactgcgcaattgaaggtaagaaatccaatgacgcttcattgcgaccaacaacgacttcaaagttcaccgacgcggtgctggagaacacgacttgagatatgatctctataatccaggttgtatcttgtcgactcggagagttgcggcaccctggaacttgcggctcgctacattccggtaatgggatgactgcaatccacgtcccaccagccttgagatacggctcaaattggggaatttcagcggtatcaacagcgcaactcgcaacattgggatcgaaggtgtatggataacatgacacgtagagggtgtaagggccatgtaaatatgcggctcgcagtggtatcgccgatgtattccttaccttcacatgcagtgcagctggtgggggctggatttcatcggctgctggcctgtatttcagcgtgtatctaccagcatgttaatgactgactgcagcagatggctgatggatttttgcaaacctgacaacctcaccgacacgcacattgccagcttgccgaatcaatggcatttcaattgctcggtcgacatcaatggggtcaggatgccagcctgtaagtgaagaaaagcgtagtcggttcgaggcaccagtctgggtggagtttcgatccagagtctgcgaggcagagtatgtccgtggagtgatgaacattggttctagttccggaacacccaaatcgcgttgagcccaaaaaatgtgtaatcacaacacatagtactgccatttgacatatgcgatctgcccaggtattgggttctctagataacccggataaatgaaagctgttcggcaaatgctgcccgagatctcgagcttggttaagagagatgcaaatctgagtacatctctgtcatgtgaacctaagcaggaaactataaaaaaaaaaacacagggtggtttattggatgtggtataagacagtgccgacaccatgtgagtaacagaagatccttatatgttgccatgtgtgactattagtggcttgtcatggtttacaacaagtcagcctgggcagcttcaggtcactggctgtaataagcctctagttgtgacgagtacgcccgaagtcttgattcgagcattgcccgaattgcgacgagccggtccactaggaaccaactgctgattgaatctctggtccgggataagccctgtacaggccagttctcatataattgttgctgacttcgggaatgacaaatcaaggttggcaccaatatcagtctatgat

SEQ ID NO: 406 - DNA, 3343 bp, Emericella nidulans
cgatcgcggaaactacattggagattgaatatgttcgcgcattaataccgcctttgcatatcgcttcctttgagcatgacgactgggtaagctctatcgatgtactctccacatcttcgcccgcttcggcaggttcagatgctatagcccgtggccaggagcggattctctctggtagttatgacgggtttcttcgagtttggaacatgtcttcccaggtgatcgcaacttcgccgtcaccgaccgatggtgggcatatttcctctatcaaagccgccaaattcatctctccgagctcaattgcgtcggcaggtctcgaccggacagtgcgcttatggaagtatactgaggccgaagatggcttctctgggaagattgtcccgcaagtcgagctgtatggacataagtcaggaatcaactcgttagccgtacatgcatccacaaatcgcatactttcggcttcggcggaccacaacgttggtttctggtcgaccaagaaatcagacgctccagccgctcctgaaagtctacttccatcagctgcctcgagaacctcaaaaaggaggaagttaaatgcttccgtgagcgtctcacaacgcgggcccctggccctcctatctggccatactgcacctgtgtccgatgcaatattcgacgccagagactcgacagtcggatattcagtgtcttgggatcactcgctgcgtacttgggatcttgttaccgccgctttagtagatacgcgcacaacgtcccactcgcttctttcgctccagcacctgcccgatcacaacctcctcgccactggaacatctgcccgtcacatcactctcatagatccccgtgcgtcagcagcaacaatttcggccatgactctccggggtcatacaaatgccgtggtttcgttagctcgggacccgcacagcatatatggccttattagtggtagtcacgatggtacatgtcgaatctgggatttgcgtgctacgaaaacagataaaggcggtgccgtgggtgaaagcgtatattctatctcacggaagagcttggaggaagagggcaaggcgaacagcaagcgcgtgggaggtgagggtgtcaaagtctttagcgtgtgctgggatcgtgaggtgggcattgtgagcgccggtgaagacaagcgaattcaaatcaaccgcggcgagggcgtattgtcttctagttaagtttacataaagacagatttgaagtctacatataaacaaaagtttaatctctggcatcatgctacaaactgataaacatctttccgttacattccgtcgatctctaggggaataaaagtatcaatcctgaaaaatacataatactaacatacaacgccttgccatgcccttgcacaataacctaaaccagccgccagagcgaccagagcgaaccgagccacaccctgaagttcacatttaaagtcgtctatcaatacggttaagcctgatggctattttgttctagagcaactgaattagtatactacttctcaaggtcagcattaggagcatggataaacttacgttgtttcttgtcctctgtcctcgaaccggcagtccaagcgcatggcgccggccacggtaagttccagtctcctttaaccgcttgatgtcatcgagaacctgtcgtcggagatcgttctcaatcttcatttctgaaagcacagccgtcaggtcgaggacctgtttgttggccagctcgccgaccttgcatgtttggtggatgtggaaacgggacatgatgcgcgatgagacttgcgggccgacaccgaaaaatttctgaagagacttctaaatagacaaacttggttaggtctgaggccagacgaccaaagcgccgcatatcgaggcttcattaacgggggttcttgcctggacgagctggccctcggggaagttcacgcctaagatgaagacctggcttgcggtcagtttatgaaaggaaataaaatgataatatccggcataccattttggcggttgtttcgtgtcgtctcaatgatccaggtctgtgtcaagcggcttctttgctctggatggtagcgcgagaaattgagtcccgcaacagcgttcttccggtatctttaagcctaatttgcaatctggagccttgagcacggaccatctatggccttaggctgcaattatgcagctaagttaagagtgttatcgagatgtaaattaccgctaattagtccgctgtccattgataaggcaagctgtcctccgcgaattgagctccggaactcctccttgtctttaaaccagctctcacctaccatattcggcgcggttggaaacctgtggacgatgacgagccttaagagccttttcttatctttcttcctagtcgtggctcttggcctggctcttgttaatgcctctgagccccgcggaccgaaaatcaccaacaaggtgagattgccctgacgctcggcggcttgtgttggcttaataacgcaacggatcttgtaggtgtacttcgatattcagcatggagatgagagtctaggacgaattgtgttgggactctatgggaagactgtgcccgaggtaggtatccctctctcctccgactgttacatatgctgagttgagaaactacagactgctgagaacttccggtatggcttttgagttacttgaactccagcggctttagcaatactgacagtatttattcaagtgctctcgctaccggcgaaaagggctttggatatgaagggtccaacttccaccgtgtgatcaaggatttcatgattcagggtggtgacttcaccaggggcgatggtaagctatgatcaccgaattgcggagatattagcgtgtgacattaaccaatctccaacaaggtaccggaggaaagtcgatttacggtgcgaagttcaaagatgagaatttcaagctgaggcatactaagaccggtctcctgagcatggccaatgccgggaaagacaccaacggttctcagttctttatcaccactgctgtcaccccgtaagttacactgtcaccctaatatgaataatgatggattgacactctgcctagttggctcgatggcaagcacgtcgttttcggtgaggttctcgagggctacgatattgtcgacaagatccagaacgttcctaagggccgcaacgacaggcccctcaaggacgtcaagatcgtcaagagcggcgaattggagatggaggccgacgtcgcgaacgaaggtgacaagaaaggtagccacaacgagctttaaaggcgtgctcgctctatctccgtcatagaatgcccgatgctgatgggttttgttatgaaaagccttgccgagc

SEQ ID NO: 407 - DNA, 1201 bp, Emericella nidulans
tcgcaaaagaaccacccatgacaggtccccccccggatcacattgggttctaaagtttatggacgccatttgaatgatattctccgcagtctgtttcgcaatgtctaattcctgttcatcattaagatcgccccattacccaccaagttgttccccgttgttccatcacaatgtaccccatggtgccaaaatatttcgtttcgtccgtgaattggagtgaccctaaacgctaggagctcgaatgttggaccttgatgcaattagttggagtacctttgcctcacaaggtagcaaattgccgccgccttttaagacaaaattattggacggtttgccgagatcataaaggattggagctgacttgaggaggtcagcgagtgattcgtcagaaagagagtcgagttctttatcgtacagcgggattgccctgtctggggccttactggcctggccgtctgtggaaattgtcagtacggggttcatttgaagtaactcatgtacgggtgtcaatacgtcgtgaataggcgtaaggtaccctccatatttcttatgtactcttcgccaagccgagtcgaccccggctaggattatataaacactccgtctctggtgaaagaaaggatcgtattcatttgagctaggcacgacatatttgtctttcatacacggcagggggtagctgcacgacgagcgaaagagctctggcagacacgggacacgagtacctccagcaaacccgataaaactcaccgtgcacctcgcggccctgctccacgatatcagcgaccgaaagtatcttccaaaacgcaaaaagcaaacgcaattccaccgcacaagttagtcgagcatattctcctcttgcacggggcggatcctgtgcttgcaacccgtgtccagacgatcgtctcgcatgtctcgtatacgacgtagtgtaaggatccgtccgctgtaaggcggttagttggcgagggaggtatgttgaacttgcgattgtgcaggatgcggatcgcctggatgcggtgggggatgtaggaatcgggcggtgttttacgttcttaggtgcgaagggcagggatatgttgaggagtgaggaggaatgggagatggggatccgattaagcattttgggggaaaactggagaggttggaggggattatgaagacggggacggggagggcatggcgagagttcgcacggaga

SEQ ID NO: 408 - DNA, 4919 bp, Emericella nidulans
ctgacgacctggttgttgggaaccttctcgttctgcagctcgaggtgaccgatacctctgtaccagtatccctgcgctgtccgacgtacgctcgccatggagctgctgaggcttctgctggaccacccctacgccgtcgccggcgcggcggtttcagtgtacattgcgtcaattgtgatctatcgactctacctgtcgcccatcgcacacttcccaggcccccggctcgcggcgctgacggtgatgtatgagttctattgggaggctatccggcacggcaagtttacgtttcacattggcgagctacataagaaatacggtaccgtcgcctccttcccttctctgtgttttcctccgtcttcgctgttttcgcgggcattgcgtggtgcgagagtatgtgctgaccgtacaggccctattgtccgcatcagcccaacagaactgcacgtcaacgacccggaatactacgaagtcatctacagccgagacagcccgcgtaacaagtatccctactatcagcggactttcaatgctccctatgctctcatcacggccgaagaccactaccgccaccggctgctgcggtcccagctgaacccgttcttctccatccagcgcatccgccagctcgagccgacgctgaaagcgctcgtcgataagctgtgccgccggctcgaagaactgaaaggcaccggccagccgatcgatatcgagtacccgcttacctgctacacgactgatgtcatcaccgactacaccatgggcgagggcggctaccactacctcgacgagcccgacttcattccccagtggcagcacatgctctgtggcacggcgaagacactggtcttcatccgcccgattgcgttccttctgccggtccttgtcgccatgcccgaggcgctgacggcgtggttgaatcccggaatggaactgttcttcgccttccagcaccgctgccgtaagcgcattgccgagatcacaaagagacaccgggagaatggaccgcttgagacgaaggacgggcgccagaatctgttcgataacgtgctcaacagcaacctgccggagcatgagaagagcgaggcgcgactcgcgcaggacatgcaggtcttcgtctctgcgggcgcggagaccacggcaaaggcgatgagctacattatgttctacctgcataacgagccagctctgttgcagaggttgaaggatgagctggcgccgctgggcaatgacccgagtctggtccagctggagcagctgccctacctggtgagtaggcgacagctctctctctctcgctctcttttttttttccccgcaacatactgacattcaattcagaccagcgtcatgcttgaagggctccggtaaagtccacacctgcgtcttctcataagtgtgctaataaacttgtttagcctctcgtatggtgtcacagctcgcctccctcgcatcgccccgtacaacgctcttaagtacaaggactggacaattccccccggtgtatgaccgacccctctccccttcggactgtttgctgatggtcgaccatagacccctatcagcatgagctgtctcctcatgcaccacgatgaatccatcttcccggactcttatcgcttcaacccagaccgctggatggacccgaccgagcgaaaacacttggaaaagtacatggttgccttttcaaggggatctaggatgtgtatcgggatgcagtacgttccaccccctttattctctatctggtctaatgggtccagcctcgctcgctcggagatcctgcttgtgatctcgagtcttctccgccgactgaactttgagctttacgagaccaccgtcgaagatgtgcgtgttgcccacgacatcttcattccatttgtcaaattggacagtaagggcgtgaggttcttgatcaaataaccatttagccagcgggtgggtatattgcaattccatttttagcctttttcccccttttttttcttgcatatgatatacacctgaatgacaacatataatacccaatgtcagccgcattgatctatctggagctgtccttagtagacgttcggtgtgggtggcgattgggcgtgtccctagcgcagctgcgtcgggttcgatgtaagacaggtcaatgctggaaatcggcagcatcccttacagggaagcgtggaaaatccccattggtcatcctatgacggctcgtgggctttgatgcaggatccaagacaccagaagcctcgtccatggagtacccggtcagctgcagacactatagccgtagtgcttatggctgagatattgtgcatgcatccggtccatccagctctcatgtagtgccgcccagccaatggtaataaatgaaattgaagtgggtagttcctggacatgtccagttgaatgcttgttttgctcggctctcgttctcagcaggcgtgcaggatccggcaccagtgctttgatgtgtaggtctggagctacacgctgcaatagagtacttatcacgtcctctccgcttaccagcgcagcatagaatgccacatcaaaggcatcaaggacattcaatgattgttgaattgtctgtagacgaagttcaaatacataggcagaatatattcgacacttgagcaattctcagtcaagggagcggccgggagccggccattacggacgcagtgatttgagatgagacataaaaggcagctggcaagcggagacacggactcagcctaccgactgcaaggaaggatgtttctacatggatctcaggtagtagttatctgtataaagttgcgagatctcgtcattggctgagatataccgctagcccatggaagccacctcgaaggttgaaaaacgaccatcatgagtacgcatgtcctgggaagggactgggagcgcggtcaggagggtagcacctgaacctgaatagtttcatcgctcattaggtctgtgcactgcactggtggttctcgcgggcagcgtagagaaccctaggaaatggaatcacatagactgcacctaacagcgagaggccgtgctttatgaactatataatgtgctagttttaaggtgctgattgtcacaataatcatataataccgacatggcgaacaagcagacagctcgcgcatatcatttgcgggctatatcagttaagctgcatactgatgttcaagtctaccagagtctctgtcctttatatctgaaaatatacgcgagagttctagaaggttgctggtcctcttttaaggccggagcaaccactccttgcgctgattacaaattacagtggcaagagcagactccctgcactccaagattagacaccattctctcagttcacttaatggaaagctggccagtatgtgccatgatactccgcgccgctaggtcgccgtgcgtgaagacgagcctgctatggagtagaccttcccacggcgagcggcgatgaggggcttgaccctcgcgagacagaatccttcaacctctctgagtcaaacagggccacgtagcaaggatcagcgcgaatataaagagttcacggagaccctatttgcatcaaactggggtcacgcgtcccgacttctcacaggacgtgggtggggagaggggtttggagaccgctacaagtacgcgcgcactgcacgcctataaacatcacggcttactaactgtttacattttgcagatgcattgttgaagctcccagtaaaggtacctctagtcaacctctttcatattattagaaactcaatatgtacgagaatattaatatgctgccagacttttccctaacccgcagtcccactatctgaggcgggaggcatggtcaatcgccctaattcttccagtacctctcacgccaacctgttcacctcactcagttcccacagtatacggcacagttcctcaatctcacaatcattccgtatttttccagcctcggcggcatttccatacgtagcaagaaagactgctgcgcggaatattgcttttgaaaggaaagggtgagcatgcgcacactcttatcagaacatatctgcaagtcataatattgtccaaaacctgaagggaagaaagagcgtaccctaaaacaattaactgggcacatgaacttagccaacgccacaaactccgcagcagtctgagctgatctctgcaaacccccggtggcatgcccacctcttcccccagtcccaatgtcaaagctacggctatggctgtgacagttcatgagcgtctcctgctcacttgttgctagattctgcacggcggaatttgcgttttcaatcagccgtcgttcggacatcccacccagctgctcgcgagcagtttggccaactttgccaagataaattattaatgtcttctccaacagacatgtaaacgccgttagcggatctgcggttaccaggggtgtagtggctgacgggctgtatgaccacagggctgagcgcttctcgacaatgtctgacagtgccctatgtctttcccagaacatcgacgcttccgtcgaggttgagaggaggagcgcactgcggcgcaggttcattgtgcggccgtgcagtgtggccaggacgatgtactcggcgaatggagggagggtcttttgtccgctgcttgcgatggcttcgtgtaagtagtccatcggttgctcagggggccgggggatctggaacgcgctttcggagacgggcagacgtatccatatctgtcgagtcctggattagcccgttctcttctagacggctgatatctcccaaccaaatagggactgtaccgcctcctcctgcaatgtaaacggccactcattcctcgaggtcaagaaccggtcgaagcagtaaacaacccaaaacgtcctcctggtctcctcccccgtaacgaaatctcgtcgggcgccggcataagtgcgc

SEQ ID NO: 409 - DNA, 2087 bp, Emericella nidulans
gaacatatcaccatcgaaaaaaaaaatgacacctgcagcagtacaggtagtgccacggaaagggaagtcatcctacgctcgcgagatgactggtttgaatggtacgaagtcatcaaggatcatgccaagaagcaaggtgtatgggaatacttcgatcctgatgtcaaagacgaaacaaggcctgatccgccagcaagaccgagggttccaccagagattgaggttacggaagatgtatatcaaagttatcaaaaggcgttgcagtcttggaagggtacacaagatgcgatcatatcaacaaaagaagcaattcgcggctcagtggctctacatatacgaagctttatagcaggcgaagaaccatataagttgttgaggatcctgaagaagctatacgagccaagcgatctggaggcagatttgggagctctgaagaagtataatactgccatatcccggccgattcgccaagggaagatatctgcatggctcaacgattttgagagtgcttaccttgcgattcgacgtcgcaatcttccagaaagcaatgacagacatgttaagcggcagtttctggcagcaatatcggcagtatcctattcctttgcggatagacagtttgtgttaatggttgaaccgacgtatgagaaggaggactttcattcgctcctaagacgatatcgggcgtatctggactacacgaaaagcttcaagacaagaacttcaagcatggcatctgcaactttccatggccagaatgatggtgcgttaaactcaacgaaatccaacaccaaacggaacccatgtgtatgcggaaagaaccatgcatacagcaattgttggtatatcataagctcaaaacggccgacgtggtggaagcctaacaaacaaacggaggccaaggttagcgaagctatcgcgaaggatgacaagctgggaaggaagctaaaagccctgttggaacgtgatgtgcagcaaaacaaggacaaggaccagaaggagagaaaccaggcaaacgagcactatgtcatggaacttgtttctagcgcagggatttgctagtgctgaagcatgctttatcctagatattaggatattccaagacaactatgatccattaggaacatgaactctcgtgctggcaatacggcgatgaaaatataaggcactgaaagtgtcaagttccgtcaaaactgtggtggagagtcagaaatcattgcaattaccctaaccacacagctagtgccaggccttaatacaaacatcgctggagtcaggaagctcaaacaagcaggatgcacctggggttttaaaaatgacgccatcaagaagggatagccctttttgccttagcgggacgttcaatatgagactaggcaagcaatttacgtaataaaccatgtctctcgccagaatactagtcattatacaggaaattataattaatcaggcaaagcagactgttgagagaaaccgagaaaagtaatcagttcgtacttttggcgcacagacgagtgccgcagatatatcagaattagtgattacgttgcaaatgcagagaaaatcgagttgcacgtctacagtcttggtggacttcgtattgcgattcgtattgcgatataggtatcaaaccacgtggacgtgactgtggccgtggctgtacactgggtacgggacaccataaacgaggagatacgaggcaactctgtcatcactcctgcatcgtgtaaaggcgattccagtccttccatacacaattttccggtaagcccctgcgatggcgctcacgaccgaagaaactgcgctggtcgaaacagccactgtgacaatcaacagcatcccagtttctgaagactacagtgtcgcgagcgccgccctctcctccgatggacgcatcttcaccggtgtcaatgtataccatttcaccggcggtccctgcgcagagcttgtagtgatgggtgttgcagccgcagcaggagtgacgcatttaaaacacatcgtcgccgtggggaacaatgatcgcggggtcctgagtccatgcggccggtgtcgacaggtcttgctcgatctgcagccgggagtccgag

SEQ ID NO: 410 - DNA, 4472 bp, Emericella nidulans
ccctgatttgcagtcattcctgtacttccagtcttgctaaccacccaatcgctccggccagatgatcccaacgacccggaattcactcagaacctccagtgccatcccggcagcagcggagacgtcaagcttccagaactccgatgtaggctctcacttggaccggtaccttgtggctcttggtgcggcgcgtatgctgatctcttgcagtcaactgcgacctcctctggggcttcgtcgagcccgccagtgggaagacgtcggacgagaccgaccacgacgcaggcaaggtgacgggcctgtgtgagccaatcctcgacattcccagcaacaaacgaaccgaggccttcacattctccaacgacaaagatcgcacggccgcgcggtacaaggcgcaatgcccctcggggacgtgcaagcaaccctctgcggatctgaacaaggccctgaatcgcagaaacctgcagctccagtgcgacgagttcccctggatgtcgtccgagcaggggggccactatctgcccagcgactcccgcagcgcaacctgcgtgccttcgttccagaacaactggcacggacagtgcctcagtacgtattgaatcgacccggggctcgcggcctgtacggctttttgctgacacgagacagaactgatgggtcagttccagtcgaactggaaaaagctggatcctgatgcacccgccgacgatgaacgagaggactattgggtcccatggtcgtcaccgcgtaagaccgtcccccgctcgcgtactctactggcctcttgctgaccgcggctctcctcgcgataccaggctggacatcaataggcgagtatgggccagaaggctccaaatactcgcagaagctcatagagtaccccaccgcacagccgcctcccgatggggttagaacccgggtacgtatctgacgggtttatagatagggtcgtttatctaacgtgccacagaacgacgacaagctctcttgggctttcaagcgcgactaccgcgtctcgtggatccaccaggacccgaccaccatcaccagcagcacctggtgggatgccacgggcaagacgctcaagggaggtggccacggccccgcgggcatggacgcgatcctctgcgcagtcaacatctttggccaggaggacacgtacaagcttccgcagggccaaaacggaccgtataacgcctactgccgcaaggaatcgaacgagatcaaatactggtctgtggactacagtatgggtacctgcctggtcacgttcgccgacgggaccagcaacaccaaaagggacagcggcagctgggctggatgggaggtcaagagtaagttcattccgcgccccaggcggggactcagcgactgatcgagttggcaggcgtagaaatggtggacaacgttgccggcgatctggaggaggacttgaggcgagcacaagagatggcaaggagggaccgccggccttgagtacggtctatggctgctctaattctgaccgtttgttgtagttggcaacagttcgttctgtttctgtagacatagattgttttaggaccctgccaaagcggagactgtgtatccaacggctgatgcataaaaataatgacgctggctagactctgtagagcagtatcctgtccagtggatgtttggcgcggctgccactgtggatgccctaattcacttcttgatccttagcatcagcgaatcggcagtgccatgttccacatttacgtctatcccagccaatgaatttcagcttcgtctcctttttagctgccgctggctgattcatatcttcacgccttcccgtcccaacgtccccacccccacttccaaacaccaccaccttctctcgccatgtcgaacgaggaccgaggatacatcccgaaatggggcgagctgcccgtcgagcagtacctgattgcacgtttccctttcaagctctcctgcccaagcacgaccactaacgtcccgcagagacactgggactctgcagcgacagagtccgccgacgaacagcgcctccggctcatccggcaattcatcgatctggatgagataccccgcgaatgggatcccgtcaactacggcgcaccgccgccacgcatgcccacggcggaggagatcgacacggtcctgcgtccctggcggtcggacgaactgcgccagcaggcatggcaaatcctggaatccggcaacgccgccccgatcctcctccggacgcactacgacccagagggcgacgagaagatggaggagtggatcggcgcgtcggaggaattcgagaaccaagcctggtgggcgtgtctgaacgatccagctctcttcgactttggctccgactggcagcgcgtctacgacatcgtgcccgaggtcgcaggcccggtgggcggtgccgggtaccggcgtacccggcatcggaaatcgtcgaaatgtcccgaacgcagttcaagacctcgttcggcaaggcaaagcagaatgagcctgatcggtggcgagaggatcggcatcggttcgtcgaactcgaggcagccgacctcctccgcacagtggcagcagcgtacattcttgttgcggatcaggagacctttgagaccggtggccaattgcgtctgctctatctcgacgggaagcggaacgtcatccgggagacccgcgtcgaggccgatgcgcagacgatcacagacgtcatcatggactgggatcagttgaatctgccgccggacctgtgggaggaggggaccatcggcgataggtaccgcgttaccggggatttggggagggagctgtatcaattgagcgaggctgatatggcggatccctgatccgcgtctgatcctactcaggggctgtattcatcaggccagtgcccgttccgcagcatggatccccagttacgcaagcagcaggccaagacagcatcagagaacgaggaagagagcttttattgcatccgatttgattcctgcgtccggtactggctcgagccaaggagttacggtccaaactaggttttcgggagtttcttgacactccttcacttctgtatactaatcatcactcgtctacgttatgtgtatatgagtacggtagatgggactgctcgaaactgctggagcagccctgtcctgatcatcatcttggctgcttgtactgccgatcaatgggacgattgcctaatacctttacctagcgtcgcccagagttctttatccccggtaacatcatgttcaatcacacggatcctgactttaagcggcagtgataagaggcactgaagtggtgtagagagttgctggacaagatgtcgattcaaggatctacgcctactctcccaaactgacagtaacgaacagggagatgcaggaagagcagattattcatactgtaagattgaatcaagtgtccgaagcggaagccgagaaaggaatcaaggcatggaaccagcaatagtgagatgcgtcaaaggtagctgctggactatttttatcgcggaatcaagcagatagttgtgggtgtagccgaaaaaggtgaagcgataacctaactgactgaggtgtggcactgaaggataaacaagagatgtgagctgggctttgagcctcttaaatcgggagacgaccaatgccactacatttcgtggagagaactccgcagaaagtgaagtcatccaaatgaatgtttacttgctgcgttccgtgcattatatagtatggagaaaggtaacgaggctgtggcctcccatggtggctttgcgtatttcgatgtaattggcttcaccaacggacgactcagagctcgaccagctctctaacaagcagcctaggtattcatctataacctggtctagttgaaccacgcgcggcccgactacatgccaatcatctcgccgctgtaagtattcaagtatcaaaccaaaaggatcgtctcaataaccctcactgaaaattcagtttctcaaggtccccgtgtagtcaaggaatgcgtctagtgcacattggccagtccgagaaaagatgaatcaatagacagggaaggtggggggaggatagttataaacattaagtcaaatcagtggcagggtgactgtgaataggttctctcactctttctactcaatatggacatgcgtcggaccgtgataacgaggaattaagaataccatccgtgcaaatatacgaggcttacgggagccggcgcaacatagacaactttttcgtccttaatgcgtaccttaacttcctcaaaacccgctgctggatgtggtggcgctggaaccgcggcccactagctgacagctcaatgcaacagtatattaataagatagctgacccagaccaggctttgtggcgtcttcgcagcgtcatatctgtgtattagtacctgaacatggaagaagtacagcataggctgcttgcttaatactgcgacattgccaataaatactggataattaatca

SEQ ID NO: 411 - DNA, 3753 bp, Emericella nidulans
caatccgggtgatctagtagatatcgctggtatcttccttcctacaccttacaccggcttcagagcgattcgcgctggattgctcacagacacctatctcgaagcccagcacatcacccaccacaagaagtcttacaacgacatcggcatagacagccgaaccctacgcaagatcgaacaacaccaaaagtccggcaacatgtatgagtacctcgcccggtccattgcgcctgaaatctacggccacttggatgtcaagaaagcgctgcttctgctcctcattggcggtgtcactaaagagatgggcgacggcatgcacattcgtggtgacatcaacatctgcctgatgggtgatcccggtgttgccaaatcgcaactgttaaaatacattgccaaggtcgccccgcgaggtgtttacacgacaggtcgtggtagcagtggtgttggtctcacagctgctgttatgcgtgaccctgttacggacgaaatgattcttgagggtggtgccctggtactcgcagataatggtatctgttgcatcgatgaattcgacaagatggaagacggggaccgaacagccattcacgaagtcatggaacaacagactatctccatttccaaagccggcatcaccaccacccttaatgctcgtacttctatccttgctgcagccaacccgctgtacggtcgctacaacccccgagtttctccagtcgagaacatcaatcttccagcagctctactttctcgcttcgacgtgatgttcctcatcctcgacactccgtcccgcgatgcagacgaggagctggccagtcacgtcgcttacgtccacatgcacaacaagcaccccgaaaacgaagatgcaggcgtcatgttcacaccacacgaggtccgccaatatattgccaaggcacgaacataccgtcccgttgttccctcacgggtctctgactacatggtcggcgcctatgtgcaaatgagaaagcgccagaagcgcgacgaagcgaacaaaaagcagttctcccacgtcaccccgcgtaccctgctcggtgttgtccgtatctcccaggctcttgcgcgccttcggttcagtgaagaggtcgttacagaggacgtcgacgaggccctgcgcctgattgaggtcagccgagcgtccctgtccaacgatggccaatcgcaccttgaccaaagccctacatctaagatctacaacctcatccgtggtatgctcgagagcggtgcagctgccgtcggagacggcgaagacggcgagctcagcatgaggagaatccgagagagggttctggcaaagggctttacagaggatcaactcacaatgacgatcgacgagtatgaaaactctcacgtacgtctcttaatttccccacgttacctgcatcttccgctaacattcaactccaggtctggcaagttatcgccaacggcacgcgtctcgtattcctcgacaacgttgatgacatggacatgtaaaggacttccatctcctaatataccaaactcatttgctatgctacgctatgctacctggttatgtattggttccgcattctagagtaattcatgaagtgggatgaatcgggtcggtgttatggtgtattttatattaggctaatactttttgcgttatcatatatgatctgagcctattccacaattcgtcattatctttttaccctcagtcaaagttttcagtaaagtaataattcatactgatgtgtccttatttagcgaaaatgctccatctaatctcaaccctatgagaattctgggagacataaaagggcgacaccccctaataaggcggctgttattagaactactcctgtagctgagcccactgcctataaatccgaatagagttatagtgacaaactggttatgactagatatacaaaattttgtgaaggagagtataattatatataaggagtggtgcccgttgaatcaatcatgaaattttcaaggggaagctatccactaaaccaatcaatattaacaagctttgaatgatccgtaaatcgttccatcatctcacatatataaggcattcaagtcttatcaacaaccactcgtcacaatcaccttctccgcccaacctttcttgcacttcccaaacctaacgaagaaccttaaacagcacacttatcatataccggtacctccttacacaaatccttgctatttccatacgggttatcgcagagtgtatcacaggtggtatactcaggcgtaaacaccaagaactcataatccggcatcggcaggcggaactgcttggtcacgtcattgttcttcttagaagccttgtagccagcacggcaggcacagtggaagcgggttcccgtgttgatgcacgaggttgtgatgtcgcagccgttgaccccggagataggattgcacactccacacttggggggcggggttggtttggcgagggccagggcggctgttgaaaggaggagaagggcagagagcttcattttcgggttgggttggattgtagtggatctatttaaatattgatatggtttggtttagaggagaaatgcttgctgaggaggaagaagatgagaaatgagaatgaggagatccctcgagagtcggccgtctttatatacttcgatctgggctatttctcgaccttctccttggtagttgtcaagctgagagggaaagcgtatgcgataggcgctgccacttatgatcacaacaagccagtccgtaagccctaattgagacatggcaaagtcaagatcccacctcgacccaataaataagccctcatatccccggatgcagaaggacgacaaagaaggattgaagacactgacacctagccccggaaagggctgattttgaccctgcatcgcttggtctcacctcccgcggctgaactagaaagccaccgttctgctagggctgagaacagatttgaatacgagatttgcgtcaccatgagatcgaactctagctgcggcgccggctcagtctccttcttaccttctagtgttgtccagagttcagggcatggctgttttgagtaacaatgtgatcttgatccgatgctgtcactgatgcttctttacgaagtatccgagggggtttgcaggatccctgttcgagctatgatctgggattactcccccgcttttgtctaaatggattctgctgtcagcaaaagcatctggtggtgacaaatgaatattcaataccaatcagtatctgcctttaggactatgggcaggaataaactaatcttttcaagtgagacatcttgacctcatcattgggaaaaagagtaagacatggggttgctgggaatgtggaggaagaaaagttcgaaacctggcaaatgattgaagctgggaaacgagattccgctgaagggctcccggggtcccaagtccccgtcgagtcctgggctttgagcgtaataagtcgcttcaagggcagagggggtcccctactggccaatcgagaaataatcaactgcttatccaatgctatttttcaggcggtagaagaaggcctgatctggccgcttctggaattgccaaaaagaaagtttgtagaatcgaatttttcgggtctagattcccggtttttcaatgggcatttccccctctttccttttaagcttggcccctaccctagtcccgggggtggaattttccctcctcgaaaatgtctgttctccttctgaagggggactccttttttttccccctccac

SEQ ID NO: 412 - DNA, 3277 bp, Emericella nidulans
catattatgataagtaaagtgaggggatgggcgaggtgagatatcttttcacgtcgacatggatttttcaatcaaatcaacctcgaaagaaactttggtgtcccttgatcaattctgactggaactcttgcgtaccggctcgaaatttatgggaattagaaggtattgttgcaaagtagttatctggaagttcaacgctgtagcccttgaaaatcgttgctcctcatatccttggtgaaaaataatatgatccttccagagaacggtaggtaagtgactgttctatcttattgcgtctgaaaccgtgggcggatcctgagtaaatgtgtctccgtaatttggatatggtgattttgcggcggtggggattcgatgttatttatcttcctgcggctgtactagaagcgaggattactcgaacagagagggaagcttgctccaaagagatttgtggggattgtattcggttcaaagtctcagtcctcgttcgttgcttctcggctgactaggacagggctatgtgttgatattgactagatcaataacccctcacccactccctcacttatttagattgtgagggcgcatcaagcgcttactcacaggcaatactcgatccaggaaactcccatagagatgttgaggatccgatgatcctcctggttgagaagacacagtgtctgaatagagtgccgatggaccgatcctcggcctcatacgaatgatacatgcggccgacactagtgatagtgtccattattcccagctaagtgacaactcgaacagaaaccacataccttccgtctggcagttgaaatgagtggtaaattgatgtggcaagggtttagctacgttcaagataatgctgccctgacaggattctgagatgtcatctcgcagtctggagagagacgatttagccttcgttcaaactatgacagaaaagctcgtgtttcactttttaggtgcagctacttacaatttcatgctttggatccttattaacggctgtgacagatatatcctcggaatacatagaagaagccttccagatacaggagttatagttgttgtctgctcttctggaatagctgaataaagtatatgaatgatcaagctcagcagtagaggtcatttgatctgtttctttacgagcttcgaattataagtatacatatctcagcacagaccgaattggtttctctgtaggtctggctatagctagtatacacgaattattgccccttacaccacagtagcgctgggtctcggaaacattttcctaccctgaggtacatagtataatagtctaagataagtaaatattggcgggaaaacagctcttacacggcggagagaataacagacaatgcaggtggatgatggttcgccggcagggtgattccactcaaagcaaacttcgtgcatgctcttgcatgagggcaagatgcatctaaacgcttaaatctcttccccgggactggcggactgaataggaattggtctcgatgcggacagattgctctctacagaccgctgtgattcgcctttcccgtcttagtttccccgtgtttgtttaacgtctcttcaggttgatcatcaatgtgagattaaacatggttactgggcattccagcgctattacgctggcagcggttcgtgtccgtccagctgaaatcccaacctccgcatcatagcaggcaaatgcgcatggagttgcggctttctcttttgcacttgtacgggatttgatgctctatttcgagaactaccgcagaaaagcttccaagtactgaaagctctcgttgccatcatccatcctctgatcaaggagaggtgtcttcacctctcgcgactgaacacggtgctggtacagaaattgcccaggaaacggcgtaccacaaagagaaaggttaggtttcgctcaattgcttcatggcatatatgatctacaatggaatgatacataatggcaaacagtccacgagctttgtttcgtcagtcatcgcacagacacagtaagactactcgctgagcttgttgaccgcgaaaatgttgtctatgtgcggggatctccggcatgcggcaaaacaacacttgcccgtctccttcagcagtattatagagagcagaagagggtcgtttatttcatcagcatttggaagaatctcgaggattaccccactgaaggcgagggcgagccatggcagaagttgacacagactatctgcagtcgcttcaaacttaggccgtgctcgaaagctatctccaggagctgtcatcatcgtagacgaagccaaaaggacctacttggatacggaattctggagtctcgtgatcaaggaaccgatctacagccagggtaaagatatcagattctgtcttttttgctcgtttggcagtccattgactggtgtcgacgggcaaactgacacgtttactccagctatcttgaaaccatgtcagcgcgttgcattcaccccagaatcatcatcatcaccaccaattgaaccttcttccctaccatcagtagggctttttttcacagcagatgagttcaaggacgccgttcagcaaatttgcgcatatacgaagtttgaggcaggttttatgctcgatactgatgccggagactatctgttttccttgacaagtggccaccctggcggtgtcaagtcgttattaaactagttctattatgtccgtttttctacctcttgagctaaattgcatctctctagataagctcgattagctgacaatatattagcattaccgggatacaatcaagcacggcaagatatcaccaatcacaaaatctcatgttatcgacagcttgcaagatgatgaacgagtttggaggtttctagagactacaccagttatcgttcatttgcaacaggtccttcactgagtattcgagttgcaaaggttcttcgtcatgtcctagagcaagggagtatacctgttgacaagcaggatgatatcactgtggctgatgatagcaatacggatctggaagagactaaggaaacgtgttatgtagaggatggttacacaaaccttggtacctatggacaaagcacgcaaggagatatatacatttccacctcgtctgcacgtctgcacgagaagcaagtctccctaagtatccactaaatattttgggtgtatcatgctaatctattccaggtgggttgaatggatcctcaacaagcagaatatatgcttggagtcgaagtacaacagcttacgatgattatgtgtggacatcttg

SEQ ID NO: 413 - DNA, 2138 bp, Emericella nidulans
taagtcctaataatgtatcgaccactcgtggttctcagcgccatccttgccgtacataaccgcctcaagccacgacttgatctgagcagcgtatcccgcagtctggcccggcttgaggagctggatatcgacagcaccgttacggatgagcttgacaggggtgatgaagaactgtaatcacgttagacatttcgagctctgaagaaaatggagaggaagcaacatactgcagtcccacaaacaaaagcctcgacaaccctgccctccttccacgccgcctcaacatcccagattgtaaatgtcttctcaacaacttcgacagcctcgaggtcgcccacagcctggttgagccttgaccgtgcaagctccagaacactacgtctcgttacgcctgggaggataagctgattctctaacggagcagtcacaagctcccgcttccccgtctgcgcattctcccagacaatgaaaaagttgcttgcaccggcctcagtcacttgacggtcttcaccgaagagccaaagaacctggtcgaagccctgcgcctgcgccttgccgtgcgctgcgagcgaggggccgtagttggcgccgagcttggcgtatccgaaaccgccaggccaggcgcggatggtgtcgggtgcggaggtgaggagttttaggccaagggcttcgccgggggttgccttgagccgggtggctggatcgggccaggggacggcgatgatgaaaaggagggcttcggcgggtgcttgaacgccaagctgcgtgccggatccgatgagggttggacgaaggtagaggaaacgaccaggctggtccttaggaagccagcctgtttatgttagcttgacggtagggatggggaaatggtgcggggaaacatacgtaaaccgtcaatctgcatcagtttggcgatgagggtcttgagctcctggaaccggaaactcggcagggacgccctgacagcgctgttcgatagacgctcaccgttgaggtctggtctaaaaaggcgcagtttcccatcgaagccgcgatacaccttcatgccctcaaaacattccgtagcgtagtgcaggcatgacgccgtcggagggatgctgagattctggaatggtttcacctcgggtgtctcccatccgccagcagcagtccagcgcgcggtaaccatgtggtcggtgcagtaggagtgacttagctcctcaagcgagcctgggagggggacatggcgtagttcggtcgaacgagtgatcttgacgaccgaggcgtcgagctcagctagagtgttgccaatggagcccatggtttaaatcacgtgggatagatatagacaaaagaggcacaatccggttctgagttgtaaacgagactctggtgttagttatagattgagcgcgatctcgggagtgagtcacgataaggaatccaaacgagcgccgacttcgctccggcgtcaattgagatctcagttggcgtatatgatgcgcaaaccgagatagagagtgtgaaggtaaaatgaaaagaaagttcttcagataattgccgtgctacagattaatattcaagaaacttcacgatgatttttttaatgagaatccccaccgtttgcattttacgccgcggatagccgagcgcagtgcagaagcaatgtgagcataacgtaatccaccaccgagctgcgcggaccaccgagctgcgcggccaaatgtagaaaaacaatgttcagaaatataaatgagaactgcaggcttcaggcaatacaaatattatatttttcctatcagatagaacagtactatctattagtacatgacaatctattatgtccggtctgattgcagttgctgcaggttggtggcctacattgctttggtacctgttgggcaagttcttcatgttctcgagccttttgctgcccttcactgcctgtcagactgccactagtctagataaaataccttgatgtcttctgcttctttttttggtatattatacctgcatgaagttgctggatctcttgctgcactagaacagtattctgtatagtaatctctgcacatttaacaatcttatccactgcctgctctattgtactaaaagatattgattaacagctttgaaggtgttcaatttgctgcttc

SEQ ID NO: 414 - DNA, 3457 bp, Emericella nidulans
gtccgatacgatgattgccgccactccgcagtgtggcctgtagcgggtcgcagtatttccgaagcatgtcttggtgatgctccaggccagggtcgtttagcccatggacatgcactgtaggcagccgcaacatgtgctcgtcagagcctatagtgattgaggaagaagaaggatgcgtaaacggtgtagcggcgtcgaccagaccgtgtggcagggggaggtcaggcatgagccacaccagagggccccgaccagcaaagagaatcgcgaacctgaaatgggtaattccacacctttgctgccggtagagaatgctagctgccacctttgcgccctggctgaagcccaacaggccaacccagtcgccagtagcccccttggcgtcatcggcagccatggcgtgtgcaagactggcgtcaatcgctgtaacaacatcccgggatttgagggtgtgagacatgttgtgatcgcagaaccagactctgaaaggcccatagtctctgtagaccgacgttacatctggcccgggctctctactcgtgaatggagcctgtgcatagacgagacgaaaagaatgcgcaaggcgtttttcgagtacgcggcactgcatctggaagatcacggcatttgtgcctccgccgtgaaggcagagaatgcgtggtaggtggatcgtttctgcgttgttcatgttgttgaaatgcagtactagtaaatggttttctgctaatgttcagggccagaggaggcctgtttaaacgtctgatatccttcctttcgggggtggttactccattagggccagctggagttatgatagtccgccttattgactgatgctggcgagtattcctcgagtcatgctgcttcatgactcagagtatctggacgatatgacgatatgacgggacaatgcttgctagaggtggtgcatcatgatgctcaacaccatacgatgtaattgggatatgtctagtcggctacccagaaacatacatatcagagattaagccacattgtaccttccgagggatgactgatgtatttaaaatgatctcttacatccttctcttgcatatatagagcgagcacatgctttacaatcttgccctgtacttcaggactgatgataactcaatactattgacattctctataataatcagcgctctgcgtagaaccaaggtacacttctaatgacgaagaagccccatcgccttccaagacgagacataagaccggaccacctcagcactcactgggccttgggcggccatggtttccgagtgctcccttgaatgttgcgtgtcaagtacgatcccaccgcaagccatgcgttcaaaatgactctcaagaaatcccagccccatggatgccgggttttgcgctggcggcagagatgattgacgaactcgctggatccactccctaaagggaacgatgccgtggggtgggatgtccagagatgccgccagaaccgtcaccatttccttccacaactgaccaacagggttatcgacgtgatagaccggatagacctctcctgagcctttgctgccgctgatactgagcaaatccaccatgatgctagcggctttgtccaccggcagccaatgtagcacgccttgcagatcgggaaacactttcagtgcatgagcactcttcacaacaaaaggaaagtgctcgacaggattccagaagccacttgcagttgatccagatatctggccaggccgggccaccattgcctgaaaaagctgcgggtggcggcgcagcgtgtcggtcaacatgcgctcgcacgtccatttggcctcgttatagccgccgggtatcgtcgcggcaaatgccacgggctgttcgaggacgggcgactcgttcgaaagccccgttacgccgattgaagagacaaactggaatccgatcctgcggggctcatctcctagggccatatcgcgcgccagatccaacatgttccgcattacctggagctggggctcgaaagctttgagcggccgtgtagcgctcatgggccacgcgttgtggataatgtgcgttccgtgctgggccagccagttgtactcctttttcgagagaccgagctgggcctttgaagtgtcagtcccatatacctgcagtttttcgcgggcagccggcgacagttttatgcttctggaagatagagcctcttcttgtcggctgtcggggggcgtatccttgaccggacggttgatgcaaacgacacctgagacatcggggcgctcggcgagggcttgaacaaggtgcgatcccaggctgccagatgcacctgtcacaatcaccacagctccatcaccagatccggtggtgatgattcgattgttagcgtctttaactgcccgcgaatcccagccggctgtataggcttcgactagacgcagagcctctgcattacgggctgctacatcgccatgatcaacatttagtatcgtcgaggtgagcggttcactcaccggatcgtgactcttgctagtaatttctgaggcgtcatccggagtcgaaataccagagtcggtgtcttcatcctccgagtctgagagcatagcatcgctctcggtgctggtcgaggcaccgtcttgacctccagatctcgccaacgcattcgacacgcaggcagcaaaatcacgaatgttggtggcaaccattgtctcggtgctgtcgagggtgcaatggaaagtgttctccatctctcgcgcgacttccatggccattagggaatcaatacccaagtcagccatctcgctgtcgagactcaattcgctggcctcgatgccggaaacgttggcgaccacattgcatacttcttttgcgatattgcgtgcgctactgacaggttctgtcttcgcgacgtttgtcttggttgctttgggaggtgccggcctgggaacagtagcagtgatggggccgtcatgaggctggggtcgatcaggcaacagcagtgacgctgttgcggtgcttctcacaaatgacttgtccgtcgtcattcgtgctaggatcttgctcattgtggccttgggtacgcggacatattgcaggcccaggatgacctccgccagagcacccgtcgaggcatcgaagacaaagacatcggtcacgtaagccttttcgccttgacgtgcgtggcgagcgaggacatgccagacatttggaccattctcccggccatctgtcacagtttgagcttttggcgagcgcatcaccagctcgaggccggtggcaacgaacatatcgcttgaggggatgtctgtcagcaagttgacgtacatgcctgcaatttggccgtagcagtctgccttgggaacgtcaagccaggtatcaccggagtgttgcttatgcacaatgcctgcactctctcctttctcttggcccacgatgtacttcacgccgcggtatacggacccaaagtcgacaacttcttcaaagg

SEQ ID NO: 415 - DNA, 3097 bp, Emericella nidulans
acctgagatgaatgaaacaaccgaggcaatgggcaatatgagcttgaccaatggcacaaagcacaaacaaaagaatcctgtgactaatcgggacggccatacgaagaaagccggtaatgcgcctcatccttctgaccagccatactacttctatcaagctctacctcattattatctttcgcccctggacattcgcattctcaaagccgcatttggcgagtattcctcgtttcctgcaaccatcctaccgcgtgttgagcacatcacttccggtcacattgtcgatgatgagctacgcaaacgcgtcaagtacctcggccatctccctcaaggctgtgaagtcaatttcctcgagtgtgattggagaggcgttgtcttgccggaagtcttggaacagtttagtacagagatttcgaaaagacgaaagcgacataaggacaaagagcttcgcgaagagaagagtcgtatcagggcagagaaggaagaggatgagaagcgctgggccgcagcgcgtcagagaaggccgagcgtcggcaccagcaatcggccgttctcagatcatgatttcctgccattggcaagtgatagcgccaatatcgatcttgcttcgtcggcgtccccccctcggccatcatcccatttcagtgcattggccagtccttcgagtagtccacccggagcccgcactgtctggggaactgccgctgttacatcacatctaggggcgccgccagatcatatgaggcctactcctcacgatggatggcgtgaagggtgggaagaggagctctttgctcagcaggagtccgatctgatcgcccggaccgccgtggacgagaatagtaacccctctcaaacgaaaaagaaggggaagaagaacaaaaagatcacgctcatgtccacgaacatccagcggggtgcctgacctgttggtgctagcctttgccagataactcattatacttgtattttcttcagttctttcagcggagtcatcggcggtatttgggagtagatgggcaggagtcgaggacatctcttcaaaatcatatactatattatattattggatctagacgaaatatacaccataaagcgtatatcttagtcagtagagggtttatctggctctgtagacatgcaactacaagtaatcttgtccattgtggagccatcctgcggttgttgatttgccgccccttaaaccgatcgtcgagctaaaaagttccccggcttttatttgtgttgtccttccgccaaacattcccacccactttgttttctcctcttttcgcggctataatcgaggctttcagtcctctcaggtcttgttggaagccaagtctgtcaattctcgcatgttttcgcaatcatgaccgtcacgcgctcccagacgggtagaacgcccaggtaagtcacctactcctccaggggcgaattgcgacaccgctcctattttggaattgagtctccaatattgctttgataacaattgctgacttccttttttttttttttttttcagaaaagttgaccgccctggtttcgtcgagacgcctggcagccgtcgggttacccgcagcagcgttgcgccgtccgacgaggcaaccgacacaccctcagagactaagggccgaacaagatcgacgactcgacgacgtaccaccagagtcaaaagcgaagaggcgtctgaaagcgaagaaaccaaactttctgtcgctaacggtcacgccaatggccaggtgaacggcaagacgaatgaccaggcgaatgcacacgcgaatgggcacaccaaagaacgggtcattgacggctgggtcgaaggcaaggaccccaaggtcgactacagcggacacttcgagtttggaggctctccaggagtcctcgccatgatgatcggctttccgctcctgatgtattacatgtggatcggcgccacttactacgacggcaagttccctagtccgtcagaaggacagagcatgtcagaatttttcgcgcacatgggacacctcgtatatgacggcgcgttcccgacgcttaaggcatggaccatgtactgggtgttcttcatctttgaaggccttctgtacctgctcgcccctggaatcaccgtcatgggccgtcccttgccgcaccttgggggaaagcagctgccatactactgctcggctctctggtctttctggactaccctcgccgtcgcttgcacacttcacttcaccggtgttttcaagctctacacaattattgatgagttcggttcgctcatgagcgtggctattctgtctggctttttggtctcttttgtcgcctacttttcggcattggctcgtggcgcgcagcaccgcatgactggttaccctatctacgacttcttcatgggggctgagctcaacccgcgcatgtttggcatcttggatttcaagatgttcttcgaagtccgcctgccttggtacatccttctccttgtcactatgggcaccgctgcacgccagtatgaggtgtatggatacgtgtctggagaggttggattcctgttcatggcgcacttcctctacgcaaatgcctgctccaaaggcgaggaatgcattgtgtctacatggtgagtttgccctgaagtttgaagaactctgctaattgattagggatatgtactatgaaaaatggggcttcatgctgattttctggaatctggctggtgtacccttgagttactgccactgcaccatttacctcgccaaccacgacccggccacttaccattggaatcgctatttcttggttttcctctacgtcgcctatttgtttgtgtactgggtctgggacacgaccaacagccagaagaaccgctaccgccagatggagcgtggcacgcgagtgttccgcaaggccttcccccaattaccctggcagacactccacaaccctaagactattacggccgctgacggctccaagatccttgttgacggatggtgtatgttttcccctagaaatcttatgaagtatactaacttcaacaaacggcaaggctcgcaagattcactacacttgtgatctctactttgcgctgaactggggtctaacaccggct

SEQ ID NO: 416 - DNA, 1495 bp, Emericella nidulans
ggtatatggtagactgatatactatgtcgcgagcagtctagccgatggaccatgcaaaaaatggtcccagacgtttatggttcagaaaaatccgcgaccagtctagggcttactgcaacacataaaaggacaacatccctcttaatacagactattcagatcttgtgaagtacgaaagcagaagccaagaagaatacagcattgtgaagggcagattgaaaatactcgtcactgaagcgaaacagaaggtctgccaactgtttgaggagagtatgtagttaatgacttcctttgataatagcagctacctatgctagatctttgttatctcttttgtttattgtattaatgtgacggctgcagcagggttaaattatggtgtgtgatagctttcctacgttgccacccccaacggcgcttaaacagcgctaactcaccgctagagtttaccagttaggaccgacaatgcctgcaaaatctactcctgagccatcctgatagtgaccgaagacgtattgaggatacaaagggtggtttgcttgacgactcatttcggtggatctcggagactgccgaatatcaaacatggttaaataattcagggagccagctcctttggatcaagggatgctgggaagggtaaaaccatgcttatgattggtatcgtcaaggagctgttaaagcttggatcttctaagttgcctgcctacttcttctgtcagggaactgatctgaaactaaacaatgccacggctgtcctgcggggattaatatacatgctgatcatccagcagccacacctgatcttatacctgcgccaaaaatacaacacagaaggccaaagcctgttcgaaggtccaaatgctttttacagcctgttcgctattttcgaaactatgattgaacaagtacaacaatatcctgtacaccttcttgttgatgcccttgatgagtgtcaagtcaacttggaaaacctgctcaaattcattacgaagacagtatccatgtcacccgctcgggtcaaatggatcatctctagccgtagcatgggtcactttgaacggatcttagactcctaccatggggccaaactgctgaatcttgagcttaacgcgggccacatttctcacgcaattgagacctatataaaccacgaaatagagggtctccggattcttgccgatgaagaaatcttgaaacatgtcaaagaccagttgaaccgaaagtctgatgggacattcttgtgggtggctttggttgtcgaaggacttcgcaaatgtgagtttgaagaggaaattcttgacgccctggtagccatcccaaaagatcttatcggcgtctataagaaaataataaaccaaataaatggacttgaacatcgacgccgtgacatctgtatgacagctctatcaatggctgttctcgcctaccgcccactgcatatatatgagatgcgccacttgactggcaggcacaaggaaaaagatgtggagag

SEQ ID NO: 417 - DNA, 803 bp, Emericella nidulans
gctgaagcatcacttcttgggggctctatttattctcaatgcatcgcttcagacggctccatgctttctccaggcagtcataatccaagcatccggtctaacagctctctgtcaaactgccccccgctcggctcgtccacggctgtaaccactgggacaccttcagaaaacacacctagtgaggaactcttttcgccggactttgatgtgcacttgcctttcggaaacccagagaatctaggtgccggagcaaccgacaccgatgctgatggcggcctggtagaagacagttttatgcccgacctggacttcgaagcctggaacgaggagcatattggagcatttgggtcggtgcctagtttcgtcttcagtagttgctgagtttgatgttctagaactaggatctggcacttgtttatgcgtatgacgaactatgattcatatacctgatggtgtttatgtacttatatgcaaactaaatatatatcaatttacaagctcctcccgtgttaggcactcgccaacagcgtgtcatgaggacattgacgagatcgcagtaggcattgtccagcatggatccattctgaaagtccgagcatcatgatattgtagttccggaaaatacgttgctgccccggtgtccgacgtgttgccccattgagtatgcatcgagagcgctgaagaacatggggtgttacagaaagcgccgggctaacgcgttcgatgtcggtagccattttagctcactaagaggtaggtgtgggatacagttgatggagacacccaatgactgttctgacata

SEQ ID NO: 418 - DNA, 2863 bp, Emericella nidulans
taatatcccagcctgaagctctattctcaatgtcagtggggcaattcgcccaagtgcgataaagatagctgctctggcggtactaccctggttgcgaattcaagcactggaaccggtggagacttttgcgaatatcggagctattgggaagactggaaaggaaactatgccacctaccaggaacgagtgtattgctgtgaccaggaagaagataccagatgggaggactgcgaatgggaagaagattatggtcttctacgcgtcgaacccaatatggatctggagaactactgcttcactaattgccctgacgataaggtacgagtggctttggagacaaggaatggctgcgacgcggcaaatggaggtcgtgttcgatgctgtaagccgaagtatattaccacacatgagaagggcgctgcagattacacggacgaagaaaaacgactcaatgaccagctgaaagagtttatggaacatccaacgtgtgggtattatgatgagacactttcaaagcgtggctgggtggacgacgagtatgcatatggaaatgcctccttgagtgagccctgcccacaacaatccctattctcatagaaggcgccagcgccgtgagccatactacaagtttaacatcctgacctttgtggcaggtatattcgatgagaggtcgcacccattggttcgccgcgtcacctatacagcagaaactgccacggcgtatatagtctatcgcctagtcttcgaagtagcaccctcacccgagctatcaccatcacaattaatgaatatgtggtcgctcaatgtcctccctctgtatcagtatctcacaattcagaggatccggacgtatgcgcacgaaacgctcgactgggtacaggatggattcgagaccttcgttacccagcttatctgcaatatggcctatttcaacaggctgttttcagggtccgataatgggctagactgtgaatgtgatacggtcggctgctgtactgaagacatggtgtgtgacgagattcctgcgggcactgtcgatgttgacgttgaggaatatggagaatacggcttggaaactgagttggtcaccaggggaaacaatcgagtattagaccctagattggcggatggacagaaattcaagtttgtcgggcgtgtggtgaggttctccgactgggcattaaagctcaaaaagattttccctaacatgaatcatcgtgttcctcaacttgataaattcgcactgacatctgagcctagtaccctaaaaaatccaatgttgtgaaggaccccaaccactggctccgcaatagggcatttggcttcacgagcggaaatctttgctatagttggagcatgagtattatgcctaaactgagcaacaaggatctcgaaaactttgacagtatgtccatgatctgcctattcacgtgttgtacgaaggctcacggctaatgacatatacttattagttgaacataaacttgagatgaacaccctctctcagtatatggagtttgccacgaacagagagctgccatctggaaatccagtgcccgcagatctcccagccctaccagtcgactatattcgaaaccatctaagaagtcctgttcttcagaatgcgccgcgcatgaaaggtggtgaattgcagccccgtccacttattcgcataatgaacgcgctgggaagcaatcggaatgctgaaggttttgtgatgctcttgagcggagttaactcgtgtaaagttcaggtatgaggcctctcacttttctacatggcccacatgggcaatttgccgaatcattctgaccctgctcagctttggaggggaaccgacgtctgggacgccaacatcatggccaatcaggttcaagattgggatccagcagtgggaaagatagttttgcagaaacttcggtctctggctggggttattgactatttaaaccaccctactatacaagcacaaatggtcattgaagctcacgaagttgaggaggaattccgcctggcggatgacgcgtgggtggcgaatggaaacaaagagaaaaacattggcgcacgatggtggagacttatatacaaggacctcctagagactcgatcagcaaaagctcagtcattgatgaagaagtggtgtgacgagatggtgaagaactggggcgtacggacaggtgatgatgccaaggaaatattggatgctgttaaaaccctaagccaggcaccgatggcgatcagtatgaacggcctaaactactagcgttgggactctataggatgcctagcagacagtattgtggtgattaacatgcaccagcccgagtgcagcaactaggggaggttctcatacaccttgacctaagaagagctagttcagcggtttaaaccctcataatgccaaagcactgcttactaagctggaccctttccctattttgcccctcattccctcaactacactcttctcccactcctccgtctccatcttatctctcattaatacctcgttatgtcgtgttggcctcccttaacaggccttgcaaccttagtacgtcgtactaaggtccactggggctgtactatataccgtacaacatacactcctctctctgaggcgcacttcgccagaattatcgacctcataaatgtcctcatcaaggaaaatgtgcgcactcagcatgataatgctagtgacaaagaacgtgctgcatatcataccctcatggagtattacgaacccattataatgaacgacaagtcccaatttgccggtatgactattacgatgtacgctacattatgaacctatttgcaatgccgacctgatgatatatgacagaaatcgccacctgagagggat

SEQ ID NO: 419 - DNA, 533 bp, Emericella nidulans
taacatgttctaaatatagtattaagagctatactagaactagatatcctagtcagtaagacttttagtttatctaatttaaaccacttttggttgtactatagagctataaatttaagatagaataatttttagacagggatttataaactgaccaggaattatattataatatacctgcttactaagttataaaatcttttctataatctataaataatctatatatacaagcaagctatatatcttgcttaaccttttatacgaatttattcaaactgctattataactctaatacctaattatactaaaatttggctaaatagaaggagaatgactatacctataatcaaattaataaaaaaatactagtatttatttattaagttgtagtagtagttttaatattttagaattaatcctctatagctaactttgggaataatagtattttaaaaaaaataatataataatagtgatcatctaaaacttaggataatatattagtatattaaatttagctaccttaata

SEQ ID NO: 420 - DNA, 2194 bp, Emericella nidulans
ccgataatacgacttatagggatcgggatcagcatttctcatcaaaacgaggagctggacagtcaaattgaagagaaactgaccaaagcatacaaggatgcaaacatccaagacttcatccaatccctaccagaaggtcagcagaccgatcctggcacccgtggactagccttatcgggcggccaacgacagcgcatcgcaattgcgcgagcactcatccgagaccccgaactcctcctgttcgacgaggctacgagcgcgctagacactgaaaacgagaggcttgtccaagaggctattgaacgtgtttctcatggtcccggaagaaccacaatttctgtggcacatcggctcacaaccgtaagacggtgtgatcgcatactagttctgcatgagggacgagtcgaggaagaagggactcacgcggaactgatggcgagagggggacggtattatcaaatggtccttgctcagggccttgacagatagaacaatagatacgacatctaattccagcgccacatcaaatcttgtaagcgatatcacttggtgttttacctggtataaggcatggggcagcgactcgtgaacagctgttcgtgagtaggcagcgaacacggcgaaggccgatactggtctattctttggatctatgttgatccagcgtacttgccatagtttttctttttgctactgttacaaaagcaaatggtaataaagcaggaacaattactatcctgcttacagaatctggactaataaatcagccaacttcaggttaatggtggcgataggactctttatctctggatgcgaacatatcaaaggggcgccgtaatgtcgaagaacgcacaatcttactgagtccgaacgggaattagttgctgggttcaaacgcctgttttataagctaggagcggatgtcagcttcgattccctctgggggattctcccactgttaaagagaacgtcactcccagtcaattgacgtgccaataatagtcaaggaacgcccgacattggccggaggtgtcttcccttcgtcacggcactcatagccagtagtatccggcatcttgagcccgcacttactgtataggactgggggttggagaagggacccttacgttgcatggacgaaaagacaaagtcttgaaaaggtagtgattattatgtgtgatttggacctcattggggcgagtattatttcttaccctccgttttactggaaccaaagaacacccgcttactgagccagcaactctgactgccaatcatccgcatccattcaatcttcacgctacgtatgtcattgccggcggattaggtagcttgggattgggggtttctcattggataagcctcctgcggtgttcggtatcttcttttgctctcgcggagggagtgttcaacaatgaggttggatattcttgcacgaactcactgcgacgaagtcaaagatgaggaggaagaagtaggaagctattatatcctataattggaggtggagtcgatgatggacactatacccgccgtgatcaataaattcgatgctagtgtcgatccggcgtagcggatagatggatcgatcttctgcctatcttggatagtctaaagaccgtgatgtcaccgtcgtctgaaaatgtcactctagagtcaagctcaatagagtcttccttccccgctgatactgccaagactcttctcttggctgtggttcagcggatagttatagggacagtgggaatctgatccatttattacgcgtcactgactagatggcaaggcatttggctgtcttaaagcgagtcacagttaccccgccgctcacccgccttttaagcttcctcactttggtcttgagaccactgggtaaattttctgttaaactggtcataatctgtagcctacgctatgcagtaaagtaacaaacttgttcctccgccagtcccgccgggctcatcatccgccaagctaggcccacctgcccaaggaggctagcttccgctggggtccagatcagtccgctggcgacttgtggcttgccatgatgccatctcccagtgcaagtcaccttgaggcttgtgccctccgccctccgctctccgccctgcacgatggatcacacccacctccaactagctcagcgctctcatcagtatggactcgatcgagagttaacatacgcctcgta

SEQ ID NO: 421 - DNA, 624 bp, Emericella nidulans
acaatcagaataaatatcttaaggtatgtaaagattagtccctatctagttactgactagtcagggattagtagataacatctaactagcattatatacaagaaatctattatgaaggtgatattacaattattatttgtatattgcaagatcaggccaagctatttcaaagcctatacttatttaaagttgacatgtccttcaaacgtgtacatgagggcaggtttaacaaggttatctttgctgtttttttagaggatcatggaaaaggtaagtataatactagtcctgctctagtcccagactagtcaataactaatcaccttctagttatcacactccttcatgtatttatgaaccaacaaacaggccgtgcctactattttctatttaaaaaggtctttgagataattcatgatctttcaggccatctagtacagtttttccatcttcatagaaccagcattgaaactatcattgttaatatagataaaggacagagggacagtatgttttctttgtacactgactagttacctactagttgctaactagttaggtttgggaaaatgcctacaagagcttgatccagaacatcatgaccagactggcagttagaaagaa

SEQ ID NO: 422 - DNA, 2027 bp, Emericella nidulans
ctagaccgtatgaacggcggagaggagaacagcggcggcgtgtttgtcatttgtgcttccaaccgacctgaccttctcgacggggccggtcttcgtcccggccgtttcgacaagatgctgtaccttggagtttctgatactcatgagaagcaagccaccatcctcgaagctttgacgagaaagtttgctctcgctccggacctctcgctcgcccgcgtctccgaacggttacctcttacatatactggtgccgatctctatgccctttgctccgatgccatgctcaaggcaatcacacgcaaagctacagcagtagatgaaaagattaagcaactcccaggcggtccggtcagcacagcgtacttcttcgaccatctttccactcctgatgatgttgccgtgatggtcaccgaggaagattttgtcgcggcgcagagcgagcttgttcctagcgtcaggtatgttccactgaaaacacacttttgccagtcagcactaacgattcctacagcgccaaagaattggagcacttcgaacgcatccgccaaatgttcgaatctaccgacaaggacaaacagaaacaggacgccaatccagcacccacgccgaacacaatcggcgacgcaattgaggccctcaaacttggacacgatataaatggctacatcggagaccctgtcacaaatggcggcgaccaaccactctctcctaccggcacaggcaaagggaaagggaaacagccagcatatggcagcatgcggagtgtcagcgggcagtctgtaagcagcagtagaggcaagggcaaagctgccacttctggcgggaagtcatccttgaagagcaagtctgtttctgccgcgaatggcaacgccgactcggactcttcccttgatgggcctttgatgggctcgggcgctcgaggtggtgtcaatagtgatggagatgatgatgatgacgataatgattatatcgtaaggacggatcatttggcaaagacggatgccgacggtgaggatgttgactaagttcagtggttgcactgaaacttccgttgtatatattactcttgttcacgtggatgtataggccgtgttctataatatgtctatatactgtgcatctgagccgctgtttaaatcgtgatactgtcgaaaacctaatattgagaatgatcactggccatggttgaagcggccatatggccctataggctttcttaaccgtggattgggttggcttcggggtgacatacatgcgatctttgacgccaatcgactcctcaactacagaagtcctaggacggggagtcaccctgatttacgagggtttgagccaatacatagagcatatggttcgcctcttccaggacaacgattcattaaagctcattttctcccccagcacaggcaatctattctatctcatgttgcagttgtacaacctgatgttgacgtatagccgggtcatatatgtacttgcttccgcttctatccccactaggttggcttctgtgcacttcaactggtacatagcaaggtaggattatctgcagaacccctcctccctattcaagcaggggtctcgccaaaaagaaaccaacgcagaggggtgaaaaagaaaaatgcaccagccgggagtcgaacccgagcctttcgcttgcatgtcatgtgaccttggaaggcgaaaatcctaccgctggaccactagtgccagttgataaaatttatagtaaaagtttgaatcataggcataagcttacattctcggcttccccgttccgtgctattggaaatcccgagaatacttaagtgttgtcccattacgaaagatccagtgcttttataaacagtgagtaatggttgggcatctatgcttgttgtactcgtcttgtttagtgtcactacagctatgcgcttatgtttaccgaaaagcctgtgatgacgattctctgcgccagggtttaataaaatatatccttttaccaacgtaggattagtgacagtgttcgcaagatttaaccaagcaca

SEQ ID NO: 423 - DNA, 2346 bp, Emericella nidulans
ggaagtataattagtagacgatgagataaaaagaggatataagataccagttaagaagtgaagaataaatgagattaaagaggaaatatagtgagagaagaggaggggcgaagttatcaaaaaaaagagttaagtaaaagagagaaaacaagaacactgaagggatatttatagaactggaacaaaaaaggaaggaggtaacaacctgaagggtgaatggagcgtaggcatcctaggatagaataacagaggttacaatttaggagaatggagtaaccaacggtgcaaaatgaaatgacaaagagagcgcaccgggtaagacgctcaacattaaccttaagacctcccaatcccaccgggtggtctgaagggattcctcaactcggcccaaatatgccttgccgtcaaacgggtctatgtccacgaatccattacgaggaattccgcggcgctgcagtcgcgtacgcaaagaccgtccaggtcggccccggcactcaggaaggcgtctttatgggccctctccagagcagcatgcagtacgaaaaggtcaaagggttctttgccgatctcacaaaggaacagctcagcctcactcacacaggcggcaaggcctttgacgacaagccgggctatttcatcaagccaacgatcatcgaccgaccagcggaggacagccgcattgcgacggaagagcagttcggtccgatcgtgcctctcctcacctggaacgatgagagcgaggtcattgcccgcgcgaacaacacccgcatgggtctcggtgcgtcggtctggtcgagtgacttggacgaagccgcgcggatcgcggccaagctacaggcaggcagtgtctgggttaacacgcactttgagagtgacccccgggcgccgtttggcggacacaaggagagcggaattggcacagagaacggtttgcatgggctgaggcagtggtgtaacttgcagactctgtacctgaagaagtgagcgtctctacctcgtggactgtaatgtgtataatgtcttgtccgtaatcatgatcaggagtaaatcctctgccaaaaaagtattgtgcatgcgcattaggcaagtaggaaactttgcaccaagggcgggtgtataagttattggataggcagacctgttggtactgagccgaggggatgcggccctggtcagccctaggttgatggtacggtctcgccgtgatctcgaggacccgggccatactcaagggaggcgttgtttttaagtgcaatgctaagacaataagttgtgcccttgcatgtgaagcaattcgatcaagactgaagatgtgatcaagagctctacactagtgaagagtctagacacaaaacaagagtacttgatatgttaattatatcaccagcatgacctcgtggataacacttttagcctactcaagtcctaactagatcattatcaacttcactcggtgctggtaccacagcaagcgcgtacctataacaacttatctgttgcgtgcatcgattcactcttttttatgtgtgtcctgcacgtcccagttgtgtgtccttgtctcctgcgagtcacggcaactatccagctttccactttccgtatataggccctctctatagtccttgagggtgtggtacttcatctcatcttttgtgaacttcgtggctgtcttgaatccatcactctgttgctcctcgggtctctctctgtagtccttgagactgtagtacttggtatcacttttcgtgggttgtgttgagttgaatgtcttcgaccctttgttggacacttcattctggtgttctatcattccttctccatattcgataccggtatttgctcccacgctattggtactttgagcagctatctgaagaccatggagtgatgatcgtcggcttttgcagacaccgtcagatagaggcggccgtatctgcagagaagcctgagcttggccaataactggcatttacgagctggcagagagcctaggcccccttctgcctaaggggcaagagccaccccagcgggttaagttgggactgggaattaaattccttgccctgcattctggcccacccctttcccttccttaagtgcctcaaaaattcttttaactcttaaacctggcagtcttgccggaacatataaacccccctattggtacctctcttgtcgtccccaaaggccccactcgttctccaaaatgtaccccctgcatcctgttattttcaatacttcaaattttttaaattgaaattggtctggtggttccctccttcggcttgacttctatcccatctttcggtctctcttcttggatttaactctctgattatatatacc

SEQ ID NO: 424 - DNA, 4375 bp, Emericella nidulans
aagatgctctatgaactcctagtactctataaaatgtcgacgccgagtgccgactctggcagccctaaggccgctgagacacttgacattgagcgccagggggctccagtgccagcgcactacgtaaaaccaaagacacttggtgccggtgtaagtcacttctagcgaacaacccgtcactggcaggtttcaaatactgactgtcggcgatttcagtcagctctggccctcggcgccttcggtacaaccttgacgaccctttcactagccctgatggaatggcgcagcgtcaaaacgacgaacgcctttgtcgcgaactttttcttcatcgccgccttcggactggtggttactgcgcagtgggagctgagtatcggaaatgggttcgcgtacacggtgttcagcgcatttggtgcgtatttgcccatcagtccctcccccatactgaaagggagggcttgagctaatggctgtccgcttaggtctcttctacgccggctacggcgccctcctaacacccgcgtttggggtggcgcaagcctacgggggcatagatacagtggagtacaataacgccgttggcttcttcatgatcttgtggaccgtgttcgtgtttactttcctaattgcttcgctgccgagcaacattgcatacattctggtgttcctctttgtcgatctggggttcttgacagtcgctgcaagttactttgctctggctgacgggcatgctgagtcggcgattgccttgcaaaaggccgggggtgcgttctgcttcgtggcgggtctaatcgggtggtacattgtctttcatttgctgctgcaggactcgctgctggatttgccgttgggagatacgagtaggttctttgggaaaaggaaggagaagggcgtgtagtgggcacggtagggatatattacctgtccagtggtttagctcttatatgctttcacccaaggcataaacggagattgagagaccatgtcgaataagcttcttgatttaatgtatttcagacaaacattcagagtcgctcagaactgccgccgttaagcctagacatccttcacggaaatatgcccatccatcaaagcgcccaggttctctatcaacatgctggccagcacggctgcgaccccaaatccaatcgatatatatacaccctctcgaacgcaagcctgaacgcctcaacgagcaaacaaccaccgattgatttccactacacgcaatgggcaatgaacacacacagcaactctcaacaactgccaataatagaatcacgctaagttcctagcttgaagacaacacccaactacacaactccatcaactgcttagctcaaatcactcatactaaaacgattgaggtaccgacaagttcctgaagatcccgtacacttcagcggccattaagccaccgtatacgagccctagggtctaccaaagcaccagggcacactttttaacgcccgcgcaggacatgggacgagttcattgtatatttccacttgttctacaataaatgaaggtctggatgctgatgttgaggcgcttgtaacaattggtcaaccctctgttagagagatcctggtaacggctctcacaagatactctcttctagagacgggataaccccagtgccttacataccgttgctgccgcggctcctgtggtgaagtccaagagtacggaaatgctgcctatacattagcagctggtatatctcacgatactcagtcttgggctacattcaaggccagagtgtgcaagctggagagatagtaacctggccatgcgacacagtcggctccacgatacaaaccgcatgttcttcgcatttgaccgtgtcaatttcgacacagaacactgcgttgagtgtaggtattgacatcggcgtacccattctggcggcctcagttactctcatttggcttaactggcgtcggagtagagcagataagaacgaactagacacccaaatatcctgcctcttcatgctgaacaatatgacgcctcagggtcccccatgccactgccaccaagtgggatttctgcgaatgccttctatcgcgaggtgttcagttaagcaagagctgccatccttgacctcgtaacgactcgaatgacttcacggagaggtcatcgccggaaagaaattcatggtaaaactcaagtaaacaggtgactagctgttcctctccaataggtggtgagaatgggatgatcgcacgccgcctcttggtcatttgttctgtgtctgatcatgttctcattgagctatcacgcaattgaaattgttctactcagcttcaagctgaggatcatgcactctgtgcatcgactgatgaaaaagatacctgagtgattcgcttgatgatcctcaacccatcttcgatgttgcgtagtgtcacgtaaatgacgccgcaatgctcaagagtaggggtgatgaggtgccccgccctgcctgagggccgagctgcttgcgagcgacggaaaccatgagaccatatagacctgaagattttatcgaagcaggaacataatatagtcggctagagaacaagaggacaagaaattttcatgaaactagttccctgttgcgtcggggcgatggagcttcttggctgtcaggtcattcacggttcagagtttttcagcggtcgccactgccatttgagcacgggctcacccatcgcatcatcatagagtgaaagcggccggcccctccagccctcaagtctcattactacccctggcatatgttgacgtcttcgcacataacctccgtttccatctgagggtctagcggacttcctggtatcgctcgcgctcatcacttgtcgttctacccatccgcgcgctccctaaaggaccctacaatttcggtgttcaatatcctaacccgcgtcgcataccccacagaatcatcatgacacgaaatatctcccacggccgcggcggcgctggtgagtctttcatagaccgagcatacgttcatatgtttcttcggtccccgtttcctttcgagagaagcgtcttctgacatccgggcaggaaatatcttctcgagcgaagccccgaagactaccccgcaggaccttgtcaccccaaccatcaagcaagaagtcttcacaaccggccgcggtggctctggaaacatgatgcacaacgatcccgatcgtcccgaacttgcgcgtgaaagccaggacgtcgaggccccgccaattcgcgtccaggaagctccgcatcataccggccgtggtacgttttaacctcggaaacccatacggtacatctaggctgtagggctaacttgtgttgcttcgaacaggtggcgttgccaatcagtacattcccagcgcagaggaagagaagaaagctcgcgaggaggaggagcaattgcgtcgggtcatcacttcaaggtcaatgcgggagcccgagatatcgaggaggggaatgcgaaggctgagggctcacagtcgaactgattgaatgatttgttctttgcttgattgattgggattgataccattgctgcctttgggtttcttttgtgcttttggtcgtctgggtttgtctttcatcgcgggacctattgcccgccctttcattgtacatccccttcatgctggtgtgccctaatatttgtcgtttttccatagttccggacatccgagctggtttgtttctgtatgaagcgggctgtttgagtcatttaggtatcgattaccttaagccgtttgattcagtcactgtcgttagaccgcgcatttatatgacaacggctaaataatcccaacctttggtctctatgcattttttctgcggtggcagtgaggaactcctcggtttattcaagttgccgaccaacagcactaacgtgacgcctccaattatatttcccgaccttatcagagtggcataattacttcttctaagccaccccgcgccccggtgacggctgtctatactccctctccagaaggactattttagctcaaattatagtggaccatgtcatatggtacatagtttgacagtacagtgtctaaagactatgataagtttgactaggctcattcccgcgctggactatttgcgagtctatgtagtccaaccaatagagacagtgtggtggtgtatagttcggagtccctcttgcggaatatgcatgcagatacttagacatccaatattaagtcggactgactaagtggaaatagggcgaaagaccatatgatgaagctgaagactaaacaccaaacctcaagtccaaagataaatcttgactcaataggatatgggtctctttcgatagccgcgtcatatacaccatggtcgatctcgattccacatgttattttgagcagacttg

SEQ ID NO: 425 - DNA, 678 bp, Emericella nidulans
  unsure (1)..(678): unsure at all n locations
gtttgttttacggcaaactagtgatgaatgggaaaaatgagagagtccgtttgtgggttttgtccaagtgatcttatatagacgggtatagaaacgcctgccaatgaaaaatagtggaattcgggcccccagactcctcatcctgaaaaagagaccccgcattacctgcggttctagtcggaagctcgccgatcgtatgattgatagaggggacgaagcaagatgttcccttccgatgttgagggggagagatcggagcgatccgatgactgcggatcggataggagcttcggccaatcaacgcatgctattatccgccggtcctactatgctgcacagcaaagcccaagagtacacttgcagaaagaattaagcttaaggtatgcgccattagattactttagaagctcgtcttaacgaaggcttgaatcgcccttcaacagtgtccgcgcctcgatcaatgccagtgtccgcctgcggcaacacttcatttttttgttcgacttgcacgcgatcaaaatatactgcacccctccagactagcgactatatttcgccccccatttaaagaaacgttattgatagcggtagtaattattgagcgttgcatggctgcatanagcgatacccttggatttgcaaagacagtccgatgaagactagcagcggaacttccac

SEQ ID NO: 426 - DNA, 1512 bp, Emericella nidulans
  unsure (1)..(1512): unsure at all n locations
gcatgaaacgggtactgcacgcaattgagctctcggcgtgcgctactaaataccctcattgcccttaacccagacagtttccccaccaacaatatctccgggcggacagacacgtcgaagatctcggagggtgggttcgcgtggatcgacccgattctaaaaaaaggcgacgaccggacacggtgggagaattcaacccggtatgcgcttgtaaaggcgatggcgatcaatgacaacgaaaatgccgcgtctcgcttgggcgctgaaacgcatgattttcaagaccatgtcacccacgggggcacaacggccgagacgggaacggaatactggcatccgttcattcacgaggggattcagatggcaaggttaattgtgcgggcggcggggcttgaccagtcggctggggattatgattcccaagccagtgcctcgaatgttgatatataccctggccaaggggcgggggaatcacaagcgtattactccaactaatgggaaattggggcttgaggaagcggcagggccaagatgtgagccagacgaatatgaatccagcagttctggtcgggtcgtaagggttttgggacgagactcaccatattgtgcgtgaatttacatatttaagccataatccttgatttcagttcaacaataaaagataattttatatagacatcaactcaagagcgttgctattctcaggcaggggccgaaattctgtcaatgcactgcatagccctcgcgcagccattcttttgcaagggcatatttgccactagacccagtgccctaagtagagtcacaccagacaaacgtatctagctttagggttgaaaggccagacctggtgtagcatagatagctatatacggctttgcgcagtggaactggtttcgaatccgccttcgggctcgataaccagtacctagcaatatttctgtctggttttacctagttggatgtgatgttcccatgggagatggattgctcaatagctcggngcatctcggcagtcgctacttggggcctggattaaggggtggatgaacggaatgatggattaaaagcgatgtctcctgacaagaatgggtgggtagttatgaagagcttaagagtacggcaaactagctataataataatcgtcttcatcgttactgtaggcatcggcatcatcatcatcctcatcatcatcatcctcatcatcatcctcatcatcatcctcatcatcatcctcatcatcatcctcatcatcatcctcatcatcatcctcatcatcatcctcactatcatcatcctcattatcatcatcatcctcatcatcatcatcctcatcatcatcatcctcatcatcatcatcctcattatcatcatcctcattatcatcatcctcattatcatcatcctcattatcatcatcatcctcatcatcatcatcatcatcatcatcctcatcatcatcatcctcatcatcatcatcatcttcgtccccgttctcaccatcctcgtct

SEQ ID NO: 427 - DNA, 2854 bp, Emericella nidulans
ttcaatatctctgtaatctgtacgtgcagtttctcagcttcagtcaagcttccctgcttgcaataggttaatgccagattgttcattctggtcagagtatcagattgctcagctcctagcattctctttcgtatctccaaaacttgtatgtgcagcttcttagcttcagcccagtgtcccttattgcaataggttgatgccaggttgtccaagctagtcaaagtatcaggatgctcagttcccagcactcttttccttatccctattgcttgtacatccagattctcagcttcagcccagcgtccctggtcccagtaggttgatgctagattggccatgctggtaagagtattaggatgctcagctcctagcacttccttgaatttctccataacttgtacctctagcttctcggcttcagtccagcgtcactggttccagtaggatgatgccagattggccatgctggtcagagtgtccggatgctcagctccaagcactgtcttccttgtctccataacttgtacttgcagcttctcagcttcattccagcgtccctgattgtggtatgttgatgccatgtcgtccaagccggtcagagtagagggatgccgaggtccattcctctcctggttcagatccagcagccctctatatagagcttcggcttccttatatctcccgtccttaagtaggcaacctgcaatatttctgacaagatcagtatgctgctcttgttgtttgctaaactccttctcctgtacaagcgctaaagcatgaggaaggtactcttgccaaagtcctcgatttgtataataattatttggaaacactttcgccagttgattagccactctttggatccagtgagtaaaaagtcaattctttctcagccagttcctagttgcaaaatgcaccagcctgtgcatatttatgtctgtgtctttgctgtttgtaaaggactacgcgttcaggagccctagcgcatccattctcttcttttctgatgtttacgacggaagaagagactgcggaatattccgtgggctaatgcaggccatgaaggatagatagtctgctgctaatggtgcttggtgttggatctgtttgaaggatatccaccaggtggtgatcacggaactctcgatatccttatagcgtcctgggtccctaaagtcctcgctgaggagctccacagcaacttgttcttcctcttgtaagatcttaaaatatgcaggcagacttatgcactttttattgatgcacgctgatgcctgcgcgatcgctaatggaagatatgcaagcttttccaagagagccaccatcatgccatggtcctcaactaaatgtttccgcaacagtaggctctctgggatactctgcgcagtttcctgatcctcgtctggaatggaaatattattagagaaggtgagatctaccgcaagttccctattgcgggtagtgaatagaatgtggccattttcactctgaggaaggaattgctcaaaacctggagctgtgtcattgggccctagccacatctctgtatcatctgcattgtcgaagatcaaaagccatttgcctccgtgctcagagctgaaatatgactttatctgttctttgatttctgctggcttcacgttactgagcccaaccatttgtctcatctttagaaatgactgctcaaccattgcatgactagtgcatgggagccagaagaccgaaagctctttatccttatcccgtatgcggtatgcgagctctagggccgcctgggtcttcccaacacctcctaagccagttaatgcaatcctcctcggcccgtcctgcattgcaatcatttttcccagctccattatttcttcctggcgactaacaaatcttggattccttgctaacgggaccatccagtgccgctctctggtgcccttaacgaagttgacagctgcagggtaaacaggaaccattgatagcaacagctttgcaaaggcggctgcagtcaaggatgcatatccttgccactgtttctgcttatgggagtcgcaataatcgcatatacctcgttcacaagagtcggaagttcgtccataatgcctgccgtctccatctcgaagcagagtatcccgtgctgacgggccaataaatcagcgcttttttgcatcccttatcacttgattaccagatgcaatcaagccataatgaacgtagggtgtccttgcatccccaaatgattgtttgactaactgctctctgtcacacgcctcgcaatcagcctccacgtcggcatggcagtacgaggaacagaatagaagatctgaatcataactcggaggcgagaattgctgtttcatgttcggattttgttctaatacctccgacactatctttgagacagcgctctctccgtgggtcataagtttggcctcaagttgactcatgtgcatcagaagcatttgtgggggtttattcaagattgcataaagtataattttaatataaaattatacagttcctgtttgctcaaattgcccaccctcaactgccttgccatagtcatactgtatcactccactatgctttcggcccggtttgctgaccaccacatccctaaacaaatatcattattcttgctcgggactccgcctccaatctccaccattaatccgaattgaagccgagtgaaggttaagcgcatgcgagatacgatcgccgtggcagagatagttccatagacgccatccggtaagtgagcaatcacaatataatggccattcagttctccaaattcgtaggcattctgatcagtgatcggttgaggtgggtggtgaaatttgtcaagcatcgcgcgggcggc

SEQ ID NO: 428 - DNA, 854 bp, Emericella nidulans
ccggcgggttgatttaaccttgcgggctgtacccaaccagcgccgagtgcatccctaatacacattatgacatgttaatcagggtgcgagtattgatagacataaactgaagcatactgccctcgggtaccgcctgcccctagaggttagcaagcttggtaattaattagaaaactagatactgataaacggccatccaataaataaaggtaattgtcctcaggtactccgtgtcgggcctagcctggtgtcaaatatactgccctccgagaccgcctgccacgaggcccaactttgctttgtcattattagtgagcctgaaatcttggtagagacccgtcgggacccaactagacagatatcgatcgcttcccatgagcctcagggtgcggaacgaagctgtcgatctgccagtcctgaacgcccccgttgccgaaatagctcgaattcgcttgtgaaccgagcgaactctgatttcgaccccatttttgaaattgagaatggttctggttacaaaggccaccccgaccaaattttggaaatggggccagttggggccaggttcggggaaaggtaacaattcaaaaaacaatgcagctacaaggttaattgggaagacctgtaatggggttaacttaaccgaacctaactcggaagggcctctactataaaaggtgttgggccctctagcattgaacgcatacgtactgctgggattttaggccctagcgccctatatcagaaggctttaaagttaagatctctcttttcaaatacgctttttctctctttcgaaaaagtttttttcaaacaccccgagaaaatactcctatttaaaaccttctattaatact

SEQ ID NO: 429 - DNA, 2390 bp, Emericella nidulans
cgacggactcgacggggacgaggcctcggcgtaccctttgtcctcgaacagccatgcgagctcctggtctgccgcctcgcccatccacgagccctgctcggcggccgctgcccacatctggatgatggcccagtgctgggggtcgagccacaacgccttctgcacgacgagaaagcgcgccaccttcagcacgcgcgagaggatcagtggatagctgtcggcgtcgcgccagccctgctcgccgcgaccgaggaccgccatcgcacatactaacgggctctcgtacttgtgcaccttggtcttctggttgagcagctcgatgcagaagtcgaggcaggctgtctccaacggggtcatcacgaacgcctcgagtcgatcgtccatcggatcgggactctggcgtgacgcggcgacgcgcctgccttgtctgatcggcaggcgtgctgccacagtcgctgccaggtccactgctgtcgtgcggtcatgacatagctgggcttcttctgtcgccatggccactcagtctgcgtgcgaatgatgaacagcaggatctgctgccacggccgcatgtgcttggctatgctcgtctcatccatgtacgctcgcaatggttgatgggggatctggttgggcattgtgctggcagccgtcatgtgaatgccattcccacagtgctgcaccgtgcgctgactgcgccgagccagctgccccatggcgtcccacacgcgctgcgttgcctggctgacgggatctccttgttcatgcagggtggcgtcgttctcatcgcagtcagggggcgtgacgacgtcgaggaggtcttggaagtgcacgtctgcaaggtatcgtgcccatcgggtcatgcgcagccatgggttcgcatcatgcagtgtatcgctctcggccgtccggcaggttgccagctgcttgttgttggcagcgcgtgctttgatttcagcagcaatctgctgatgggcagttgtcggtactgggggctcgtcaggcgtggggtcgcatgatcggatatgaaccaggtgcgagttcttgcgcgttggaaacacctgctgccaggcaaccatgtgatatgattgctataactctgcatcagtagcttgcttttctagaaccttggctcggccacgtctcttgtattgggtccatccatgcacctgctgccagtgattgtgcatagtattaaggttggtcgcaatgtatgggcagtccagatcacgtcgacactgcatgccgttggtcgagactgggagaattggcaggggatgatccaatgcccgaggaatctcaacagcaccagggtcccggatcaggttggtccattgttggacagtctcgaggacaggctggatctgcaagctggtcatgaaatgcttccggtaaaggtgggtttccacctcaattaggtgaaccccgtgcttgcattggcggcagaccatgatctgcagctcagggattgtttcaaagagtaggtgagacatgctgagagttgcacctatagaggctcatacctaggagtacatatcaacatggagagattcaaaaccagggattgattctcctgactgaaatctgctgctgacagagtatttgcttttgtttttgatacaccaaccatctatacagccatatcgccgatctcccgtccaaccttgtatccaaccccaaccaacttcagctcaacaccatgccatgattcttggttgcctggacttgaaactgtgctctgttctagataagtggctgctgcgtctacagtaaaattttcagccccctagccccctgcattctaatcccattgcactccagtttcatggccgagaaaatcccattgcactccaacccgcccatatattactttaaaaccctaatcccattgcactgcaatgttccacccccaatgggttaggccatgctgcgttggcgcaagcttccgaagatatactgcaaatgacagtcagctttctagaaaatgaatcgaccttcttacgatgggcccgtttatatcaggctgataggagttgggcaactgaccctggtcctccacgaggttctagactctattatgcttgctttgcagggctcgtggggactgcacgagatcttatcgacagtggcgaggacgtcaatgcccaaggcggcgaatatggcaatgctctccaggccgcctcaacaaaaggacatcaagagattgttcaactactcttggataagggagcagatatcacgcgcagggtggcgaatatgggaatgctctacaggcagcgtcagcagaaggccatcaagaaattgttagactactcttagaagagggagcagatttccacgcgtaggggagtgcataatgcaatgctctccaagctaggacgagtgcgatgctg

SEQ ID NO: 430 - DNA, 1438 bp, Emericella nidulans
acggggcggagggtgaagcggatgttgatcgtctaatggagcagctcgccgatgatgcgggtgtagatttgcgacttgctttggagcaggattctgcgccaaaggaggatgtcaaggaacagacgaaggttgatgcagatgtcgaagatggcctgggtgccaggttgcgagccctacgggccgcaaactgataaatgatatttttttctttggccagttggttttgagctatttgtcgtatgatgctgggtatccttaggcgtcttatggagaagtatgcaatgattctgggtttaatcaatcataagctgttttgtatatacccgttttctatgtgaggatgccattatggatctcaaatttatgactatgatgtctgacgcaaatccttcttgacctgtccttgtggcgtatgggccattcatggagtgattaaagcttgtttgtgctatctatataagggaaattaattaacgctgccatcaacaattagccgggctagctcaatcggcagagcgtgagactcttaatctcaaggttgggggttcgacccccccgttcggctttcattttgctaccttttggtctttttcctatcctgtctttttttatgttattctggcatgggcgtgaccgcaaacgaaaaacaacttgagtgtaggatggttctacgcatttcttaatgttagctattaaattactcagctcctgaaaaatctaaggatgagggacgtgtgatctacccacggacaccatacgtgtttgacggtcgttcaaagtctcctcgtaccgcctttaaaacctggccccatgactaactaatcggcaagtacaagaggaatcctatcgtggttatcgagggatggaaggtccggcatcagcaggtcatcaacgggcatcacatagccgccaagccgcatgccttaactgccggaagagcaagataagatgtgaccgcagccaaggagagatttcttgtgacaagtgcaggcatgctggcttggaatgtgttgtcccaactcatcatgtcggaagacagaagggcgtgaagaagtaagaccgtgtctccaaaagctgagcattcatgctgacaacaagctgccagcaaacgcaaaggcctagaaaaagcactgcatcagatagaacaggccatcaaacggccaaggaccagtcgtccagctgttgaggctgcgcagaaagtcctttcggatcttcaggatctgctgacgcagactcagctacaacaggcccgggacgatagcaaggacctttccgaggactccgaccaacaagaacccttgcatttccctcacggctccaactctggcgaaagtttggcgctggacgatgcagaaaacctctacagttacttgcgcgtgcctcagatctccagctgtctccaaaagatgtacggaatacagcaatgtggcctttgttg

SEQ ID NO: 431 - DNA, 1178 bp, Emericella nidulans
acccaaaatacttgcggcaatcggctcggttagatcccgaaaaagagtgctgaaagtaggcaacgcgttggctcgaaggccctctcgagaatatggcgcgagcagctctgaacacccacccctcttgaactatggtggtgagaacgaacagttcgtcgagtatgacgagactgaagcgttcaagggcgctcccaagaaagcaaccaagtccaaataccctgaagatattctcacgaacaatcacaaatcagtctggggtagctggtggcacaatttccaatggggatacgcttgctgcttctcaacggtcaagaacagttattgtactggcgaggaaggaaagcgcgcattcgaggaagcgcggaacatgttgctactgccaggggatgagaccgagcagccgtcgctggcagtcgagtctgctagtcgccaggaagagccgagcgcagaaagtcacaaccagcagcgagattctaagaagcgaacgctcatggaggtccagtcagggattactgaggaggaattagagtcatataagcgcagccgacttgcagctgatgaccctatggccgcatttattgaaaaggacgattcctgaggaataatcattcgcattcaacttctcttcattgtacatactagcttatgacctaaaaataaaagccacagcgttataatactcttccagctcagttgggagtgtggactgagcacccagctgcggacgcccatgagagctaatgatatcaccccgcaaatagactcgaagtaggtgtgatcgccgggcttaaagccctctgcacgcagaccggggtaaatatcaagacatagaaaagcctcgtaaagttgtagctctgcgtctaaaaggcggaaatactagcatgtgactaagcatagtatgtcatgtgaccattgccattctaggctgaccagggcttgtgccctgtcatggcacactcgcttagcaagacacccggacccagcgcaactttcgatccgcctagtgtagcgacgacgacaacgacaaccagcccttcaacggaatcgccaggtgagttgcgtctgttaagtttccagattgatttgctgggaggtttttgttactgacgattttccgttcgctcacagctcctaattcaagatgagtacgtccaaattcgataccccgtcgacgtaga

SEQ ID NO: 432 - DNA, 1402 bp, Emericella nidulans
tgttggtgttgaccaaaaagaatgggagaggaggatggagaaaggtaagagagagaaagtgcggtgtatggtctgcagcagaaatgcaagcgactgatggatctcatgtctccagtcgagtatacttcatgctgggacgcgtctggctgtgagccacacaacacgcgtagagtggcttgcgcgtgtttgtcgaagtttgcaactgtaagcggacctggcttactcagctgcgtagatggcagcctcgggttaacgtactacttagccgaccccgcaggaaccaattattgtgtccagctgagcctcggtccgggggtatgctggggacgcattctcaccgagcgccctcctattgccttgacacgactatggacttgtttctaataacaattcctctctccgtactgtgagaggactgattttgagcctactgtatcttcaccgcacacggttacatcatatcatggcaggggccatccgacagcagatcgatattcccgcgctggagcgctatatcgaccagcatgtaccgatcatcaagacacccttggaggtgaagcaggtatgccatcaacaggggcttgtgtcccagattgaagaaggatagcgctgatctctgtcacttgcagttcggcttcggtcagtcgaacccgacgtaccaactcattgccgccgatgggcagaaattcgtcatgcgcaagaagccgccaggaaagcttctgtccaagacggcgcataaagtggaacgggaatacaagatcattcatgcactggagcagacggacgtacccgttcccaaggcgtactgtctctgcgaggacagcagtgtaattgggaccgccttctacatcatggagttcctggatgggcggatattcacagacccgactttcccagatgtcacagcggaggaacgaactgaattgtacgggaaagtggcccgcataggtattcgcagctaactcatcgcagatggaaagacgccgttcgcacccttgccaaattccaccgcgtcgtccccaaatccgtgggactcgagacctttggcaaaccaagcggcttctatgaccgccagattgccacattcacgactgtctccaaggcacaggcgcaacgtgcgacgtcgaaaccaaagaaccggtcggggatcttccgcacttcatggaaatggtgcgcttcttccaggacaaatccgcgcacgccaaagaccgcggcaccctcgtccacggtgactacaagatcgacaacctcgttttccacaagaccgagccacgcgtcatcggaattctggattgggaaatggcaaccgtcggccacccgctctcggacttttgtaaccttaccagcccttacttcttagagggcacggagtataagttggaacacttcaggccgggcgctg

SEQ ID NO: 433 - DNA, 871 bp, Emericella nidulans
accagatttgtttgtttcactggccagcacatgcgccaaaaatgaccaggattcgggaaatcttatcacggattgccttttcagctagctggacagcagcaagagcaataatgcctacagtggaggcgttcaggccggagaggagagcgtagactggagccggaagagcttcatcaatccgttgtacgccgagagagagcgcatacatgccgattgcgccggggagactagcagttaatgaatatattaccgtgaataccaagagcggcatttgaagtgtgcacatacgaccagaggaggaatgcaagcaaagctgggataaaccccgcatgaagcaaagccaagcaaaacagcatctttgttgatcctggttcgggaagaccctgacatatggcgaagagttcttgatactacactaccgatgagtgcctcggtctactatccaaacagagagtacttaccgtctgctcgtctacccacttttctttctcgacgaaccgcgcatgaaagatctggaaatgaacaggcggtcccccgaacgaggtgtatccgtggtaccaggtatgctgaacaacctccatcaggcggacgaataggggttcttctgcgcgcgcagggctggttgctcccgctatgactgcgccatgtttgatttagtgcccgtcgggacgaggcgagtcgcgaccgagttaggacgagcatgcttgcttcgtctattgataaaccggctagactttcagatcttggagaaagaaaggagtgaacaacttctgacgatggcttgaaatcatgagctggggatatggcggacctttatggttagaatctactttgacgttcatacaatacgagctcagtcaatgttcacatg

SEQ ID NO: 434 - DNA, 1583 bp, Emericella nidulans
gccctgccgctcgttcaggagtcggtaggccgctgcggtcggattctgtaacaatgtacgagtgtagtactgagttcctcccacgtaggctcttcggtcttgcctttctgtctgatgctctaggattgcttgacattctcgcctaattaactggtggcatatgctactttatcgccttcagtggaatagtggcttgcctgctctctaaaactcagctccatattgctgcggcatcggcggggtatttggtgcctaacaagacaggtgaccgttatcggttaacttagttacaatattcgcgaagacaaccactaaataatagtggttgtgtcacccagaggagacctctccttgctaatcaaacatacaggacctggatcgaccttccactcatccatcggttatagagagatcaacatctcttttgacgatgagaagaaatctttcaatggatataaaatctctatacagactgtagctatattatcaagacctttaatatcaatctgtggattattggggtggttatgtaatcaatatccgtagttaacgatttcattgaaggtcttaatctcctaactatgatctgtataggcaatttataccttttccaaggcttcaaaaaagaaggttcttgcttatgcaggagatatccttgccatataaacagtataaggcatcaaacagatatccctgccatataaacagtgtaaagcattaaatagacaggcaaacaaacaaggtgctgaacattgattagtaaggaggaatctcctctggttaacacaccccctcagtgcattaagagtccttcagtttccttcttgggattggatgaggtctttcacgtccactaggttgagcatcctgacaaattcttggtgtttttagattatgaggctcttggtaaggccatccgtgatcatctggttggtaggtatctatttaacatagagttggccttcctgaacctcttgacaaagccaggatctatatatgtcaacataacagagcttagattgttgcttgatatttttggaggtaagcaagttaatggtctgttggttgtcacagtatactgctatctgatgttgcggatcaaaacccatggttctgaatacccttttccaccagtgtgttgcctttgctgtatcagataaagctagatattcagcttcagttgttaaagtcatgactatatattgttttccagatttctatttaatcaggctattatatagcttgcaaaggtatcctgcagagctttgctggtcaggttggtcagcaaatgctgtattagaggctaatataacaacttccttactagtattgttgcctgagtatttaattgccagaaaatatgttgtatataggtatataatgaccctgtttgcagcctgaatatagtctggtaaaggatttgttaaggcttcagataaatggctaacagtatatataatatctgctcgtgttagaactgcagggtactgtatagagctaatttttatttaatattctttgatctgagcttctgttgcttggtatttatttggagagaggttatataagcttgctaatagtat

SEQ ID NO: 435 - DNA, 3344 bp, Emericella nidulans
atcgacgctatacacgcaggcaccatcattcgccaacaacgcagcatgcggccggcccacaacctcagagcggttaacaacgcagatagtatgaccatgtagcctgttaccatacggcagaactgtgttgtaaatgtttaggtgctccagaatcttgacgattgcgagaggcgtgcagggcaaaatgcatttctggcgcttggtctccgggtcgaggaagcggatgttctggtacatgttgaaaatgtaacgatggctgagaccctccacatccttggacacgtccacaatttgctgcaggtattggtcttgacggttgttgaatatggggtaatagacgatgatgccgtcgacgtcagggtcgacatttgcggccaggattgcttcttcaaggttatcacggtgaacttcgcgcagggaatatcggaatccactatatccatgagatagatctacgttagctacgagatacagggcccgggatgtaggtgattttgagggaacacaacaaaacggacatgacacgaacaacactacgccgcgaccaatgggcgtaggggagcaggatacgaacgaacaaaagaaggctcacttttcatgacatgtcttctcggtccattgcgcgtacatcagcgccgcaggatcattgttcgccaggaatccgaccagatgaggcggcttctctagggtcttgataccctcagaaacttctgcgagcaggccattcgcaacatgcttcgagagcatgaccttacaattggtcggtgctggttctgaaggggtagccatttttgtgcaacgagattatcctcgagacaagatgtgagaatgagttaatgccgtttcatgggtgatggaggggccttgaaaatttgaggcgggaaaaacctcccaaggttcgcttatcgataagtaatccagcatcccgcattcagccagtatcgatttccagctgtgactcatccagcttgtgtaagagaaggggctttatggaattataggtacgaggttactagccagctgcatccacaggtataccttagcacgtccgttgcttgctgttctccctggtggtaataaagagccaacacgcttggttggtcggtcgtcactctttggaaacttatttccgacgagctttttcgatcgtcatatggttagcactagagcaagggcaggagcttcagtaaacgagaggtggctactgatgcgttggggtattagagattccccaatatagtggaaaggcagacaatgctttcattgagatataggtatagaaacaaaggaaatcatattcgagtgcatatatgtagacaaaggaatcccagccgaagaccaaccaaagagtatgcaactccgtgttccatgggatttgccatcactcagtcgttctgtctgatgccatcctctgtcgcgcaaaaacatctaaacgtacaggatattatttcatattttttggccctgctctcggcccaccggtttgtttgctccacagctacagatacattaggtcttggtgtccaaaaccaacctgaagcttaggcgaagagaagaacaaaacagtggagtcaattgtacaagctatcttgtctatacacacagagtcaggaaattgaaacagtacatggtaggctaatcgacaagtatgtcgcttgctcacctatgcgttgaaggacttgttgaagctggggatgatgtccttcagcttagcctcaagctccttgctgacctggccctccttctcaatggtctcctggacctcggggtggttgctcttgaggtaagcaaggaagtcagactcccactggaggatcttagcgacaggaatgttgtcgaggtaaccgttgacaccagcgaagataaggggaaccatgtcagagacggccatgggggagtactgcttctgcttgaggagctcggtcagacgctgaccacggttgagggtctgcttggtggaggcatcgagatcggaaccgaactgggcgaaggcagcaacctcacggtactgagccaagaagagcttcagggaaccagcaacctgcttcatggccttgacctgggcagcggaaccgacacgggacacggaaagaccgacgttaatggcggggcggatacccttgtagaagagctcagcctccaagaagatctgaccgtcggtgatggaaatgacgttggtgggaatgtaagcggagacatcaccaccctgggtctcaatgacgggaagggcagtgagagagccaccaccgtgcttgtcgttcatcttggcagcacgctcgaggagacgagagtggaggtagaagacatcaccggggtaagcctcacgaccagggggacgacggagcagcagagacatctgacggtaggcgacggcctgcttggaaaggtcatcgtagacaatgacagcgtggcggccgttgtcacggaaccattcacccatagcacagccagtgaagggagcgaggtactggaggggagcagcctcggaagcggtagcagcaacgacaatagagtacttcatggcgtcgttctcctcgagggtcttgacgagctgagccacggtggaacgcttctgaccgacggcaacgtagatacagtagagcttcttagactcgtcgctggtgttgttccagcgcttctggttgagcatggcatcgagagcgacagcggtcttaccagtctgacggtcaccgatgatcaactcacgctgaccacgaccaatgggcaccatggagtcaacacacttcagaccagtctggacgggctggttgacggagcgacgaggaaggataccaggagccttgagctgggcacggctcttggtagaagcgttgatggggcccttgccatcgatggggttaccaagagcatcaacgacacggccaagaagctcggggccaacagggacatcaacctgtatggtttgtaagtaatgcttgataagcataattgatgattacaacgggtatgacatactatctcgccggtacgcttaacagtcttgtcctctttgattagactgtttgtactcatcaaattaacatccaatttggcctgtctataggttcatgcccataccctttacatcattggtgaatctttcttaatattatgtctagtcgtcataattaacatactatttttgtattcttctttgtactatgttttctacttgattcttgtcatttctatgtctatttttattctgcttttattaatttaattaatttttttttttgtttaatattttagttgttctcaatttttttttctatttgttattatcttccttattatattttttattttattttattacttcttattctcttgtttcatcttct

SEQ ID NO: 436 - DNA, 1804 bp, Emericella nidulans
gctctcgcgttcgctggggttcccttcgcggagacgatcctggactgatgcaaacttggccagctgtcgctgccagtctggatatacaccgaaagcttccctgtcaccgtattgatcgaaatcactactatagcaaccttgtagctcatcacgaacgtctttatcaacgggccagccagtctcgttccagaatcgagggtactcgcaggtctgattgtaggtgtttccaaaatcaaaatcgacgtagcgacggtcagacttccaaacagcttcgtgctctttgacagagaacggggcgctaacgttcaaataacctttgaatccgatcaaatcgcccatccttgggtgtagttagcattcgcgcatttgacttggaaaaccagcagactcacgtagcgatagtgttgtcgaataagacgtacatcccacgcttgtgaatctctgtgattgcatttctccaggtttggatggtcccgaagtgctgatccagcagcgtagtgtccaaaatcgaataaccgtctgcgccccagggttgattcatgagaatagtacccgcgaggtagatcccctaaacaagatctggttagcgaaggctgaagctgagacgaaaacaaaaatcagaccttgattcccattccttgaaggtagtcgagtgtgtctaccaggccttgtgcatcaccgccgtgtcgcatctggttggagttcaaatcatgttcatagacagttccgttaatattatcgttagtagggtcgccgttgacgaatctgtccagaaacagggtgtagaatggaaacctccagttctctggcgacggcatatatgtgtggtcctccattccggtgcgtaataatctgctggggtggcagcgtttttgttcacgttgagattataatcaactaatgactcttcgtagggccagcctgctgcggttgtgcaagcagcggaagtaacgggtttaaagccctccacctcatggtcgatttttccggatgtcctcaaacaaccgacatgtgtcccaggtcccagtaacacgaggtcagagacggtcaagtactcagctcgaagctcagtttgaacaagcccaatagctccgggcccactcacgatctttcctctctcgcaaggtcgagctgatactggaggggtgagcactgaagaagaaagagtaaggtagaagcccccgaggcaattgtggcagcggcagcgagagattaaaagaaagagggaagaaagcagaaaaagaaaaccatatgcccgagtatattcccgaagagatgcaggaagatatgcactctatagaccgagagaaagcattattagctgcggtatactggtattatgacaagaaggagggttagcgagggatcaataccgactcgaaggaggaaaaagaaacgaagatccttccatgccctcagtgccgcagtggaatcgaatactagacagataacgccggccagatggagacaattctgtatgtagcggtacgcattgaacgccctttgctggcggaccagccaccggcccttccatgatgactcggatgccagtggcaaaggcaaaaaacagagacctaaaaagacccatttgggcttggtatcaagggaagtttgaagaaagggggaattgtcaaggaactcgaagcgaagttcgctgaaagtcgatgcatgcaggtcagttggagtggagtgcagtggagtggagcgggagatcatggtgttagtgcagaagggtcagtaataccgaaatacgatacgaatatctgacccatcaagcactttactttctctacaatgtattgct

SEQ ID NO: 437 - DNA, 1895 bp, Emericella nidulans
taaatgtgtggccatcatgtctcgcgtggactggtgacaagtctgtgctcacccggtgagtactcaggcagagctggccggtcctgttgagcagcctgataactcggcggcatcagctcaacctcagagacagccttaagtcgctctttctctcttcgccggtggcggatataaagtggcataaggatgaaaaaagttatgccggcaatcgcgctcccaatgccaattccagccttttctgaagcactgaggccatgcgattctgatccttcctccttggcaaagcacgaaatgcttacgttttgaaatattgcttcttctattgcatcgcagtcaagggccatgtcggagtagatgcttatgccgctagaggcccggcgcaaattgggtagattgacgctgtcgaacgaagtttagtcagggaatgtcgctgacaccaaaactgtggggatgtggatcttgccttgagatattcccgagcaattggaggctaccgactcgatgtaggggaagatcaatggcaagtgggtcaaacgcttctacttccaatctcatttttgtgtcgatcatctccggtatagagaggctaacagcaaccattcaactgtcagcacagcgggcgatatcagcgtctagcgtaacaagaagcaagtacctcgcaaagttgccctttactttgagggttccagagacagtatcaaggcgaggaaatgcaacgttgagcggtggtccgccgtctgttgtcaattgaaaaccacgtgcaaggccccatgctgagctttccaagtctccaatactggttaactctggcacggctaagctgtatcagtcttggttagtatagcttccatgcaagggcatgagcttgcaaaacccacgttgatatccttccccccagctctatatatgtcgccgatttgagcgacaggagaaatagctctaaggatgagactggtgatagactgctactgcaatcgtccttattataaatcctaagagtctgattgacagattgtaatgagtcaagtccgaaaactacgccatatttatcagctcccgtaacctcaaaaagatctagttcaaccgcagccgcctaccttgagatgtttccaaagatatacgcatactttgcatgctggagtgacctcaaatccacattgtaggcgcagtccacattaaccgaatgaccgaccatactcaatttcggagccgaaatgtttctcaaatcatagagatactgaagatccaggctgccatctatgtgctcgagatccggaagagagattgagttcactggggatgtatcaaagcgccctgtagagtgcctatactcatacatgtttgaagggtctgcgtaccattggatatcaccgctgatgttgcggatgttgggtagatagaaagaaccagtgtagttgttcgagattcgaatgctaccatttatgcttgtacattcgctggcaataatatcaagggtggattgattggcgacgtagtaggcataatcgtaactatacaatgtctctggggtgcaaatctgggtcttggctagcagtagttagtaacttttgcagacaagtgcatggataggggaaaaacgattcaaaaaaaaataagatcaatatacgaaacttactagttgtgatgaggcctaataatatggcaagaaacagcttgcggttcttggaggacctcatactgggcagtaaggactgatgtttccacgcactgatccaacaaggaaaagataaacatgtatcgtggaaggggtacgccgctcttttgttaagcacggtcaaccctgccaagacccggggcgccgatgccctaaagcggggcatcagctttaaactaatcagagctgggcaggaaggggacaatgctccaattctgac

SEQ ID NO: 438 - DNA, 653 bp, Emericella nidulans
cgctagacacattatcacgactacgcgtctcgctctctgagatgtatcgctcttgtgcaccgggacttcgaaaaatggccccctcatgggataccaacggacgaaaatgaaatggcagtttttgagccaatcttcaaggacatgacgatgctaggcatcttcggcatccaggaccccgtccgcgaaggagtccctgacgcagtccgccaatgccagcacgccggtgtttttgttagaatggtgactggcgacaatattatcacagccaaagccattgcccagcaatgtggcatctatacgcctggcggtgtcgccatagaagggcctgaatttcgcgagttgagccatgatcagatgaacaagcttatcccaagactgcaggtcatcgcgcggtcaagtccagacgacaaaaagattctggtcagccagcttaaggaacttggcgagactgtcgccgtgactggggatgggacgaatgatgcgcaagcacttaagactgctgatgttggctttgcaatgggcgttgcaggcaccgaagtcgccaaggaggcgtcagatattatcataatggacgataattttacgtcaattgtcaaggcgatagcaaagggtcggccggttaaataacccggttaaaaagttcttcaggtaag

SEQ ID NO: 439 - DNA, 637 bp, Emericella nidulans
  unsure (1)..(637): unsure at all n locations
gggaccccggcaggagatacccagacagcaccttaaccatccagccngcnactttcctcaagacggcnggcgcccccacggcggggggaaacaacggagaaccccagcaacaagaagaaacccgccaccaagcccaanccccaagccgagacacaaaaccgnccncgcggccaaaccacccgcgaccacggccacaagcgaagacaaagcgacgaccgccaccccggggacccagaaccgganggacacngaggcgcagagganagggggcngcggaaagaggagcgcgcggacgcanncnnaccaggagaagaaccagggcgcgaggagggcnacgccggaggggaagggggcagccgggccagcgccgcgggagagggcagcngacaacgacgaagaaggggccgggcccaggaaganggcgcggaagcagggccgggccaggcaggggaaagcgcaggcngggcagggacccagagcggagcccgnaaanccaaggacccaaaagcaacaagcagaagcggggggacaagagaaacagcagacgcaccgagggcagcaccacgcaggagngacagacacgccggggagcccggagggagcgaacgaccaagccgccaggcacgggaccaacgga

SEQ ID NO: 440 - DNA, 789 bp, Emericella nidulans
agatgaagcaccagaacctgaggcaggatggccttcctggacctgatgcctaaaaagaaatgacataagacgggaaagccttatgtcatctggtcacgtgatccaggagtaggaaacctaatgggagcagcttcgtagctaagctacgcgaggtagccaggctacgcagctacgcttgtagcacatagctacgccaggaagaagggatatataaagacactcattatctccatagttagtttggatcttcacgatcaatgcaacttgttatttctgagttaccttaagcatctcaactcgtacgcacttaactccacaagatatagagccgtcgctgtatatcttggccctgcctcctctcgtgagcttcaccaaggaccgtgactagtcttcatactagttggacgtggctaagaacaaggtatcggtaagtcaatcgaggcgaaggagcttaccatagagcagccagggttaggaaggacctggagacgcagacccttccacaacatctagaaaagaggataattcttaaagtcttttctagtaaagagcttaatatctagataataaaaatagagatagctttatttatagaaggtaggtattctagatataactctagaagtaactagtaaataatttcttagttataaaatttatatagcttatagtttctatctattagcctgtaattctggtcttaagactattaattctagaattctatattttcaaataagcttctggagcttgtgtagaaaaaaaataaattatttttttatactataa

SEQ ID NO: 441 - DNA, 503 bp, Emericella nidulans
  unsure (1)..(503): unsure at all n locations
agtttcgacatattatcagactcagctccattctgggcaccgtgccgggataagggtcatccctcgcccgacaccgatacgcgtcacgacgcgtcgtcaagatggcgcgaatcaacccccaagcagacggccctctacaagccacactgcttgaagcaaccactgcggcctccatcagggctgccaagggcaggaaatcttcagccctattgcagcctttctggataaatattagagccaaacaagcctcgcgccccaccagcaagacgcgcttgaggcactgagcaacaacctagctgatatagcccaacaacacctcaacgcctatatcagaggtgtctccttgaccaaggcctcttctgctattgcctctttttctaccactgagttcgcatttccctgccctgagccctgtttttccanctccggactggaccagtccacgtatcgcgtctgtggcccagatcaactctggcaaaactgctgccatcaagaagactggc

SEQ ID NO: 442 - DNA, 1621 bp, Emericella nidulans
taatagtgtagtatgaagcaaaatgaccatcttctatcctgccgttctgccctagaactcgctcactctccggatcatcgcggcgaacttttctgttataatgctcttacatacaataagccgccaccgagttaaacggcgagtagcaggcgttgtgccttgaactaaccatagaccttgctcagtgccaatacggacccagcagttcgtgcaatgcctgcatgtttccctgaactgcaaaatagccgacaaaaggcaaagcacctctcattaatgagtaagacctacgacgcacttgataggcgaaccagtaaacatagtaagttaccgcatagttgcgccgtactaccgggtaaatggactagtatcagtagtacattgttggaggtccggtcctctgtggctcgtctggaatgagttcatatcaattgttgacggttgacttagcctcgcgctaccgcagggacgggcccggacggcgctaccctaacaaccccccaggatgatggagaccgggccggagacaatggtctaattccttggtttggttcccataatcttcgacattgctggtcagtgggcatccggtgattgggttagtggcccagacttgaagggggagtggtggttagaacacacaggtgcagctggcatcatattcttggactagtaatttgattaacaacaatgacatctggcaaagaaatgctcctcgtccttgttggatgtctatgggaataagttgcgctccgggcccgtgccaatttggttaagctactccaccacgcagtgatatcttgatattgactcgcaagtgcctcggaatgttacattcatccttgtatagtctagccgttatggtcatcgcgtaggtagatattgaaagcaccaagatggaactcggcttccttgggtaagtatctatattgcatgttagaggggtgtgtgacgcatgtgtggtgtgtctgctatatagttgcagtgaaggaagttgactatatatactcacatggttggcttctatcctcacagaatctagagacatcccatgcatcagtgacagcacaatgcgtctaggatactgtctctgcctttgcggcctgctcgccagctcagccgtgctggcccaggacattgactacggggccgccgccgagtcaatatccgctgtcctggccgaccccaccttcgtcccctatgcaaagcccacccaaaaggtctcagagtggattgccgtcggcgattcgtactcagcaggcacaggttgcaacggcaacaacaagaggatgggcagggatgctgttccgtgggcagtgctcatacccgatgcagatggcgcaggatgcagccaattagggcttcgtcaacaacgacgacaccctcccttgctttagcttccacgcgtataccagtaacaaggtgcaagacctggttgtgcatcacctgaagcagggcgattttcgcgagggtaacgaccttccgcgcaatcagccctttagcaaaccgcaacttgctgtcatgacaattagagggaacaacgccatgctgtctacataaagatccccttttgtctccctttgcaagtgtttactgttgactgaccgttggcaaatagttatta

SEQ ID NO: 443 - DNA, 1227 bp, Emericella nidulans
cagtcatttgtgccggcgctgccgcacgtgtaagcactagaagaagtgagggagaggaggtttgaatacttgattaggatgacattgggctgcagccgtgtagagttgaccgccgcctcggcgatatggtcgattgtgtcgccaaaatggccttcgttttgctgcctcaccgtcaatctcttttcctttcttcttgcgtttattttgcgtaatgcggcaagagagagaggatgacgtacattatccttcatcgtcccattcgccagacttcccaccatgtccaccccccaccctgcataccgcagctgctcgcgaaggtacttgcggtaaccattctcatcactggacatgtacccgacggtgatcgaggcaccgagcggcattacccgtaggaggaagggttttgtcgagcgtggctgaagatcgtattcatcctcgtgttgctgctgtgtaacttcaggcagcgacgcggtggagagcgcggggatggcggaggcggcagaggctgtggtaaggaatgtaaggaggagaagaatgccgacggatactctggatagaaatgccggtccaggtgttgtcgacaccgttatgggggctctcatggccctcaggctgtcctcaggctgtacctggacaacgttagcgctgccaactcagagaggggtcgttgcttgttatatctccacgcccggcaggatccggtctcgccagaagctgtgctgtgctggctggggctgtgtagtgtgactgcatgcgtgccagtcgctgattttcgattgcctgatgataggcactgcctagtgataggagggagagttatttccggctgcgttactaatcaaatgaggacctagatgagttacttctctgtgaaattttgccaatatgtcgtcaacgattgtgggcaatgcaacctgggacatgcaacatgcttacgagcgaggtctgaccagagcgatcgtcctggacgatgacagcatatgagagatggaagcctccactgtttgggtccagactcgggtcggttgctcgggcaaggcgcagatcctgccccttgattggctggtttgagagcctcgtccgcattgggactagcgcccgtcaccttatctaagtcaggttgttatgcctggtaatgaaggcatcaatactcactcggtacagtaggggtttggggtcccagacaataaatcaaagagagcaaatcctagttcaattcaatgagga

SEQ ID NO: 444 - DNA, 566 bp, Emericella nidulans
ctcggtcgaccgtgaagggaagattggcccaaacctctactgtatgtatcgctggatactgacttagggcggtgggggctccacctttttgaagactatcgctggtgaaatgaacggtatctttatggacgagaagtcccagctcaactaccaaggtattccggcaaagcagatgcgcaagcagttccgtggtgaagctatctacacggcggagaccgatgttcacttccctcaattatctgttggcgatacattgaaattcgctgcgctggctcgatgcccgcggaatcgtctccctggtgtctccagggaacagtatgcagtccatatgcgagacgtcgtgatggccatgttgggtctgtcccacacgatcaacacccgtgtcggtaacgatttcgttcgcggtgtcagtggtggtgagcgcaagcgtgtcagtattgcagaggcgaccctgagcgcaagtcctctgcaatgctgggatacagtactcgtggcttggatagtgccaacgctttggtgagccgtgttcggaagttcagtcgggatatatgtgctaattgaccgac

SEQ ID NO: 445 - DNA, 2279 bp, Emericella nidulans
acgacttctgcctgattatacttagcctaatactacggtccgtgtatgatattaccagagaccttgaaatcaatataggtttcgccttctttcacatgttaagggctatggagataattttcgatacattatctctcctgtatataggcacggagcagtcctgtcttccttcatggcctactgaaagtcttcattattttactgcaagtatcttctttactggagcaaggattagtgttacaatgagcaaggtttgattgatgtataaagtattttttattgttgcgttctctaaagctattgctaatgatatcatttattattctgcctcggccgaccacctgggtcacaggcattgtccgggcatcggccttgggatatgacaacaatcagcgcgcctatactgattgcgaagtaccagaaaatgaagggcctatgatacaaagtgagaaggtattgatatttttgacgtgtacagactttttgctgacttaatttcagcatattaaactggtctgttctgctctgcagatgcaccctacaagataggatattggataaattaaaagtagttgaagaataattatggctctaagtgtatagtatatggaatctttatggctggatacttaaatacggcatactgttcgaacaaaagggcaaaaacgtatttaacacgtaacgagtttgtacaccgcttattcaaccgcttgctttaaaaaaggtcaggagatttctccttgtatttcttatttcttttaacttcttaccttcgtacaaagctttcagaatgcctcggccgtcaataaatcttgagccatacaaggatgaaatttctaccctgtataaatcaggcaaatctcctcctactattgctatgctactagggaattgatatgacattcaggttagtgagcgtacgattaagacccgccttagtatatgggggattcataagacaaatcgtacagcctcaaaagacacagttcttcatgctcgaatcaaagttcttctatatcaagttggcctctcagagaacgagatcctacatgttcttcagcttgaaggctggaatattcagcctagaatattgaaatatgttcggcatcaaaaagggctcttgcgacgtacagtaaatccaattgctgatcaagctgaagttgaaagggtcctgaatcaacttcgtacggaccttgctactggtcaaattgaaggatatggtataggaatgctttatcagcactttaagaaccaaggatttcaaattggcaggtatgctatacaggaatatttcttcttttaagcaaactggctgactttgtacaagggactgcttgttctctatgtataaagagcttgctccagctgctgtacatcaacgctggcaagatcttcaacgccatcaaggagcttatatcactccaggacccaattttatctggtcaatagatggctatcttaagctagctccgtacggcatcgaaatatatgcagcaattgatgcatattctcgatatattatttggatttatgttggtatcagctcctgtacggctgttagtgtccttcgacagtttcttgatactgttaatattgctcaacagcagccttgctttgtacgatcagaccatggtacagagacagtcttactggctgaagctcaatataagcttcagcagtctcttcatccagagattgatattagggactgctacttatatggaacaagtacttctaaccaaagaattgaggcatggtggcttcaattaacccgtggtatggtgtttcgatatagagtaagtacttatataccatctcttagtttgtacaaagggctaattaagaattaggagtactttcgtggccttcaagaggaaggcatattctctatagatcagttaagtgatcagattgctttgtatgcaatctatatacctcttctccgagtccaaattccatcatttgtacgcacatggaaccatcatcgaattcggaaccagccaaatcgtccgcatttggtgcccggcaagccttatatgaattataacttcccagctactggtgttgagaaccagggaatcaagtttgatatggaactattcaagcgcttgcaagaagatgtccaagactggggtaagttcctaactatttctattactaattactaactatatataatagatatagatgaatatctgccacctgagacctaccactggactcgaaatcagctactagagctaggatatgatccttagcaccctcaaaagctgtgggga

SEQ ID NO: 446 - DNA, 401 bp, Emericella nidulans
tatctttatatagtaaaggattttataagcctataaatactagttaaaagataattataggccttctatatatatttttatttcttatcctgagtaatctacttgcagataaattctttatcttaaaaagattttttttttataatctagagaaggatgaagaattataaataattatatatatataaaaacctttatatatattagctagtttagaacttagagatctaagtagttcttgtatcaatttaaactttagttgatgttttaaatcttataatatattatcaagcttcctgctggggctactaagtcaggattttgaaattttaaatagtctaattatattacttagaccattatctatagtaagtttatagcctgtaaagtatcagttgatt

SEQ ID NO: 447 - DNA, 6389 bp, Emericella nidulans
ttcacgtgaaatctctgcaagggccgtactaccgggcgaatggactagtatcgtagtacattgtaagaggtccggttctctgtgctcgcctggaaatgagtttacatcgattgttgtcggttgacttacgtaccgcatggacgagcccggacggcgctactctaacaaccccctagtttgatggagaccgggccggaagcaatagcctgattctttggttcagttcccataatcttcgacattgctggtcagtggtcatccggtgattgcgtcaacggccctgactcaaagggggtggttgttatggcacacaggtgcggctggcatcatcatatttccggactggcgattttgattgacaacaatgacctctggtaaaagaaatgctcctcgtccttgttggatatctgaatgagttgctaattcagcgttcaatcatctaaacaagctgaatagcaagtacctgtatgcgcatgcgagtctttgccgtcgcagcgtcgctttggcgacagcgagattattatgctccgcctgaagttgatgaagcccactgagtcttgcttcatatctggtatcgctgactgtaactccatgcttcatgttcattcgttttgtgcctttcccaagcgctgactcgaccacttagttacgctctcctccaggctgtcgaacgttcacaggacgataaaaattttataaagtaagaatgtcactattggtcttgcacctggattagagccactatgggctgagtgcagcatacccagtggcttatcttgatttctagcctggcagatctacttggagctgtatgttttctaactttttaagttggccatccgcagcctttctcttcaccagttgaatttccaccaaaacagaacaagactgagaagatatagtgttggtaaatggagctggattccctgactcatatcctcaaccatgtctatgttccttttcagctcggttcgttgtggaagctggtgaggatggtattcatcctgtccataagtcgcattcagtgtgacattttcagggacaagcccatcctccagtcggatccacgtcgccacttcgtctttgatggtactttgctttagaagaatctgtctagcacctcgggccaggccaccgtacccgccgtacccggtgtggcggccatagcacacgttgaggcgcgcgctgctcgacgtggcactcggactcttccacttgaagcaccttgaattagtaagaagtcgttttacctctgaagagacaaaagcacgatacgtaccagtcgttatcatggtcatgcccactaaatgtagccagcattccttctgtggcggacaacgccgccatgaatttcagatcgtgacctgttttaccgtcgtagccgcgaccttgccaccagaccttctcaccattgattccaggctctctacttgtatcgacaccggggtaaagctggaagtcgtacgtcgcagtgatggggatatgaaagaacgcaatcgatgggaccgctttgttatacttgttagtgaggttggcatttgtgtctatgaaccactgaacaacctttggtaaggagccagtcagtcagtcagccattagagacaaagaggttaaatagcgtacgtaccgagtcatgtacccagtcatgaggctgagctccgcccctactatcgaagaaccatagaagcatctcaggaacgtgcgaagtctcggctgcaaatacttccaggtagtaattcgagacccctgcttccaagtctcgcggccccatattcctcgtgagactataatttgggtacgtcctgctctcatagtccagcagttccctcgacctagcaaagcgctcgttatcgtggttcccgtacgtgacggcccacggcaagccaagcgcttggatcggcgcgagcacctgatccaaataccgcgtcgcattgtctgatgtggtgccgtagccagaaatcaagtcgccgttaagcacgacaagttgcgtagaggcttcatgctgcagaaccttgcggactaccccggcggttcttgagtcttgcttagcgccctgagcggtattttcgtactctgcgaagtggaggtctgagaagaccgtgatttgaaaagttccttccttggagaagcgcagactgtgtgtgtccattttgcagcgactctgcagaatatgaaaatggaattggactggtcggactggaagggttgcgtctcgcccttaaggtttaccgcaaggtggtcaacagagatgaattgctgttaaggaaggaccagcctttacagtcttttatggaaaagtgctggctctaccagcaatggattaggcaagtgcagattcactcaaaacctactggacaggcagattatacgctagccagcgcatcggtacaatgctggtagtacaatgcattacatcccctctactatttgcctgtcactgtaagacgtaaacaactgtgtcgcctagttgaactgcccattccttacctaaggcatgataagaatcttcgtcagaggcatcctattgcagcacagccagagaatcacataccactgccacactcaacttcattccgtgaattagagcattaggccgcctctttagctccgaattacaccagatttacagtgaacttgggacacatttaatatacaaaaggcccgagcgtgatatcaggtcgtgaaagcccgctaatctgggcttgtagtgtcggtttctcgatgcgcagattgtggtgtgactccaatagagcgcgtttacccacccgcgtctgccagcactttggcgatgctaatagccggcgtggagggaagtttctacattatgttcttttggcgtaatacggacctgttattcgatgtgtatcgttagctagccctagagaaaggcgccctatttgatgggacgtataccaaagactatcacagccccactggtttcatcgagattccatcctactctggctcggagaggccgacgatgctgtggtcttctggagaatggaactagacgcttgttgtggaagctgatgataaggcaaagagtcggtttaaattatgcacagcatcagctgagggaaatttccgcaggctcgcccggctactctgcatgattaacgatttagacctaaggctgacagcccagccctgtaccctacattcttttattgtttttggcaagtccagccgagcttctgaccaatgatggggggtcctataatacaaggagcagcaaacatgcacgcggctactataggcattagttaaattcttagggtctataagttccgtgatgatgtttagatcaagactgtcccttcaatcactgcctcttgataaaattgcattcggcttggccaaacgtgcattgaggcatagcgaacatgccttttacaagatttcctatattcagatatccagctgagttgaggcacccgtggttctgacgccaaggacaagcccaaagacgctagagaaccatgcagtctgtcctctgctaactggatagcaagcgcacaacccatgtcaattagtagaggtatgagcgcgtagagacgtaagcacttctttccagctgacagaccatattcagatttctctcatcaagaatgaacataaaaggccgtgtttgccggtctacactctttctccagcagcttctaccaaaaaccttctctatcacgagtttgatcgccgtcttatattcaagcaaaagcatccagctcatcttgtagaacacagtcttcgataaatagaatgacctacctccagtccatcgatgtgcgtctatctctttggcccatttgacctgattcattatcctacttggtgcctacacaggattaattgctgacgcctaccttgcgcacaggtccgttacggcgaggaccccagctcagagccctctgatggcatccacacagtcgacggcaccaatgccgacataaatgccgggtttggaggagagcaagtgcccccgccctcgggctccctttcttacacgaaactaaccggcttgactaccagcttcgtctggctcgtgccacgctacaactccaatgccgccaacgcggtctccaacattcgaattatcatccaaggagacccggactcagcctacgtggacctagccaagggcgcgggtggggactaccgctatctgcgcttggagcgcgacggcggcaacaaaatcactgaggtacggctgctgcgccgcaacgatgaggcggattcctcggtggtcagggcgctgggctttgacggtgcctcgggcgatatcaacaagggccgcggcggagattatttgtatgttgtgtggaagtattagggcccttatgcaggttgggtgggctccagtttgcccctctgcctgtctgtcagggttctagacctgatgaatttatcccgtggagtgttttgcctgattaactaggtatcgtatacagaatgtgagaaatgcatgcatcctattgggaaagaagtctggccttccaggaagcgtttcttggaatggcgtccagcagcggcattacttccagcaatgtataccgcagacgaacatcttccgttcaaacacgctattaccagtagctatatcttattgcccaccgagatgctaatagacattctttactcacgagctatccatatcatagtgcctaagttgatcataactaaaccaaacttagatgtcagctttctggttgcgacaaataacaaggcatcgcaaaggttacccgataacccggagctctggcaacctacatcatcctcgccagtccttgatggagtagttgaatccaagaaggcgcaaggcgccttaggctataagtttgcagcttcagttgggtagaccctgagccttctatactggtagcaagcttcctagacagacatcgatattctccaaggttaatacagtaaagctgacgccatatatgacatgcctcgtttgtcacctggtgaattagcatctgcaatgcttgctagattaagaccgccggatttaacagaaacccaacagacttccttcagatatgctccgtcccgtctgtacatttgcagaccgtctctcatactaacgactccggtctcaccagcgcaaaacaacaggaagcgacagagtataccgttcaaactagacgatacaaccgcggattacccgtcacgggttctgcccaaaccccgggggggtgcttgcgtgactcgcagcttggcaaacaccaagaacatgctgtataaacccaaaatagatagatcagcattttcatggggagagtatatactataactcggatatattatgcaaaatcagttctgaccttcgatccgaacgtgtagcggttctgattttaacactggacccctcgcggatttgttatggtctagcccagaccgtaagaatagaagccgggaaaaagaaagtgaaagagactcaaaaagctcctggatcgtccgtatcttgccgactccatggtcaaagccctggtggacactatcgtgacggacaatagtggtcgagtgccgggaatacttcgagggcagcgcgggcaggccaccaaccagctccacgtttacacttggcttcaaagtgtgttcttgcaattcaaaaatatagtttacagagagaatacccataacctgtatagatatcatgaaaaagaccatacctgtccttgtgtccttgcttctttccctagattgtgagagttagccatcaagcttacaagtcccagaattaggatctcagaccccttctccctaactccaacccgatctcactttaatcttaccaaagtcggcagctacccaacttctatccgaggttgggctacatgctgactggatagtagtatggtggatgactgcatgcgaacagtagttgttttcttttctttggtaggcatattctgctggacaaactgtatatctgacgtacacaattctcagctaatatgccacaattttgtcgacctgttgcatctgcatatattcagttgcctgtatctagctagtgtctggatcagatcacactctcacgaattacaagtgataatagttgactacgctagccgatatggagctaccattatcacactcaagcctggctctactctaacgtctgtacatgcccttttctggggatatactgtactatgcgaccaacacaaaacctctttcgcttgataggaaaacggatataataccaacaaccctataaacttctccccggtaaacaaaagtcagataacagaccgagtgaaaagggtttgtgctctatggcagccctatctttgcagcaacgtagggcctggaccctggagagggcaccatgggtgattccttgattgaaaattacttttcagttcgacgtattatcagcctcggcc

SEQ ID NO: 448 - DNA, 576 bp, Emericella nidulans
agttgacttacatagctacttgggggatcctgaggcggagacggttatggtggaatgcttcacctgacacggagcaggggaatgaaatgcaacgccctgagggatgtccatgagttgatcaccctctaccggaaacaggccggattgccgcctcaagacttatgggatcagcatctccacgacgctagccctggtctgacctatatgaagtggagcaccagacgtgctttagaccgttatgtcggccgcctggacgaccaacgagatgatggcggtcctgttcccatatccagaccagaagaccactatactacgctatatacgatgctatcgcagccagtcgttcccttaacatgaatataccacatacttcttctttggatgagtatactcgggacaagctcattacatccatcaagaccctgatattgaatggctacgacacctctgtcagtactctatgcgtgagagcttagtagacttatcttggacaccgttaacagtacatcagttacctcatcggccataagcaagcccccagagtgttctgatgccccttcaaaaggctcatatgtc

SEQ ID NO: 449 - DNA, 874 bp, Emericella nidulans
gggggacattttggaccttgtgttctacgatctttaattaaacttttttttaaatatatcataaactatataaggtattacaagtactaaaaagcttataaaaattatattattatctttagaagttaataaagctagtagattgatatttaaaatatcaagatatttttatatagttatatcctagctataataaagctgttttatgtattttaaaaatagaaatttaataataagctttgatatataccttaaaatcatatttattaatatatttatatatagtcttatccagcccttacaaggcctttatatactcttttaaaggtctgaaataattaatattaaataattattaaaggaaaataagcctgcaggtgtatagaatagaataatattaattatttataaatctagttagatttaggtattaagtaactttcataattatctaagattaatagataatgaaagttgactttataggcttatataatacataaaataaagatcttttaagattattaaagacttattcatctattatctagctattaagctgactttaattttataatctattaataaattagtattcttgtacttaattttatagattaaaattttttaagaaattattattacaagaagtacctaattatttgaattaatatatttaattattattacttatttttgatcacatggctatataagataataatttactaattgttttatattataatataatttgtataatagctaaaacccctattgcaaattttatttaaaatatggatattactatatattatattatattatatttagaacttctttaactagttaaaaaagctttgtagcttttaaa

SEQ ID NO: 450 - DNA, 522 bp, Emericella nidulans
cacttttctgagcttctcgcggggactatcattacgtccattgctcgaacttgggcttgatttgccaccatgaggacaatttatgccgcgttgcttgctggggccgggctggctactgcaatccctcatgcgtctccgtctgtcccagcatccgccccgacgggagtcagttatgcatcaggattcgacatgaccagaagctgggccaatctcagcccctacaaggatgcaggcagctttggggtccccaagggggtccccaaaggctgcgagctgtcccaagttcacgtcctgcaccgccatgccgagcgataccctacgggctatcctctggatggtgaaggtatggaagatttcgcgacgaagctggccaactacaccaagacccattcggtcaaggggcctgtgcacagggccccttgagcttcctgaatgactgggagtatcttctgggtgaagacacacttatggtgactggcgctgcgaccgaagccactcgggtgcagagttttggatcaagta

SEQ ID NO: 451 - DNA, 1628 bp, Emericella nidulans
tgtaccaccttgccgaagattatgatcgtgtcattgatatgagaaacaggacactgtctgactccgtggcaactccccttggaagccccacactcaggctgcagcctctatggcctcgcactaacctgtcgcaggaatctggacaggagacgccaatagagccaggcaccagcctgagcttgactgtggtagaagacccagtcgttctcgcaaagaacatgatcggcctctacaaccagaatgctctatattaccagcgcatccgtcgatcaaatcgcgacgcatgtggtgttctgcttcgaatgatggaggcaaaggctgaggttgaagcaggaaaatggacggcagcattagatgtgagtttcagactgggccaagtcttgttcgcttttcacgtactctttcgccaactgacactgggttcttagacgatcaatgagctgggcattctgccgcttcgggccaatggctctgtaccttatattcgaagcgccgcccaggctttctcgtccctttcgtcgctcatttccggaaatatcggccatgtgatcatctggagcattacatgtatcggacgtgagcgggaacgactgaacactggaccatatgaaaacgagatgaggcaagggctcgctgaggagctgttggtcatggcgaaggacctgatgatcttctccggcatggtcaaatacaaactacccccaagagtttacgagactcttgctcgagctggagcggacattggcgcattctagataacaatctccagcacacatcgggttttgaaataatactagaaaataacttctactttgatcgatttatgatttttcatggcctatctaagtatgattaccagctatgctattttccgtattggtccatctaggtccaggggtcccataatacgcaaaatatgtacggttacatcgtcattaataacgagcgacacttggggaattgctttcgtgcagaggcggaagagaaaccggcgccacggcgccggaagaataacggccaaagctagtagcgcgccaaggattggcgggtcgatgaagcttcaagcctgaagcaactttctaagcgtacaacctggttcagtcaacgctcaaccgattcactctcctgatattctaccgatcagtgcgcctcatgttataatgcattgagcacttatatcatgcggccgtgctcctctaggtgtgacgctgggatccatccacaaacttgaccctcaaccgatattgtcgtgctcgatatggaccatggcgtttctggcgtgtcggacgacaactctacgctaacagatacggcaaatgatgcgacccaagaagcacctatctcgttgacagagatcgatgaacaagcacaaccgcgttcgtcaagcttgtatcgtcctgggggagatataacgccttcctccgacccaagtcccactaccacggaggaccgttctaatctaatcaatgaggtcaccggaaaatcacaagatcttactggctatgccacaccaaatgcggtccagctggatgagtcgggcacctacagcctcattgacaatcccccgaacctggccagaattcggcagatcatgtttgaatgcaaggagcctattgagattagcctgc

SEQ ID NO: 452 - DNA, 454 bp, Emericella nidulans
cggaccgggcccaagaagagactggaggcctgcagagagggacacccattctattatctgacgagatagccaggcttgggccggcgggttgtgaaacatgggctgaactaggagatgcaatcgggggaaatgagggggggagcatatccaatcgcaggactcgacgaagcaaccatactatggcgccgaaggaatatattactaggtcagattaaagaggggcaagcgttaggcacaccgttaacacccctaggtccctcctcacggaaccaaacaaaaagaatctcacgatatgcagatcaagacgagatctgaggcgaagttcatcatgcatagcgtacatttgaggacgcgggctcgacggtggcggatctccgctcccaagtagagagcaaaacatagcctgcctatgcgcggaggacgagagcagatgctgactgcatcataacccggg

SEQ ID NO: 453 - DNA, 838 bp, Emericella nidulans
tgcaaggttagtcggacaatccctagcgtgatgcatgggatgttgtggaacgcggtccagtctatcagggttttggccttgggtggtttgacgcgctgcttcatgatgacgatcgggaggaggagggtgccgagggcaatgaaaccaatcactcggacgggccatccaaagccgaggggactgaggaggcgattcaggacgattggatagatgatcccgccgagagaggatcccgcaacggcgagaccgagcgcggcgcctagtttggaagagaagtatgttggcaggatcgagacgcacgggacaaataggcatccagcaccgattccgacgcagaagccctgcgccagcaggacctgccagtactccttgcagagactgagcatcatggtgccgaagacgatgccgaagctgcccacggtcagcagcgtgcgaaggtacccccggtcatagatgggccctgtgatgaagccgacgagcagcagcatgaaagcctggactgatccgatccacgagatatctgaggagctccgacggaagagagtcccggattcgtagtatgtctggaagacgccgaaagtgttgagcaacccccaggtattgaagaacagcatgaaaccagcgaccacgtgcagccaggccacgagtccgccattgggaggaggactgggaccgatcgggcccttggggagctgatccgtcgacgtctttggtgtaggctcttggtcattattgttagggttcttttcggtcacgaccatgctggtcgactggttggagtcggtcgcccattttgtgagacagtgaggagtgaagagagtgaagacagggagacgat

SEQ ID NO: 454 - DNA, 1556 bp, Emericella nidulans
attactaccggaaatatcactcatctagtaatctgaaccaactaataggatgacattagcgtcttgagggttggctcttgagtagcattgagcaaacccacaatttccgcactccatcaccaagctggagcaacaactccataccaacataagccaagggcggctcctagcaagatcgcggctgcaggtggaacactgaaccacgcactctcagcataagtgacagcggcgacaacgacccaccagggctcctttgccagactttgcccatcacgatccccgggattcagatatcctatttcccaaagccggtacacagccgtaaagactaatcctacggctgtcgcattcacaccgcgcagaaaatcaataacgtacttctgtttccgtaaaacacgccagaaggactggaccgcgatagcaagggcgattccagggaaaaagatcccaaacccaccaaggaatgcaccaaaaatcgtcgggtaggatgtggtctgaagggcgagtgcgccgagaaaaacagcaaagttgaagtttgggccagggaaggcctggataatagcaaggccaatcaggaagtctcgactggagacccagcctgggtccacgacgtaggaacggagcagcggaataacaactgggcctccgccaaatatcacagttccagcgaggtacatgtttgcgaagagatcgagggccaaaggtggtggagaaactttggctcttgagacaagtatagcaataaaagaggctgtcgggttccggattagctcacgcacagcatcatgcccgaacctcaaggggacataccgaagaagaaaataagaatcacatgtccagccccaatacgaatcacatggtcttgagacggaggcccttcgcttccttatgaatcccgggtattgggtcgggtgttgccgtcaaagtccctgcattcggttttctaattccgtaggattttccatccaccagcttccgagcctgaattgctttccaaaaagttatcgctttcggacccccaaaggatttagggggcataaaccccttcttggcttcggggctaggccaaatttttctgtgcccttcccatggcagctggtttaggccccttcaaaaaatctggtggggggcagccaaacccaattccccaaagcgccagttagctaacacaaccgggtacccataataaccggggaattcccggagcggccttttacacaggccaagacaatgcgccaaaattaacaggaattcggaatattttccggatgcctttttagtttgtggaacaagccagacaatttggcctaaggggaggtttatgtccgaaggaaactatactggaccgaaaagtttttaatcctgtacccaaagaattgttacttccatagtccgggaacaaatcatataaaatttaaccgataccaagcgcggttagagggtcaccaccaaggggaagcgcgctacgtgttaaccctgttaacatcccataaacatttttttgtttcggtggagacacatcatatggagaaatttttatacctctcatgggccgt

SEQ ID NO: 455 - DNA, 7546 bp, Emericella nidulans
tgcactcagaatgtggattatgcattgaatcgagttgatggtatatggtatggtataaaaatcgatcaacactcgcttcaaagacattcggcacactcgatacagcattcgcaggcctcttcgcagaggaaacagcagcagagagtcatcaaactaatcggccgcctcaatcagtacacatttttccataacctccatgcgcccatctgatgaaaacgggcacgggtatggacctaccaagcagtcaagcacccgcggtccttcttttcttcaggtggcggcgcctgctggtattgcatctggggaggaggatacgcttgcggtggaggagggccataaccaggctgttggggagggtagctgtacagtaaccggtcagttcattccacattaatcctctcgccattggcagtgtggagacatactaagccccggggggaggttgttgcgggtatgacattgtgagtatgttgtgatgggaaaagtctggggaagagagaagtccaggagagcaagacaggcaagggaggtccgatgttttatttgaaggtgccaggcagaaggataatgaaaatcctcagccctgcgaatccattatccgatgaatgcgcgagcgatccacctgctctgtcccactctggattcgatagtttgtaatggggcatgttttttttcttcaattctttctgcagcattgtctaaaaagtacctaagctatgaagattactgaatacgttgccagcactatccgtccttcttcgttgtactctaaaaaacgaacctgatatcaagaagaggcttgccctagctcttcttgaccgatatctgcggagtataaaaaactacagtgaagggtgaaggccaagagatagtcagccccttaaggcaagctccaccctagcgttttgaacaacattactggctgagaatggtgctgcctagccgcggcacaaagtcaggagaactggccccacaatgtccacgccgacattcttgattgggcgcctggctgaatccaagaccttcttaatgaccgcctttctctgaatgtcgagttgtgcatggttatgcccgcggtcgatgtccgcgactgtggatacccgttaggtatggagtaggcatagtatgaactgactgacttcatcagatagacataccaaatagatgctcctgaaggtctcctctagacagccaggcttcggtcaagaatgtggatctgaatctttgtaaatcgagtgttgttttctgctttatgatccacatttacaagatcactacctctatcccccgtttgttactctttctggagtcttccagatccttatagaccatagccgatcaatagccttgaggtcttcgcaaatacccattcgatttgcacatatttgagtcaatggcttctgttgggcaaccctacccaagatatatatgctggtcaacctaagtcgcaacctgtttagtttgcctattcacttgccaaaaatgtccagtttacgaaacttaacattgctgtctagatcacaggatcaatcatgacgataagctatttacatgtctacctagtgtcgaattgaatgtactgaaactgaagtacttcagggtccaaccccgcagcggacagaaagcttggcttcctcggctgggcctgtcagcaaccctacctatacctagcctggacgtcgatcactgagagtggctgtactgtggaaaccgtcctcaacttgaggtaccagagctgaaatgggcagctggaacgggcaagttcaaggtgacaggtctggagagaaccagtaagcgttcttgccgtaccgagctggggccgcgggccagctcttgttatgggcttcacatgagagtagcattaacacatcgctggattactatctaacctgggtgtatgtcagagtctctgactcaggttaagagttctctcgtgttacatcaattgcagatgttgtacttcacataaggatgcatagctattgcataagtaaagtaggagattcctcagccagtggaacatcgtctgaataggaaaggtggactactgaatacagaggctgttcatattccaggatttcttgagatttattgtagactgcgcaggcgtcaacaagctcaccttgaaaccatgatttcagacaccgatccattgcagtatgaaagctatgttccacgcacaactaccactgacgcgatggtcatttcgtaatacctaatcgtgagcccaggcttgcgtactgaagatttcgacccatcgacgggaatcgcaaatcccggactgcacatccaaggtcattatggggcgaagatgcatcgcataacgcctcaacacaatatcggatgcaaaatagcccggcatttgtatcagtcccgcaagaacaatcaagccgcaatgaccagttaggtctatggacccagctttcaagcagttgcgtaacggcggggaaccctcttaacaccactctcttattaccgtttcccatgactccctgaagatctacaagtcccgtcagggcaatcagcacaacttcatatgactcctagactgacaccaccccaccggctcgcggcccgacggtaaccttgtcaagatggagggacaatatctggggctgatatacggggtaaatatagaaccgataaagacccgtgtccatgtccaccccagtctgataccagtcaagcatcccgaatctatttccaaatatctcatgatcagatactccaatatttcaagagaccaaagcaagcgagcagcactcccactccaccgtcaacggtcatatccacgatggcatccatctcccccaaagaagcccgttcagtggtgataaccatcgacgacgatgccaccccactcggcgaaacggacctcgcaatccgcgagctccaggccgtggcaaaagaaggcgtcgccctcggcgccggcctcgccgcaatcctgctccagattgcccaccccctggtcggccaaggcgtggcggaccacagcaccttcgcctcccgcacaatcagccggacgcaatatacgcagatgtacatcttcacgatgatatttgggagcgacgaagagaaagccgcgatgaagaagtgggtcgatgaggcgcattctcgcgttaagggagaagttgcgagtggacaacgaaagagtgaggcgtacgatgcgatgaatcccgagttacagttgtgggttgcagcgacgatctacgcgagtatggtggggatgtacgagaaggtctatggagagctgccgccgctgaaggcggagcttgtgtatcaagcatttgcatgcatggggacctcactgcaggttccaagggagatgtggccggctgaccgaagggcgttcaagacctactgggaggatgttgtgaccaaccagttggaggtcacggcggatgcgcgcggcgtactgaatgagctcttccatccaaagggactgccgctgtggcgaagccatttgcttggatgctgctgccaattgtccggccggtgacgattgagcagttgccgccgaatgtgcgcgaggggttcgggctcaagtctacaaggaggacgagggcggttacggcgctttttatgagtacagttgcagtaacctatcccgtgacgcccagttttatcaggcactggcagaagagttattccttaaggttgctgaagaagagaatgaggaagcggggagggaagctggtaaagttgtagcatcgtctcgtggatatactagggcttactagggtttcctgtttagtttgtatctgtttcactgataatgcagcaatgttgacattttgctcaatccgggtcgatagctcagtttggtagagcaagcggctgcagtttcatgtttccgctaggtcctgcgttcgagtcgcggtcggccctaacttttttttgcctttcaagggggcccaataaccactaaactgtgaaaaatatcatcgtgttgtggcaggttggttgtcacagtttaagagttgaatcctgtgtagatccttcttattcaagctatttggcataggaggcatctcagttctgttggggtggtcggggcagcgagcaagaacggacagacaccccgtgagccgaggagagccgatcctagcaatactcattcatcttatcagataattttgatatgaatagagctccttcagaagtcccggagtcgttagcaagcaaccaaactgactctcagacctttgcagaactcggccgccatagagccctaacctcttcatcctcaacctagggctgaacacacacttcctcgcggagacttcatgcctggaggattcctaactatatcgaactcgtcattgtcacgacgtggccgctgctctgatcctccccgtatttgaattcttctacaagacagcttctattctgcggcgtggattgtggcggctaagtctgcttcgccgtgtaggtaccgctattactacgctgccatttaacagaaaattgcaacggctagactataactggaaatcctgcgagtcaaaatgttactatgcataactagagaacacgattagctgcgctgcctacgaagcagtatcctcattccgcgccatctctcgctataatgataggcaatatacccactccttcaagaaattggaaagagctcaaatcctcgaatgacagtataataacatttttggccttgaattcttggcgccagcgacattatctctctgattaacgtgtcattcttggacaaattcagcaggctgagtcgatatactaatagcataagcttccaaaattgaaggacgaatttgaagaatatttagagtttctgagcaaaactaaagtcagaaaaccgttgacgcatttgcgaattatcaaggccgttgccttcaacccgttctggtgcactgccacgcttgtgaagacaatgccaaatggtgggtttctgtgtgtggacgattgcttgtccaggatgttcttgaagcaatactggaagcgctggggtctcttaagaatcttggaactttatagcttcgaatagtgattggatatacagatcgaggtgataactcatttcctccgcttaaatatcgaaaataatctgcccggctccttcttcgcttcaactctcaacgtcccgatcttatactccagcgcatacctctgcagaatattatcaccgtgatacttgcggtacttcttgcttgcatctgcgccggccactccgagtagaactatacgttcatcagtttcttcccttataaagaaccataataacagggtaggcgtactcttctttccacccggatgctcttcagagaatttcgtcaggtcgtagaccgtcccgtcaatagcgagccacagatcgccgtctttgttgtggatgaggagatcgtcttcagtgtagattttgtcggttgttatggggatcgcgtccgacttagattcggccctgctgggaggcgaggctgcgtcgactatcgctgccgctgtctcagtggatggttgcgcttctgttcctggttcgtttgacatgttgggccaggcagcttatgaaagaagtctgatctgcttagagtataatgctagagtggtattatacttggtcatggggactgtcttcatgtgctaatcctggtcctctcggtattgctgaagccgaggcggggagccgagatgccgctcgatagcgtcttggaacagggagcaagcacgagtcaaacggaccctgtcaaccaatacatggagagggaataaaatatcactagccagattataatcgtttgacgcagtggtcagccggtatttgagggggatgagtcatgtacttcgaagtgggcgtagacttccctcgtatgcggcgaggactagcacgaacgcgatgggatgtcgctggagataaataatgcaaaagggacttcagggtaagtcatcgggccatatcaactgcggtgcctgtttttcttctgcgtcggctgcttttgactcggcgttagcgtcgtcgctggtgagcgtcgcccatcccagttcctgaagatttgcatactccatggcaccgcttatggctgaagaaaatatgggtggaaaaggcggcttccataactgtggaggggagttaagcctccgaacgtcttaaggagtgatgcttgttcgtaacagagccacttacaagtttgttgccgccggcggtaaccctagcttataaaaccatgttattgcgagaaacagagaaaagggggaagaataataaaagctctgttagccgaccagcctagtcgtataatatcttcagacttctgtttgaagattcaatttttaatgaatagatatgggtttcctgctctgtcgtacctcaacatgttgctgtgctatactgtagcagacttcaaggtcaaaattgcctatattcccttgaaaggcggctttgaaatgagctgaacagagtcaaaacaaataagcgcttgtcatatcataaaccacgaaagttgacggtgatgcaattcctaatacactagagcaacaagcccatcactctctggcgccgcttctgccgcaagattacgaagcgcaggctgtaaagcgactatcttcctgtcgattcggactcactgacacttgtaccggatatggtggccgtactccatacctaccgcacagtgcaaaatcctaaataggttcggcttcggctgaagctatcttagggtcaatcatcaaagaagagtacgaaagttcagtctggtatttcgaaaagacactgcaggatttgcagaccatgaagacgactttccctggcagagttttgagagtcctgtcagtactatttgaaccagatgagataactctcctagagacccgacagacatgatcatcagtctcaggggcaatatgcagatacgacgatacatcaatccgtacacttcacgagccaacaatggctgtgtctcagtatgctcgctgagtattcaaacaatcaattcattcaagcccccacaatggccgcgtgcattagagggtttgatgcagatgacgcggctcaactcttggacggctccagtaagaatacgcctagcaccacgcaccagttcttgacgatttagttacccttaatggtatgataaacccgatcccaagtcacaggaagcgctgaatcgcaattacttttgtcttactactctacgaacatgaagaggattcgtggcctacaacccgacagacgaataaccagaaactacctgaagctcaaggaaaataaagccaagaagcctgtgagtaacagctctggatattcttggtcaaccactacaacagaagtccgtcctccccagagcgatactaagaggccgcatgaacgctcaacctctccatcggtccggggtttgcaaaacaagaaaaaaaatgattgtgcttggcgtgccgtagaagcagcataatcttgaagagttcaagtactgtaagggtaattgatgtgactcattgaaggtctgtataggccagcaagaaacttgcttgataatgcgagacacacggaccatggcccaatagatcgccatatgacttgcccttctga

SEQ ID NO: 456 - DNA, 3589 bp, Emericella nidulans
cccaccccctccccgcccccaacatataaataattcctccataaaaaagaaagaagaggttttttttttttaaaagaagacgtaactaaggccgtgttaaaaaacctgggctcttaaagaccttaagacttctcaattgaaccgcaaagggtattgcaaaaataccattagcaacctaagtaatagttagtcgtgggcacactctttctttaaaatagtggccaacagtaaccaggagaatcaggattgtgcttttaatccaccctgacactgccctttgtgattgaacaaacggatctccaaaagcaagaatacggcatgaccaaccctttttttcaatgttatgtagttcggctataaataggtacctgcacaatttactgcttctgagaataagtgtgggcgtaagcaaacgaaaatgcatttggtgaaggttcaatcctatgggaactatacactacttatggcgaatattattagaatcgaggtgacaaggatttttcaactgtaatcctggtaggtctaatctacatcatccatattgatggtgaagtttgtcctagccaaatttgaactggcttccaatactggcccggctattcctgtacgcggcccccagaagcgcaccatttctccatgccatgtggtgatgtagttccgtgcaaaaaggcccacggaatagaagtggtctctaacatagtagctccatactcgttgtgcgtgctcatcagggttacctttggcccacccaagcatcattggctcgacccaattccattcgcacctcgttcaattctcttgctaaaatgctgttgactgttgggtgattcatgtaggctatcactgcaacaacctctcgcatggcgttcaacgcgcgtttgtagtctcccttgtcgacgtattttctcattattgtattatcgacggcattctccgaaatccatatctgtagattgttagtaattcacagggagaataaaatatgcgtggagttactatacccttgtcttcacgtaatttaaccgtgtatccagaagcacaaatccatcatcattgtttgtgcttccaagcgcattcatcatcctggcaataggttggttggactgcccgccccctctcatgggtggtggattcgtcagtatagactcgttcaagccattcacaatgaaggcgtctgataaccctgtatattccggaccgggtgttctcctagagggcaacactcgagcgttgctatcctctaagaaatccggaatcagctgcagttcaggaatatgctctatggcattgctgactatattctgtgtcgtcataagactggttccaatcgcggaactaaagcagttgtctgggtccctatacccgtaagcggccctgaatatagggtcattagggcggtctgcaaaccaccgacctcttggcctatactagattgtgaaaagacgatatcaggtaccggccttatcataatgtgagttttgtgcgcacttacagcccatgaccgtataacccgttctgcatttgctatcatgcgactatatgtccgagcatttccacgcttgaccaaatcgcgtgctttgaggccgtacatctcgtcgttgtcctcgccgtcgtcaggccagttttggctgtctattggacaatcgatggtttcttcatctccaagaagtgcattgaaatagtccatgttgcaagtgataagctcaattgccttccaggttccctcgcgcgcccaatctcgagccacagccagccaggcctgaattttcgcaacggcaagattggcatagacagagacgacatggtctttccaaatatcaaagtctgcctgcgacgcctgaccaactgcgaaggctaggcggaaaagcagctcgtccatggattccatgtccttactgctcgcacgccgtaaaagagatgatggactactgtcgaaggtatcttaagatattcggtcatccatggtcagcacccgtctgtaggtcaagactgctggataatggaagagaaaataaggggcaaccataccggaggtgatggtctcagggatccagtcatcgcccataagatcacgattttcaaatgtgtagtcgtctatgccacagctagggttctccatgaactccttcacacttttctccagattggcctcggcatcggtgtacgaacgtttcgtcgttgtgacatacttgggcgtgcagcattttactctgcctccgccaccctcgcaaccgtttcgggtctctagggctatgcgtacctgatcattggggcaattacttgtacagtatccgtcgaccaagccacccactggtacatagatcagaccataattgtcgtgccattcgcagtcctcccacttaatgtcctcctcctggtcgcagcagtactttctctcctggtaggtcgcgtagtttcccaccgcatctttccaggcatgtctgtacgagcagaaatcccccccactccctgaactggaattcgcaaccagggtgtttgaacaagttcccttgtcacagccaggggattgagcccaggagcattgcgaataaagcttcatacttggagtgtcataagtgcagcaggccgcttggtagttgtgatttttgcagtgttgaatattggagccgacctccaccatgttagacggacatttgtctctcccgtcgcatttgccgttatggtgcccataccaaccacacgtcggaaggggcgagtcgggtgggcagcagaagaaatggtctgtctcagaactgcatgctgtgttgtccaccatgccctcgttgtcacgctcgcctccatcactgcgtgcaactatagaccagcctgtcgggcagttctgccagcagtttgtccacttgcactgcctgtggacttttcgcgtctccatatcatttgaatgggcagcaagagccactgccttgacttttcggttggcggcttcgcccaaggcgcgggaaaaattgccatacgggagatcatgagatacggcccagaccatgacgcctcctaagcattgcccggcagcaaactgggctttcatcttgaaggtttcagcgtcatcatacgtaagccactgatttggtgtcaaacttgacaatcttcacggcagcttctttgctcaatgtagacttcccttttcggtcggccataacccagtgatctcggaattgagcaggaattccccctcggtgctgcagtttccagcgttcccaccagacacaaaggtacattcccggttccatgcaccccggatttgaggcagagaaaaactcggccgtaaaatgccacttcaaggaccaccttatcagggctgatattattttttccccaacaggtcagggcgttggtatttttgcaaattggtggtgcgtacatggggctcagccacttttgtggttatcacattccggggtctactaatgttatgataatccactcttcttattcataatacgcgcttagccattcaatgttatcatgtttttcctttcctcttcttcaactttatatgcatttgtattttttctctcttcctttatttcctcgttctcttttattttctctctctcaccttctcatcttttcg

SEQ ID NO: 457 - DNA, 682 bp, Emericella nidulans
  unsure (1)..(682): unsure at all n locations
caagctgttcagcatacatacccttatgaaatgcctgccagaacattcaaccaattcaagaaccagctatgggactgattcccaaatatcgtctacccatctcgaaagcgacccgccgttgagcatcatttatgcattgggatctcgtgctttctgctgctgaaatgcttcttcgctctcgccgcaacctcgcgtagcttcctccttctgtcgccggcagctgcgtccttgtggtggtgtcgttctggcgttaatgcttctctctttcccccagcattatcttcaatgtcatcatactgagtcgtcaactccaaacctaacacactcatttttgatgcagccgcgagtacagcacgacagcttgaccactgaccatacagcagtcaaagctgagcccgtccgctttgttgatgtcattcaaacataagtcctaaggatatttaaccggttcatatcggcctttggcagtgcagtatgctgagggcaaccagtaactttgaatagccctacgtgttgcaaggccggcacctcttaatatccgcctgtaacacgccgcttctttgcctggagattgtggtgtactgctttgcggtagggacatggaaagaagatagatcaaagcctccagcttgcgttcgtctcagttggcccaggagcgtaaccaggcantaaaccagtagag

SEQ ID NO: 458 - DNA, 865 bp, Emericella nidulans
ctatacttgaaaaattattgcaactggggggggattattatacatttggggcgtctctaatcagagcgagaggatattgaggctctcatttcgcactaaactactgtaagatcaccacctagccggccctggttatgtgcaggtgtgcagcggctcgcccgaatcataaaacgtctctgctacgaccctcgaaagctagcgccaaattcttcttttcaaacatccaagctttgattgttttacatccaccttcgcagtaatgacggcagaaactgcaggaactctcaccttacagcatcccttccaaagagccaatcagctaaatcaagaccttgaacatgtccaagactatctaccaggccatcctcggatcaaactcagcaatgagagtgcttgtacaaatttatcaatcaggagctttgggcagacgacctcgagaagatggcaagtaatctctggtggatgtcaaaacaagatagtggcaataatccaccactacatcggcagacagtaaagaaccgacagattagattattgtcacagaagatcctaggctccatctgatttggatcgatgaccggatatttctcaagccactccctcattacctgacatcctatatattttggcacgaatttatggacaatgagcgcgagcacaaagatatcatggaactcagaaaggccgcactaagatacctgcaaacatatttgcatctgatacaacacgagttagaccttcgtattgcacagcatcctgccctctgtctagtccaaaaggaggtaacttggactcagttctgcaatttcctggccgatctcaacagcttcacttataacgacgtttcggggcggtaccattgtag

SEQ ID NO: 459 - DNA, 722 bp, Emericella nidulans
atagcaagtatttaaaataggtaagttttttaactacagctaaaatatatcaggtaggctgcttctttatataggctacttacctacagggtataagtaatataaatagaagtaatataaggctttaaactatatatatttatagttaaaacaatttttataaagctattagcaaggtctactagttattatattttaaatatctaagtaataatattaaaaaagatctacaaaacaggccctcgaggaggagaaacctcccagtggcgttgctgcttatctggactatataagatagattagatatctaactttgtagctgagatgacctagggaatatataacttatatattaccaagatcaacctattagatattgactttgtataaagtatctatccaggattatctaccctgccctagttctagaaatatatcttctagattttatccttaatatacctactgagttctactatccttttaggtctctactacctacctatcttgtcagatatatatactctcatctgctaatatttataatactggcagtggtcaggtctattatatacttatagtagctttgcttctaggcagcagttcttggataataatatctttcagaacaagccttggctgaggtaggcaatattttataagtaatctaaactctatagagcttgaatagcttcttaacttaggtataaaaattttatata

SEQ ID NO: 460 - DNA, 4525 bp, Emericella nidulans
  unsure (1)..(4525): unsure at all n locations
tacttgcaacatatccgaacatatttgcctggatttgagagatttcttttgtctccttcgtctaacgacttgaagctttgcgctgctgatggtccaattgtgattgtcaatgttacatctatcagcagcgatgctctaataatctcaatatcagatatcaaacatatccctctacccaactttcctgcggataaggtgagacagtaccgcccatggaggttgaccaagagttcgccccgcgacattgaggcggaaatggaagggtgcttgggtcaagatgccgagtttcagcaattcttgagatttttgtggtcaaattgtgttcgtgtaatactggatgatctgggctttcttcactgtccgagcgatctagagcttccccgaatttggtggattggcacggggtcggccagcgctcttccatttcatgcggccggagatcatcagaaggggtcaaccgaaaatactttcagttgtgctgtttcctcttataccccatccatcaagacattgcggtatactcgagagaaggcagccgttgagcacaatgcgcagtcattgttgctagtaaccatgcctgagacgccaggacaaccccctcttccaggggtcagggcagaggccgaagctatccaggaaattgtggaaaagcctcatgtcatgcagttggtagatcggcctaatggagaaacggttcttcaggcactcaagacctgcactatcgcgcattttgcgtgccatgggtcgtccgacttgagagacccttccaacagttacctggcactgcaagggccgggctccgctcctgatcaactcacggtgcagaagatctcggactcccaccttggacaggcgtggcttgcctatctttctgcttgctcgacagctgaaaaccaagtgcctgacttagcagatgaagtgttgcatctagcgagcggctttcaggtagcaggattcaggcatacagtggcatccatgtggccatccaatgatgacatatgtgtacaggtggcgagcgttttctatcaagagcttctgatgaaggggcgaatacaggagggaagccggggggtggcagttgcattacatagcgccgtggcgcatgtccgcgcacaagccctggaacagccgtatttgtgggcgcaatatatccacctcggtgcatagttaagaggaaactgggtgtcggatggggaaagccaaactttatatcatcgttctatcattctttacccaacagttctcatagaatgcccggcattgctcaaccatgcgcgcttcccttcagaacttgttgattcccttctatgtcaacagatgagcgttgatactctataattactaaacaagccagggtacatgtatattaatatttgatcactggttgcaggcttattactctcaaactgtaagggcacttgtattgggtgtggagagcaggttctgccccggtatatatatctatttgagaaagtactagtaaacagatgtattaaaggataactatcttctatacgagtaaaggcaacatatgcagcagaaatatcatcaaacgggcatctatctccggtatgtgatagacccataggcagagattaacaaagttttcccatatacttagttgaaataatccaactcctgctcagccaatgaaggcaacatgaacccaggagtcagagcttgccacgctaagacaggatggtcattttaaaggtcgagcctcatagcgccgttcaggcttacgacgctgctgctgttggatatgttctgcaaaaacttcagagagtttttttcccatccttgatgaattcatcgttccaggtcatccagtaggcccaggggacattctccttagcctggagttctggatctggtatagagccaacttcagccagcgcgagaactctttcgcctctagtaatgtttttcaagccctcgaatttgcccttaaggacaccatggtcaccggcttctgcatagtggtcgacggtagtgatatcgcacttgttgttcccagggtaccagctcggatctgcagtattgcaaacccaaacaaggttgtgaatatcatgaacacaagtgatatggttgtaaataaggtcccagagttgcttgaaagcagccgggccatgtgctctccaccagaactatcccccttcaggctcgtgaagcgggtggaagaggactgggatgtttgcgtctgataggcgcttgagctgggcagcaataacatctatatcctgaataaggagtccataatctgtcctattcctgctgtggctaagggtgtttgcaatattgaaacaggttgcttcagtgtaaaaaccgctataccatggctgctcctcactgtcgagaagacatgttggggcgtaccaataccaaacaagagtactgatgcctccttgtctgtcgaaatttatggcatcttcgacggcgtggctcttgcttccatgagcgactgcagacagcgagtagtacatgaggtcaagctgttcatttgtgtggatcagataagggtatgagtaattatagcaactgcagtattcatctacagtagttggtatactttgttagtccatgcctactccaaggttgctgaaaaaccctgttcaatataagaaaggatagtgacttgccagcttcactgtccagcatatcaccagccccaattccagccaagtaagagtcgccaatagcagccaatcttgtgatataggagaggtctgctgggtcaaacttatctgtgttcctggccatcagatggttcaggttaatgcttgtgtttttgtggccaagcccatgtaaaagagggtttgccagggcaggactgcccaaggtagcaagggccattagcccataccatagcttcccatgcataacaaatatatatatagatacacaaaatacaacagatttctcccaggaggactaagactctaataaaattcagaaccagcaaagcccgcacagtacagaatagctccttataccacatggtagggctactagctttgttgcgtactttgtctgtttggcttcatctccgtctcaacctacgggcgagataggactcctcccactgctaccgtgtcatgaatcctggaagatacggcaaaattaaagagggggccaagcaagccaccagctggtattgggattgcaagcttcataatctggttgagtgcggtaatctcgggtcgaattaccccctgttaactgccgtcggtctcacgcaccaaagtagacatcgatcatatacatactaggatggcctggttggaatgctagggcatagccgccgaccaatcaattgatcctcattgagggacgaaccccaagggtcccgccggcgggtctatggcgatgcaattatagaacgggtaccctagcccaagggggtcagttacggagcgaacaacagaaatttccggaccagcgatattagtgatcagagttttcctagcaatcttttggccttatttccagagtctttgtctatggtctctactagattggatgaggctaatagaagtattcttggcgctcggtggcgatgctggcagaaggcctccatcgtctaccctgaccagctgacagctttattttctagatacaaactagttcagtactcatagtagactattatgttagttggtgatgtgctgacccatgcatgttggttaggaaactgaatttctacttcaagtgccggtttccgcctactactgctctattttgtgtaagtttgtataccaggagcctcagtttgggctcagtactggtcttacctctgtagacctctatttttaaagtagattagatacagagccttgaggcttggtaagcacgacaaaagaagagcaataacagcatctgtagagccatcgcgcagtgactgaatccactggttactgttaggaatgctagtgctctggataaaccagatcagtctatcaagttcatccttggaaatggacagtttaggaagctttttttaataggcatcaagaaaatgggcattgccatccaagtaaaggctcgtgacatagcaagccagctgaggacaggagaaaagcgtgcgcaggaatttaataattgggggaggttgttcaggtgcagcatcatattcgcgacatttctgccaggtaaattgaattttcgagtagaggaagggctcagcaactgagtgaaaagccttattaacatagcatagtgctcgatgttcgcgaaatgatagcagtttggcaataaagtgcaacagttcatgtggacaggcattccaaccagtaagctcttgtttcttgaccattagcatgaatttcttttacagtcgccagcttgaacattccattttcactgacatttgatctactgctatgtgtgtngtgggaagngatgaaataagactcgagacagctgtcctttttaaggtgagagccaaccttgcaccctactttattttagagttaaaattgtcacgaccccggcccaagagcttttaatttgtgttcgcccttaataa

SEQ ID NO: 461 - DNA, 556 bp, Emericella nidulans
agcccaagagccagagccaccgtaacaccaacaccggtcatccaagaaagcccaggccagcaacgggagggactcaacaaagaaacagcggggcggacaccccgcgcgggcgcggaaacagcggccgaaaccccatcgggagggaaagaacgccacgaaggcaaaagcccgtgagcccaacacccccacaggggacggtaccgccagaaaagagcagggcatccccaggaaacaccaacgcgcgaaccgtcgcgcccaacgacacagccgaaaagcgctgccaccggagacgacccaaaaccacatgggaggcgccattctacgctgggaaggggctcagagccacgagaaaaccgatcgaaggggcaggcgcaccaggcttgaagcacccgactatagggtgaccgaagcgcatgccccgacggacagagcggccaagaacactcggcgccagccccatcacggcgcccaacaaaacccaaaaccgccatacacacggaaggcagcctccaaaccggagcaggaccccacagacaacacaaccccctgaccccca

SEQ ID NO: 462 - DNA, 1293 bp, Emericella nidulans
tttactatttttgattgacgccccagattcaatggcaacggatcatagagaaacagggccggccttttataggaaatgcatgttactttgcaagattgtagagcattacaaataatgtgcatcccatcctttaactcatatatcacaatggctcgtggtaacgtccctgtatcgactggtggcacatgtctgaaggggtcggagggcggctgtcggcctctatacccctatatactctgacccgaaggagaacctaagaaaattatattctgtcttagaagataggttcacacttggcagaatatatacatcaacagaagaagaattgtcgatcaacccttatcaaatccactagcacaaagccccaacgcctatacagctagcctaatctagcactcagagagcggctcagtgtagatgcagtagtcgctagggccatcgctgacctcctcgggctgtagttgacgggctaattagtttctgatgggacaaaataacgcgattgaacatcgaacacggggattatcccccagccaaggcagggttttggcataatggtcttacctcctcgtcgttgttgtcagtgcccttgtactcagcgcagatggtcttgacattcgtggcgcaagttgcgctgtcaatagtggtagtggcggcgtaattgctgttgatgccaacaaggcacttgccgacaacggcggtgactccctcaatgacaacgtgacgctcgtactggtcgacacagtatccgcaggagcggtagtgcttggcgaattcgtataccgtgaatgttgatatgcttacggtaccgtccccgttgtgctggatgactctgtacgcgggtcccttggcaccaccacacacgactattataggggctgtaacagcttttggggagtaggctgttatttaacctaagaaggggtttttttcacaaacacaaaatacgttccgggatatgtgtgtgttaggagaccctctaaatagccttccacacatcttttatatgagctggcgtcctaataatgaacctttttctgaatctacctaagagacttcttgtcacctccttctcggactaaaatgttaggttcatgttcttatgattagatgaatactcacctcttttttgctctcattttatgtcttatttacacttaggtttctgcttcataacttggtctaaataacatatctttctattttatatagtattgacttccctgtccttcttgtccgtccatcttcgtacttatgtctctttccaatcgggtgttatcgatcctttctttt

SEQ ID NO: 463 - DNA, 1566 bp, Emericella nidulans
  unsure (1)..(1566): unsure at all n locations
gctgcctgttaggatcccaatcacaatcgagggcttcacgacgtcgctgacgataccccagacccagcgcttggatcaaggagacaccattctgcaagtgcatgctgacccaagtgcgaagatccggatccataatgataggtaagttaggcacaacacagagtcctgccgtgagaccaactactaacagacatgcagtcatacagagtctcctatccagcatagcgaagcatggctggaagctgttcgccaggcctgtgggagcagcgctgaggccgaaacgcagatgctggccatgcaccgaggtcttgcgaagcgagacattgcaagtgtatcggtatcgtctgccgacggtagtggccaagcgcaagcatatcagcaggtctatctcttcaagtgtggtgatgtcgccggggcttttgataagagcgatgatgcccggttgaaccgtgcctttgtacacaatatcacgatcggcgcctatcttaatagccgggcaacaggagctttatcgatcagcgcactcgcgtactgggtaccccagctcgtcctggcggcagcattggccctggctgtactcgggtcatggaatcccaagcaaaaggcctcctcgccttccggaccagcgaccagatcagcacgttcacgaacagtagtgactcaacccccagtgccaaaggcagtggcagcccgacccattgtcggttctggccacagcaaacgtccatctgatgtggagatacgcgccatgcctgagagtcagatcatcgaactgggcacgctgggccagatccccctttacagccttgaacgcgcgctccaggaccctcttcgggctgtcaaactgcgacggcaaatcgtctcccagcatcaagccactggcaacatcgacttcacaacggacggctccgcgctcccgtacgaaggatacgactacaaagcagtcctcggagcctgctgcgagaacgtgatcgggtatatgcccatccctgtgggcgtcgccggtccgatcaaaatcaacggaaagatggtgtttctccccatgtccacgacagagggcgcgctggttgcgagcacgaatcgtggctgcatggcgatcaacgccggtggaggcgtgactgctctggtgctgggcgatggcatgacccgagcgcctatcgttcgatttcccagtctcgaagaagccggcgccgcaaaacaatggctgggctctgatgcaggatttctcatcattgaggacgcgttcaatgcatccagccgcttcgctcggcttcaaaacattaaggccacggccgttggctcggacctctatatccggttcacggccagcacgggcgacgcaatgggcatgaacatgatctccaaaggggttgagcaagcgctggaggcgatgcaaaagcacgggttcgagtctatggatgtcgtctcgctgtcggggaacttctgtgcggataaaaaacctgcgcctgtgaactggattgaggggcgaggcangaccgtgaccgcgcaggcgacaatacctgaacatgcggttcgacacacagctcaagaccagtgacgaggccc

SEQ ID NO: 464 - DNA, 744 bp, Emericella nidulans
  unsure (1)..(744): unsure at all n locations
attcaacggaagcatgactttcagggcactcatgtcctattttggcgtgacgttagggtttgagtggtagcgtttattagggtatcatatgcccaatgagcgtgataagatacagagcctgctgtgcatttccccatataaacaaaccccattctgttcttctgctaaactcgaatgtgaacgccttctagagagtataatatatatatctgtctatatatctgacctactatcagacttcgataatgtaaaagccccttgccatcttgtgcctgcctacctacctcaagaccaaatatagtaaactaatcatccagccaacatcctggtgaaggtgagtctgcatccctatcagcgtaggtctggactggatacaagcatcgtttgtatgagtataggtgcctttgatatttggaaccagtcaggatagattaccactcggcctagctctctgcacagtgcctggttgcaggcgcagtacggagcggagcctcctgtctatctaccatgccttctgtaggcccaggcagcctcagtaggtctaagtaacttggctcaggacatcatttcacccgagacttcttctgggctaatcctggccccagncatcatgaacttgtattaagaagaaaagtatgttctcaatttttntagatacctcgtccctaggagagaaataggtaggtagactgacatagcgtaaccagactagacagcagctagtctgcctaccttatcatgacg

SEQ ID NO: 465 - DNA, 2774 bp, Emericella nidulans
accatttcattgcgtctatttctattagtcactcgctccaaattcgacggcttgaccagctgtagccgcccatcgcggccgaacccccgcgatgaagccactaacgtcacgcttctgttttctcctggcctctgcctttacttctgtgtatgcgtcttccgactcgtctggctccggtgaactagccccatgtgtcgcgcgctctccgacaacgggactttactacgacttgaacgccctacatgtacaaccgctcccgagcgacgagaagtcacgcaaatacatgcgagatgaaagctggcacgcgaagggctatgattacaacgccaattttacgctgaacgtctgcggtccggtagttgaaaatatcacggacgtggtcggtattgaggaggagaggtggcagaatgtcagcgcttactaccagacgaatgggaagacatattcaatcgggtatgtcgcgcagtcgccgcgcggagactctgactgacatggtataggcaacaatcgtccgatccgttctttcgcggtcgtaagcttgtcatgaactacacggacggctccccgtgcgatgacgagggatcgcacaacaagtcgacaatcatctcgttcttgtgcgaccgcgatgtgaccacgtcgacacctatattctctttcgtcggcacgatggaccaatgtacatacttctttgaagtccgaagctctgccgcctgtggtggctatggccacaaccctgctgggcagggtctttccccgggcggcgtgttcggcataatgtgagcaccgcattcccagtatagatgctctgagctaacatcctcagtgctctcatcgctgtcgctgcgtacctggttgggggctgcgcatatcaacgaaccgtcatgcaccagcgcggctggaggcagtgccccaactacagtctttgggccgggatcgtggacttcttgaaagtaagtttattggcattggtaccgtttcggctgttccggagcacggctcgctttcgcgggcctcgagcaacgcaaagttgccacttcgcggctgcattaagcgttactgctgcatggcagtcccccttcctatactttctgtccaatatgcgtctttcctagaaaatgtacctatattgcgcctgagtgcgactggactgtttggttagaaacctatcacattctttctcaggtttagcctcaactccaaataacgctgagcgcatactcttccatctttcgtgttcacactataccgttattcctccctgtctacgccttctacgctattgctgccaatatcaattcagcaaggctaactctgttcaatgcaggacatggccataatttgcctctcctccctcggacgcttcttcaacttcaaacgctcaacaacgaaccgcgcatctgccggggctgatggtttacaacatggccaatttgcgggaaaccggcgtcgcgatgtcgatgcagaaaatcgactgattgatcagttggatgaggaatgggatgattagcgatgttgtccgttgcccgttgcgtggctcttttgattctgtttcccttgcagacttcttgtttgtgctttatggcgatatgatagatggtttttgctcttaggtatgggtttgagacagtgtcgcacgattgtatagtactattgctgtgtactgctgaccacccgtgctgatatatataacgatgcgatgggaatgaattatgttagcacatgtgttgcgggtttcgcatatatatagcgtggacattcacttaagattttgaatgacttcaaacccgggattaagaatgaaacaggcccctaacgtctagacaaaggatcgcatataaagactgaaagctttcttcatctgctgtaagttttgctttatgatataaatgaataaaaaatagctaaatatgaagcatcattggtctagtggtagaattcatcgttgccatcgatgaggcccgtgttcgattcacggatgatgcatagttattttactttttttgtccctccggctgttagaacattttcgtacaattatcgtgctctcgcgcttgtcttcttatgacatctaacaacgaacaagcatagtttgaccgtggctgacatgtctatcttgtaggatcctttcttatgtcataaacgtgcgcattccgtcttcacgctacgagcagtaactgagcaatctcgacgtctagtatgctagtaagggcagaaccgcctaaatcaatggctggtctaccatatcaacaaagataggacataaatcatatttcttatggttactacatcacatataatacaaccagagaagaccgactatcatgaaatcctcttcccaccaatatcagcaaagctaagcacagaatagccaacgaccaaatgtatatataaatcgccaatcatgcaacaaaaaaaaaaaaaattcaaaatatacttcgcatatgatagtacaccgactcttaccccttcatctgcgacccatggttatggtccatgccagacatcccaaggtcatacgcgcccatgggcatatttcccgtagcgccgaaacctgacaggtcgcctcctgcatccggctgagaacccgggtcgagactgacgcccgcgccgatcgggtcaaggttgaagggaagaaaccatgcagatggttggtagtactcgccggcgcctgaaggggcattggggtccatctgtccagtaaaaatgtcttggttgggaagaccagtaacctgaggccccggcgggggcgccacgtctgcgccgttcattggtag

SEQ ID NO: 466 - DNA, 5426 bp, Emericella nidulans
tgtaggaaaaatgtcatctctaaaggtgcggcaccacaccttaggtatgtcgcgctttgagtcaagtagagactgatgcgatgtagatcccacaagataatcgctagcgaccgtctcgatatatagtggcctatatgtcaggcggtgataaggatgatggtgatggaatgatgtttatagaagtcaatggaacggagggagtttcgcaatactggctgagcacacggctgagtacacggctgagtacacgtgaaagtgatttgtcagggcctctttgttctgtggcgacaggcaggcaacaagtactccggaaagtgatggcctagtctcggcgataagggaatcagagcaagccagaaaagctcaacgacttgtaagaggagaagcacagccctgggagtgagaaagaataaatcaaagcgcccctgggaggctttggctaaagggtttaggtatgagtcaatgcgttgctgatgggcggatgagcctgaagttctatgcttgttattgtacaatggatgttcacgagactgcgggggtggtgcgtggctgtagaagcagtgaagccaattccaacactgcagtaccaactggatatatcaagcgccatatgaccttcttaaccatattcgaagatgggcgtcatatcttatatctggagactgaatcagtccggccttctctaaagtcggcaaggcataagtgagcgtgtgatcggaggcgggggtggatgatccaccacatgacgccaattgtcacgggaaggggctaggtgattcgcagcatctacagtcaatacatggcagatgaggcataattttagaaggttacggctggcttggcggttgactgtctgagcgtcccatttgaggggacgagctgctttgatgactgcaaacccgccaatggctgcaaacaattgagttgtcgtcagatgttgggctgaaagccatggatatcagactggcggctgtcttaggacctgggtctcgagaaggtatcaggctcccgccaccttgcggagttaagggtcttggtaaccccgcctcaatgagtacggagtacgcttccgacgatggccgagcagaaatgactcaacttgaatctccagaagagactgtttaaggtactataccagccagtaataatcatctcctgtggtatcctcctgtcataatgtacagtaaatgcttcaccgtagtatctaatattatgactcaatcatccaagtgaaccctgataatactgatatcagctggagagattgaagcatgaacatgcattcttgatgcagtccaagatgtgatgctcaagtgtagtctgaacctgcatgccattacacctacgcgcagttcacaaatgtcaagtacctcttgagcagtaggaggacgcggcgatactccgagtaccgaagtagtacccaagctagtcgtggagcaccaaaacgccattccacgtgggattgggattccgcatccaataaaccctggtacagcgaggtattctgtagatctttgttaagtggtatcatgtggcattctgatatacaactatgcccttgcagcgttgacacctcttatgccatgtccagttcctcgttgagctttccctactaggagatttggctacaggcttcagtatcacgtgattcgaaaggagatatcattctggagactacatccaaagtcacagaacaaaaactagccaggaggtcctgtgctgcattgcccatgcattacagagcgggcagcgagcgtggtattaagaccattactacacttccctgatctgacaaagaggctcaccacaacaagagcaggtcaagagttttttttaacgcgcccagttggcgagcctgacatggaattatggctgggaattaccaagttcattggttgcttgaacagaattaacatcgaatgaaaaagcgcagggttggtcatcatttatttctggccacaggataaccctggcgatgtgagcaacagcattttcaaaacacacacactcataacacacaaacaaacagtaggaactcggaggttccatggctcaggttcgcagaaactagttgcggagagtacttaccgacgcaagtaagaaaacagcgaatgcgatgctgctcgggacgaccagaactgaaatacagaacgcaccggcagtactgatagccgtgtcttcgaggcaagtgtgcaacagctaacatatcatggcctgtctccaagggtaccgaggtttgtttacaaggtagccaagccgtaagcagatgccgggtaagagaaaagcctacagcacgcccgggtggagttcgcgaataggatcaaaaaaggttaagatatgtaagaggaagccatatcaacgcaccccaatggcacatggtagaaagcaacggaccttgacacgacatgagttgggatagccagaaacatctgagaatagaacatcgtcccgagctgatggtaagacagtcatatgatgattttgcagacaagtacctaaaggtatctcacaagcagttccgcaaccgtgggccacacggaattctattgaccttagtgtttgtttcgcttctcctgtttgagccttttgcctactctcgtgggcaatcatgtcgctgagatcttcctggaactcccaattggggttgctctcctgctgcctctgagattcgtaaagcctttgcagattgtccttactgattccatcctcactttgcatatcatccggattaacagaaacatcgacatctccgggtttcttgcgctttcgagtttgatcttcggttcccagtacaggtaagctatctgtagccgggcgcaaatcatacgccctgtcaccgccaaaaaagccttgtacctccgtttgcctttcggggatgatatgataagcactccggcgatcagcagactcctctgtttgcgttccttgatagtgctttcgcacatcaaactctccggagacattttcaacaccagccagctctgacggaactgctgacactaacccacttggactttccattccactgggggtttgcagtcctgcgtctacgtcctcttcgtcgagctcttcttcttcatcctcgctatcctcatcggataattctggttcctgtaactctccccagagatctttttcaactggttcgccctgctgcatggtttgctgaggctgcaaaacaccaaaaatgtcgcctccataaaggggtctattatgttcgtccactggcggctttccatagccgccggggtgataaccccacatagcacccggcggcgggggggcattaaggcctggtatcttcaaagctgggtaagaggggggcggcccatatcgctgttgatttatcaaccaaggtgggggtgcaccaggcggcatattaagagcctccttcagctctgaactaagctccccggggcgcagatgtcgctggttagtctcaaactcctttccttcatagtaaacttcaccgtatcgagtcaattctggcttggtttggaagcggaaaaaagcttcgtataacttctgatagtcaatatctagtcgccccatttttggctgcaccctctccctttgtttctgcttgagagtcgcttgttcttgcttttctagtgcagcatcacgcatttcggctattcccgtctcctggatgaattttggcaacgagaatggtgccttctctatcccccttttggatgatagatattcacgtttgagagaccaatgagacggcactgggacaacgtttcggtgcgcttttatatgaaccagtagccgcggatcaggggctgaggtatccgtccactccactaactcaggcttcttgaccattgcttttagctcagcgacggagagcttgttcaattctttgcgttttcgcttggatagggtgggaactttattctcttcctcctccggaatgtcggcatcatcatcgaaatacacctccggttttgaaggttcagcttccggagtattgtcttcagtatcatcgaatttagtagcgatgtccttgtatatttgccagagaggatcttctgggtctagcgtatcgatgtgtcccttatcaataccatttgttgccggagcagggggtgaaacttcttcatgttgttggtcagtgcggttaccggttgacaatgtgcccttgaagattgtcagttcgtttgtgtaatgctagaagtgtaggaattctgggaagcatacctgggatttcaaagccttttttctagctcttcttaactggtttttactcggcttcattatgatggtttcgggttgcgagctgcaatgtgacaagtttggcctaggtgccaactgtataatgaactatgaatttgattttgctgtttgtgttcagattgaagggcacggtttataatgcgctctcaaatcagtatgactgatgctttcatggtcggcgcggatctgcggctaccttccaatcagccattgcatactctcacgtgattaatctctcgggatgagcaagacctgctggcgggtattaacaagcagcgctgccccccttgccatactgtactttaatatataagcctaaccccaacaacccaaacatatatactctattgatcactatattatatgatgtctattactagtataactctgatcatgatcattatatgctctttgtacaaggcacccacaaatataagtcaaatgttcttgttatgggataagccccaggatatgtcaaggtgcaggctcaggaatatattcagaacaggataacggagtaaatacaataggcaggctacagagtcaggctatcagacaggtgcatagacaagacaagacatagctccaggttccgatttggatcagtgtcggagctccagaaatctcagctaacccggcggccagcggtggcagaatcaaggctcaggatgaggcgcgggctggccccgtgataggataagggctcaggcatggccttcgcttctaaatagggcgctagatacaatgatcagaattagcagttgtcttgtacctttttagtccagcggcctgacctatactagcgcgtaagaaccaagcctgttacagttctgggttgatcccatgacatgcaccatttaacttcatggcacctaccatctatctgttatgaaacaacgtcgaaatcttgccaagaatgtcacgggacaatagacttgttaaaccacgggttggggcgggttttcaggcctagctgatctgcccacgcggtttttggggtgggttatctgaacagtaaaccgcccataggtttagcaaatgattctaacccaacctaaataacccaaaataacccagttatgtatattattacttcaataagcaataatctacatatctaataaaatactatattaaatactgtattataaactatctgagtaagaaaatataatcgagatatc

SEQ ID NO: 467 - DNA, 5264 bp, Emericella nidulans
cctatgattgtgggaaattcactggggaaagtggttgtagttgagcggagaaggatatgactgctggctgtttcagtacacctccttacaaagttcgcctagagtggccttgactcacccctcgctcaatgcaagcgttgtggcagatctcgtccaagtagtctgtagtaacgccgggcttcactgctgcagccgttatgtcgaggacttctctcgccagccggcacaccttgcgcatagcctgctggcccttagcatccaagaggtcccattttgacctgcttaagcgcatttcccgccttgggatgccagtctccgcccaatcgggatgggtgattattttggggacaggccgtcgcggcgagagtgggtagactggtctaacagagccagtaaattggtaagtcggaaaagggttgaacagtcctcgatctgtatcgtgatcagtaaacaactggctaagtcgccgctaccttccagccgaaagaggtagttaccatttcgtggtttgtgcatcgtagccttgtgcgtggtctggacacaatcaaacttcggtgctcagcgatcagaatcggcgcggatgcgacctacccaattcttcttgaagcagtcttgggagcagaagtaactgcctttgatatccagcttcagacatgttgggcattgtaaggtcccagcttcattatcgcaatcgatcccacagcattttcttgtgggattggacatcccgcggcgttaaaaaattgtaagcaacaaagacaatgttgataaggaaagttagaagagttttggcaaaagagtggtatttccgccagcactacacgacgacagtgtaggagagtttttctggtgcgtaaggaatggtgaaatatgtgttcaggcgacacgttacaccttcctaaggaggcccacagcgagggtccgatctgtttgcacgtgactatccgaccaatgttctgagacgccgattgcccaggtccgcgccgtctcagcaaatacgcaaccccaccctccctttggcggggttgaccgtggttacactggccagcctccattgaattggaaatctcacttatcatcggatggcctgcctgctaaagacaactatggacaggaagcagtagcgaaacagatctatagaacgatatcttagatcgcaatgttatcgaatagtcaaatcccatgctatgtgtgaaaattagtcctgaagatccttttacatcttcgatacagggcactaccttggtaaataagggttggatagtgacgggcactattccatatttttgcagtgagtgcggccgaagggggcgggagccagaaggccttgttgtgtaacaagggtaccccttccactccagcctagtgggtcctactgtccctcgagtaggacatgtgctgattggctaaattgaggcaataggatctcctagccgccgcgccccacggtaactttcgggatcgcgcttctagcgccgggcgggttgtgtattttaccgggtattgttgacgtttttaccaatcggtttagtgcaaattttactccgagtaatgcgatgattccggggagatcgttcgatacacgattggaaacaagacagagaacaataccgagtacatacatgtatcaagaatctacccaatggggtgccatctaccaggaggactaaccggactcggaaactctggcttcaagaaagaccctcggtcacagtgatcagggtagcgaccaatatgcaaagaaaggcggggacatctacgagcagcgtttgggcgggtgtctaggcagccactccttgagtgaggtctcaattggacaccaggtgatttggaatctccaatgcgggcaaggatagcgaacatggttggccccagccaaagtgagcgatactgaacagtgcgccggcaaagtataggttgtgagcatccccgctctggcggctaagcccattgatcacgtagataacggtggctggggggtaggtcaagccgatgtcctagagcccaggacgcatgaacgcgggcaggtgtcgcgggagaatcgtgccactagggtgggctgggtcgttgcgtagggacgggtgcaagaaagccccaagcgagatgtcctgcgaccagctgaacatcagagacgccgatgataggaccagtggcgtgacacgaaggagggccagtcccagctggacggcgtcattgcttgggccaaataacgagggcattagaggactgtggcgcgtgtccaaggatatgctacagcgcagaaaccaagctcggcgagatccttggccgagatattctctgttttaccaccttcaatgatattggcaaaagtaggaatgccaacgtcctggacacgccgccgcattgactccctatccggcagggcctcgacaaagaccgcgtcgacaccgatgcgcttgaactccttggcacgggttagagcttcgtcccagccgtggttcaacaaaataccgaaggagctttcggaggctatacgggtgcgctcggccatacctgtccctggcggcatcgaggagaagggatttcctttctgttcggaaacggtcttcgatatggggtatgggttcgtctggccgacaccgagagccattcaatccaaacagaagaaatgtagcaagataccaagactaattatcatgtaacttcaaagcccattcaagagtcatcccttctgcattcagtcacttagggtaccatattttgtatttgtggcttgagctcatgtctggcgccagaacaaggatctagtacagaaaatggctataacaattcctgactatgatgccatcgtgattggcgggggcttcagtggtatcagaatgctctggaagttccagcgactgggtttgacagccagatgcttcgacgccgggtcagaaataggaggtacctggtggtgtaatcgctatcctggatgtcgcactgatagagaggcatgggtatacgccctaaggtttctgccagagctgctggaagaatgggactttacagagcgctatcccagccaggaggaaatccagtggtacctgagacttgtcgttgaccgatacgacctacgcaggaacattaaatttagggccatcgtcgtatcagcgcattacggcgattgtgacaatctctggtcaatcaggacgaaggatgggagtatggccacctcgcgatacttcctccctgctacgggcattacgtctactcccaaggagccatcgttccctgggctgcggcgttcaaaggggagatgcactcaacgtcgacctggccagagcatgaggtcaactctgaaaacaaacgaatcggcgtggtcggcacaggttcgtcaggaatccatgtcatcacgaagcttggccccgatgctgggcagctgacaattttccaacgaacgctaaattatgatattccagcacaaaattatcctcttgacgagcaaaaacagaggaagtcaagaagaattttggcgtgacatcggatattgccaaggtaaatttggcgggccacgccgataagcattcgggaagaactgtctccagtgttcgcgattcagaagagatccgacatgtcttcgaagatggttgggcgcggttgttacaatttccaactcggcacatttgatgattcgttcatggatccagacgccaatgctgccactgcgaacttcattcgtcacaaaatccgttccatcgtgcgcgagcccgaaaccgccgaagctctctgccaggcctatctctttggggcgagacgtcctccctgtgcagatagatactacgagacgtttaatcgttgtcacgtttattgctagtacttcatggttaagtgagccttacaacggctagattgtactcggcatggctatcaccccaccagagctgcttgagaagctaaaaaacggtcgcaagtgcgtaaccagtcggaagtgcgatgataatcgagtccactattcacagacccgtcgcgcagcaacacgagcgaatccttgatccctgctttgacgcacaggggtgccattggagctgacctctgctcctaccctgaccacagcagacgggcctgcgaaggagacagaagacctggctgactatgggctgacaatcgcccactcagtcgtcgctagcgaggacggcgctaccaagagaagagaacaaaaagaggcagcaagtgcatgctggccacgcaatgtccgagtggatattggcattcatgtaagcggccggattatcaacagtgccttaaccatggcgttctatttgacgtatcagaacttgctcgcagctgccaggatgcaatgaagattcgcatcttatgcatacagaagatcgtcgctccttgactactgtaccaaggacaatcttatgatcaagtcgaataacatgacttagctaggaggagaatatgtctgtgtagaagaaacattggagcaccgggagtggatgaaatgtgtgaagaggcgaagtcttgcaccaagccctgcacggtgatgcgagcagaaaaagattgacgctgtcttcctccagatctgacttgacagctatcaagaaggatctaagcattgcttgttctaccggcgccatctgggcaggatcgagcaacggaaatatccctttgtgtatgtatttcagcagcatttgctcggagggtcttgactaacaggagacagctgaactcctagtcgaatcggaatgttgcaggatatcccccaccaaataggaggaaagcgacttacacggcgtaggtcgaacacgtagatcggattgacctaacctgaagcagggctactgtttatatataggaccattcttctcctccccaaagtttaggaattcgtccgtcggagaaactacgtattcagagtgcgttttccttttaaagggcacatgcacggttgtggaaagggcatatggttcgtaaatagtgtgttttatctcagaagttcatatataccacgtagggagggacgataacgaaataaggatgtcctccgttccggtaacagcatgaattatatatctggatgataaggacatgcaattacttggacctgtagatgataaggctgctctatggcgttaggttcggcagaggatccattatcacattactggaaggtctgcattgagcgggactaactgaatcatggtgctccacactagctagaaagcctcgctggtctagatcggaacctgggacgactgtgggagcgcagtggctcaatcccaaggttaccgttcggcagctaggtgccattatgc

SEQ ID NO: 468 - DNA, 3774 bp, Emericella nidulans
tacactagttatatctatgtaaccttgcttttaggatccttcaaaccccgctgcaaaacggcaagttaccgatagttatgcaactgccaccgcacagcctgcgtgaaagcagttaccaatcagaaacttaaatcacgaaactacaagcacgtcggggcaggtccccataaggttgtgagagaacatcacggcatcatatactctgaatctagggtgaaacataatggcaagccagcccgcgctaattctgaccacaaagcacagtgacctagtgactcgcatgatgtcagaagctgtacaaggttggtgtatcttccctatttccttcgtccttctttggacgagctgttgtgaaatcctcctttcgttcttctatacgtcaaccgaaccgggctacggtcggcacaaaccactcattatcagccgctaaggcgggtttgctcaaggtgatgagttttgatattacggtacaattgcttgcatattctagattgggcgttatctggcaggttatttaccccctgtacgtacagtgtcgtttttcatttgcaggtgccttccagttaggtctaaatagtccaataaagcagatatttgtcgtggcctacgggtcactcggtcaatcacacccaggaatctctacagtagtttgccttagcaagtatcaaaggccttatggcgaaattttgggggaggatgagaatgatctctcattgatgttaggcggggaggctgactaagatatacatagccatatcgagcctcccagaatcgtagctgcaacagataatgagatacgttcatataggttcatcggggtagtagcaaggcacgtaacagcaagccattctacgtaaaatcctacgcactggttctggcttattatccttacatacaacagatacgttattctaaatttctatctttagccttgtatttcaatcagctaactctaattgtctactcagctccaagcctcaaccaattcatacagtgtagattcactcccaacatttcccggaaagaccacaaatggcacgccccgatggcgggaagtctcctcgtagcacctccaaagcggcacacccgccgcagcctggccaacaatcaaggcccgcttcatccggagaccttttgtagctgcgtcggaggatgtaataccaccctattttccgaatcccgcgtcagtttacttcatgggtttcgagtggagaacaaataccttagcaataacatatcttggccgcacctctatcccctccaggacaccaactagggcctctgcgactctcgacccgatcttcagcgacgaaatctcatcgtcacctttcacaagcgcccgacttgtcatgacaagcgtatccttcccggcatttagatagctctctgtctgcgtaatgacactctgaatcacttctgccgccttttctttcgactcaatgagatcttcaacccgcatttcaatcacggagagaagatcgccgcgacgctcaatgaggaccttgagctgcgcagttgtcttgggcacataggaccctacgagaacgagtccgcctgtttgctgggggttaggaagttgcagttccgcttttgtaatgggaggtttgtgagggatgccaaggcgcgttgagacgaatgcggcgccggtgcggtagatgtaccgaaggccttttgcttcggcttcaccattaaccatatgagcacgtcttcaacccaatcgcaaagcaagtaatggaatgcgcggacgacgtaccaagtaataaacccatgacaaaaacatgcatatccgactcagctgccgcattggcaatcactataccaccagcagggaagctcaataggcgatctcttacgccctccggcccaccagtgcggatatcatttagtgtcacagaatggatctgctctgcggtaaaccgaccaggcgccttctcgaggatatagtcccgcagattggagctcttatagccgaacgttgcgtctcgggcaaattgcgtttgtcccgccgggactaagtcttcaccttcgaggacatagtgcacgtcgttgatcgtataacgccccccctggaagaagaacggtgctagaacccatgttggcgctgttgcattctcgtccgagacggagtaaaaaacactctgcgcaacatcaacctccaacggaaaatgccctcttagcgtactatcacccctaaggacgatatctagactctctctgctcaatcccatctccagtgcagcagtaaggacattctggcagatttcacggatgagaagttccgcttcgtcgggaggaagagcgcgcgagttggtcaaaataaagaagccggccgaattggtactgaattcggcgacaagcgtgcgaacatcccagactgtcaagacggaaatgtcatggcaggtttgagtgcctgttgggtcgtcgtcgaggacgactagacggcgtggggtggtagatgtggagaaaaggtaagtggctatttgggagagtgtatcggtagagtactccgggggtagagtactgagggtttgggtaagaggaaggggcgggtatgtagacatgatagggtgtactttcttcagaattgattgaggagtaatggacgttgaggagatggaggttgcgtttgtatgtagatgagggatcggacagtcctgcgctgttaatcggagtttgtccgaaaaatatagagggcaaccaaacagttcatttacactttcaaagacactcgattcctctcattccagtcaggttcgaatctttaaagaacaccaggagcgccaggacatgtgcgaaatatgtatgatgcaaaggggtcgtgaatgtgatagggagcagcagatgcaaaggacaggaagtcaaccactcgcaaacaaatgaacaagcgacaaacaaatgaatggctgtatagatccaacttcgtaaaacatttagaggaagacaattgcctagtgtcgccgttgcatgaaaccagtaaccaaaaccgccgtcagtatatcgtgagtccggtgcacagagagacagaaggattagcagtagatatacgtatcgagacagaaaaaagaaaaaggaagaaaactcaaccaaccacgctgcggaagctgagagcttcgaggaatccgccaaggtcatccttctgcacctcgacgacgcagtgctcgaagctgtcgatgcggacccgggtgttggtctcctgtacgacttcctggaaggcgatgccgaatctgttgcgcaaaaggtgcttattcccgcgcatatcttgctcatcctcggagtccgattcagactcggatgatgatgactcttcttcggattcctcctcttcgtcttcttcaccatcgttcgccctagcagctcgttcagcggcacgtttcgcctttgcttcttctttctctttgcgcttcttctcctttagttctctctttctccaacgttcttcccgacgcttgtgcatggcagcaaaatcaataacgccgcctccgccgccggtaccgacgacaacgtataggccccgatcttcgtcgagtccagcaagcacgagcggagtgcccgctgctcttctctttccgatctttatagcatcgccccggtctcgttcttgtacgcggatggcttcagcaacccacaatgccagcttagtcaatgctcccggattcgtgaaaagtttaacatcaggtccgtccttcacaacggcaatgcggaaagctcgtagatgtcggatttgatgctttgacaagagtgatgtgccggtgcgaagaatcgctcggtgcagat

SEQ ID NO: 469 - DNA, 3068 bp, Emericella nidulans
aagaaaagggaagaggggaaaaagggaaaagaaaggattgaattggaaagagaccataggagaggataaagttttagaaaaaagtttaagcaggtaaattaagacacaattcaccacaggtgaagatcaagtggccaaaacacatctaggttaaattccagatggcacaaggtcaaggcaagcttccggtttttgggccaccggggaaccacattgctagggcaaatcaagcggcacggatctgaatttccgctggttcgctaaaaatgctttcccaaaagtctgcggcctcacgtggcttcctcaagtggatggggtcaattctgtgcgctgccgaaacagccaagaggtctccagccacgggatcgcaagccttggcttgctcggatccgggtttcatagtggagtgtgaattgcctctgagatatctttgtcgctgtcgtcatagccgcctcagagttaaatagagtgccatcgcccagctttccatatatctctttattgtaaaatctagaatctagatcttcatcgtcactcagtatcaattccggccctgtccttcttgtgcatggactcgcattccttggttgacacgatctatatggagcctccctaaaagacaccatagtagtaacgtcagaacaaaaacttttgataaacacaaacgacatgggagaggagaccgaacagaaggggcatgtgcagcccttatcccggccggcacatactctctcgcccgatgaaatcttgcgcgaactcaaagtgaactcggaggagggtctcactgccgctgaagcgaagaagcggctggagctgtttggacccaatgaactcgaaggtggtgaaggtgtttcgcttgcgaaaattattattagacagattgccaatgcgatgatgctggttagttgtttccctctcctaagcctagctccgcttcgttttagttgattaacgtcctggtaggtccttatcatcgcaatggccgtcagtttcgggattgagtcctggattgagggtggtgttattggcgccgttatcggactcaacattgttgtaggcgtgtatcaggactatgccgctgagaagaccatggactcccttcggaacctgagttcacccaccggtgtagccacgcgcgatggcaaaacgaacactatccctgctaccgaaatcgtccctggagacatgattgaacttaaagtcggagacactgtcccggctgatgttaggtatgtctttcacgtactcgacgcagggttggactaatatcaaacagacttgtggacgccatgaacttcgaaacagacgaggcgctgttaaccggcgaatcgctgcccgtgcagaaagaggtcgatgtgacttttgctgaagacaccggccccggtgaccgcctgaatatcgcatatagctcttcaacagttactcgtggacgagcacgcggagtcgtcatcggcacaggaatgaaaactgaaattggtgctattgctgctgctctacacgcaaacgactccaaaagacgcccagttaagcgtggccccggaggtgagaccaagaagcgttggtacgtgcaggcttggaccctgactgccacggatgctgttggtcggttcctgggcatcaacgtcggaacacctcttcaacgtaaactttccaagctggctttgcttctctttggaatcgccgttgtcttcgcaatcgttgtcatgggcgccaacgaaatgcgcaatgacaaggaagtcattatctatgcagtcgctactggccttgcgatgattccggcttgcttggtggtggttttgacaatcacaatggcggtgggaacaaagcaaatggttgagagacatgtcattgtccggagacttgattccctagaggctcttggtgctgtgactaacatctgctcagacaaaactggaactcttacccagggaaagatggtcgccaaaagggcgtggataccatctctgggaacgtattcagtgggatcttccaataacccgttggatcctaccgagggtgaactaagcctcttgcctgatcctcctgttaagcttgacgcgatgcgcgaggagaccctgcagatccggctgaactgatcaaggataataagatcctggaggactatctcaatgtggcttccatggccaatcttgccgttgtccacaggtctgaaggaaatgaatggcaggctcgtggtgagccaaccgacatagcgatccaggtcttcgcacaccgcttcaactggggacgtgaacgctggacgaagggcgagaagccaatctggcgtcagaaggctgagtacccctttgactcgaccgtcaagaagatgtccgtaattttcgcccgggaagatgactctgaaaagggtcgtcaaatggtttttacgaaaggtgccgtggagcgagtcatcgattcttgcacgaccattctctggacccgtaacgaagatcccatccccatgagcgaagatatcaagagccaaattctgcaaaatatggaagccctggcgaaggaaggtcttcgagtcttgtgcttggctagtcgtgaatttgatactcctatcgccaacagcgaagaagtaccccctcgcgaggaagtcgaaaaggatctcgttttctgcggcttggtcggcctctacgatccgcctaggcctgagacagctggcgccatcgaagagtgctaccgagctggaatatctgttcacatggttactggcgatcaccctggcaccgcacgagccatcgccgctcaagtcggtatcatccccgccaacatggatgggattgctaaagacgtcgcagacgcgatggtcatgacagccagtcaatttgacaaattgacggatgaagagatcgacgacttgcccacattgcccctggttatcgctagatgcgcacctacaaccaaggtccgtatgattgacgctttgcatcgtcgtggccgctacgctgccatgactggtgacggtgtcaacgactccccatccttgaagcgggccaatgttggtattgcaatgggagaggcgggctctgatgtagcacaggatgcttcagagttggtcctgacag

SEQ ID NO: 470 - DNA, 273 bp, Emericella nidulans
  unsure (1)..(273): unsure at all n locations
ctgtgctgacccattgcaggcatgtcttcatgtcgttgatgatacagcgagagcatagacaagtatgcctcgatcgttggaggtctatctgaagagtgcaccatgcaagacctgntagacatctaaattccccctgactgctgttcttttttctataattcagcatacgggaaaccatcaatcctgnatacgttattatagcgacgagcttcagataatttccggtgtntccccaccattcntggcttccctaacgattgtccttaacgatcg

SEQ ID NO: 471 - DNA, 772 bp, Emericella nidulans
acctccccagctcagattacagcagctgataatctacgcaagcttccccttgaggagcattgggcgtacgctgaacagcatgacaaacagttaatggaggcaaaagctgctgtggaaaatggtgctgcaaagttcctgagcaatctacagctgcgccttttaatatcagaatacttaatattacctaatagataattactcttctggggaagatgctgggtcctgaatttagagtccctctagacacatttaatacaggagatatataattctatacttactggtcaccccggacaaaacacaatatattctatcatagcacgcaacttctattggcctgaaatctctgcagacattcagcagtttgtacacaactatgataagtatggagcaaatcaagtatggcgagactgctggcagggcttgctgaagctactccctattctagatagaaaatagcaggagatatctattaactttattacaggcctaccaaactcagctggttgtgaagatcttatggttattggtgacagactaggaaagggtgtgatactagttccatataagaagacagatgctgctaccattatttaactactgatctaatattttattagctactatggcatcctaagtgctattatatctaactataggccttaatttgtcagcagcctctggaaatgattctgcaagctaaaaaaaattaagcaacaactttcaactgccttctatctacagactgagaggcagatagcgcaaaaaaaat

SEQ ID NO: 472 - DNA, 3030 bp, Emericella nidulans
tcctataaacaagatagcccgttgctcttcctggaccatttgcatatggacaatcctgaggttgctgacatgatcactacctttttcatccaccattgcatctatttttccttcttcggcaaatcagcacaacctgggcctaccggccacggtcaaaccagagaacctggcgcggacgcccctcagtctctgttgtttgttgaggaggctgggtcatctaacaatcaaagagctgctccacacgtggctgagccaagcaagccagtacaacaggggcagcaggaggtacagctctgacaggatagggtatgacaaactctgcaccaccagcaggtacctagagcaggaagggagcgacgaattctgaaaaaacaacagaagcagaagttctattgtcagcagcacccagctgacgcaggcagcccagagcccatggagtatgaataggtgagcaaggagtcctcggaccaggatatgtctgaccagggacgcttatctctggaaccccctggtgcagatcttgcaataacgccttggggaccattaaatagatctttgttggtgtccaacccactaaaccccgcgcagagctcaatcgccgaccaaggcaaaaatactaataaacattgtacgaggatcttgccagaagcagtccctccggaacaggatgtaggggagacattgatgataggagctccaaatccagatagtaagatccaagagcaagtagagattgatctgcctctgtgtctggaggttggatctccctgtaatgaccaggatggacagcaacagatatcagatgcttacttaaaccaactaataagggctgagaaggagcaggaaaggttagaggaggagatggaacatgaataacttgagggcgagcttggtatcctcaacgcaaatccaccagctccagctccagaaaggcaaattttactgcccgggactgcggagctgacaggcacggacttacattcagcactgactaatattccagaacctactcagcacccacctactgctgaagttgggccacgcttgctaatgccgccaggacaggtggaaatatccttctgaacttttgaacaaggggcctggaagcactcagactgtttctgggtcaacctatcagatccattgcccgtggaacaagctgcgaggaagtatacatggaagaattatttactatataatcggaatctacagagccttagccccgctcaatgctatcgcgcagcgactgttgatggcaataataagatctttgtgatttcggagtatgaagagaaaaaactgacggccgaagggagattcaccaaggcccgacagcttctgttgttggctggggacgtctcccacacccaggaacaggttgagtctgctcctaagcataaccaatgccgatcctgttctccttctgagacatcagaagaattgtgagcactcttctaggtcgaacttagcaatatacaactctacccaagatgtccttgggaacatgaactgtatcctcctgaggagaacctcttagagcagtttactcctcaagaggcttctcctatgtgcttatccggcatatataggctatctcgtgtattggcccacaagtagatttttatattaatatacttatagttggagcattatatgaatcaaacaaacttggaaagcatgtcacagaagtgctctcttgagggggtaagtttcgtttcgttgtttcgtttcgtttcgtttcgtttcgtttcgtttcgtttcgtttcgtttcgtttcgtttcgtttcgtttcgtttgtttcgttttattatttaatgtcactcggcggatcacgtggcccacgtgatctgcggcctcccagggggcatctggacgtgctacctaaacagaactgcctaggaactagctagatacaggtttgaagcagcaactatggacaatatatgttggaaatgagcggaagaagcatccggcgctaccctggccaggtcttcgagggcagatgcctgttttgactacctatagattggggggaggggccgtaccctttgtccaggtagatgtgtggactgtcgcactttcaagcgctccggcgggcccagttcaggcatatgtccttgaaaaaggatgattcttgcacgatgcggctgaattcctcagccccggcagctgtacttaagagccagtctattgtttttgacgggccatcctttatacatctccatctatccttccagcattttctggtatatgggcaaaagaagaagtgtactggggtctttgccttgccgcaggtgcagctctccaggtagtctgtatagtcaaaatactggtggtatgctgtaaagtctctgtggcctgtacaagcggcgacgagtcggccaagtacccaccagggcagcttgtgctcgcgggagcggctttcttttgtatggggtctgatattcagggctttgtaggtttcaggcgccttattagcatatgctgtatatgtctctgtacagagccactgttttgcctcctgttgtaggtatgctggggagggggggatgtcagggctgtatatagaagaccctagcttagcaagcttgtctgccagctcattcccagcaattccagagtggcctggaatccagcagacctgaaggggcttccattgcatggttaggattaaagggctttccatctactgggcggctagttggctaaaggtctctgacagaccatgtctgtaaggggttggcctatagcttactagcagggaggctgcagctaggttatctaggaggataactagctaggtagagtagccaatatatggttgtcccaggactgcgcataggccttccacagcacctataatttctgtattatagacttctgtcctggggcccgcgggaccatgtcccttggatacaaggatagggccaaagtagattgcatagccataccctgccccctggctggtctgtaagctatctaagtatactaaaatctgtaaaggggcagggctgtagcctttgttatctat

SEQ ID NO: 473 - DNA, 872 bp, Emericella nidulans
gggggcacttttgcgggggacgacgaggacttccactttgcaatcatattatctctctctagctggagatgaattgacattccctggagcctgacgcggtgactttctggagaattgtcaatgcagcctcgtgctggttaggaggatgtggccgccttggattgtccaagcacagtaaatgaagacgaaaaatggagcaacttcctcagtattgggcgatattgtgaatactaatgggtgaagcctctataggctcttgagggggaggtgggcaggtaaggtgcaagtgtctgaatccaactagagtagatatactagttatgggacagcctggaagaactcttgaaaaccctagcttttcatcacctgcgccctcatttctcagtcctctcagccctccttcttgctttgcgctcccctggcggccacgtttcgcaccggctggcgctgcttctctggcatttactgcgcctctctcatgttgagttgctccttgatttctagtgtatctgcgacgcagtcatgattccagttcatctgacaatggtgaatatgtagaggaagcttcgtgtgcttcccgtgctcttgtccaagaaccttaaataggccgtcagaagggtaagatcgcgtcttgtacagggctcccatgcccttctgaagctccttcgacgagtcgagtctttgccacaatatctcctaaatctaactgtttcgagcagcaaccattaatcagtaattgatagtctaaaagccaaaacgctgcacaaagcatgtcaattgtttattcatatgcgaccgggacctgtcctcaggcgcggtggcagttagtgctattgagccgacgaggtgctggcattcagagtgagtagata

SEQ ID NO: 474 - DNA, 788 bp, Emericella nidulans
caacattgtcgtcttaagcctcttaggtcaggctcgctcgtcccttgcttggatatcatcgtctcggtctagaacgataattcagcacggcaagtgaagcggcaaaagctcgaatttgaatgctggtccctccggggtccacgttgtattctgcagagaatgctttgggtgcctcccctacccaagtgccctggaatgggccgtcagaaggggtgagctctacgcatactcgccctaaaagacatagactccgtccatgtccaatccgtggccgcctatatccgccatatcgcagtcgttcagtcttctaggtgggctaagacgtactctctccatccttggaatagggcgtgaaagacttccatggcaacttcagcagtgagcgtttaagagatgactgacttcatccgttgagctaggttcgacgaactggaattgacagtcgactacttgtcaatactcatcgcccacaaggactattcgactgcgccttactttggaccatctactcctcttacaaccgcaatccacaaaccggatagattataagaatgtacattgggtctctattttttggccaaccccaaataccgggtgagtattggagacacgactcgtcgcaccaggcagtccaatcatgccttacttgtgcttggttttcgtcaagtatagccacgacaagcagatcacacctgtcccttcttcagctcgctcactgcctagtcttaccgatgacaagacaccgtggtgagattggcggtcagaagcgctactagcgcataaaaagg

SEQ ID NO: 475 - DNA, 1243 bp, Emericella nidulans
ggaagatattcacgagagagagagaagagagggatgggaaacggaatcacgggatattagaggaagaaagaaagtaattaataagaaccagaaaaagaaacagaaataatttttctgattgagaggaaaactatgtgtggtggactgtaggaaattatacaggcctgcaagagttgatcttgaacgagacaaggcctacaaaggtttttcctccaagacaaggtttctgaagcaggatcctccaaaaaagtcaattaccaccccccaacaaatcagccagaatatcagccttcaaccaacaagaattcaatttttgccggccttgaacgggtacctccccttaaacatttagactagaattaatttgtctaacgttgggtatgtaaaactttggtcagagttttattccgtgtgatgtttcttgtggtactcgcgtgttcggcctgggatagaaaagcgataaaagcggtccttgttagcgttgttacgtcattctcaatattcattcttgccttttctgacctttttactcttactctttcttaatactattactgatatgacggtggcaagaatgtccactctattctaatattctaaccgaatcacggtctgacctatattatgattccgctccgattccagctcagagccagataaaaccttggccacgatatgtacacctctttccatcccaatcagtcgcctcagctcttcctcagatcttactctcttctttaaccagcaactttcccaacgcctcccgaattcctctttccattccaccctttgcaggcctcatgactcccctctcacaccaaacatgcgtataaccgccaacgaccttgacgtcctcctcgccctgcttaaaaaccccgacctcatacgtaacgctcgtcgaacccaatttgttcacgcgcaatcctaaatccagaatatctgggtacgagacagacgcaaagtagtcgcagtaggagttcaccataatggcgacctggccggacggattgatgtcgtttttggctggggtcgaggaagtgtacgagaaggggtccatgccgcactcggttatcaggtagtggttgatgatcgagtcgaagagttgcgcgtagacagtgttgtttaggtgtgcgtacatgtcattatcgtgccttgtttgtaaaatgttagcgggtggacattgtaggcaagaaaaagatggaggtgctgtacatcgtgtgcgataggtctggtgaaagatgta

SEQ ID NO: 476 - DNA, 1916 bp, Emericella nidulans
aaagggcactttgagatttggaattcgaaaataaaactaacgtttaaaatccccaagtggattggtgtatggacaaataataaaggtgagggtacaaaaataatttaaaattgggctggagttgtttagtggaaaaattagtaaaggctaatccttagtacaagcgtccaatttaagtccaggtatggggatacaggaaacctccaacgtaattggattacaccagtaaaaagccatccctttcaattaatgacactacgggttggcttaagtttaacccattaaaatttggaccatgaattcctacaaattttcccctccacataaccctaactgaaaggtttgttttattttgctggtggaattgtggcatgccctactataacatggtatatttacgtcaatccagagtgccattattagaaaaagtgactgtcccttgtagactcaaaattgcattctgctgcagtgtaaggactctgagtatgtgcaaatatactacaattcagggttccgtaatcgtaacctttatcctcaacagtggcgctagagccgataagctaatcgcgtcaataggcttatctaatcctgcttccgatggcgggaccaaccattagcctttgctcattctcaaccgagggcagcaagcaaaaagttcgaaaagtgggttattttttttttttactaaattttctaccgccctcccacttcaaagctggaagcggatatataacatcctccagcctactctctttcttctataaaccaactgcctttgaaatccactttttaccactctttctttcctttgccaaaatgtctgacgaggtttatgagggcgccattggcattgaccttggtaagccctgcattttccaatttaccatcccagtctcgctcacaaccattaggcacaacctactcctgtgttgccaactacgaaggcacaaatgtggaaatcagtatgtatcggaaatctggctctttgagacataagaccaacagtccgtctagttgccaatgaacagggtagttacacaaccccctcgttcgtctctttcaccgacaaggagcgcttgattggtgaggcggccaagaaccaggctgccatgaaccctcagaacactatcttcgatatcaagtaaggcgccttatagccacagtggctccaggactgactaatatctcaggcgtcttatcggtcgccgttatgaggaccccattgtcaagaaggatgtcgaatcttggcccttcaaggtcgtcgaccagggcggaaaccctgctgttgaagtcgagtatctcggagagaccaagactttcactcctcaggaaatctcgtccatggttctgatgaaggtagacgccaactatgtttcggtttccacataatactaataagccaccatagatgaaagaagttgccgagaccaaacttggcaagaaggttgagaaggccgtcattactgtccccgcttacttcaacgacaaccagcgtcaagccaccaaggatgccggtgccatcgctggtctcaacgtccttcgtatcattaacgaacccaccgccgctgctatcgcctacggccttgggtctggaaagtccgagaaggagcgtaacgttctcatctacgatcttggtggtggtgtaagtaatatttgttctatattggagactggaggatgcagcactaaccaaggtattcatagaccttcgacgtttcgctactcaacattcaaggtggcgttttcaccgttaaggccacagtatgtcatgtctattccaagcgtttcttcatgagttggtcgaggaaggttgactaatatatgcaggctggcgacacacatcttggaggacaggatttcgatacgaatcttcttgagcacttcaagaaggaattccagaagaagaccggcaagga

SEQ ID NO: 477 - DNA, 849 bp, Emericella nidulans
catgccgcgtatctcggagctgtgtagtacattatgccagttctcatatctcgggaccaagatgtataaacatacaatcaccttatccttggtaagaatcaagctagaaataagatacctagatgcggcagtagttgtcaaacagcctcggaggtacattgctgatacattgctggcaatattcagccctgacatattgactagatagtgcccttctctcattgagcccgcagtctcagaactaagcctgctcaacatgctttccccccccccccaacagcaacaaccttgtcggcattgacatccaaccccatctccctcatggcgttcttgcccgcaagcgcgtccggcccgtcaaaaatctctgcaacctcctcaaggccctttcccttcgtctcggggaagaacagaaagatgagggtgaagttgactccgatgaccacacaccaaacgatatagtaccgccagctgatcgcgtccatggcaaccggattcgcaaaactgttatacaggcccgcaaggttccccgtcagctggtacatcatagccgccttggacctcaacgaaaaaggtacgacctccataatgtacgttggcgcgacaggcgagcacatgtggtatgcggcgctgaagacgaagatcatggccagcacgccgccggcataccctttatcctcgaagttgtgtttctcgttcagtgcagagcagatcgtccagattatgtacacgacgcccatgctccccatgccggacaggaacaagcatcgtcgtccggcgcgatcgaccattgtcgcgaacactgcggcagtgaggaaacccagacagagagacaggcgttgatgatgagct

SEQ ID NO: 478 - DNA, 947 bp, Emericella nidulans
cgactccattcaaatcgaacactcctcctcccactccgccccgagcatccccggccccatgcatactacacatgctcactagacgagggcctgtacctgcgtctttgctatgacgactaaaataaaaaagcccacaaggccgtctgggcggagaatttcgacgcagcattcgtcggtccggatgggattattcttggcgatagggagatatttggtccgtgctcgtctgttgcggatgcgtatggggttcctcgagcggttacgaatactggtggaatgggacatattcaggtcagggagagggcgttgaaggttgttttgagtcggaatcggggtgaagaggacgaggaccaaggaaatgagggaaagggagagaaactaatgcgctatgcagcgtaccatgcggctgttgtagtgacgcatttgttagtggaggatgaggaggcgcttgatggtgtagggctgctgcatatgtttctggatcattgcggggatgtcgtgaggcaatctcggccagatgatgagggaagaattatgacttgatgggaccgggaaggatagtgtatggaaggaggacttctaggcaagaactggagagttggagcctgcttgtcgtgctggaggggtgagggggccgccatgttcggtttcgacgtagtcctgatggtatctgtggaatcaggatttctgctcggttacttgaccctccaccggttaagtatgctgagatctgggattgcttacgtatatactctttatggtgctctttctggaggccgtggagcgatcttacaccactatatatagcattcgcaattagaaaacaagagtgattaacaaacaatctaaatgaccgactctagttctggacatatcccttctagctctgctgaacatctcgcaaattcgagctgagcatcgcgttcaatatcttccgatagaggtcc

SEQ ID NO: 479 - DNA, 946 bp, Emericella nidulans
caataagccaatctcgacaaccattttgcatcgtaaacggccagattattcggcatccaaaacaaaaaggacagaagtacagtaataaattctcagacaactcacctccagcagtgcgcttcgcaccgtgcgactgcatcgtcacgtgactattcagttggttcagagttccgtacgtcttctcgcaaccattccatccacatttgtacatgcgctcaatttcctcgtaccggcgacgggggcgattgtgctgctgagcgccagggattggggcagaggatttcacctaaaccatgaaaaaagccatcagtgatctaatgcacaagcccaaccctccatgcaaatcccaataacaccaattcggcagcgaaagttacactggttttgacgatccctaaggcgattcctagccgaacgcagaggcatccaaggcaacggtacggaagccctcggaaatatgctggaatcgtcaaaagcatacctagtccgggcgcggtcctgtggttgcagcaggggaggcagaactgaccgttgtagccggaaacatatatggagtggggagagctgtcgtttccttcgttaagttcgacgattgtactggttcctcttctttgaccggggccagaggaaccggtgatagtggcagatcaaagatcgactctcggggctccttgcccttggctaatcgagggctcggtctgcggctttcccgggttagggagctgacagtgacctcgggcggcccatcagtgcgattgtctggcatattagccccggtggcttgagtactggcaattggtcgttggggactattctcagactctagcacgttggccatttgactgatggcttatgactcgatgtaaacgatggtcgtgtcttaacatgctagtattatctgacgtgggtacataccttaaagagtgaatggtcaagtgcgagcaag

SEQ ID NO: 480 - DNA, 2510 bp, Emericella nidulans
ttatcgaattaatacgactcactatagggagacccaagcttaggatcagccatttctcctgtccgttcatatcggtccctaagcccagttccaaggtggtttagatacatagcctggtcagggtgatcttgtggcgttgcttcaacggctttccgtccaattcgaatagactcttcaaggtcagccattgctcctgtcctttcatattggtccctaagcccgcggccaaggttgttcaaacacatagcccggtcgggatgatactctggtgttgcttcaacagcctcctgaccaatttgaatagactcttcaaggtcagccatttctcctgtcctttcataccggtctctaagcccacatcccaggttgttcaaatacatagcccggtcagggtcatcttgtggtgttgcttcaacagcctcccgtccaatttggatagactcttcaagatcagccatgtctcctgtcctcttatatcggtcaccaaccccactcccaaggttgttcagatgcatagcccgtgcaggatgatcttgtggtgttgctttgacagcttcccgtccgattcggatggactcttcaagatcagccatttcccctgtcctttcatatcggttgccaagctcatttccaaggttgttcaaatacatagcccggtcaggatgatcttgtggtgttgcttgaacagcttcacgtccaatttggatagactcgttaagttcagccattgaccctgtccttttatgcaggtcccggagtccacttgcaaggtggttcaaatatatagcccgtgcaggatgatcttgtggtgttgcttgaacagcttccctcccgattcgaatagactcttcaaggtcagttattgctcctgttcttgtatatcggtcgccaagcgaacttctaaggttatctaaacgcgtagcctggtcaggatgatcttctggtgttgcttcaacggcctgtcgtccaaattggatagactcttcaaggtcagccattgttcctgtcctttcatatcggcttctaagtcgagatccaagtgtattcaaatacatggcccgatcaggatggtcttctggtgttgcatcagcagcttcccgtccaagctgaatagactcttcaagatcagccatttctcctgtcctttcatatcggtccctaagttgatttccgagattgttcaaatacatagcccggtgatcttctggtgttgctttgacaatctcccttccaatctgaatagactcttcaagatcagccaatgctcctgtcctttcatatcggtcctcaagttggcttctgagattgttcaaatacataagccggtcaggatgatcctctagtgttgcatcaacagcttccctcccaagctggatagcctctccaagatcagctattttccctgtcctttcatatcggtccccaagttgacttccgagattgttcaaatacatagcccggtcaggataatctcctggcgtggctttgacagcttcccaaccaagttggatagacatgttaaggtcagccattgctcctgtcatttcatatcggtccgcaagttgatttcctaggctgttcaaatacatagcacgctcagggtgatcttctggcgttgctttgacagcttcccagccaagttgtatagacttattaaaatcagtcacttcttctgtcctttcgtatcgatccctaagcccacgcccaaggttgtttagaaacatgccccggtcagggtgatcttctggcgttgcttcaacagcttcctgtccaagctggatagactcttcaaggtcagctaatgctcctgtgatggtatagcggtcgccaagtgcacttccaagattgtctaaacgtgtagcacggtcactatggtcttctggcgttgctctgagagcttgctggaaaatttgaatagactcgttaaggtcagccattgcccccgtcctttcatatcggtccctaagcccaattccgaggttgttcaaatacttatcccggtcaggatgatcttctggtgatgcttcaacagctttccgtgcaactcggataaactcttcaaggtcagacattgctcctgttcctgaatacaagaagttgctttcccaaactaagtgagtaaacgaaactctttctgtcaatgggtttgcctttatcagtcagtcatccgaaccttcacaaaattctgccggaaagagtgcaggccctggggatgtaatagattctggaaccgcgagccatgcgatactagggattagttggaaggcattataccatggcgactggacgcttagtggcccagaaaatgaggctgttataggacccaagctgatttgcattgtcataatcccgacagtcactcaatcaccaataagctgtggcccatctgtattaagcgctccaagaaggacagtccttccaggcagcaatattctcatgtagttttgtggctatgttgggcctgccaagaacgccgttgcttggagttctggtataagtagccaatcttc

SEQ ID NO: 481 - DNA, 3923 bp, Emericella nidulans
agcactgaatgtagagccaattccactgttactgtgccacgtttgatacctgtgcatgaagtgtaacctggggtttgctgcctgtaagttttagcaaagagtctaccaaacacaaatagatcatttgctaacttataaaactctagtaaatcaagaggaaacaacgcagcatgacaactatactttgaatatatcagtcagaataatccagtaagacacagaaaggtggtgtagttactctcgagcacgaacgaatgctgtgtttggagccagccaaagccactctatacgcagcgcttcgtcgtatcactgaacagtctttattgtgctttgattctgttatactgcaactgcagagcaatctgcctgcaagggcactgtgcttccatccccttattaaagcatgctaccccgcttgccaagagataatcagttagccctgggtaactattagaaaatataccgctaagccagaagcgtcatgactaccaggtaagtcttggtcatatctccaggctgaattcctaaaattctggttgttaagccccatcctgtttaaccttgtccctggttctataggcaacaataactacttttaacggtgaaacagttagccggacgcccaaaacggctgcacgcccaaactcggcgagtgtcgattcgacgggactaggaacagtggcgacatcggaacataacgcctcaagaagcaattcccgaatattctccgacatcagctcattggcgtaggcgaatttttcccactcaaccgctgtaggtaacttcaggataaacatgctgatcagtttctggatattatgaagcttgtcactgcttagtatggcctttttcagatggtgtctttgaagcttgaaaggatcccatcggtccacccctagggtgtttactgatacttcccgcggaatttgctcggatgccaggtttttggccaactgcgcgttgacataagacgcttttaatgttccataatcgtcctgctgctgagtgtaagagacaccctgcccagtgttcacttgtggcaagtgatcaatggatcttccgggtattggatgatagcactcatcgccgttcgtagggagcaaacgtgcaagggtatttttggtagactgtggccagagaaagacctcaacgctaatcacttgttagcctgaagtgaagagggagaagggatgaggcatactcctcttttctgaagatgaaatcgtgcctaataacagctctgagatccctgtcatacgtttcttgagcagcccgagcgcattgctgctttgcattttcaagtctctctgttgttatatcagagaatatccaaagctgaaggcgatattcgtagtacgtgaaccaacgtgctgacggaaaggcgtgaggagcaatcgaactggaaacgagaaactgggtatatcggctaagaaatcaaggtgtagttgagcggtccccatctgctttagttttgaacttagggagtcagtgactgcgttctagtcgacctcacataagaattgtgatcagctcaaggctgtgctctgttctgttcaaaggtagcaggaaatgagttcgagaaatctaatggttggtttatatgcgactagaataatcctggagtaataattggtaggcgatcgtacgctaaggcaactagttcaatgacgactgtccactcatgagtggaaattgggtttgatatggatcccttccacagccctagatactgtactgtagagctcaataagctcaacagtctcgcgcaggggtgcttgtcttgcctactggctacaataacgtcaagcaagccatgaaagaaaattaaattcttggttcatatgatcaggtgacaacgctaggagtgagtaggtagctaatacccaaagcttcaatgtgaactgcttgacggcttgcaagtaggtgagttggggtggcagaataatttcgcccatctttgttccgcggttgcctgggaagtcagcgttgcaaggaaacctgagctgcttttctttttttttcctttgttattttgagttggaataaggcagccgccaagaaagaaaacgcatacctcccactgataacttgcgactgcgttagttcgagtgccagtcaattgtctgctttggaggcagccgatgaaaacttccatttccacagtaatgcactgaccctgcaaccttcgtgaagccacgacaaaccctcctgagggagaccgccttggccagattcacaatagtggaccgacctctccaacagggccggtcggatccctcttctacctagagatgactaattgagggagctaagccacaaagggcatgatcgcgttcaaacaaacaccatcccacatgttgaacgttctgcaaacgttggacacttaaaagctgaccatgtctggactccgcttcagtgtccatttgccgtcgctccaagttccatcaaaatgactacgtttcacttcagtgaccaacagctagatagtgacctagtgacatcaatttcttcacttcttgactctgtcaatgtcccgaatctgctttggggcaattatttattaaccgtatacggagttccaactgttgttgatgtgagtatgctatcctagtatgactggtcttcgaataccactcacactgacagggtgtgtccttcgtcgtgccagatgcgcttatcgaaatatccttctccaccctcgctgaagctggctttcggccctgctctcgaccttacgcctgcccacattcgaattcgcgccagccgccctataaacaccttcatatcgatgacgagcttgcgatatcgttgtaccggaaatctgatgtgctctgggaatttccagaattcgaggctgccctggaccacgacgatttgaatattatgtgcgcgtctgacgtgaggcttcctccagctaccctagggcgcggtcgagggcgatttccacactttagtttcgtccgaattccgagcgcctcgagatattgtgaggctcttattctgttgctttgttggggttacggaactgcctgcgagacttactggatggcgattttgacgtatatgctagagtacgttgatggaacagatattctcgacgaagaaaatatgagagacggatacaaacagttttaccatgccttaaaggtgggtgatccgacgatgtattcaattctggaggacctccgccgtgattttaaagggacggctcctccaagtcaaacaaggttgaccgatacgactcatgttgtctaattcagtgattcgctttccctccaaactaccgtcaggttgaccttgcctaaggactgaagaatcacctttaggtatctttcagttccaccaccttttccgcattgaatcccgtagactgtgagaagtaatagcctctctggtttgccatcactcttttccctgtcgttacgtctcggaaatcacagttgaaatgggtgtgtccaaaggcccagagtgtgacaatctcacttcgccaacactgctcatctaacaggtccgtcatgaacccagaggaaagtttgctgttgctatgtctaggatcgacgacttcttcatgcgttgatggacaataatgtgtcaagatgacgacttttcggtcaggctccaagcgcgaaatcgagccagtttcagcattcaaccaggaaagatccgcagcatgcgcttctcggtgggcttcgaccgaccaatcgcgaatgtggtaaaaatcgttcagaccaaagctgacactctccatttgttcttccgtgatacaagagaacaatgtgcagccgagaatggtgagtgttggtgagatatcgtaccgcgtttggtcgagcagaacaagtttcccaagcgcctcacctctcccagatgcctcatctagttcctcttagtacgttccaggttagactttgtctctgtccaactgc

SEQ ID NO: 482 - DNA, 293 bp, Emericella nidulans
catgagtgtacactacgatcaaagaagaacaatactatctacaacccacaggattctagtacgatattctacaccggggagatccccgaaaaatacgaacccgactggataacaaaccctctgatcagaagcataagagcattagactgctcgatatgtttacgtaagtattggttaagcgaacaacggattcggtacttaaggagaagattggaacgaaattgcaaaattttggggtaccggcttctcagaccacacccgactcggaaaaatttgcggtctcaatctaaaga

SEQ ID NO: 483 - DNA, 523 bp, Emericella nidulans
aactaggtaaatggtaataataattaatatataaagctaagctctaaatacaaaaatctaattattggtaaataagatataataatcctgagctattctaggagttttctattattatttaaaaatataggattatttaaaataatatttgtaatatagatagataaaaccagcctttaaatggatataatattaattaggattatctatagagcagatatgaaaaatagttatactaaagctatttagcctaggaatagagaataaagtactataagtaaatatatctaaatagactttattattatattatcctagctgcagagaattattaatcttagtaatataataatatactgagtaactattaacttagtattagcaagaataggtagataaataataagttatatttagactagctttaaactactttaagatttatatagctttatagatagttagaaaatattatttattaattctagataattatagcagttatatacaagatttaataagt

SEQ ID NO: 484 - DNA, 1161 bp, Emericella nidulans
  unsure (1)..(1161): unsure at all n locations
acaacgttaaagtcggacaagacgtcttcataaattttaattgcgtgatcctggacacttgcaagatcaccattggttctcggaccctgataggtcccaatgtctctctgtttagcggaacgcaccccgttgacccgaatctgcgcaacgggacgcaggggccagagtatggcggacctatcaatattggatctgattgttggattgcgggcaatgtggttatcctgcccggtgttagtattggcgatgggtgtacggttggcgcggggagtgtggttacaaaggtatgtatcgatttacctaagaaatgtctcaacagtttctgggcaatatgggctgatgaagtgtcaatgtaggatataccggcttatcatgttgccgctggcaatccggcgaggattctgaggaaaattgagcgaggaggatctggagctactgggaccgcgggaaagggtactgaggacgagggagaagcttccaagtctgaggcttgaactaatggcgtaaggagacctggggttcatgctagctacgcggttgtatgaataacttgctaagggttgtaagataaactgaagggaccagaaagcatatcgctaactttcttatgctgtgaggcttcgtctgtcaactcgatcaagacacccctgcgagggagagctctatcatcctctcccacttgctctaggtagagcgcgatagagattttacctactattacttttatcacgttgattttcgtagactgtacagactgctgcggcaattgatgtcgataatattgccatgaggatttctcccactctctcgctgaccagattatcgacaaaataagcaaatatattggtaataatattcatgggaggcaacctaaggcctttttcccttttggtaagcagggctagcataacgggtggcgaatccacaatggccgtgaaaagatttttgcagacaggcgaagatcactttcacagatgcatcgtaagtttatggtcaaccttgagttcaaccatgagttcaaggccgcgaaggctagtgatttggcagtccaaaaccgcgccccaggaagctctccatcttaagctgagaggggctcgatgagtgattttgacagccgcattaagggatgatgatgatctagncctaanttgtttcatgtct

SEQ ID NO: 485 - DNA, 1114 bp, Emericella nidulans
gccaatgatatgcgacgcatacgtcacatacaccgactctgatatatctattgcttcgtacaactgccatatctgtattaaatgccatctccatctctcaaaccatcaaatcatctgtactggcccactcttcacttgccacctttacgagtccaaaccaagtcacacagggactacccagcctgttagcagccttcattaccttgggtgatcgagctgcgccacgcattccctacgcccatttatcctccatcagcccacctcccttacaagacatggacgcaactgccagagttcagacacgtgactagcaagactcgtccatccatcaatccattccctgacatccatgtctgccacaactaatccggccagagcatctttggcatactccgtcaatgcgacagtgaacgtgagcccggatgatcaacacaccttatagtcaagatagcacacctaagacgaggtaagcacccctctcccagcacccttttctcgtctaacataagataaacagcaatttacgccttttccaggcccgagtacaggaagagaatagggtgttctacatttggtctctttttccaacctcgctccaatatttttttgacttgacacccaagctcccgttgcaacgccatcgtatgtcgatacttgccttcgtccaagcccttagccgccccgaacacatcatagtgatcatcgttagcgtcttagccgtcgcagtgcacgctaccgcaataaacatattgattaaatcagaagcttcgattacggcgtcaatgcaaagaccaaggcggtcgctaggccgttgcggatgaagtctacgccgactagtgcgtcgccaattatctatccacagcaagttaagatgagcggtatgaagggacgggggagattgagcggcgtgcacctactcctgatagcatccgcaaaatacataagcgcatgagcgccggtgccgaacatggatgtcgaagactccgctgcccagggccccggccagccctgccaccgttagtccatacggttggggtttgtgtgcatccggccaacaaaaaccagttcaatatcagaagcaagcaacctaacgggcgtagaaagtatatcgggt

SEQ ID NO: 486 - DNA, 1481 bp, Emericella nidulans
aaaatataagtcagtggtacttaaattaccgtacaatatatactgtttctgtttctggggtgcgcctagaacaaccctaagtaggggacctataagtggcattgcagccagctcctgaaaatattggattccctttcttcctccaactcccaggcaacatgacttggaatgcgggtagtgagttataatcccccaaccacggcagccttctataacagtcaatccaattgaacggccccacaaacctatcaaaccaatcaatatatttgcatacttctatatatatccgctaacctcctcccctggatttgtactgccatcctcatatccatgatcagtacggaggctataaacattgttgtagtaatcctctggtattggcttttcccagactcttgagaggaacttgataacaggctggtttggagttctatataagctctcaagatagatcttgtcaaaaataggcaaaagttatagtaggcacctattaagcccttaattaggtagtacttgatacttccagggctatgcacagcctaagtttgttttctgggtccttcaggccgcgggagagtttgttctgggtctagagggtgaagtgctcacagaccttatgcgatgttgatctatcaagttgggtaggatcttctatgattgatagttgatgagataggagcaattccatgcgctcttcagcctctagaccttgtaagacattggtgttaataaggtcgagcatttgcttccggttagaattgtacttgttgtcatatatgcactggtacaaggcaaatccttaacaggactcgcctttcaattcggctggcccatatccatcttcaagagggtatctttaatgtctgcaagagggcgctgctcgatagaatggcaggtttagtattagtgaatagtgctgcctgtagcttgaccatgtgatggcgaggcttgacatggcacagcgcatgagaggagaagctcctcattatttagcattaatcttctcatcttgaccacacatcgcatgtaagcttgatctgatatccagaggccctagtatgcttgatgactttctttctccttggtatttcttcctgacccggcaaatccgggaagacaattagagggaactgacaggggttcatatcccaaaacggccaaagtaacagaagggcacacttagcatgctgcggcggagtgtaatggtgtctcataggctagattcacggatgtagactgagataagactgccttaaaaaagaatgccaaggaactaatataggtaactaacatgagtacactggtgcctagtctacgcttaagcaagatcgcagagagtttttgctgttgggcaattgatacatcatctgggtgagccttttattcaatgccccctcccttactttcttttggggctaccataattggataaattggggattaatggctgaattgtgattaaaaacacccctaaggggccc

SEQ ID NO: 487 - DNA, 1009 bp, Emericella nidulans
cacccagagggtggctgcccattccgtgcgctattgaaatctttcccggtggctaaatagcagccgttaaacgggccagcccaattgccacaacctgatctaatgggatctatcgtttacctcctgccgtagacagctagcatggccataccaagctcccggcagccctcgtggacgactgcgtggacgaccgcgtgggcggcctcgtagacggcgtcgcggctatggagagaaagtagaagagccggttctgtaaggaaagggagattccagaagctataagttttaagtacaatcccggccagtacgacgatcctttcttcctttcactcatcttcaggctggtttctctcctcatccttcatcttccctccctcgcccccttcttcatataaccctcgccatgcgcttctccctcgctgccgtcgcggccgcccttgctgcggttccccaggccacggccaccttcaatgtcgatgagtgggatatcctcgcgggcaaagcgctgctgaaacaggtggagtaccagttcgtcaagccccggtacttcaacagcacgtgtacgcctcacaatgctgccgtccgtcgcgaatggtgcgtggccagatcatccggcccccttcccattgggccacgttctaacatcgcataggggtgcactgagcaaaagagagcgcaaggagtacattgacgcagttcaatgtctgatagactccccgtccaagatcgatccttcatttgctcctggtgcgcgcactcggttcgatgactttgttgctgtgcacatcaaccagactttctttatccacacaactgtaagcgccattgattcaatcatcaaccctatctccctttccattcaagtaactaatctgtgttgtgtccagggcaacttcctgacatggcaccgctacttcacctgggcctacgagcaggccctgcgcaacgaatgtggctacaagggctacagccatactggtcctggcccaagtacgccgatgacccctca

SEQ ID NO: 488 - DNA, 521 bp, Emericella nidulans
acccccatttctccaaaaaaattaaagaaaattagctggacatggtggtgtgcacctgtggtcccagctacttgggaggctgaggtgggaggatcatttgagcccaggaatttgaggctgtagtgagctatgattgtgccactgcactctagcctgggcaatagagccataccccatctcaaaaaaaaaaaaaattacaaagcattttatatgacacataagctcaacaaatcagtaggaaaaacactaacaaatcaacagaacactgggcaaggaatgtgaacagcaatttttgaatgagggatttgcctaaggcaatgcagcacgacattttgcttttcaacctcagtgtttagttatgtgtagtctagaatgtgcctgaattctagcacgagtattcccatagagcctaatctctgtgaacgacacagcttatatggagcaaggtgtcctatcctgtgtcctgaaaggagagtggcatgtgtccccaatgaaggactgccccagggcctgatgagcag

SEQ ID NO: 489 - DNA, 810 bp, Emericella nidulans
ccgttccccttgtccatcttgctgctctcgttgcgatacgacctctacagttatctaggagcttttttttctttcgatttccattgcttgcattctactttctatcgcttaccttatccggattatgtctgatgaatcatccttcccgtgctatgactcgctgatacctttgagtttctgttggttcgataatgaggatgtctgataagccctccacacgacatatccacagacacttcgacatacaatcatactcatttcagattccaaccccactcttgctcgtagtgaagcacagctttcagagaataatagattttcaagttcgtcgaagacgactatttattaagctggtactgtacacccctgtaggactcccgcaatgcagtatgtctatctataaacatgtaagtgcaacaaatattccaagaaggaaaagtggtatccgaaagccgaaacatgcaagtgtgagaggagttaaattaacgattaacaacggacgaagcttgcacaggaacaatcgtaaaagcctactcctctgccttcttcgaagccttcgtcctcaacttcataagcccgtaaaccaaggcataactactaaggacgaagagtgcgactatcgccgtatcccgccaaccatagtagtagtccttcaggttcaggctatacagatagtcgcttccgcgagtatactgccccacctggcattgggaggccgcccccgggttgatcaggttcgcgctgacgaaaaaaccttaagataggtcgacaggtaatcgatgcaagatgagccactcccggatgaaggag

SEQ ID NO: 490 - DNA, 716 bp, Emericella nidulans
tcgacggtcgccctcgcgaccagtctttccagcgaaaaaccggttacgttcaacaacaggaccttcaccttcacactaccactgttcgtgaggcactgcgctttagcgctttgcttcgtcagccggccaaaacaccccgccaggagaaactcgactacgttgaagaggtcatcaaacttcttggaatggaagcctacgccgacgccgtcgtcggtgttcctggtgaaggtagcttcttccgcccattaagcgctatactttgctaactcttctaggcctcaacgtggaacaaagaaagcgtctcaccatcggtgtcgagctcgctgctaagccccagttgctcctcttccttgatgaacctacctccggtctcgacagtcaaacctcgtggtctatccttgatcttatcgacactctgacacagcatggtcaagctattttgtgcactatccaccagccttctgctatgctcttccaacgtttcgaccgattgctgttcctggcaaagggtggtaagacagtgtattttggcgagattggtgagaaatcgtccactttggccagttactttgaacggaacggtgctcccaagctccctgccgatgccaaccctgcggaatggatgcttgaggttattggcgctgcacaaagatcccacagtgacatcgactggcctgcagtctggcgcgagagtcccgaacgtcaagctgtgcacc

SEQ ID NO: 491 - DNA, 1172 bp, Emericella nidulans
aagatctggatattgacaggaggatcaagctctcccttaatgctcgagtgggttctggttttgcagtcctgacccttctctgctgcttacaggctttacctataggatggcgtctgagatacagaaagttaaaccatatgtggataataagtcagctaacccatattagctgatatctcctcctggattattcaataacaaaaataaaaagaaatcagttgtaacattattataattacttcctctgcaatgccaatttaaatagtttctagactttatctatcgtgtcgaccgaaattcctatttatatattatgggttagcttgagatatagtaataacatagcaacggcagtgcacaaatccatgaaattatgcagatttcaagcatttggtcatatatcagctgcaaactgagtaatgtgcacctcattcaagtcgatacaggctgtcacagttctatgtgctgtgatcatgagccaacacagattacagagctcatcgtgtacaccatgaatgattctgccatccttgactgcctaccggatcaagctaagctccgtttcgcgaagacttcccacaatcgatctctccatgtacataattctcttctctatgcttaggattctgaatatgagcgccagaatggttgtttaaatgttctgattggcttgccgtcttacaggccttgacatggagctaagtatatattgccaagtttgggtttaatgtggacaactatttcatgcatgacaggttccttattcggtgagccatgatagataagatcaagcctaagcattataagcccagccatccccgccgtcatgcttcaccctagacctcaacactatgtcctccctcaactcctgcgaagcctgcacccaccgcggcctgttctgcagcggagggccccaggctgctattcgtgtcttcgaggtggctttatctgcgccgccaaaaactaccgcgattgtcctgtcgtctctcagccggcatgagtagagcagcaaacaaccgctgcagaggtcgctcagttccagatacaggacattctcactacccactccgccctcattaccagcctaaccacattctacaacagtttcatctctatgcaatatctccgcgaaaacgaagtcatccgcgcaccacaggttgcgcattagattg

SEQ ID NO: 492 - DNA, 832 bp, Emericella nidulans
ccgcaaacttagtcatcaatgatcgggcagaagactgatatccgactggatgacctgtccgttacgactgagcgaaaacgcctgcgagcccacgcccatcgggaccttgaaagcgctggctccagcgggcgcatcaaagacctcgacattgcctccagaattgaccgtcacagtggcgggctcagtcagggtggtgaccacgaacacagcgtcttccatcgtttcccagccattcgggcggccatagaagtaattgccactggcattgttggcggggaccatgcaagtatctgtggcatcgcagttgacatcacggggagccgggcgataccagtacacgagaaggtcttcggtgatatagtcatcaaccgaggtggcgccgtccttgtacgcggcgatgaacggcttagacatatccatccatccatcatggggcctgggcagtcagtatagccacctggaccggtgagggggggcggctggcttacatgtcattcacccacttggatgccccatcatcagtgtgaggtgagctcaatgggccgatatagtgcgactcgccgtaatcgttccaggtgacgatctcgatgaatcgtgggcccatggtcaacagttgctgccagcggtcataccacaacaaatctccagggaagacccagttcttgctgtacgggacttcagggccgaaatgggtgaagaaccagggagaagcagctggaaaagtcactactgaacgtgcgagcttgtcaccatggatacgtacgagcaatgtagtcctttccagttctgatatacatctcatcgccctcttccaccgaaacggaggctcagg

SEQ ID NO: 493 - DNA, 525 bp, Emericella nidulans
ttgccagacgttggtcccaaaggccatagtttcctacagctccatcggggctctcgtcccgcaacgggacgccggcaaggaaaccaaacaaattaagtcggtatcccaccgccacaaatacagcgttgagtccgccagtagaaatcatctcagtcggatccatcgatggctcattgctagggtcgcccatctggaaccagcctccgtggaaccagatcatgacgggccatttggcgggcgttggttctccatcctttggaaccggggtccaaatgttcaaccgcagacagtcttccccgtattcatgctgtggaatgttcttcttcacagaagccgagtaattgggctgcagacacacctggccgaactttgtgccgtcgaaggggccgccctcgggccttgagtaggagtacgactcgggcagtgcctgaggtttacgcatctccgctcgccagttggtggaagggaatagggaatattggcaaagcggcgtgatttgttgtcaaactgcaggcctttgatctt

SEQ ID NO: 494 - DNA, 546 bp, Emericella nidulans
gtacttgttaataataatctagttaagctattatatctgccattagcagttcaggaatatgtagaaatccaggttcttagtcaactcaggcattacaagcatgatcactgccttgttagggggctggtagctctcctacaacatatacaagatacccagggcctgatagtatattatcaggtctatatacagtaacagcaggggtactactataattatatatctccctaggggctgtatatacaggcaatatgaacagcatgctcttgcatactacctataggtataattacaactacaggactagtactgtcctggattacctttagtactagtacctgtaccctgtgcaactacagtacagaccatcctattatatactacaatgcctgtactatgtctgtctaggccagctactattgctgtggctcctgatagttaacagcctgctcctcctacaggttggtatacttgcctagtactatattgactggtagcaagtctggagaccctagaaagtaatgctagttagtcttaatgcttgaa

SEQ ID NO: 495 - DNA, 893 bp, Emericella nidulans
taaaaaaaaaataaagattaattactaagcaaggcttattatggaaaacatgagtgataataaatatactatatttattttatattatagaagcttactgaacctgatgctgggccggtacaggttctgtgctgttatgggtcctttgcctatacaaggaccttagaccttagtgactcggccaaggcctgcgctgttctgaaggcggtgagccaactgtaagacttccttacaataataatccttctttctcctttcttctttagcaattccttcttatatatatagtatgtctagataggaagatctatctaaatatatcccttaatattaggaatcacttactaatcttaataatagtataaagagacctttttatataataatagaagaagaaagtattatattattactatagcagctctaggagctctatatagagatacagacttagaaataacagctctaagaagagaataatagcttataaatagaattataggctgtatagaacttataactaagaaactatctactagttactactatagttatatctgtaatacctactgcctataaataaagctacctctgttcttattatatagatattaaatttttactagaaaagattttaaagactactcttctttctaaaataatctttatataaagtttataattaatactatctactatcttataaaggaggaataagtttactatatctataactacctaagaagaaaagctagctagtatatattattatagctcttggcttactagaaatctaagactcctgtactataagcagaattctttataatattaaataaagcctttagtaatcctgactaataaaaaaaggctcttgtataagtaaatataat

SEQ ID NO: 496 - DNA, 573 bp, Emericella nidulans
ttttattgttgaaaaatcttccattctttaattatttttactttttttaggtctattttaatttcttttcctgcttatattataaagcctaggtactttattttttctagtttaagactatttatatatatttctagtactggtagaggtctttattagtataaataagtatattaataagatatatagaatagaatttatctagatattcctagaaggtctagttaatatatttttagaagatatatagtatattagctaacttaaaaagggtaactagctatttaaagagtctatattttatataaaaagtagttatttattcctaatctttagccatataaatcttataaaaagtagtaaatatatctagcttagagaattatctagcttgcctaatttagtttagtattttataaattaggagtaatagataatagtccctcttagtaataatatttaagatataatagttaatatagaactatagcccttttttagtttttatataatactagggctgtacctggggaataacttatataaataaagctttttttataatagttttta

SEQ ID NO: 497 - DNA, 832 bp, Emericella nidulans
actctttcgagtagtgaacctaaaacgatctgtgacactcttgtcctgcgtaagtcaggaggaagcaagtcaacaattctaatctaaagtcagtggtaaggtatggatgtgttcttggttaagtctccatgaccttcaactagattctgttgaacttcccactcagccagaaagctgaccttggagagctaaatcctgactaaaatagtgcctctcaaataataacccaaatccccatctcaggtaatttaagctgaggtgctgagtgcacagccttgcagccttgcaggaggacgtggcttttacccctcttctctcagcctcacgaactgtgctttgcattctcctgtccttaagctgtctttctgctacggcaggacactccatcttcaaaaattttcttatgtgaccctgttccttgccctgagcgaccatgacctctttaacgcgcgacgaatacacgtttgcgtggatatgcgccttgccgctggagatggcagcagcccgtgccatgctggataaaatccacagtcccctgcccaaacaatccgccgatccaaatgcctacgaagttggcgaattgaacggtcactatattgtcattgcatgcctaccagccggcgtatacggaacagtctctgctgcaaccgttgtgtcgcgcatgcgtctaacgtttccccggcttcaatatgggctgatggttggaattggaggcggggttccgggcagaaataatgatattcgattaggcgatgtggtggtcagcaagccagttggaaaatatagcggagtattacagtatgattatggcaaggcagtccagggcgggata

SEQ ID NO: 498 - DNA, 548 bp, Emericella nidulans
agtagtatctaagctgtagagctaatatttttttattaatataaattatataatagcctctagctaatagtccctgtactaatttcttttaataatattaattatagctacctctaattagcccttataatatcctattaatagttattaataaatttcctaaatatctaggactactctctagtttatttgattagaatattaaatattagggtatagctctagttaaatatttttaatcttataattagggtatttcttacttatttatcttaaattataatatttattttatattagaattctggcaggatatagttattatacttaaattaaaatagcagtatttaactgcattctacccctaaattaatagttaattaaaatatataatataaattattaaaattatattctgctatgcctgtatacagggcttataataaattaattaattatttataattattatagctattcattctttccctagtactataactagtaaaatattatattatctactctttatatttaatataaacaac

SEQ ID NO: 499 - DNA, 5330 bp, Emericella nidulans
ttaacgattatttgatcggcaatgactattaacaatatagtatcggcacctgaggatctcgacgatattatttgattatcaagatagtcaagctttgaatttgacgatactattgccgatattcaaaaactatgactatatagtatcgtgaacagccctgtgggttttgttatattatatactcgcacgatagctcaccccatctgcattcgctcccagagtaatgagaacccaaactaagcaggcttctctgcacaaatatccattatatatctagattcctggcagtaatatacaagtactcacagtattttacttgttgtagttttattgtaatggtctgccgtgggacatcaattaatcagggaccctggacaaggcaacgagtcttgcccggttcgggccgacagtggagcgttgataaccagcagccgtaaggtcgacgctggctcaggggattgatagtcaaatacgaccagctggtacgacgagacagtgcggctctgggacacggcaacaggtagcctgcagcagaccctgagcactggggaattgtgactgaactacacttttctcaggattgttcatacattgacaccaaccgagggccgctcaacattcacgccaggcgtggtgagtatatctcccctttgtccaaagcgagtccggagatatctgtggatgagaggaactggattgtcgtcaatgataaacggatattagggcttcctcctgaggccagggtttcttgttcagcggtaaaatcagatatccctgcccttgcacatgcgtcagaacgatttatcttcatcggatttcgagtataccaggtgtcgaccaataacagttatcttcctgtccttcttattttccgctcttttcaaagcctggaagagatagacaatttgttcgcacagatttattaagcttgaacactgcgcaaacggtcagaattataatctccttgatgaccgcctttgagcagggactaatgtctcctgttaaaccatcttgcatgaggtattagctatcgatcgtaccaccgtcgaagcacttagtcactgagtgtcagcacgcgtactatcattcctctcagcccttgggaggacagcttcgggaagcagtggcggtctctatggtgcgcgaaacggctatacagaccttctaccgacataccatactcggcggccttttaatatgttggagtaagaatgagttgtacgatggggtattggcatgggctataggcagccaggaaggattgtcctgcgtatggcatggcacatgaatacccaatcaaggctgttattctcgtttcttacgagtccttcactttagtgtttcatagagacctttccttcctgcccgaggaacagatgtcattttgaccatatgaatgagaacaaagccgtgtaccaacagattttgcggctccagactgttgtcagctggcaccacaccaccatcgccacgtcgacggcttttggcgctcagcgatgaacggctccaagtaacggacataagttgcagcagttgggtataccagctctgaaacgatcgtacccctaccagttcagtgtaatgctctcgaggtcgagttctggtgcagagtaaaagggcacattgacaaagacctggcaaactctcaataagctcagttacaagagacagagattaatagtgggtgacgcgtgcgttagttccaccgctgtagaggtagatggcccgaggtaggtggagtccagagtcaggttggaaatgattgacgagggccctagcctttctgggacagagaatgatactctggtgattattgagcattagggacgaattgaaagctgaatgatctgtaaattctgctgcatgatgtctattgacccggtcgagtcaaacgtgaattggaaatatacatctacactccgtagtcatttacagcacgatacgtcttaaattggagtaataccaaaggtagatcctcttgcacggagtgtcaatatatggcctggtgctcttcctattcccttgacaggttggcatgctagttctggagcgatctttgctttttgatccgtgtcctgtggatcctacagtaactcataggatgaatgtagccacccccgatcctggatctgggtcggttatcccgagcgaggttcctgggactccccttgggaactctctagcctccacaattgccgacttgttttcaggggggaacagcgccatatagttatgtgacttgtccatcgcgttctttcgatgtggcaaataggacaaatcccacggcaaatcgcctagcttcgactgtgatgcgaaccgactaagtgcagcaatggtgcagactccgcaatattccctggtgtgctgacttcatgacccttgagagctgttatctttaccgttgttagattgtcttgtgtaggctagtgttcaccaactgagagtccagttctgtggaagcgaagaaaaatgaatacagctataaatgggctaaatgggaagtttgttggtactgtggagtctgatcctggtcatcgcttggatttacatagcggatgtctcgatatacatatctgaggacgctgagcgacgagatggggtagctactaatgcgttgactaaatcgcgggttagtaaagtcattgtcttctgtggatccaccgtttataccagatacaagtaatgatgctgcaaagaatagagataggagtatatggtctgtaaaaagctctggctaccagaaaatatctggaggtcacatatttcaatcaaacgaggccatgcccacgtcggaacagcatgcactctagcattcaacccgctgtctgaacagactcttccaggcaatggaattcttacactgtttgtttatatccttgcctcccccaccatgggagctgcgctcgggaggggaggggagaaaccacattttgttgaaggtgtttgtagaagcacaatcaagaatcggaataacattcggaattagtgcgttgtccaagaaggcctgttctgttactagagagtagctggatcaactattgacaattcggccaaatcgggaatcgcctcaggtaattctacttgaacacctaggttggacacacccgatgactttgcataggcttaagactactttactatgaaagatgctgccgggcaaggcgaatctagctaccgagcaagggtcccctcgtaggtggcggttcggtttaaccaaaacattcagttccctggccatgagtggccgcagcctacgccttgttcttgacttttcgcattatatgccgtggagaagcagcaatcaacctaactagcacggttctagcacggtttcaggaccagaaaggaatgttgagcagaggccacagcatacagctagcaacatggatcagagctattgtcgacaacgtgactaaatgagaaaagccttttttacagtgccgtgacaccaagtactgcagaaacctgtcaaataagataggtcaaactggctcggcaagtgatctcaaagccctatgctcgtcacgcccacaaagcctggcgcgcaaacagcacggtctgcaagccaccaagatattggtctcgctggagctttaacgcgttactccaatgcagtcttgttctgcaagaaatcttgagttattgcccacttgggcgctagatgatggtaattaatttgagtgcacttttgtactccacagggactttgcctacaagtgcagtgggccactcgtttgattgaaggagttagcgaccaattccaccagcataatcgcaggtcgaccaccttcaaaagggcaagatcgacagatctcaagcttgtctcccttctcactggggtttttttttccaccaacgggttcatgagacagctcagaatggcttcgctattggccttttctccaagtcgactctatctaaaaaccagaaaatggcaatgaagatgcaaaatagtgtgattgaaccacgatgctttagctacattctactgctgtggttctgcaaggtatctagagttaatgtcgatgggatggactgagcttatcacgggcccaagtgctctcctgaaccggacggagttcaatcggacggagttcaatctgtgccttcaagctggtcggttggcccggaggaagtcatcaggtggatgccatactatcaccgaatagctgtctagacgaaacaccgatccgagtcagagaatccgagctccatacgatattcgtcaacacccctcggaaatacaatattgcagagctacgatacatgtcctccatctcgatgaaacaggagatgatccaccctgttcacgcttgggcccagaaggctagaaacaagaaatacgaagctttctgggcactggcagggctgactcctgactcagactaggttcacacgttacaaagtaaatgcacagcaccaaacctgcaattggaggacaaaatagattggtcactaaacggtggggggtgatgatggcctggccaggctaggccagaaaggccatgtccactgcggcaaacctatataaagtgcctgtctgcgaccaacgatgggctttccatccccaacacactctctttctctccttcctaatcttcctaatcttctctgtcattcattattcatcatctttcgctggtcgaaatgttctacgctcttggacctcttgccctcttcgctttcgcgactgaggtgatggccacccctgtggcctatccaatgaccaccgcgtctccaactctggccaagcgggactcttgcaccttctcaggctcggacggtgctgcttctgctagcaggtcgcagaccgactgcgcgactatcactctgtccgacatcaccgttccatcgggcactaccctcgacctgagcgacctcgaggacgataccactgtaggttgatgttcctccagtcagctgtttggatagggctaactccagtccaggtcatcttcgagggcaccacctcctgggagtacgaggagtgggatggaccgctgctccagatcaagggcaacggcatcactatcaagggcgccgatggagccaagctgaaccccgacggatcccgctggtgggatggtgagggctccaacggcggcgttaccaagcccaagtttttctacgcccacgatctgaccgactcgaccatccagaacctctacattgagaacacccccgtccaggccgtcagcatcaacggttgcgatgggctgaccatcaccgacatgacaattgacaactccgccggtgacgatgcgggtggtcacaacacagacggcttcgatatcggcgagagctccaacgtggtcattaccggcgccaag

SEQ ID NO: 500 - DNA, 2847 bp, Emericella nidulans
  unsure (1)..(2847): unsure at all n locations
aatgtaacacacccaccgctaagcaactcgtttctccaggtggcttcgctgtagttttcgttgctacaatccgtatgccggagcaggagggcgtatgcctgtacatacccacgggcagtaatctatcagccactcgccaattaagcggggaatgacgaggccaagtagatgagagggaaataaaaagagcaaggaaaaacgtacaatcccactcgccaacatcgtcactccactaagagcatctagagaaagcgtgatgagtccttcaagcgatgatatgaaaagagagataattccaataaaggagaccagggtgccgaacccgccgcagaacgcggcgtaccctgtcgcaggtgggacggactggagtctggtgtcttggccacgagcgaggtcaacggagatgccgaggactataatggcggagatggcctgaatggtgagtggttagggatggactggctttttggaaaacaggttgtgaagatgggcctcaatggtgttgttggtgtgagaagcataatacggagacctacctggaagatgcgcactattgagttgactatttgcattgtgtatggctgtgaatgggttgtctagtgggaattgaattgactggtgtgagttatgtcgtgagtaggtggtcttttgcttcggttaggagtattgatagtgaggtaacccagcccttcaagcgcaatctggtagaactgtgataattcctttcaggcagggccaaaaatgtgataaggagtaaggacaagtgttagatataaatctgaagcaatatttgaacgagcatgacacccatatttatacctaggctatactatctgtacaagtacaaatacaaacagatcacagacgccctacctgcggttagcaaacaaacccagcactttctggctacggctacggagatcagcttcacctcctatgtaggtgaggccaggactgcgccttgaccaagtgtgtatttgtttcatcctggcacacagcatagcgtgatacctgtgactgacagattgcatggcagacttcgcatcaccgtctggtgtgacgcgggaggtgagaatatggttggacagaactctttttcgcgaagctaaccgccgatctcgagaccctgtttttgcgctgtcatttctaggctctttggttaagatgcccttcctagcctttggcttgtccggggtgttcgtgtctggtgcaaaatcaagttcaaccaaagcaatgtgcgccaaccaggatactaggtcccgactaggatgccagcccattgatgcatgctaggcgccaaggagcctggcgcttaatgggtggctgatttttactggtttttgtgggctaagcggagtcatagacactgaccagtgatgaaatctttcgtagattaatgcggaagttgtaccgaggagtttttatgaaactgggttctggcagtgaaactaggggtagcttggaggataatatagtattactaccttcatgcaggagatggagatgggcaggtactgaggttggctatgcagcatgtacgaccagggcgataaggcttggatcccgatttacattgaccacacctgccgccgtcattatactcgttcttagagtggacttgaatataccgaaactagatgcgttctatcgcttaactagcatcatgtttgtcgagttagctgtttcttggagggcttcctacgcaatagagtgctctactggcaggaaggccagtagaagcttgtcgaggaagtcaatatcgagtcctttggtacttgttcttatcaaacctgattgccgctgggggcttagaaacatggacactgatgctatgcctctagcgaacggaaaactatccaatgttgaaacgtacctatattatgacagtattaacaggcacctacaagggcatacattctcatttagggtcatgaattatatctgcttgcatagctaccgttgcagccgcatcngtggttaacagtaactgtagatctcagcattagtcagttagtccatggtgcatttctacgaacgtacacaacatgtctcctgatatgtatctgtaatacccaaccgtggagggaacttgccttaccagtcttgtgatattactgcggtacgtggagcatgggtaaaagaggatggcaaaaaaaaaaaaggaaaaaggaaatgacaagggtgggattcgaacccacgccaaattaatgacgcggaaacttgaaagatcaagatagaggttctaattagataccttaaccgcgcgccttagaccgctcggccaccttgccaattgttgagatgatgttttaaatagcgcaacttatgctccccttaaagacatttgaagacttttgaagtcgccttactcacaccgcacccacgctcagtagtgcgagctcttatatcttgggagcagtgcaaaatgaacagttgctcaaatagcccaaatgtataaagaaatatgctgttggtttgttgttcgacttgggttaagattccgcttccaatcacgggatgcgatatatatatctccctctcagagctcgaccgtaccacgaccaggttatatttcatgccatgtgtggagaaataggaacaccggtaaaagatacgagtactcaaatactgacaagaatgacaacactaggaatcaagataggaccgcatgttcgattcagagagcttggctgtatcgacgtagcaccttgctcgaagaccgaaagtgcacgaacttagatgtgaaaagaggcagacgaagctagggtctgccaactcgagccatacgaacagtcttacaaatttcccctgatagtccacttacggccatactatgcccagcatggg

SEQ ID NO: 501 - DNA, 481 bp, Emericella nidulans
  unsure (1)..(481): unsure at all n locations
agaacgagnggaacccccgggctgtaagaacacaagccctcccacacccgaaccggcgaccccgancaggcggaagaggaaggggccggacaccgcgccaagccgcgaaagacagcnaagggaagcaacccaaaggcgcaaggaaacacaacggggagaagaaggcagcaccgaacgagaagacgaaggcgacaccagaccacccgaggaaaaggcagccggagcgaaaacaagaacggagagaagcacgaaccgcagcaccagcagaagcgaggagcccaagaagggacagcacagagagccggacggggaccagacacagccgcggcagcagacgaaccaagcggcaaaggaaccacccggagggacaaggcccacgccggacacgaaagaggcgacgaacngaacaagccccccccggacacagagcgacccaacgggccgancacggacacgagcaagcactccggcggcgccagac

SEQ ID NO: 502 - DNA, 756 bp, Emericella nidulans
aaggcatatacccctttaaatatcagacatacggccgtagcttatatgaccgagagagaatacttatatagcggtttaaaattcctaatcctaaatggaggctacctagatagactagatatatacttatacatctctgaaccaacttgttgttgagatagtagagtataaaaaaggtgtcattttatatggaatacaggtggtccgctcgcttacaggatacgttagttaaatctcggattgtatgacaaagaacccgcaccgagtgcatccctagtatggtgaaatgcagtgacttgataacgttgacaatgttggctatcgtggtgttcagaaaataagacacgaagtacaaaactaattacacggtaatagcgtcctcaaataccttgcaccatcatatctccagatatgccggtatcataccccctttatgtcccgatcatactcccagtatgctctttcatatcgtagatatgacgctagcctgcttcgggcctagtcttcatactgccagtatgacggttcccgccgttttttatccgtcactgttatacactagctgcggcacagctggtcgattggctgacgtcgttcggtcattctacataaccatgaagaacattattttattccaataagtcattacttttatgcagaaaagtatggctcaattgggagttttatgcaaaatagattcttggtgggtaaccctacaagtaactaaaaacctgcacaagttcccggggtttgggt

SEQ ID NO: 503 - DNA, 839 bp, Emericella nidulans
gagcccgttcaaggcctgtacagtagctgagtaggtggagttctcttcgtttctccatccgatctgctgtaggtgatgacgccgtggggatctcgctcacggactagacggtagatactctcacggttcagagttggagcccgcgggcatgcaccggtctcgaggtggtggcctaggccagacgcggtcgtgtacgtgaccttgcagaagggacactggacgttgcggccacgatgaatctgggaattgaggtgctatgagagtggtcagacagaggcctagagagtgaagaggtttcaaacgtaccatctgcaggttattctcgttctgaaaccgccggtcgcacgtcttgcagtagtaccggtaatggcctagcgattgcatgtgctgctcggctgcttcctccgtgtagaatgtgtttttgcatgtctcgcagggccatctgcgtgcccagtggcccttggagtccatgtgctgatgagcggcgttcagagagcgaaaggacttggtgcaggtctcgcactcgtagcgtagagcccaatggcctgcgttgttcatgtgttgattgcaggcgcgttgggtgcggaaagtgcgggggcagatctcacattcaggccaatggccatactcgtccatgtggtcgtcgcgctcatacgggtcgtaaaaaaacgcggtgcaggtctcgcattcgtacattgtgttattaggctggaggtcaatggatgggtctggtgaaaggtgaagaagaattgatggaggggaagggcgaagaggtggctgacgggaagagaaagagacggagtgaatgagcggaaaggagagagttgatagatctatta

SEQ ID NO: 504 - DNA, 498 bp, Emericella nidulans
ataaaagaaaaggtattatagccaagatattaagatatttatagtcttattaatagatatataaaaagtactagttctaaaaaaatatattaacccttgtacaaagctactaagataatattagaaatatctaagactctttaaataagataaagctaaaaaactactattatactagaaaaataggactaattataaaattaagcttatataaaagaagaatagaaaagatcctaaagtcctctagggccctctttataatataacctagaaaaaactaataattttctagaaaatactctctaaactactataaaaaggctttatttatataagctattttctagctatagccctagtactttttatataaaaactaggagaaggactataattttatattaattattatattctaaatattattactaacgagcactgctatttattactcctgatctataaaatactaaactaaattaaataaattagataatt

SEQ ID NO: 505 - DNA, 1119 bp, Emericella nidulans
agtgtaaaggcgcaatctcggtcttattacctacaaactccctcccattcgtatctttctcttcgaaagctgttgtattcaaagccagactatgcacgagtaactccttcaacgcagctggaaaccgctccagcataccgggcatggtcatggccggtgcttcagcaggatcagaagggagcttgccgaatgattcgcccgcgctgcagaacccggccacgacagacatcttgttctgcgttagggtccctgtcttgtcggagcagattactgtcgcgttacccattgtctcacaggcgcggaggagtcggacgaggttattttctttcagcatgcgtgccgttgcgaatgctagtgcaagggtcacggcgagcgggagaccctctacatactcagtatcaatattcgcggaaaaaagaacgggaccgtacctgggattgcgactacaatgacagtcacagcaacgatcagaatatccatgaagtgctggcctttgatcgctggtgtatcattctcatagatcccggacaactgcgcgatgaaacggaagaagaggacgaagaataggagcaaggccgaactatattaacaccatcagcgcaatgaccccccagaataggtagatggcagcataccccagtccaaaccatccgatccagcctgctaggcgcgcaagcttcacctgcaatggggtagggtcggtttcagttgagagactgaccatgatgcgtccatacgtcgagtgcggtccgacgctcgtaacgagatacgtccctaacccctctagtactttgcttcctgagatgataaacggatcgatttccttccctaccgagcctgatccgttccgaagacgctcccaggccgtatacccgctcaccttctcgacttggtcagattctccagtcgctgtcgattcgtcgcatttgatgtcgtggttcacgatgatcactccgtctgccggggcagcatcgcccgggtcgaggtgcacgatatcgcccactgtcagctcggtgatatgcacctgtgtcgtcttcccatcacggatagccctaactgagcggtcgagtttctacgacggtctcttattagaccctgcctcttgaataaagctacgaa

SEQ ID NO: 506 - DNA, 3199 bp, Emericella nidulans
cggtcttcattttctctcgacccaactacgacggtccgccgggtttcgccgtacctgtgaacaaagtcacgcacccggatctcgaccccgatcatttaggctcctggcccttctaccgccctgagccgtcccgcatctttgctcaacttccccatctccggccgagcgtgctatatattttcggcggcacatcggacatgtccacgccgacaatgatagcggataaattagcccatacagggactggactcggtggcagtggcggagtcacagcgggacgtgttcgagacgtagtactcaaggataaaggacatcttgtcgcccaggaagcgccagtccaatgcgccgaagaagctagtaagtggcttgggccggagctacagcgttggagagaagaagagaagatgttccaggatcagtggagtcaaaagtccaagatcgagaaggttactattgatcatcggtggaaggcgcatgtgcctgctcctgtgcgacctaaaaagaaagactcgaagtcgaagctgtgacgcttctagaatatgtatatcctcaacctagtggtatagatcgcacatataaatacgtgagttggtattgttctaggagcgtcttttagtctctataggatatctatttcaaccgcacagagccggacgtctatcagcggatcaacccatcaagacaaatataaaattcaggagtgaggtatccaatgcataaacgcttaacaataaataaaaccccccacgccacctgtcataacgataatcaacgagagaagctttttaggagtgtgaccgtgcatcactgcgatttcttcgccgatccgttcgtcgtgaccgatgtccgcactatctcggggatactccaaatatgtggccaccataggtaatattcctcctgtcgattgtttaaacagtggcgcagccagatgccccagacgatgtacaaatacgcgccagtaccggtcatgatatgcctgatcgagttattagtagggtccaaaatcacacggaactcaacttaccaccatccatgcccttccagcaaaattccccagggaaggccaatctctctccgccaccgccgtatcgtgctacagaagtaattgtccagattccagatcgcgaatccccccaggaagacactcagcccatacccaaccataagccacattgtcttgagcgtcttcaggtcccgctcattctcatagtgctgctgttccttggaaagaaccggaagacccttcttctcccgctcgagtctgtcttcttccgtcgagtggcgcaaagacggacgcagcttcatttccattgtgtacatgctccggatgagcacaatggccgtcagcagggcatatgcgttttggtgaaagaccgggttctggaggtagtggtagtacagagttatgaagaccgcgagcgcggtgaggaagatgctcaggacgatgcggtaattgtttgagcgggagtaggagaaggaggcatagcacatcagacatgtggtgtaaatcatagaaagttcgtctactagctgcattgggtctgaatttcgacggtgatcagtttcattcacaatcacatgggacccctgttatacgacggcacaaggaataatgaaggcttacatttcagcgtcgagtgaaacaggaagctgcctgttccgacgacaaggtagccgtagtaggccacctggaagattgtatcgtgcccattgcgccggcagctctggatgccctttacgcccaaggccatgaacaaaaggtttgtgagggtgttgacgatctcggcggagtagatggtagcatagtagtcctatagagcacgatgattagtcctgcatcggtggtgttctcatcaagaacagaaatctcacctcctcgcaccagttcagggtcgaggtaacaggatgccaatacccatcttgagacggcggaggatacggaatagaagggaggagacgcataatagacgggaagcagacagaatccgtagaacccgatgtgccctgaagaacaatcaggtatgataggtatgtgatctcagcaataacaatatgataataatgcagggagcaaagctctgtgggcgtgggctttggttcgaatcagcaggaaccgatcgggcctgtgacgtcgtcggttattcggccggtggtactcatagtagaactcgcatgccgattggctgagtcagctatacgagatgaatctatgtgggccagaaagtactccatatacaccgataatatgcacctgctggagaagtgtgctcgaatgcctctgttgtgacctttgacctggatgaattcccgccctcttattcgagcattggtccggtgacaagccacataggctcagtgaatcggacaaaaactagacaaccctttttgctactccaggcgttcctctttcgtacacatgcaagttactttccgccgccctacagaattgatctagaaccacgaggctacgtaagatccaggcggcttcgtttgactatttcaaggttcaccaccataaaaagatgtcagccggcgaaatactcctccttactattcaatatccagcacctttctcgcctgatcgtatggtacgattacaccgccataaacggattacagctatccatatgggctgagctaccttcagataccgagattcttgccttctgaagctctctaaatgctataactgtctatacagattgtagttaggagatcaagaccttcaatacaatcattcgttacagatattagtcacatgaccatattcaacgctaacaaccacctcgagagctgacaaaagacaattgttgctgacgcactgtcccgacttgaaagccgcccatatctattggtgtgaatttgacttgaattggttgtggcaaaatgcggttctatgttcactggaatcggaaatcatgtcatcggccaatatttcgttcataagataatcgagcgtcgtacatgatcaaagagcactccaaattccggtgcactactgcgtatccaactctcgattgggtcacacagtaactccaaatcaatgcttgctcaagaactaacatctatacgtctagaataaaggtcaaggaaaagccctccataagcatcccgctcatttcttagtctctctcttgaatgcacttcgctcatatccctctcatcatctgaacccagcacccactccttgccatag

SEQ ID NO: 507 - DNA, 702 bp, Emericella nidulans
gcgatcgacgcggcacaacatggttggccctgacggcccgctttaatctcaccttcgtcccctaaacctgagatgcaatttttcttgaatcttgtacactggtcaaataattggaatgtcttcttctaaagtatttattcgctgattctagtacgctggagctagaataaatttgggcagtcaggcgcatcctgaggctaacttcaaggagcaccagatcagttcatatttcctcactgaaagtgcttatcgaataaagtccctaatggtggagaaattatagtccggttatgtgctatggcgccaatggggctggagaggcagacttgggtgctggcacgaaggtccgcgaaaccgcctcgttgaaattcaccataccatccaacacggtttcgtccatgctcaggccgctctgcacgttggtccgtaaaccattttccagcccgcgtaatccaccaaaagcgccaaaagccgcgaagttcttagggttcaagagtttatccagctggccgggcgagaaggcgaacttgttgttttccacttccgagtcaggatccccactgaattccggtctaagagtgtctcccttatcggcagaattgtccttgggttgagtttgtgagtcgacgcgcgcacatcatgtctccacaacgtacttgacgatgagtgcgtaccctgctgtctgatccccacgagcagtgc

SEQ ID NO: 508 - DNA, 868 bp, Emericella nidulans
aatgacgtctatagcacaaattcaatgtctctattacaccgaggactatcagcagggcgctttatgataagagatagtcaggaatgtagttgttgtgattgctcaaagggtagaggacagaaggaagctgtatcaactacacgaacgtagcctactaaggatggacgccatatgacgattgattctctatcttgttgacgatagatctcttcttccaaatctctcgatttgatacattgaggggtcaggtcaggttagcgatgaggctgcttatatcacgttgtgtaagccagccaggaggctcatcgtggatacctagtgtacacaatgaacttcacatgacattttcatatcagattataagaggaacaatgtcgaagaaccggtctagagggatctgtatgactttgtaatcgctaagatgtaccctaagtaatccacaccaccaaaataaaactttaagattgtcgaacgtcaagcttagcaaaggaacaactcttcccctccaagcatttgactccaccaacattgcagcagcagaatcaagatcatggcacttgttctatagataccataaaggaggaattttgaggagacgagctcgatacagtatgagaagtttgaaaggagcatactctaaggggttcaggaagtgggagagtaagataaagtacttctggtgtattccgttgggcgatgggcggcgtttttgcagccaggcttgttattttccccattgcaacaactcgtcttccttggtgagtcagctggactagtggtgttggcgtgagagggaatgagtgagtgtagagtatgtataaatgttgaagtgtgagcggatcctaagcttgggtctcccatatatgag

SEQ ID NO: 509 - DNA, 1063 bp, Emericella nidulans
atacctggtactgaatatgctacgcaatggcccatggggaaaagctaaaagtaatgagagacaataataggttatttataccaaatatatgtttgcgagaattatcttgttaaaatgtagatgtgatgagaatcaagcgctgtctgactggctagccttagctcattcttcctacttgaacctctccaattcaagacgaggggctctcgaatcgagaaaagacctcctcctgcgccctctgatactccctcatgatgctctcgcgctttgcctcagatcgcggcataatccgacatggaaaatcattcgcgcagaccagaaacccttcgctatatccagtcctaggatccaagtccggctcaatcactttcccactctcgtccactccgggctcgattgagaaggcccagatgagtttcgaaatggccagaaacaggttccgctcggcgacatggatgcctgggcagatgcggcgcccggtgccgtagccatagtgatcgcgggtcgtgtaatcagaagcattggccagttcaggagcaagggctgtctgacctttgtagtggtctggatcgaagactgagggattgccgaaccgggcttcgttatggtgcatgccccagccgttgacgatgatcgtgctgcttttgggtataaaatgaccgtcaatccagtcatctgttttcaatcttagcaacacgttcgacaacaaagtagaaagtagaaagtgtgtaggaagtgagaccaaccttcagcagctgcatgcgggaacgccaacggcacggcaggtctccatctcatggcctccttgactgtagccgcaacatagggcagcgagccatagtccgaccaagcgggcattctgtcttcaccaatgacattaccaatttcggcctgcgccttcttcagaacctgaggccactttgtcatggcgtgaatgaacgccagaatgatcgaactcgacgtgtcagaaccaccctccatcaggacaccgccgaggaaatagagctgatgacgtgtaagacccagcttctcattttggtcgagcaccgtatccatgaacgag

SEQ ID NO: 510 - DNA, 917 bp, Emericella nidulans
tgctgcgcactaggattcccgcattgttcgccaaggatgcgttgtaacagtcccatcctaactcgtggtataactccagcaatgatcccaatgctcatagcctggaatccccgctgccccagagtatcattacccaggccagcctgttgttcaacgtcgtgaagggaaggcgtttcattattattaagcgactggcgaatctcttcccttgggccgtgagcatggtcaaagtatctgccagcctctaatagcacccagcgccattcggtcagctccaacacacgctgcattatggtctcgtaggtatcgttcagaaaagaaatttgctgctctagacacccaatgtgttcggcaagctcgtcgatctccaatgtcaagttatctgccattgtgtcggagtattcagataaagttggtatcaaaatagatgctttgtccagctgggaacgaaagtagcctgttgtatgcagtcaagtcagcgtcgcgcgaccagatgcagcagctcaaccggaatccaattcacctacgcagttgcctctccacattatccaggcgggaaatctctccagtgaaagttcttctgagggcattcgtatcctggttgagctatttcagattcatcattagccttctcgccatgcctgatgcatcttagttttggcgttgaatctttaacttacatccttaaactggacttgaccaagttcacctagagccctgacaacttcacgtccgttttcgttggcgatatagagctggattaagctcatatctaccgagcggaagaaagtatccttggggcccatggtggaagagaagcttctttagtcagtgttttccactgctaggataaggcgttcatcagtgtttccatcactgtagacaaagttgagacaggcgttcaaaggagtcgccct

SEQ ID NO: 511 - DNA, 1493 bp, Emericella nidulans
atttgctatcatactgcctaccaatgcagagcgccggtatgcatcgcgctacggcagagccaatcgctattgtcggcctgagctgcaagtttgccggcgaggccagcacgccggaccggctctgggagatgctggcggcaggcagaagcgcctggagcgaaatccctccttctcggttcaacctgaagggggcgtaccaccctagtgccgatagaactaatacggtatgtttcaattcgctgtgcagggggaaccctactgaagagaagaaggtccacgtccgtggcggacacttccttgaacaggaccttggtctttttgatgcccagtttttcagcttctcggccgaaacggccgcggtagggggatatctatcagaaaaaaaaaacccttgatacctgacgaatgtagtcgatggatcctcaaatccgtcttcaattagagtctgtctatgaagcgttagaaaacggtgcgggcgcccaattgaccctcacgaaccagttgctgacagcggttcagctggaatcacattgccggacgttgcgggaagcaatactgcagtatatgccgctgtgttttcgagagactaccgcgatggtatcatccgcgacgaggataggctgcctcgcttcctacctaccggtaccggagacgccatgttctccaatcgagtgtcgcacttctttgacttgcgagggcccagtatcactctggacactggctgttctggaggcctggttgcacttcacgagggagttaagagcctgcggaccggagagtccgacatggcgctgatctctggcgtgagtgtcttgctcaatccggatttcttcaaagccatggggtctgttgggtaagtaatatcttgttaccttccaggagggcctgactgacgaaggaaggttcttttcacctgacggtaagtcgtatgcgttcgactcgcgggccaacggatatggccgaggagaaggcattgcaacaatagttatcaagcgtctgtcagacgcgatcatcgccggggaccccatcagagccatcgtgcgtgaatcagggttgaaccaagacggcaagaccgaaacaatcaccacgcctagcgaggaggcgcaggttgccttgatgcgagactgctaccgtcgcgcggggctggattatgcggacactcagtatcttgaggcccatgggacagggacgtcgacgggtgacccgatcgaatgccgtgcgattgctaccgtgttcaaggacagtcggtcatctgaacaaccgctgcgcattggttctgtgaagacgaatgttggccacacagaggcggccagcgggctcgcgagtctcataaaagtggttatggcgctcgagaaaggcaagatccctcccagtatcaactttgagaagccgaatccgaagattgcgctggatgaatggaatctacgcgtggtgactacgttggaggattggactgcagggcctggaggtgtccgccgcgcgtccatcaacaa

SEQ ID NO: 512 - DNA, 4330 bp, Emericella nidulans
ttacccttgatggagggggatataatgaagatggttgtaaagcgaagtagacggctcacgtggatggggaatgcgaaaggggataagcgcagcagtcacatgacgtgccgaactggttgctgtttggtagttgtctggttgactccgaaccacctggtaaatcttgaggaatcacaccctttattaatggtatgaccagtcacaacgttgaggtaattagatctttattatcctgcaaaagggtattccttgcatgagttttttcaagctaagaaaatcatgactgatccaaccggtttgcttccctccctcttctgctccggccgtgtcatgtgccaggaccgtagtcccgcgccccgcctcttccaagcgctctgttcggtggcgctgattcgctgtaagcaccaccaactccagacactcagtctatacctggggaatgcacgatgatagtggacatcagcagcctacaagcagatcttcacgaccgtcccctgcactcctcccaccgcgcagatcaatcacccggaatttagccttgtgacgcgcccagcggcctatcctgctattggagagcacgtaccgcctcacactagagtacctgcttcgccttctcgcgggccggccctcctcctagtacacttgctacgggtgagaatatgccgtcggacatgaggttgcacggtccatcccccttatcgttttctggccgccgatcatctactctctggcatgttttacggtactctcgtcaaccatacttcagcccgtcaaaagtaccctagctgagagcagatgaccattctgggcctcagctctgagctctctgttctttatgtgcatcgtgataggccgggtcattgtagacggtgttcaagtcgcgccctctgtctcaaccatgttgagttagactgccttctacccagatcacttacttcctttctcggtctgtcgatgtccttaatgaccttctctaagacatgcttttccttacctgatcactcgtctcacatgtgatcgccgatttgcactcagttcagcctcttccctctacccgggaatggcgtaatccagcgcgccagtcaatgtggggttgcgagaagttacattcaaatcttgtcgacaagatagggcctccaacgttattgagggaagcgtttgatgaacccattcagcaagtactgtcggtcatgggatcagcggaaaccctgctctagctgagatgggtgtgccctcccggaacggatgtgcatagttcggggcggagtgagggggtgaggaaacttctaccatgatctgagtggctgcgtatattaacttgagtagcgccgcctgggcacttgtttagattctttttaagaaggactccaccgaaccagctttctacgacgttcaagcaccgtgcccccccccagacccagcaaagcattgaagccttcgtcacacggtgttatgcgagccatgtctcacatgatccgtagtaaaaagggtaggcgtagacaaagggaagtcctatcctcacggcttaacatgagtcgtaggtaactaccgagaggaatagagcctatgtacgaacataggaagctccatcaatgtactgatatacgtataatctaaacgcctgtataaggacactcaaactgctgcacccatctctgtatcttcgtggtcaatacaagctgttatctcaaattatctttgacagcaacaactagtctgtccttgatcacataagatattgaatacgctcagcatcttgacctactttctcctgtgagttcttggagcctgactaagggagtacaaggggctatacaatatgtgccgttaaagtaaaaagtaatagtaatgatagtagcaaaagagtaaatataattattacaatctgaatactaccaatgggtaaaaatagttttacattaattgagcggtcttcttagctgctttatgataatatgtatcccattccattaacgacgtgacggctagcaggtggcaaaaaatggtaattcagacaacaattctacgagtatctctaataggcatctatcttggccacgtgaatcatttcgcacggcaatgtgcttccctccatccaacccacgatatctgatttctgaggctagttcaagttgctgcatcatcagcatccctagtctccctcctactcagaagccatctcccaagagagaaaccaaattggcccccctcttgccttcatgatttctccagttctatgtctccaaatgctgaccatacccttttctatacccacacttcctaccaccggcatctcgcaattttcctgtcctccccattctgtccttttcaacaaagcaatgttattctgccctccctatctcttactctaggatctactctatttgccagttttacgtaggctgttttggccaatggcatctcactcccgacgattcgagatttctgaagctaagatgtgcgcttttgagtgaggtatttatagagctagataccaaatatcaacaatgctttgtagggcgatgaaatgacaactatgaaggtcaggaaaaacagcacaggaaatcggggacttagacgagcacctatcttcagtatgcccctgacgtcccgtctcttgaattgccctaggaaagccctagggcataatttacctaggtaggcgagccgtccaataatctttctgggcttgtcatgcaggtctcgaggcatcttcttagatgattcgtcatccaaattgatgctggaaatgaatgggatatcttggatgctgattcagccattccatacttttccaatatggaacgtgcataaagcccctgatcaagtcggatagagctctctgcttgggtaatccggatccctaatatcttctgtgccagtcctagatccttcattgggtgaaagctcttcagccgatctttggtggagtaatgtcctcaatatctttgcgaaatatcaggataacgtccacataaagagctataatgactcctcggtcataaataagaaattccaagatctgcagtactttgtcggaatccaattgatgtaacaaactccttgaccttctggtgccaaaggtaggcagattgtcgaagtcgtataatgatcgtaggatcttacacacattacttggagcaaatgatcgtcattgcagaaaagttgtcttgagcgtgtcgaggtcgagaccgtccgtggccttatgtgcaaaatcttctccagcaaagtacgtttcagtaaatgctcttacttatttgcaggtggtagctgctcgctgatctagagtatatacatgttgcgcaccagcaaaaccgctacaggatagggcgatcattggctcacattctgcacccagaatcctcgctctcactctagcgatatccgctttcctcgtagaattgaaaaaaggccatacatgggcatgaaggattccatctttgctcgctcattgtccatctgctcattcctttttttgccaagcgtattcttaataataccaaggccgcttaatgcgcttcccagcatgtcctcaatattgtccatgacctcagcaaggtatgaggcataactgctgcagctgctggaatccagggcaaggttcgctcgcggccagacagagggcttgctgaggacgcctcctcgtctactgaggtgttgcgagtagcctgggagctcggcgagggatgtcggctggctggattttatgatcccggggaaggcagctgtctggagttcgggtttgcgtttgcgttggcaagcgccagatgcaggatttgaaatataagcagggcgctcctcattttggccaggacagccattgtaagcgcgatgaagcagttcctaggctgtagtgaaggactatggtctagaagaaggtgtgatgtgcctcaggagctgagagatatatcatcctctgcttaaattaaaacaaacaatttacggctacggcacgtttgcttctaaatcatgttcttcttcttagagctcttcttgagcagtttgggacagtatgtttgtatgcgtataagtaaccgctgtgctacttactatacacggtacgtagtattagtatcgcgggctagggctagattagtggtagctttcagcataaatggccactagccgcgtacaaaccacctttcgtccaagcaaccactacgcgaatttagacagggatgggctcatcgctaggttgccttttgctcgaacttttcctaagaagtgcactcatccaatccatttgtttgattcgacgtgcatgcaactattatgtgtacatccattaggtacctggaagagattataataggagcagcaaaaagcatcc

SEQ ID NO: 513 - DNA, 740 bp, Emericella nidulans
ggctcgagaagcttgtcgacgaattcagatgagggtttccgttttttagtgctgaagttaacgcattaagcagctcggtctggggagtacggccgcaaggctgaaactcaaaggaattgacgggggcccgcacaagcggtggagcatgtggtttaattcgaagcaacgcgaagaaccttaccaggacttgacatcctctgaaaaccctagagatagggcttctccttcgggagcagagtgacaggtggtgcatggttgtcgtcagctcgtgtcgagagatgtttggttaagtcccgcaacgagcgcaacccttggtcttaggtgccattattaaggtgggcactctaaggagactgccggagacaaaccggaggaaggtggagaatgacgtcaaattatcatgccccttatggccttggctacaaacgggctacaatggaaggcacaaagagcttcaagaccgctagggggagctaatttcatataaccgtctcagttcggattgtatgcttgaactcgcctacatgaagctggtatcggttggaattcggggataaaatgccggggtgaatacgttcccgggccttgacaccccgccggtacaccacagagtttgtacaccccagtttggggggtaactttttggagccgcagctaagtggacgattattgggtgaatccaacatggttccttatgagtgcggtggaaccttttttatgagatgggacctcccttattg

SEQ ID NO: 514 - DNA, 3506 bp, Emericella nidulans
agtaacggccgctagagagttgcgccaaccgcttacagccgctgacgcggttaaacgggcaaaagattgcaagaagagagcgttgtcacccgaaaactggttctgggcatcatgatgagaattgcttagaacgggtttctggggagaaaacttgcggggaggacagtttgcgcaacgactgcgaaccacaacgaggaactgggaaatgcggacggggactgcgccccttataaaacccggtagccttgcaatgctgcagtagccctgtatatggatgagcttgactgaccctgctctagcatgtcctatttacagcataaggctccttcgtgttgagatctatacgagatgcttcgagcacccgtccaataagagatgagagcgaaatttaactgcgcttagggtcgccatgtgaatgctatatacggtaagcacatagaccagagagtctggtgtgaagtagtagagcatgtagaaattaggctcagtccttctatgttacgtttagcctatctttgaaacgtataaagtctgaagcatgggtgcgtcagggtccctttttctgtatgtgtacggataacatgaagtgcgaccatagcccgtactattaaaggcgtggcatgatgctttttctagatcgagttaacatgccaggtgcagattgaattctgctttacaaggcgtacggaaggctataggctgctgtggagcctcgcaagtatttatactagcgagtagtagatcgggctaaaatactcacgcagaagccaagttaacgagagaatgacaagggactccatatatgatctttcctagtaactacatcagtatactagcaaggaatcaattgtcattgtaatgttgcatatagcctttgtcgctctcaagtgtccttacggctggttttggccattgcctaataaggtagtggctgtctatatagtgtcttgcacaagaataaattttcaacagcctaggcactttggcggagtggttaacgcgatgccctgctatagtatgatttctcatacaagcgaggcatttccttcgggagcgtgagttcgaatctcacaggtgtcgtttttttatttaacctcttattttttctacgaccccgtacatgggaccaaacaacacctatggcacaaagggcacggaccagttagctactttattcttggtctaatgcgaagctaatactcttgtgctaaggtcactgctgtatgcatgccatctagccgtgcaatgctcaactaagcccggcaagcagcaagagtacggaaattcggaatttatgccatggaggatagatagtttctggataagttagaagcccatggtttaaagaattggctctttacaacgagaaccgttcgagctctgcatgttgggacatacctcgagcggtgggtaatgtcggaatctctacatagccataaatatttcaagattttatgatttcattaatgcttgtcctgacatggctcgccgaacacactgtttatagagagaagcggatccttgcaatataacacatttcttgattagctgcgatattgtttagtacctcatttagttagacaacacttagtggtcgcaatgcgttgattcatgcaggagccgtttcctgtgcacagcccaaatgagttaaccccttctatcaaacggtctctagggcaatccccgtgtagcaagcattgtcttgccacagtaaagtcttctctccgtccttgacccggtatatactcccaccgagatcacacacatacacagtgccatcaccagcaaccctcaaaccgatgggctcattaaaatgccgagcaaggatctccttattcgacttgagtttttcgagctgagttgaccctgatagatccacacagttaagcgagcagccaatggggtgctcaccccggtccgtccagtataacttttgtgatttcacctccaggtccaaatcgatcggctctggtaaaccgtccaacagcaactcaatatctgttctgttctccgctgtctgaccggcaggtatctcaaggcccgcacggaaaatccggccccggcctgccttgcttgggcccttctgggtccagtagatgtacctgtgaggggtgtcgacggcgataccaacacaccagcgcgtaaggtcgctgcgatgctcagcgcaatctaggctccccgtctggatgaggacttcgtggcccgatccgtcaaagttgcaccggtgcacgcccattccttcgcggtcgcagaagtagatcttgcggttcatgtcatccaccactagctgttttggtgtatgcacagatccagtgggcagaagggtttgcatatccgacccgtcgaggcttcgcagagtgtactgagccgtcacgcgttgaggtggcgcgccccatgttcgtccagaagaggcggccagtggacttggatacgtccaccccgtctggcaatgactggccggtgacgattggtgacatatttccggtagactgatcaaagtagaggattttcccggctgtggggatctggtcaaccttgttattcgatcccaaaccgacatctagaatgtacagactctgtgccgccttggtagcggcagcaggtgcagcggcggctgacggtccgtacaatccacctttttcactcttcagacctagtcgaccttgatcgatatagctctttcgtagccagtccacagtcatgcttccgtcaagccccctttcctggatatagttgtcttcaatgaacgcaactgtgtctaagccgatcttgtccatcaactggcacggcggagagctggttggcagctgaaacatgttcgtccacaagaggtctatttcctcgggcgtgctcacgtcttctgctaagatgagcataatctcacgcttgattgccgcccacagacggttgaagatgaagctgcagatgaagaacgttagcaatggtccaacccagaagaatgatatagccgacacctacccagtcgattcctttctggccgtaacagggatcattccgcatcccttcaacatcttactcaagctctcaaaaagttcgggcctcgtttgaccgttcgtcattagctcgactgtccgaatttgcggcggcatggtgaaatggacatttagcacccgttccttccgttgctcgcccaccttctctaccatcaaactggacttgaaactgctactgttcgacgcaataacgcaatcagccggtgcatggcgatcgacctccgcaaacgtgtcaattttcagcgacagcttttccggcaccgcctcaatgacaagccaggcgcctgcaactgcagaggagatctcggcgaacgctttgtatgtgccggggacgggatgcggcgttggtgtgatggcagtgaattcgtgaagatgggcgtcgatgaatgaggccgcgtcgctgagggcttgagtcaaggggtcccggatgtgcacggtgtgcccgcatacgatcaggacgacggcgaaccgtcttcctagaacgccggctcc

SEQ ID NO: 515 - DNA, 1488 bp, Emericella nidulans
acattcagaaattcgtcttgcatctgctcgcggaaaacgttggtcttgcactcacccttctgatcggcttagtgttcaaggacgaagctgggcagtcggtcttccctattgcgcccgttgagattctctggattatcatgattacctcaggcgctcctgatatgggattgggaatggaagttgccgctcctgatgtcatggaccggccgccgcaaagcgtacgtacttaatcttcacgcaaattgagccattcaagctaacagatcacagaaacaaggtatcttcacctgggaaatcatcgtcgacatgctagtgtacggagtgtggatggccgctctctgtctaacagctttctcgctcgtcctctatgtctggggcgacggaaaccttgctcgcggatgcaatgccaactatagccaggaatgcgacactgtcttccgagcccgtgccacgactttcgtctgtatgacctggtttgctctgtttctcgcctgggagatgatcaacatgcgccgcagcttcttccgcatgcagcctggttccaagaagtacttcacccagtggatgcatgatgtttggcgcaacaagttcctcttctgcggtgttatgctcggcttcgtcacaaccttcccagttctctatattccagttatcaatgatgtcgtcttcatgcatactggaatctcttgggaatggggcgttgttgtcgtggaagcaatcctcttctttgccggcgtcgagctctggaagtggtgtaaacgcatctatttccgacgcgagtctgttcaaaataggaacaaagtcgatgtgtaccgtggtcctcaggacttcagccgctacacgactatgagccgttcggaaacccaggctactggagacttcaaggcggaacagaatatcgtttgagcactccgacggaaagcttgctaccaaagcagctatccaataccctgctcttgacattgagcatagctcagcagcttaatcgctaaggctgtcgcttcgctgtcttcaggccaacttctcccgcaccttcgagctgggatcaaatatgggttgtaaatgcctaaatgcgttgatgaccttaaatttctcatcttcactgctcaagatgttgtatgccattgtggatagattgatatgacccattcaaggacatagtaatgatattgatagatttggcaaataccaccgcatttgtgtaacttgatgctgttgtagcactattttatttagaagtcgtaatcttcttgatgtgtaaagtagtggatgtgagagatttgtacaacaacaccacagcgggggattgaggtcctatatgtgtccagaatgtgttgtatgagcgatttttcctgggccaatagcatcacgattacccaaattggaattgggtcaggaatgcaacacccacgccgtgctgaacgctgcggatgcttgagggcagacggataaaacctggtatagcaatgattcattgcaatactcata

SEQ ID NO: 516 - DNA, 582 bp, Emericella nidulans
ttagttaacaggggtcaggactcatcaggctcagggttgcatgatcagatatgtacaaggtataagttcttgtatatagggaatacctgctgccaggcaacaatataatataactactaaacctcttgtaaaccctatactttaatatcagcagtaacatggccttagtataggtactgtatccagccatgggcctggtactagtacttttatatagtcttaagacagctgctaatatatagatataatagatcttgctggcactgcatactattagtatatacagagattataggaactaggtaatcaagctcacgggggatatagatagtagtagtatcaagatagatatcatactattattggatagtctagataataggctgaattattaagcttgagaggcaatatttcttatagagataggcctcagccttcttaatatatataccatgctggtattaacagtagacaataaaccctagttcagggacttttacaaagataaaggggtctattatcactaacaaggtgctgattcaggggaattagagtaaaagtcagatttcggccagatctacc

SEQ ID NO: 517 - DNA, 888 bp, Emericella nidulans
cgacgccgcctggtccttgctcggtttggcgacccccccccccgccagtctgatatccgcctggctcgggactccggccccgatgccagccatgaggctgaagcggatggatgggaagattgtcagcatctgagtcgcgaccgtcacggcaggcacggggcctataacaccagttggtagggttaagaacctgaaagcattatatttttctagggcagtcattcaaagatataggatgtagtaagtatagaggaggtactagaaactattctgcatggtagaaggctggctggcataaaaagcaatataaagcttgctaaaggccctatctgggttattgtaacagagcctgagctaggtgggcgcggtctagacagaccaggccatggagtctgatcgtagggaccttctggcccagttgggagatgcttggctggacactctcttcagtatatagctctattcctgcagcagcaaagctgatttcaatgttctgtatagtagaaatactctaataggtgcgggtaggctcctatagttaatgttaggcttattaatatcatgtttgtctaggcatgacctttattcgataaggctctatacacatgttttagcagaccaaagagctaatatctagttgatttaaatatcaagcatgcaaacaaatactataccattattcttgcagagctctcaaattgacgtgttaaataggtatatggctagtcaagataagcaataaatatcagttaactgtacaagaaccagttacaagaagcaacagcttgcgagaactatgcccacaacgaatacttctccaataagtcgtatcgattatgtactccacattccactaaggacacgattaccggcgttttgcctttttgg

SEQ ID NO: 518 - DNA, 338 bp, Emericella nidulans
aaagtactggcaggggggctgataagcaaaaagattaataagatttatagtaatataatatatttcacaggcaagcagcacatacaagcaagtggcgcctctgtattccatataaactggtatcttttcatactctcatatctcaacaataagttggttttagagatgtataagtatatatagtgtctatttaggtagcctctatttaggtattagagaatttatcctgctataataagttttcttttagtattataaattacagctatatttctagtatttaaaaatatatagtaggggagcttggtatcaggattttttattactatttatataat

SEQ ID NO: 519 - DNA, 1804 bp, Emericella nidulans
ggcaaacaagtatgtgccgaaacggtaagtcaatctcggccacgtggtcgggctggggtggcccacggtaaccgtatctcacgttgatgctgtatgctgtgcgaaaatcacgaagctaaagagacgtgaaggggcataaaggtcggcgtctatggttgtcgttgcttcttatttgaacacgtatgtttgaaagagttacaagttacgccagaaatcttacagctggcttcctaccattaaactttatatctaaagcgggtttgatctatatcaatactcaaggcgctttagaagaaaaagccctgcgcgtgcgttggtgctctctatgtccgtattgactgattttcaactccgtcagttcacatttctatgccccaagagaaaatacatctcgttcacgttttacccagaacctacagcgtacgggggctcattctacccgctcgaacactggcatccaatgcaatggtgcgcagatctcaatccattgtccaccaggatatgcctctttcacagcatcgtcgttctggaatggcacccactttccgctcctcagtgcaggcaagtaggatttgagctgacgctgaccatcctggagtaccggacagcaaagatatctatcaccgtacatgtactgggtaccaatcctccagcattctgggtcttccgggaattcataaaaaagcgtacgcataacaggagaccctttgagatgcgcagaccgcataagaccgcgagtataatcccgtagagcctcccgcagcaacatatacttcttgcaaatctcatatacctcgagcccgtatgaccagacttcattatcggcgccactagcacaggaagcgcccccggtagtgccctgaacaggctgcctgggctcccgatctccatgcagccgcatgactgggcagaacgtagcccactggaaccatcggacaaaaagttctctgaacttgctatctgaagggttgcccccatggaaacctccaatatctgttgtccaccacggaatgccacataatcccatgtggaggcctgcaacaagttggtgctgaaagctttcccaagatgaagcaatatcgccactccacacaagggctccgtatttttggctgcccacccaagcgcaccggaccaggttcacgatgttcttttgcccagcctgttccatcccctcgtagaatgcccgtgcatattctagtggatagatgtttccaattgctgtgtttggtccttggtagtatcgataattatcaaagtcataggccttgtactctggctctgcttcatcaagccagaaggcacggacgccataatcgtaataatttgttttgcatttctcccagacgtatgctcgcgcacctgggtgagttgcgtcaaagtgtatggtatctccttgaaagtccatcgccgtacggactcctcgatcggtgcggatgagaaaccctttctccaacattttgcggtagttctcgctccgcttatccaccgtgggccatatactgaccattagctcaatccccattcccctcagctccttgaccatcgcagctggatttggccagtaggttggatcgaaccgccaatctccctggagcggccagtggaagaaatcgatgacaatcaggtcaatcggcagctcgcggcgcttgtactcgcgagccacctgaagcaattcttcctgtgtctggtaccggagcttgcattgccaaaatcccagaccatactcgggcatcatgggcacctttccgacgttggcagaatcgtctcaaaaatataggcagaggaattgccagcagccacg

SEQ ID NO: 520 - DNA, 3082 bp, Emericella nidulans
acggcactgcgcatgacctgccggaaatttcgctggtattcggtgttcagagtcaccacacaagattccgtagctcggatcatcacctcgcatgcattaaggattccttcgcccgcttccttctgcagcctctcaacgatcagcaggagaagaaaactgccttgcagcaactgaatgccaaagaaatagggcatgaaactaatgtctgggtcgtatcggagaatctgatcgaccgagtcggctgcgtccagcgcatgcgagatggtcgatgcgaatgcgggggaggaggtccagaaatctttgtcctcgatcagggatacgggatcccatttgcccaccaacaggatgtggagcacgtggaccaggtatgatgcatacgatatgacagtttgcgtgtgccatgcgtatgcttgcgagagggatggctcggctggtagatgttcggattgggcgtgcgcataagcggacagcggcgcttccggatcggatgtagtagcggcgaacgtggttaagctagccttgtagatctcgagctggcgtagaacttcgcttacatggacattccacgcgtccttgccgtttagtcgcatgccaagcatcggatggttcctcgcttggttcaggtcaatgagttcgccggtgatcgtcatgaggggaaggaaaaagccaaacacagaatgatcatggcagatgaagttcggaaacaggcgacgcttgttcttgtcggcagagagtaggcattgcggcccatccgacttcgggctgttactgtgtatgatccctgactgccaggatgcctcgtccagcggtagtagtaagtcttcgctttcggcatccagcaagccaacggccggttgtagcacagtgcgagatggcggtccatgatgtacagaagccaccatgtccgccgccgttcttcgcggtgctcttcggtgatggtgttctggtcctggcgatcacagacgcaattgagactggaccgagttgggtttgagtaattaaagacggggcccgggtcagccccatcccagccgggtagagagtatccgaacggcggacttgacccttccacttgggagtcgcattcggcatcacctcgatctcttgatttagcttgagctctcgcgctagggtgaaggccgcatgccaccatcgcatactggctgccttctgctcactggacgagatgatagaagctacatggatgtaggtaatcacatcgtcaagcgacgctgccgccctaccaggcctctatcgtctcctcctccttcaaacggatggtgcacagtagtgggcggtagatcctggccgacgccggcgaacgctgggttattcggtggccgccgcggccgctgctgcaaccgctgctgcgcgccgccctgatctttgaaggaaacatgaatcaacggtcgcaacaagcggatagtgagagcgcagagaaattggcagatccttttccgctgcggaggcgaaatcggcaacgaaaacgccctatcatccagagcagctacccagagcatactcgaaagcagtgccggactgctgggtcgtggcgcatctttgctgaggaaggaaaccttccgcagcacatagcaatgaatatgatggcatacggggtgcatgtgagttgaaaacgcgctggtgaaatatagatcaagcaggtcaaagaccagttttcgaggcagagtcgcctccacgaacggcatcaagggctgtagaaccgggtacttcaacggtgctgtagaggttgacggcgcgttggtcgctttcgacccttgcgaagtcccagcgctgtaggcggccaggtcgacaccgttccatacatcgaacatgtgaggaaacggtcctagtccttctccaaaagctggtccattcaagaactcgtatgatcctggtgatacatgcgtcccggcgagccattcctcagtaacattcccgccgatttctggtctccggacgggaagttgtgggtcagtctgagaccgtcggccatcaacacttggagcagaaacagtaggagcatttgccggcggcgatcgatggtggaaagtcgatgcgggggagacatgccctgggatctctgtaccagcgggcgccggtataccattcatggtcttagcggagccggcgtctcactggtctccattttgttctttgccatttcggccagcttggatcgtgcgatacggcctcgcttacgacgctcgcgcgtgaattcgcaggtgatctcgctacggaggcagcgcgagcacggaaactggcggtcgcatcgaacgcggcgagcatgacaagagtcacaagctatacggttgcgcctccatcggcgctttgtggaggaatccgggggtgcgtcggtctgagagttggggactgtcccgttcccctggtgggaggatgccatttcaggacggcattggcaagtaaacggacgagattttcgacgtgaagcgtataagaacaggctgagttggatggaaaagtctggaaggaatcagggaaaagcaagggtgttccttcggcggggtgtcggggtctccgcatgacagttggctaacctctttaagccaagtaccccgtacgacgaagcattttcaggtactcggtaatcggtaccatatgtaggcaccctgcctagtatcgaactgggatgccgacctcagacttactaatttagcacatgatcaaccggggcatcgtattatacgagttagactacacgatacggtctttccttgtttggaatctcaacatccctagccctaatatctcttgtttatgactgtatttgcaccgcgactcacaatcgagaatctctgaacttaatagcagcagcttgatttcctttattacattgcgtgcctctcgactcttgccataaccgcaggtgaaatgtatgctcctgcactatttcacccatagcgactgtaaacgtgggcgataaccaggcatccttctgttacaccggccatagattctgaccagcaggaactgattaccgcggtacgattacattggttagaaaggtctagccacgtgaaccgcgtagcgttgctcgacttcctgtataagcccagtgcgtatc

SEQ ID NO: 521 - DNA, 740 bp, Emericella nidulans
acacacgaacgctagtttcgagcgtctccttgaaatcaactttcctctatctgaacaaaaaagagattcagagcttgcataccttcggagccgcgcagccactcattctggcctaaaggtatgagcaatttctacccatgggtacgatatgaactaacattatataaaagagtactatgcttcatgtgaaaactgtctcccctgcaaccccacttaccctccgaaatggccaacatagggtacaggcactggttgaactttgcgatgaacagaagcagctcgcggcgtccggtgccttcgatgattctggcaaccctattggcccaccaggtgacgatgttagttagcaccttgtctacccatggttagaatataagccccgctaatatgtcgtatcaggattatctgtgggctgtggatctatacgatagcagccaattgaagcctgatacactcaatgccttgatttcaaattgcgatgttgttcgcaaaacaaattcagaaggatataatgctctgaatatcattacatacattgaacagttagatgacgaggagagagctgagcgattaaaggccagcaattttaagcagtggcttaacaatgtctttggggtgaatcttacatatacaacacgcatgattactatccttaaagacaaactctctccagatgatctgctgtattgggacaagatatggagaaactcgttcactgttcttgatggttcgatccagca

SEQ ID NO: 522 - DNA, 1468 bp, Emericella nidulans
tggcaaatacagctacagagctcgaactggctgaggccttcgttgattgaaccagcgctgatgtccttcagaagcctgaaatgctggttattgagacactataagcgccactctagcgccgccgtgctcaccgtcatgctggaggtcgatgaagaataataacagggccacgtggaactttaatctaacagtgatgaccaaaatcacctaccgctctcgttaggggcgatagtgcagctgtctgcctgccgaacaatatgctactccggcgctgccatgcgttacgagtctcagcaatagtacatcgagttcgtcactcaaagagataagaacggcactcggcagctgcaacgccgccaatctctttccctgcgtcgttgtatgcatccgtcagagtctacccctccccctgggacttacataagctcaatgcggttcattgtctccctttggcctggcgaagctgaggtttagcttggaagcattcgacggcgggccttgggatacccgccagatcttgccgacatgataactttcactttgaagcgagtctagaaccagtctcaaaagccgtggagggtcgggacaggctcgacgcaccatggggaatatatacttggctactgggactgggaactttgaagatccataacaactctcctcgatccattctagcgacaagacaaccatggcgtgtctgatagtgtctggtaaatctcagcgggtagccaaagcaagtgattggtgcttcaagtcattgagcttgtctacgtgaggaggaattgtgtcacgttcgctgactaccacatacaaggtatacgactctgataaacattcattgcatacggaaagcaaagctgcatcaagtccaagtcgcttcccgtggtcgccttaatccttgagctctgttagagtgttgtcagtctattgttggacatcggtgctttctgtacgatttgtcacttgaatgccaatggtctgctcctcgaacacggcgagccataggtcagttcagagagaaaacgctgtgcagacagagatatcccaggaattgatctcccaggggtcctttcagtacgaatctaatcctttccattagtcgattttgtttgccaaatcgctttgttgcagctagataacccgggcatacgcggatgccttaattaccctgctactatagtgcgctctctggctgctctgcagagaatcttattcagggagcatgagatctccatcgcacctcgcaaggtatgtgacttggagaagagtttctaataataataaaatatattaaaaagaacagagtcctgacgaatattgtaggtcctcgcttgatacactgttactggccgaagctccttacatacgcgcgttgtacaaggacgtccctcgagaaagtcactcggtatatggcgctagacctaatccagtacatacgcgtaaaactgacattagtaatgacttacgc

SEQ ID NO: 523 - DNA, 459 bp, Emericella nidulans
taatttatatacttcttaagatatagcttagctagaagaagctttctagatagacctttagtaaaaaatagtaattattattttttttatattttgatttactatttaggtaacctactcttaaaacctatataggcagatcagctaggcctgaaacctgccctaatctatagtttaataagtctaatagataattagaaggtctaacctaacctatttcttggcagggcagggtaggttggggcaggttttataagttaggtttaacaaagtctactttaaaatatctaggtttattattattactaaaactatatagcttgcttgtatctatagcctgcttatagattatactattataaatactaataagtagtaggcagataataaatctatcttaaaaatatttaagaaaaagtattagaatatggattataaactggtatatataattaatat

SEQ ID NO: 524 - DNA, 559 bp, Emericella nidulans
agcgcggcttcaacaaatacaattccccactcccagctgatacctgtgtgcttgaacacgactgtattcaggacagggatataaagaattgggaatgtggtgatccaacctgccatgatggaccagaagagaaatttattgcgccagacatcatacatccactgggtgaagtatttcttgctatcaggctgcatgcggaagaacgacaggcggaggttgaccatttcccaggccaagaagagcgcgaaccatgtgaggcagacaaacgtggtagcccgcgcgcggaagaccaggtcgcaggcgtcagagtactcgcggttacagccagacgcaagattgccgtcgccgaatccccacatgcgtagggagaacgcagagagacataacgctgcggtccagaagccgtagacgagaatgtcgacgattatctcccaggtgaaaatcccctgcttggattgcggtggtcggtccatgatgtctggtgctgcgacctccataccaagacccatgtctggcatgcagacgtgatcatgatgatcagaggatctcaacaggggcg

SEQ ID NO: 525 - DNA, 2263 bp, Emericella nidulans
acgttcgtgggaatataagccgacacatcgccgccctgtgtctcgataataggaagagcagtgagtgagccgccaccatgtttatcattcagctttgctgcacgttctaagaggcgagaatggaggtaaaaaacatccccggggtaagcttcacgtccaggggggcgacgaagtaacagcgacatctgacgataggcaactgcatgctttgacagatcatcatagataataatggcgtgccgaccatggtctcggaaccactcccccattgcacaaccggcaaaaggagcaatgtattgcagaggagcagcttcagatgccgtagcagccacgacaatggaatatttcatagcatcgttctcttccagggtcttgactaactgagctactgtggaccgcttctgtccaacggccacgtaaacacagtacaacttctttgattcgtcatccgacttgttccatattttttgattcaaaattgtgtccagggcgatagcagtctttccagtctgtcgatcgccaatgatcagttcacgttggcctctgccaataggcaccatggcatcgatagcctttaggccagtttggacaggttggttgacggaacggcgaggcaaaataccaggagccttgatttgggcacgacttctttcggtagtctcgatgggtcccttgccgtcaatagggttacccagtgcatcaaccacacgtcctaacatcttaggaccaacaggaacatccacaatttcgccagtccgccagacaggctcactctgtttaacaagacgatcggaaccaaaaagcacaataccaacatgattggactccaggttcatacacatcccctttactccagattcaaattcaacaagttcttcagcttgaacgttcgtcaaaccacgcgcgcgaacaattccatcacagacagacaagacatggccagactcggcaaggttaggtgaccctttgagcccacgtatcctctgctcaagcagtgaggatatttcaccggatgggcatttgacacaacggccagatgagaatggctgcttccagagaatggccagtgagctggtagggttagaagttgatctgcctcttctgggaatcagagtagcagtggctaggcgattaagggattgccaagtggatttggacattattaaatagttttcaggcatcgagcgcggcaagtgctgaagaggaatatacagagcagatcatgctgtgtgtgtcccttaacatcagataatggtgtcattatgacgaactccgaactctataatctttaccatggtcgcgtccattcggtaagtttcgcgttatattagacagtggtttggctattgaaggttatgttacatacacggtcgacaagctcacgagtcaagacatgacaatatgtaaagttatgtccttgtgcggtccgcatgtttgttgttgtttgcctgttctactacacttacatttgctacatacactttgccaaataaccacggaatgcatcatttttcagatcatatcatcttactgatttggtttgctttcctccttttaacggggccttttctgcaattttatggttcacaaataagctggtacaaatgaagctagctaaagatatttcattggcgaatggcataagtattgtcaacaccataatcagccattcaaatatataagaaaagttgaaatgtcagatagcaaacaacagagagaaaaatttgcggcagtcaagtaaccatccgtcagaatttctgccttattagccgtatgacaatccacacatatcctgccaagcttccttaccttaaactcttagcgaatcccccgtgggccttgcgactcattcctgatgccctgtcgctcagcgttctgcgttattatcatggttagccatattctacctaaagcacgataataaagcgagaggggattacaaacgatattctcctggatctcgccttggtccaaaattttcgcgatagcttcgttatcgttggatgttccgaactcgttctcaactgtggcattgctggcttcattatgaatcccttgaggtccatgtctaggcagattgcagaatttagttaatacttgactctatcttcgcaatatgcacaggttgtatcatggtggagcacctactgagcagtgaatatcttccatccgtcgagcacctgcgctagtgggatagaatgatcccccctccatttctgcacagcagcagcatcttcaaccattatacaaagtcttcagtccg

SEQ ID NO: 526 - DNA, 1567 bp, Emericella nidulans
atcagtaatggcgatgtttctggcagaagaatactgttatcatgaccgttctcgaaatggtaacaggtaaggggagagaaaagtgcatactggatgatgacattgctggttccgctaacaaggcgcagacccttgcccttgatcacaccggcggagccctcgccgataagcgttttgtccgagttaacggtgataccgagggttccggcattgtcgtaggtcaccgagacggagggagcgtcaggctggtagtttgtgcaccagtcattctggttaatcgcgacctggcacgccgcgtcggtgccccaaggtgcgcaaccggtttcggtggtcgtgccttcactgtcggtgaagtcgaagctacacgggaacaatggaggttagtattcagggtcggtcgagcgagcacgaggaacggagaatgtacgtcttagagaggacaatgacgcgggcctcgtcgtctcccaggtacgagaccagctcgtcgatggtgtctgggtagacggctgtggcactaccaccgccggtcacacccttggcgaaaccctcggccgagccgctgacggagacggcggcggcggtgctgctgagggcagcggtggccagggaaacgaggaaagtggtcttcatggttggtgtgattggatatgcttgaaaaagtattgttggttgattggtgagagaacgaaggaacgaacaggttggaccagccggagaataacaaagggaaatgcaatgacaaagaaagactgcggttggagaatgtggcgggatgaagaactatcggagaacggggagaagttccgttttatatcctggtcatgggcgtttggaattctaaggctgatgttaacttagtaacggggtagagtaggcgcaatgaaatgttgtaagagtagcttagtcgtttagagtccactctatcttgattgaagacccatactggtggcctcagatagatgagacacgatagcggaactccggccgagccctatagcaaagtaagccgtgggtggcacagacactgcgtttggcgtcagccaggtgcaggattcttcaagacgagggggcgatgtaagattggccgtgtttcagcgtgtccactaggaggcccggtacttgatgctagtttcccgagtcgcgaacaagcaattcctccgtcttggcggtgggtgagatgttgcttgaccttgacacctcgacgatcagttcatgatacgagagctgattgctggaatcgaggcacgttcacttctgggtttgaagcaggagctgaaactgcgcgcggagccggagttgtgggggtcctgagattcataagactcggaaatttttttccatcgcagatcaacgctcgttaagcacgttgatcagttgagaatgagatcgttgtccgaaaactaccctgatcgtatcacttggacaaccacccggaggatgcttacttcctagcgacgattgacagaatggcgtcgttcttttcgaggggggctatgggtcccagggggtaacatttgccaattgtcccgcgcttgccaaacctccattgcgaaaaccagcaggactg

SEQ ID NO: 527 - DNA, 228 bp, Emericella nidulans
actcgtaattagtgctatagggttagagtaggcatttatcttcagtggactcagtagagtcagaagttatataatgatcaaaccacaccgcaactagcatccttaacgtacttcttacacggaaccctacacttcgataacacggttcgtcctgttagtaaaacaccactggcatatacctatattccttggatcacgactcagtcatgcttaaattcccagtgagaa

SEQ ID NO: 528 - DNA, 2357 bp, Emericella nidulans
tcctggccatccctcttcagtcctccctcctcaccaagtcaccaccaaaagaacttggtttttggtaaaaaaaaaaagggtggcacttttcttgacttcacctaaaccccggtttcttttctctcctctctcatcctggcctccgctccctcttaaccacggataaagactgcacttagtcgcacctaaagatactggagccacttctctagttcaagttcaacggtgtctcacctgctgtttttgcgaattcggggccgctcctccctcagccctggcggctttttccacgttcctgctcgacctgcgcctctccctcttcagctttggaccctcacgcttcctcccgctggtttttatttctgattgctttctctcgctttcatctcgccttttcatcacttcactttagcccatctttatttttttattttcctgaccgtgccgcgtggtcctataacgcgtgctcaggtgtttgaccttcctaagtcgggacaaaacctcgttctcgtttctttgataccccttccttcacgtccttgcgttctgcttccagttgtatttgcttgacctccgaccaagcccagttcgcagatactgccgtctattcgcacatactaccagtttaaccatggcctaccacggctctggtccccagtcgcctggcgagcatacttatgatgacggccatcagctccgcgacctctcacactctaatacctctgtgggatttcctcgcagttcctgttcgttagattctagctaacgtgatgctcgcttgttagtacgaagaagaagcctctcatggattgttatccagccaacaaagccctttcgctggccccttcgatgacccccatcagcagcgtggccttaccgcttcacccgtacagcgtccgacgtctggatacagtttgactgagtcttacgctcccgacgccgcataccatgatccgtacagcgccaaccaatcggtctactccggccactcagagaaccctgcagccgcttttggcgttcctggacgtgtagcatcgccttacgctcgtagtgaaacttcgtctacagaagcgtggcggcagcgacaggccggcgctgccggcggtggaaacgggcttcgtcgttatgccacaaggaaggttaagctggttcagggctctgtcctgagtgtggactacccagttcctagcgccattcaaaatgcaattcaagccaagtatcggaatgaccttgagggcggaagtgaggaatttacgcatatgcgatgtaagctcatcctccaacggccttggcagctggaatcgaaactaaaagcatttgactagatacggcggcgacttgtgatcccacaaggttacggctccccaccggttacaacttgcgtccagcaatgtataacagacatactgagttattgatcgccatcacgtattacaacgaagataaaacgcttaccgctcgtaccctgcacggtgttatgcaaaacattcgcgatattgtcaacctgaagaagtcggaattttggaacaagggtggccctgcctggcagaagatcgtcgtctgtctagtctttgacggcatcgacccttgcgacaaggacacattggatgttctcgccaccgttggtatctatcaagacggtgtcatgaagcgtgacgttgatggaaaggaaaccgtggctcatatcgtatgcacatttttgcgaccgtttccccctgaagcccccagctaataatcattagttcgagtataccacccaactttctgtcactccaaaccagcaactcattcggccgacggatgacggacctagcacccttcctcccgtgcagatgatgttctgtttaaagcagaaaaatagtaagaagatcaattcccatcgatggctgttcaacgctttcggtcgtatccttaatcccgaggtctgcattctcctcgatgctggtacccaagcctgggcctaagtctctgctttacctgtgggaggctttctacaacgacaaggatctcgcaggtgcttgtggtgaaatccacgccatgttgggcaagggctggaagaaattgctcaatcccttggttgccgcgcagaacttcgagtacaagattagtaacattcttgacaagcctttggagagttcctttgcatatgtcagtgtgttgcctggtgccttctcggcttaccgattccgtgccatcatgggccgtcctttggagcaatatttccatggtgatcacactctttcaaagcagctgggcaagaaaggtatcgagggcatgaacattttcaagaagaacatgttcttggccgaagatcgtatcctttgtttcgagcttgtcgacaaagcgggttggtatct

SEQ ID NO: 529 - DNA, 1962 bp, Emericella nidulans
tccggtccatttcgtactgattcgggtgatatacattcaattattatctggcgcgatataagcattaagatattgttccgctgtttccgttggcaatatgcaattgcaacgtccatgacgcttgagggccagattaactggagttggagttggatttgaatcaagtgttaccgtcgatgctcaagtcgaggctggtactttttctttcttttcttgcgagttgtaatgtgctaatgctgatggtgtgaggccgtaatctcattgctcattaatcgtaagaagtatttggtgaataggatgtggatgtgaacgttgatgtggatgtagattgagtggctaggttagggaccactagggcacgctctgcttcaccttgtacttgccgatcttctgaaatacgaagtcggcaagcgctgagaagattcggtgaagtctcgctcggaacatggaggattgttcgtctgtgtttcgccgctgagggcgtgcgagatatcggagtggcctgttcctgattcgcgagtgaggcttgagtgttcgaacatggcgatgtcgacgtcaacctcgtccatgaacgggtgacagcgttgtcggttagtcggagtcgcgtgcgtaagatctgaagtgacccgtgtggcgtcgacaaaatctggaaactccgggggcgaaccggtcacagattcttgtttccatatatggctgcggacgaggaagacgagtttaccgagaaccgcgaactcgagcttcagcttgacgctgtagacgacgcccttgatcattgtttccatgatgtagtagtccatgtattcgacgacgaggaggccaatgtccataaggataatgatcaagttgatcgcgacaagctgatacatgatcttgcgtttccccctgtctgggtcgagacggagcatgcgaatcgtttctgagatatacagggcggagaggacgaattcctggatgcagaagccggtcatctggatcttctccatgacattatatccgttgatgtagccgcgtcgtccagccgccaggttagagccgtaggtgaggactgttgtggggacgtggaggatgacgacattgatgatgatcatagctagcactcgacggaggatgcgctggttagggaggacgaggtgcagcctcgagtacagcacgacagcttgaccagtgaccatgcaataccagccaatagtaatgaaagtgaccgaaagccatgttgcagatgtcaggttaaagaacttgagcaggaatccgagtgaatacggaatgagccccacggacgatgatataagtaagctccaaaagtacaagcccctatagtcactgaatgtgacaaatacgagggcaatgagctcgatggcgttgtaccaggtgattccggcgagtgtcgcgatgatgatctcaaggcttaggctgtcgcccgaataccctccagtgatgccatttcctggtgagctgctggagaccatatcgctaattctgagaaagctgttgctggctgtgggatgcggtgacgagattcatggtgtgcctgaggtgaaaaagaggcaacggcggccagattgaaccggtcagtaaagaagagagaggagaggggagagcggagaggggagagcggagaggaaagagagcgagaatgacagagtaacacaagaagacaaagaagaagaatgaatgaacgaggagatggagagttgagcgagctggatgagatgagatggccgtcaggtgagaaggccaatggagccgttcagggcgagaaaataccccggactgggaccgtcacacctccaaccaccagcagccaacaacaccactcaatggacgcgagattcacacgcagaggcaagtagtgagctaacgcccaggacagaggagaccactacggaaagatcaggaaaagagcaagggaaaaaaaagcccggtgccccgacgcccaagatccagcacacagaatggaga

SEQ ID NO: 530 - DNA, 2795 bp, Emericella nidulans
cggccccgtaagtgggattaatcccatggtatcgaaaccatcttcacatctcaccaaccaacatcttcgccggggtcgtcgatcttggatccctgacgccagacggacgggtgagaactcggggcgtcacagggctccaagggaacccctcggccatatgtcagattccagccgcagcggaaggccaaaagttccgggttcaaaattgtctttcgaggctgcaacgcccggtaagaatgtcaaaacctcaaccttcgagtccgagcgcattcctctaaacaccaagatgcaagacgtcgccgaggatgagactggtcggattttggtgcaaatttcgacgatcataggagcacttttggaccccacggacgatgtcattaaataccgccagagactgctcacgaaactgcaacccaggtggcgtgtcactgatcctaacgcgaaacccgtacgctggttcgataggtgcgtcagcggcaccccgtgggaagatcctgaatttgagtacatccgcgcacataaccactccatgagttaccgtatgccggcagtttatgcttgccagtcgcgtctctgcaatgaaagcaccgaggacatctcgtgcgagatccgcgttaattgcggatgcaccattgttgccccttctatttcgcattagaagccattattgctgtacatgggagcttcctcggcgagacttctgttgatctggacaagaacaaccgcatcattttgcaagacggtgtaggattgatccagcccggagatgtgggcaagggatttcacattgtggcctttgaaggcgacatcgacgctcaccgagaatatgccgtcagctgcagaaagaccaagaaaggcaagcgagttcaaaacactgtttcttggcctcgtgggagagccattgtgagggacgagtttcaccatgcagcgaccgacataatgaaggactatggttatatccaaactggggcctacagtcaggaagacagctatctccagtctgggggctccgggaacttgttattatgcagaaataatccgcttgatgattacaggattgtgggtgtctgtattgacaattttattaagaacagcaagggagagaggacagttgttatttactaggaatgttgggctgactatttgttgaaatagctagtaaacaaacgcgctcacgggaaactcaggtgccttatttgaaaacgcgtattataatcccatgtatatcccatttatcaactcaggcaaccacctggctttctttgaatcccatccagcaggtgctttcagagaatctccaggtctacactgctagggatgcactcgatgcggtgagggttgcaaaattggcagtccgcgcgggtagaaaaatacatagcaacagacaatgacatacataaaggatatatataggctcttcctaagcaccgtccttaggatagggggtaagaggaaggcacataaaaacgaggcctttgattaaccgggtcccgaaaagagggttacctcttacgagtaacccataacaccaacccgcggtttaacaagtctagacggcaataagtagcttgggaggatttgttggaattaccgtttgccattttttgagagaattgtgggacaaaataccaaggtcacagcacccaaataacctgcgaccatgcaaccacttctgcttgatttttgggttacaacagcattacatcacatgtcgcgtacaccaaagtaattcgctaacaaacatccatcgtcaacgttagctcagctgcaaaaatgggaaccatagcctggtgactttcctcttctctaaccatctccgcaagctgagccaacttcaacaaccagttcctttcgacgactgacaatgaagcctctccaccttgttatgctatgctatcttgtcgttgcctccagctgttggcccaaaagcaaagatcaagtcagcctccaatggtcgatatgtgatacaaatccacaagctgtgtttgcaaagttgggcactgtcattcgcgctccagataaactggacccgatcacttactatgattcctatcccccactgtatacgccgaagggactcatgtttcgaaccaaaattcgcggtggccaagagatctcggtggtgaaggtgaagttgccaacgacgaaatctcatgtgcgccgccacgcgaaatcctgccggtgggatcagtatggcaatgagactaccttcacatgcaagcgacaagcccctgtgaatggaaccaatctatggagcgcgaatcagaggcagttagcagaggattttcagaacaatatcgcctgggagaagctttttggatatggtccgtacccaaatcccaagtggaaggagttgcgtattgaaggttacaaagctgtcctggatgatgtgcttgtccagtccctgcaccttatggagttggaagtcaaggtacatcgggcagaagaggataaagtttatcagtcaatcacagaccatttaagcgcacgaggagtggtgctatgtgccaggcaggagcccaagaccatgcggttgtttcacatgatgggctgtatcacgacgcagaacgagttataggttgtgtttattggccatttaaaataggctgagattaacgctcagccagctagaaatacggcatgaaggagtgcgggagaaaatgctcgagtgcctgctccactgagaatttaactgtcttataggacgagaatataaatcctgcttgcctacctaaacctgctgagactccagaatccaatgagcttggtccccggtggcatatgaacattatggc

SEQ ID NO: 531 - DNA, 709 bp, Emericella nidulans
tgttgagcaagggacattataaatctctgcagcacggcaaatactggtaattttgctattattcaaagctcttaatgcaggttaaagccttccctctcgctctatcaaatcaacgcgcttttggtggcatagtggttgtttgaagatcaataatatttatacacatcaaaactcgacgaggtgggcggaccgaccaggaattacattataaatttcttaagttgcttattaaactatatatattaagctgccgaacctgattttggccttcttagatattaagaaggtaattattacctagtctagtatactttcttaccttttttaatattattacctatttttagcctataaattcttgattttttattctagaagtagctagatgtatattactatttatactgctttcttaaaatattaaatatatataataagactactataaagctattatttctattataactattttataggctttagatttttttgaatctagctagtaagtattttacaaagtttaaaaagtagaaaattaagtcttcaactagtagtaatacaggtataggtatatataattagaaggtaagttttgaaaaatatactctagattaaatagcttaagccctgcctttttaaaactactataaatcttttaaaaagaaaatattctagtatatatattagtatatagttataaaaagtc

SEQ ID NO: 532 - DNA, 519 bp, Emericella nidulans
cataatataagaaaatatatagttaaaaataaaaatcttataatattaattagatatctaaaactatattttttagaaaaaaataggtacctgggagtaaatagctctatataaatataatttaagctatatataactatattaataaaatatcctagctagaaataaatatatatattagttagctataaatatttctagtccaatatattttatattattaggagattttgcctaaaaatatgatatatataaaaataaaattttagaaaaactaaaaagaaattatcaaatttttatacctaattatccctggcaggagcttttgatagactttattattaaagagtaaagattatataaatattataattattataggctaattaattaaaggttaattcaaggtataataatagaaaaaatattaaaagttaactctaagaatataggccctaaaagctattacttttgatagaggaagctagtttataagtcatatataagcttatatatata

SEQ ID NO: 533 - DNA, 898 bp, Emericella nidulans
aaggggggactctctgtaagcagggcatttggcgtcttgtctcgtctatcggaatcgggacccccgtcctctaagaggatcaaggtggacctcgtgtttattcttagcaatattgctgcttcacgtttcattcgctcttgagcagctcttatcataaggctcagctcttcgccaaccaagcacaggggtttagtctcagaatttcagttcctcgaaggttgcggctgcgtttgggcttttttttctcttatcatcttttgacattcgttttctattgtccacgctcgttacactcacagccagacgacgcagacggagttcatgtgggcgtcaatattatagactcttaattccgcagtgcatcattccgcaccctagtcgttcgttacctaccggatctgcgcagatcgaggtgcgatcgaggcctcgttctcgcttcatcagttactatggggaggctccagctctcaagcgggctgaaggccatagccctgctcacattcgcagcgacagcaacatgctggccatacgacgagtccctcgttgactacaacgtcaacacgaataagtcggccactaaccccgccgactactggggagaatggtcggatcacaagtaccatccgtcgccagagaactggcggtttccgttttacacactcttcatggacagattcgtgaatggggatccaacaaatgataacatcaacgggaccacgtttgagcacgatctcaattcaaatcagatgcgtcatggcggtgatgttgctgggctggttgatacgctggattacttgcaagggatggggatcaaggtgcgtataacgatattattcgtcaatttctggtaaagatatagttgatgctaacgatgcgatagggtctgtaccatgcggaa

SEQ ID NO: 534 - DNA, 842 bp, Emericella nidulans
cggattctattgacagttcctgaactcactggttcatacttttgtgaactggcttcaattgcagcttttctttgccgcaacctggagacttttgtacatgtgcgtctgtccacagactgtcctccacttggaaatgtgcaactgagatgatttcgtatacaaccactacagtgcggcctcttctcgtcgcttttctttcggcgccgacgacctgaatgaatgtagagtcggcacggactcagtgctccgaaaaagcacggtgctttgctgtgagtcgaggctcgaccaagtaaacaatagagcttcgtatacggaatttattccggatacaatcagattggtttccaatcaatttgatatccttaagctcaggatttcagatatgaataacaaaaatcaatcaattgattttttttctggaagtcaatagcttgtattcatactcacgacagcaacttctagtccgtagacttgcacgggataacatggagtgcctatccaatttgtgctattggatatgccctgacaactcaaagcgcacggggaactgagacaatgcgtgaggcgaatccacaacagggttgtctattggtagatcaaccagcaaataccctacaatttccgttcagtatttcttcggatcactccccactacataggagatagacgagaatatcgagattgttcgtcggattggcggccagcaaggccaaaatgcatactatcgtgcataccatgcgctcctgaacactagtcatcctacaggagtcgacaagctgcttgatctttactactctgactagttcgagggaccggaattccgtacactacaattgcagcgc

SEQ ID NO: 535 - DNA, 1091 bp, Emericella nidulans
ggaatgccggaacaatgcagcaaatggtaaaagcttgattttgagccttttgccttctcttacaacattgctggtttctgaatagattcaatgctagctcaagtgcagcaaagtcatcctcagtgattaaactggctccgaaacaaacgtgtattacatgttgtaaaaactcggcgcttttctgcagactcattgaggtcctaaggcattcaggtacggtgagatagatagggtatggttcaacccattacttctcttataccactaaagcccagtctaaacagacccaaatgcttcttgtccagttccagtccagacataaagtaactgcatcttcactaatatttcaaatctgatttccgatagttcaatcaagtgaatacccatgtcaaaactatccctcgatatccctcaaatcaaccgcgggtcacgattttcatccttctgaggttcgaatatcttctcatctgtatattccttgctccgtttgcaaggcctgtatcccttgcccgaggaactctggattgtcccacggagctcgttaacggtttccacaaggctctttatttccttggcctgggatactaacttcagagcctgagccactacacagtcttccagctcctgaattcgtgcatttgggtccgcgtccgtgctagcgaggtcctccatatcattgatctttccttcgccgaggtcggcatcttgctgagctggaaaaactgttggaagctcctggattcgttcatgatgttctttcagggtgttctcagagactgtgggagtgacaaattcttcctgactgcggctaccgctggacgtcaccgaaagacgggaagtgtctgtctggggttgttcatggcagccgatcggcgtatcgcccaatgctacaaagttagttttttgtacaaatattgcgctttctgccatctccagtgcactgagtggtttggagctggtagacaggtcttgctgtggtaatgtgtcaggaaccgcagctgattgtaggtgttgggccggaagtaatggggccacggagctttggagaggtgctgagatgtttccgtaagttccaggatacctttttatga

SEQ ID NO: 536 - DNA, 930 bp, Emericella nidulans
cagtattttgttccgcgtcagaagtatctacttgcaatattattattctctaaaggttgagttagtctgggcgtcgacagctggtgccaggttgttttgttgatggacaaccttgatagcagtaatagagattaaccggatgttaaaacaccagcagatcagttaataggatatctagtatctgtatatctagagctgccagatattctgccaagcaagcagtgccctttggcattggacacagttgagaaggcaaataaggtcttattagtcatatcaatgtggctctgaaaacatagagatattacaaatgctagagaagctgtccaggggcatgtgaaacattgcattgccttgctgtccaacaatggtatttcaaataattaacaggcatttatgacgctgttcaagacatttatggctgatctagatagccgcgaggaccgcgacgcagccttgcatcttctcaaagatgccgagaagcgcgccatgagcaggtataatgcagtggtacaaccccaagaagcaaatgacagcgggacaggggaactctcccagtcactaaaagtcacttgtttgaccgacgagaaggcagagaatcaggatggtgatgacgacgatgatgatgctgataggctaaatgtgcgggctttagccaattatttggatgaatgtgtgaactgtcggagggagctcgagaatatccacttctggtacttttgttgcttgtgcctgtatacagcgctgtgtcgcaggtgctatcacgagttggaaggaggacctcatccatccgggctgttcggtacatgtaatccagagcacgaatttatttatactaggggtcttcttccccgtcggagctggtgggtgatgggatggtccgcttgtctcgcggagggaacagacaagttactgggtggaagagtggaa

SEQ ID NO: 537 - DNA, 4027 bp, Emericella nidulans
ggaagagtagcaaaagcttctagaaattgggctagcatggccatattcggcaagccaaggtcactgaatccacctatccgtgaaatatcttgtgacgaacgcaaagactgccttgtgcagtatatcaataacctgctcgttgacaggccatgtcctgtattgcctatcagcatataccttcagcggcactttcatcgcaaagatccgacaactcaccaagtcagtgccccaacaccagtccaattctccaacgtctgatcaatcattaacctgacagatatgaacatgaaatctgagaacggcccgcgaatcccattcgcgctcataagcgctctaattattgctgcggctgctccctgtccgtagtgcatcgccatgttcagtccaaaccgctcagaatcgggtcgaacggggagtgacaaaagccgctctaaagtgtggcccgggacataggagcttgggcgtccggtgaagaattgttcaattttttctccgacagtcattctacatgattagtttgttgtttcgtttgagctcggcaggtcttacgcagcgacgcctaaaagtcccgctccgcaaccatagaggatgcagcttcccagcgagacggggcgggccggttgatcagggattgtagtgcgacgggacattttatcgactgtgtggactttttgcatttgttttaataatgcggctggaagtaaggcagacagtatataggcagttgtcggtttccgcatatctcgtaagaatgacgtcgcaattacacccacattccacctcagaactgggctcagatactcacaaacacaacgcttacagtcacccaccacgtgtcaaccgttccgctaactagccttcagcttatcattatgcttcggtaagaagttcctctagtacaccttgaaaaaatcgggccgctcctgcggacggcctctcaagacatcttggaaggtagtggtggaaatataacctatctttccctcacagaccaggaaatagtacaccagtaagtactgtatcacagagtcattgttatcacaccgtgcgcgtaacacgctttatcctttcgctccggtagcaacaatagtcaatataggtgtcactcgcagtagcaacgataatacaatctcgaaatgaggtcatgtctcgcgccctgactagtagctgtatcaagcacattaccattttaagcatcgttcctgaatgaatcgatatgaaatggactattactggctttcgagtcttaccggttagaacagtaagctgcccacggtgttcgtcgccaacccatgattccccttcccggcgaagacagtggcggcttgggcaacacacaagggcagaccgtacagttaaagccactagggcagagtaggggttctccccaataggaagcgggagtacaccttcctgcttctgcttgcatagaacccagcatggactgggttagtatagctacgaggaggaagcgccaagtaaacatgtggtgctctaaatgtacccaacgacagcttctacgctcttctgtaatgggacgtatttagatggatcttcctatctagacgtgccgtacgtacaagaaggaatcgctggaaaggagaaaggaaaaagggattgctgtcatgaggaagtctaacaggtgtctcaccgccttcatgacaacgtaggccttggccgagtcactaaggtctaaggtccttgtatgggcaaggacccataacatcttcaaagtttataccatatccctcaaccggctgggttttgaagggactaattttgcgcttacagctctattctgcaacctcaaaatctgtgccatgattactcccatgcggagacatatttttttatagctgtctgacaataccgttggagaacaatatccgtatacctgctgtcgtatcacttggcatttggggttggtggagaattacaaagagcatcatctagagctgaaaacaaagtcgataatgcggcctagctagcgtcgtgtgttgtaatccaccccaccgattgctccagtcaaggccgttcatttgacaagcctctagcctgttttgaacactccagcctgccaatcgactggtgagttggatttgaggcaggcaaggtgactgtggtaggcggttattctgccgtacccgtacctgtaacacgctgggtcaaccacctcgacgggatacagattagacgatacagcgggcacaatctcgattatacatttgagtattagacgtctagcagtcacgcagatcgttatcctttgcagtaatgagttattagtggggatcttctgatttccagaattgctgcctgacacacctagaaatagtaaaaaaaaaaaatccctggcttgtcgccgactaaaactatactcttactataccctattgatagagccaggcagacctagcagggctccgcagcgctataggaccgactacccaggctccttattggtgtggaacctcaggggatgtagcggggtcctcgccccctcccctctacactaacagctcataggtgtcatgcataattccactctgatagctgcctaaaagtgcttcttgggtgtctccacgaaaggggggtttgtggctattaataccagcctcacctcgctttttcagccacataaattctaccttactctcatctacaccttgcacatccagcccacacaatatcagtgatatctaagatacaatgagcttccaccattccgcccagaacatcaacgtctaggacggccaccgcctcgtcgcacaactccagactgaagacggcgaatgggttgacgccgagtttgatctgaaccagatcctgggcaatgacaacggtaggtcctccctgacttgcccgtactgcaacattgcgatcactacattttaaccttgataactgattctgtctttgccacaggacgttttatatgggatgaaagcgacttcagccacagtgctgaggagatcacctttaatattgagggggaggaatccgtgcctgtgcttcgtgcttttttgaagaatgaggacggggagctggttggggcggacgttaatttggctgagcggattgggaatgctaatgggtcctttgaggtagtttgaggtgtaggctacctatgtggcaactaactgaattattatggctttgagcgcctcggtttcacatagactatatacgtcctaatgctgctcctctttaacaagcgaattactgctacttgtcagaccgcacacaatatgcgattccccaaacccagtagtgctcagggctaagggatctattactttcctctatggctagcataacaggcgctcctccagccgggtgacttcatggcgagtgtacgcgggtacaagagggaccaacaagaactggcattccaactttatcatcatcaaatccatctattcttcctcctgtccttgccgttatagcaatggaagtctctcaactcttgactgcgccggtgatagcgatcgttcagattgtgacttaaggtttaatattggggtaacgtgcgcgccgatgtcgagtgaacatgcttagtatacacatagaaattcttataatctcgcatttgataattatattggcaaaactcgatatctaataccgcagtattctaccgaatactggtacattagataacggcaagagctctatagcatgccagctgaaagacgtgtagaactctgatgagaccatcaacaacccctaggacgactgtactgcaatgggaaaatcggcaatgtgcaacttcgtcgacccgtaggggatcaagcggatcttactaggagagccagtgacgttgggatatttaggggacaccggggcgtttcccaagttctcctcccaggggaccaaccacgcgtccgcaaatagggcgacgggagtggcgttctgagcccagatgggattccggagttgtccatcgcggttgtagtaatgatggattgccactgacgttgggtcaatagcatattgccagttagcgcctgagaaagtatagtcgtcc

SEQ ID NO: 538 - DNA, 833 bp, Emericella nidulans
tctaacgtcacttttttttttttttttttttttttttttttttaaaaactaactcttagccatcttcaaggctggctagtatattatatacatataataccgatagtcatgacatcattccgcttcgacagattgatgatgtggccggtaaccgtctggttccgggttcgatctcgcgctcagaccggacaattagcttggtcagtggtgcgttatggtgatggtggcacggctttggccttcttggtagagaagacatccttgtaggctgatagttctgtatagttctgtatgaatcgtatcaaggtccatgataaagtaggctctccttgtcatcaggcagccagagttctgtcatcctgactaacgcgaacacataggcttcgttaggcataggcgtacttttatgaaatagcgtttgtcgagatgcttgcttttgggcatttcaaactaccacctagaatcaattagcgatagatgtatacaataagcttggagtgtggtcatggaaagcatattgggctttctgttaagggttttgaaggataatcacccaaggacgttcaaatgatcgaatagtgccccgagaatcggtaagggtaagatatattctctaaactctgtaggtgggtatacaggaggttaatttcattgagaacaggagcggtttccttagcctgttgagacgataatcctcgacgaatgggtacctcacaatatcaacctcagcacatgtggtctgtgtacagaaacaatattaaaaaaaaacttatacccaatagaaaggcaagtggactaaatcagagctttctatacactcttataacaagatg

SEQ ID NO: 539 - DNA, 417 bp, Emericella nidulans
attagtaattacttgtttcaaagaagctattctataatctaggttattaaaattcttagtagtatattaaatatctttatagcagcagttttttgatataaaaaagcctaaattataaatattagtagctcgctttatatactcttctttcaaaagctcagccatgtttttttaataaaataataatctagtaaaggggtagccatattatttagtagtaactataccgcttagtagtctgcacagcttggtagtagattatattataataattatatattataatataactgtgtagttagagcaggtatattagaataaaatatttaataaatatagaatttctaccataaacaataacaacattttcatactagctctgctatataagaactaatataataaattatcatataa

SEQ ID NO: 540 - DNA, 2377 bp, Emericella nidulans
cccggaacattttaggagggagaatcttggcaaaccagaacataggttatacccaacctctccaaaaagggaaaggggtccttcacaaagtggaaggttcaaaagaatcgtctttgcaccttaattcggcgtgcggctgccaagtcccaatggactaatcctgtcgccagcggggccagatagctcccaatatctctatagccatcgaatgacagctgacgatacaggtgcccgatctgtcacagtgccgcgcgcctaacacgcaatcctcattgcttctccagcatagtagtcgcccccaaccagtcacctccggcagtctgtcacagacccctaaccccgggccccttcgccaattggtcacttacaatagcaactgctgtttcagtgctctaacagaaaccgaaccgcaggttatatctctgctcacctggactcttgtcatgtgataaagcagggcaaacgaattgtaggccaaaagcgaggacgacaagacgaacgtcgatcaacactaatgcagtttatccagaggctcacttgcggtttcattgtctgatccgcttgagcatattgggtggccaatacggcctactatctaatgccagttaagttgcgacgcctgtccgcgagaacaagcttattcccagaaaatgaagacctctgcctactttagtcgtcatataaacacccttttccacccgcgacttttatgattccctcattagtcgccttgggaaatgatgcccccgccctgagagacagagcatcgtaataacccaattcgaaaggtcatggcgttgcgtatcaaggcaggtcagattgcggctctgaaggcttctaccaatcaccgtacaagccccaatcccgtcccctgactccgtgtaagggtgctgcatcttcgtctgggaataggggtaggtctagaccgcctttggaagaattgattcttatatcaggtctgcattggatgtaatccctacagatattacttacatacgttcagacacaaaatataggggaacctaccatataatctgggcgtcctttctgttttgagaccggaaatgccagccgccacaaccgtcagagtctctccagagaaagtcacactccaatccccactcaaatccatggtccttaggtgagatctgtcgataaaagaaaacaacgctctggtcctggcggcactcgaggaccatggtgtcgccctttattttctcatcaatcgtttgaacagccatacttgccaccacaaggtgttataatttaagaaagcattccacttacattctcaacaaagcaccatcccgtccttttctccctctcggcatcattgtaataccagacacttgcttgtatggagcaccataccttagtggagcgtttaacagagggtgttgatatgatccgaacattatggaacagagtgatggtttcatccagctcgttctgtacgtcatcatattcaacgggcggtgtagcaacggtaggcgcatcgagtcttttcaactcctgcagacctgccgagtcagaccagaaatcaccatcgtcagaatatccatcgaaaatccgccgagaacgaatctttgagtcaatgccactctccaagtcctggatccgccgaaagatggatccgcagacagagctacttcttgtcagtatgtccattaatctataaagaagacgaagatgtgaaaggcactcagataaattattttgtcgatgaagtactactcaccattgaatcgcattagaggtcgaccctgggaaagcgcttttacacgatgggcaagagtcatcttcaatcccgtcatgccagaacaccatacacattgcaattgcctggccgggtcgaaagattgtgtcccatttcctggtgacatcgatatcacggcacgttcccatatcaaatagcgcgaactatcccctctctatcatctctgcagcgggtccgtaatcgcgaaagttgtctttcaatacagcaataaatgcctaatatgcgatgttattagcatatttagggcagccgtgccggttgttcacgcacctcggccgagcggataaattcaagatgaaaaggagtgaccctgcccaaggcatccatgaaatatactggctgttgcctttcaatctgcacctgcaagcttatgtaccgcgagcgagactggtgatatacgttatccttgtttccagagcgctttggttttagaacagctccaccatgtgacgtcctctgcgagctgtagcaatatttgaaccctataggaggttaaccgccgctgggcgcacgccccaaaacacctggatcaggacctacctgaatcaaaagttgacagttcttccccagctagattttgcctccagcgacgggccttgg

SEQ ID NO: 541 - DNA, 1816 bp, Emericella nidulans
  unsure (1)..(1816): unsure at all n locations
tctatcatcacgtgtgcccatcgcaagatcaccaagtactctaggctagtgtgccgccttctgtccgccttgcttctgatttcctgaaaggggcaacgtacgtggtcactctgctcttcctggcactactactagagatcattctccgagccatgcctcgttcagcgatcaatcttgagccttttaaggctgaaattgttgatctctatactaataatatctcctgtgactctataacagagaatctctctagaactcataatattgctatttctgaacgacgctacgtacacgacttcgtggctggggaatccaaaagcaaaatcgtacggtaggaacaaatcaagttttgcatgcgcggatcaaggtccttttctatcatatcggactcgaagaacgcgagctcctcgaagttctacagcaggatggcttcgatatcacgtctcgcacgctcctatatctgcgccacaagctaggattatatcgatgaatcaagaatcctatagtcgaacagacacaagtagaaaatgttcttgagcagcttatttcatacctattatcagagcaggggtcacgtattggccaggcaatttattcaaggaccaagtatgtacgaagctaatatcttcaagaattgtctttattcttcataccgaaaagttgcgcctgctgccgaacgaagaggtcttcaagatttgcaacaagaacggtgtgtttatgtagtacctggatcgaactatgtctggtcgatggatggatacctcaagcttgctccgtacggaattgaggtctatgcagcaattgatgcctattctcgctaaattatctggatttgtgtcgacactacttctcgtacagctgttagtgtactgcaccaatttctagaggctgttcaggttaatgaacgacagcctcaaattgtagggtcgggccaaggaacagccgatgagggagacgactgtgctatcttattagcagaagttcaacgtaagctacaagagtcaaagcatcctgaaactcaactatcaaactgctatatttacggtgcatctactgctcatcaacaaattgaagcctggtgggatcaacttaccaagggcctacaatatcgttggagcgtatgtgcatgcccatctattcgacctcggtcgagagctgacgaagggaatagacatactttcgatctcttcaaacaaagggacatattctagggataacttagctgatcagattgcattggatgcagaatacatgccagtccttcgccttgagataacctactttgaccgacctggaataatcatcctattggttactgaggaccggtcacaactcggttgtggaagacattatgagctcaactattctaagaggtggcctgacccactttaatgtgagagaatttctttttcagccaagacgaccggactgggaagacccgtgtggattaagtttactgaatgcgacctgagatattgcttggtcttgtttaaggataagattagccttaaaccacttagagctctttgctattaacctatagcgccagagaactttagtacgaccaacgcttccaaactcttgaaaaaagagggggggtgccctacgtcatttccgggagcttctactaataaccatccttcttatattattatttgtgtgtctgtacactcctactatcacttatacccctatttcttgctctattctcaatactaggngtgtggtacttccacctctcttacatcatctcttcttcatcaacttgtctcttgcttattcctcttataattattaatgtgttttgattacatat

SEQ ID NO: 542 - DNA, 1088 bp, Emericella nidulans
aaaggaatctgcatatcgaggagaatcatgattctttggttgccgcgaggagggaccgaggggagaaaacggtatgcgaaacgcctgcccctctttaatcttacctagtaatatataccaacggcgacatagtatggatgtttcgtcgagaactgcgatcgaaaatgctccacacctcagaaacgcagaatgcatctcatagataagcatatgtttcccaaggtactggcccgagcctggaaaactcctcatatcctagaatgggtattaacatccgcagacctacaacttctacatcgtcaacgacggcatcgacgggcaaacctcaatgctgcggactatgccaactcatagacgccgcttatcgtgcacgcccacgtcgccaaaagaaggccgattacgggaccgccaaacctccatttctcagtctagctctaactccaactccaaatccggtgctccacccgagatcaccaaatcggacgaaatggatgtggaggtggcagaacttgaaagatccatgtctgcattgcggtttgtcccagtcagtgtgacgaatgcatattcccggcagcgcgtacgaaagggtaaaaactcgtgagtcgctgcgacatacgccttagtaaggtcccaactagatgctcttttgcgttcgctctgtcactagagtctagcttaggccattcgttcctgggaaacgcattctcaattggatgtgttgtcaaagggttgaagtaaggggccactctatagcgaaagggtccaattgagggtgatttaaaacatcaatgagacgcagaaaaagtcatccgtcatcaattttagctcagagagagcaatgaaaatagcaagacaaacccatgactacccatcattatccaccagcccgcgccgcgcgaaaggaaacatatgtacaggaagagatagagaagcgaagacataagggtataagccaactcatttacaagatgccacacggtggcagagcttttgtctgaacaatgccgtgactactcactagccgctctggcaaggtaaagcactgccgattccacgcgagcatctaccttccctgatatcgcgtcgga

SEQ ID NO: 543 - DNA, 2793 bp, Emericella nidulans
tagcgcccgacgcaaagccagattaagctgggtagctcgcggcagagagataagattctacttgactactaagtgtctagtacaatgacagctgaggctatagcaggttcagatattccctgtaaggatccaccatcgaggccaaagctctatccgattccagctcttctaatattcccgaccacccatctgaatagcaactatggagcgccagactagacataattactaacatcaatcatcattaaaataaaagaataaaggtctgattcttccaattggtgaagaagactagagacgtcgataaaacaacaagccttatggtctccgtaacaaaagcttcaattcccatcattcgcttcccataagcataatcctccccagtgtttgtcccgatactttactacagatacacaagaacatctgctcagtttttttggcttttattgttggttgggtttcgcttaggtgaaacgaagtaaacgtagaccctcaaagatacctccgctagcctatcgtaattttaatctgccgacaccatgaagaaaagaagtcaacaacggaaaaaaagaacgcagtaatcaaagaatcaacgatgacaactgggtgctaatgatttcatacgcttcttggcggaaggtatcagtgatcaacccagttactccctcctgggtgaaatgaagacgctctttgttttccgtccacttaggccagttaatcaattcactgccctcatttgggtccagctcatacacaaaggagaaatagtaggatttgattgcatctgcagcggcagatggcccgagtccatgaccgccgcgcggaataacggcttgcccttgtatgtgctgttgccaccatacagagccaactgattaaacacggagatagacccagcagacttgccaaacatagtgacttttgttgggtcatcgccaaatgcttcaatattaccggccacccactccagactcagtcgctgatccagaagccccaggttggttgatccatctttcaaagttcctcaactagagagcaattataataatcttggtagggcgtagtcatgtccattacggaaacagtattactatacaggaactcagctcatactttgcctccgcactgccactacgtcgaccctatgtctactgccaagtgttgttgctcgtccacttcaaagctctagtatcgtaattaacaggcccaacttcaaagggtaaaatgagtacgccaagctattccatttgcgatccgttgacgaataagacggccatgtgactcatgagtggagatcatagagacctggggttcgatggttgggcacgaatcctatgtggccgctgccatagagcgaatggcattcagcaacttcgttcttcccaagaccttcgttcgacgccgcttgaggtagtgaaagcgcagggtataagaagcgaagagatttgccatagtgatcaagcagttgcgggggacaccacttatgtgcaggcatcatggccaggtaagacgaatcgaaactagaaaatgaactgacaatgcccctacatttctgtgtcgcgaattaattggcagagaaaactgcaatttgggcacactactgcttgtacattattcacaataatatatcgaaggtgtcaatatgcattgaatcttaggcttggcccaagtggaattcaagactatttggatttatttgggtccggccaaaaacctgctggtctttgatacttgtcttcctgatgcccggtcagaagtgctcttcttcacttttaattcctctggattagctgggtccagaacaattccattgaagacacaaaaatatgattttggggacctcggggaatggaggaaggggtattgattaacagtaaactaaaaataactagagtttcaatgagtctctgctcgctaattggaaaccgaaataactgccaaggcagggtgtagccaggcataaatgctgacattgattcgccaacgagagtttcatcggcagttgagtcccagatctcgatacaactctcgacacgagccgacgccgtaaacttgccgagcttttacaatcatgagtccatatccgaggaatagcagagaccccttcgtcctgtaccgcggtagcgtcgtgagctccactgtgggcgtcactaaggttgataatattgttcttgcatgtcaaccccgtatccgtgcctattccccagatgtggatgcctgggctacactgagataccacaaatctgggatctgaaaccaatgtcctctcaaagcagcaccaggcgtatcttctgcgtgccgggtaccactggacctcgaccaatgccgagcgcagatcggtgcaactggcctcaatggaaggtaaattgtcaaggttccacagccatcacggctgtcatcgaacacattgctcttcgcccaatcgtcatagttccggctgtggagatggcagtcatctcgggtgcgatctctcaagaccctctgagcactaccatattctggatcggaacagtatacgttactgctatcaccgccgctcgtaaagctcgcccttccaagcaggccccggttcttgtcatttcgtccaggtctctccactagtggatccacgcgcgaaactcacagatggtcgttctcgctcaatcaggccatggcaaacgcctatcagagaggcagaagggacactgcaatggtcatatttatactcttagggcgcatactggctataaagcctgtgatcttgaaacctcaactgatttccataatctttcctcgtatgagagcaaagagaat

SEQ ID NO: 544 - DNA, 777 bp, Emericella nidulans
gggccgggactgcattaacagcaaatgcgattcggtgctctgctctgatcgacccagcgatcgtgacgggtgtgttttctaaaggatcggtgcctacctctaccggcgacgaaaaggatccaaatgactatctgcgatggatcgatggctataatctccaccgtgaagacgatccatactaccagcggatgctgtacaagatcaatgcgggatatcgagggttcgagggatgccgcagagaccagttcctggaagccctcgtcaaggtgataccgccagaggtggtcgagtgcaagaagcgtttggagagtatcgaggagcgaggactagaggaaaagttgatcctgacgtttgttgacgggacgactgtagaggtagatgctggtcagtccttctacaaccacattctttgaaactcctttccactgacatggccggcttgttcaagtaattggatgcgatggtatcaaatcacgcgtgcgggagattatactgggagagggaaacccagcctcctaccctcactacacgcacaaagttgcctatcggactttaattcccatggaagatgccatcaaagctctcggcgaatacaaagcaaagaaccaacacaaccatgtcgggcccaatgcacatcttatccactaccccgtggcaaacaagaagatgattaatgccaccgcatttgtctcggacccgaacgaatggcctaacgacaggcagatggtcgcgcctgggtgccgggaagatatggagaaagcctttgcagggtggagt

SEQ ID NO: 545 - DNA, 2872 bp, Emericella nidulans
cagcggccatccagtcggcagacctggtaatataactggctcaaatgtttggacccaggcggtttcaaactggcagatggagttcccccgaagccctgttggataagaactgacagcataccgtatagctccggaaggccatccggacttttcaggccgcctgtttagcctatgccccaggctcttggagagacatcagtgaataggaagggtgcaagatcattaaggcgccattcgcagtactcagagagcagttttagccattccagagcagacctcaggtcctgacatataattaaataacatgccgatctacctcgcggtgcggtataacccagcaggaaacgtggaagacctgaaagacgcaattcagtctgcagagagagctgtgaacatcgcatcagaaaagcatccagatttcgctgaccggctcagtaacctggctaacaggctctacgaccgatataagcgaacaggaaaggttgaagacctaggagatgctatccaagaaacgcgacgagccatatcggccatatcacaagaccatccacacctcgcaggccagttaaataacctggccgccatgctttcagcccgatataggcgaacaggcaacgtgaatgatctgggagaagctattcagaaggcggagacagctgtgaatattaccacagaagatcatccacaactcgcaggccagttggataatctggccgccatgttcgcagcgcggtataatcgaacaggaaacgtggatgatctgcgagaggctattcagaaggcagagaaagctgtgaatattaccccagaagaccatccagagttcaccaggcggctgaacaacttaggaagtaggctttcagatcgatataaacgaacgggaaagcttgaggacctagaggaggccattcagatggcagagcggaaagtcaatataacgccagatggtcatcccaacctcacaggtctgctaagtaacctggccctcatgctctctgaccgatataaggaaacaggaaagatagaagacctagaagatgctattcaaaaagcggagagagctgtgaacatcactccagaagaccatccagatcttgcaggtcggctgaataacctcgccattatcctctccgatggatatgatcgaacaggaaagatgcaatacttagaaggggctgttcagaaagcacggaaagcagttggtatcattccacaagaccatccagatcttgcagctttattaaataccctcgccaacaaactctcagcccagtatgatcgcatgggaaggataggtgacatggaagatgccattaatatggcacaagaagcagttaatatcacgccagaagaccatccagaccttgcaatatggttgagtaacctggcaaataggctctcagcccgatatcagcgaacaggaaatgtagatgacttgggagaggctatccagaaagcacggatagcagtagccgtcacgcctgtaggtcattcagacttcgcaggtcggctaataaacctcgcgaataagctgtcggcacgatatcatcgaacagggaaattgactgatctggaagaggctatctacgaaacacggagagcaattgctctcaccccagaagaccatctggatcttgcaaactggttaaagaacttagccaacaacctctcaaaccgatatatgcgaacaggaaagatacatgacttgcaagaggcaattgagacggcaaggcaagcagtcgatatcaccccggaagaccatccacaactcgcagggcggttaaatacactgtctgtcaacctcttggcttggtacactaaaactggaagtataaaggacctagacgaggccgttcagaaggcagagagagtagtcggcatcaccccagatgaccatctcgatcttgcatggtggctgaacaatctcggcaacagtcttgcagtccgatatgatcgaaagggaaggatagaagaactggaagaggccatccagaacttacagcgagcagttgatatcactcccgaaaaccatccagatcttgcagggcggttgaggaaccttgctgacaggctctccgcccgatattatctgctgaatgagcaacaagatcgactcgtcgccattaagaactacgtacgaagttacaactgcctgaacgcgataccttcacaccgaatggggtcagtctgtcgcgccattgagcttctagctaacggtcatgactaccaaaccgctggctccttagctgaaaaggcccttcatttgctgcctctggtatgtggccgctcattgaaccgagatgaccagcagcatgccatcactcagacaactggccttgctgcagtagcttgttcacttctcctcaaaacggcgggagaccccgcaagtggagtagagtacctggagcaagggcgcggactcattatcggctatcttattgacagccgtagtgatatttcagacctggctgaaagatatccagatgaagcaaaggaatttgaccggctgcggtataagcctctgttccatcgcgtcgactgtcccctgaactcaaatgcactatcacaggaacggacgggcttatctgacctagaaagtacttgcacatatccgactatttgccggatttgaagattctttgcctcttggtaagacttgaacttgcgctctgttgtccaatggatgcatgtacatttcacacctgcttatatctaaatcgtttaacatatccttccatttctgggtagggagagaccccctgggtaccaattcccctcattgcgaatgagtctggtaaagccttaaaatttgattgggcaagggggtaaggaaagggttttggcgcaaaattcccatggtgcggggctcctt

SEQ ID NO: 546 - DNA, 756 bp, Emericella nidulans
cagttgtgtggtttactaggcgacactattcgttgcaggttttgcgtttggacttagtccaatgtgttaattttggtgtagcaaggaatagattgagacgcaacgttgcctttagatcttccagtacatttgtctgtaagataatcttggaatgttctacctagaggcctctagcgctgtctaaagaggactctaggtattccgagtcacgtggaaatatactggagtaaaacgagcaatggaggcaacaacaccatattatatagcgctgtacttcgtatgaaatgtcttaccttaaggatggatctacaaaccagcttctagttttatatttaccccatagatgtgctggtgcctatccccagccttggcccctctggtatcctccaatcagccatcctgcaatgtaaccgtgacacctttagcggtcgtccttttaaggcgcccctcatccacccctctcttgtcatctacggtttccaagaccgaatagctccatatcgaagaagtctaagcatgaaacaactcaccttcctcataatcggcgccggctcccgcggcagcgcctacgcccgcgcaatcacatcttctacgcgcgcacgcatcggcgcagtcgcagagccagacccctacaagcggcgccacgtaggccagaaatatatttggggcgatagagctccagtacaggagaagagttcgacgggtgggaaagttggatccagtatgaaactgaacgaagacgacggcatcaagcaa

SEQ ID NO: 547 - DNA, 1316 bp, Emericella nidulans
  unsure (1)..(1316): unsure at all n locations
atgtccgagagtcaagcagatgtgctctgaagccgggttaaagtattgttcttcccgccatactcaccagggctgaaccctattgaggaattctttgctgagttgaaggcttatattaagcgaaattgggaatactacgaaacttggcctgaccagggcttcgatactttcctgcaaacacgtgtcgatactattggtgcgaaaagagacagcgctgaaggtcactttcgacatgctggcgtaacaattgaagaatatgaagacgactaagggaggactattatctttttagtaggattccttgatatagacagtagactttcgcgagatagctattctcaaattgcataaactaatgcttgtatgagcatttgccgtatcacacaacttagttaccagagagatcgagctagtaaacagctaatacatttgaccagttccccagtcgtgatcttacaaggcgtcccagatctgtaaagccatctgcgctgacgcagattcagtcatctcccgaagcgttctctctatatactctgccgcaccgctgagtttcagaatatgtgcaatagcacagtggacctttagaagcttactagcaggtggatcaatagcagtctcaggactgagatgaagttcccgggtaactggaaattagaggattccacaaaaatggccttcgctcggtagagtcgataacatatgtgcgctcaatgctagtgtccttctgttcaaaatatatctcaaactctccaaacagcagatggtaattctgggttagcatcaaagcattgtaaggactatcgatctctggccctgcgataagtgggcctatgtccggattgaacatatccagaatgtacaaagcagccttttttgacgggacgccctaatcttcataccttgtggtcgtatgtgctagatcccgtgttggagggcatcacagccttcttagtgcaggtgcaagtcagagttcgacgataggcctcagtccggtgctaaggtagaatatcagccaggttcatgaccgggtagaaagcctgccagaaatcagcaaataatggttataagttgcgggcatgagggccagagtccncgaagattccagaccaccagtcncgttgtctggcagctttcgagcatactgagccaggagtgagaatgggctggggnngaggtcagtcatcatttgcnctggattgcttgggttgtcgctctgcctcagcggctatttcgctcctttcgtccatgagacggtcttgactcaattggcactgcgtgagctcagcgtcttctcagatagcccacggagttgggtt

SEQ ID NO: 548 - DNA, 441 bp, Emericella nidulans
tatttatttctagatttttatcttcttttatagaagaaaatatagccttagatatttaattagtattctaagatttctatttttaattatagatacaaaaaaaatcttattctattctttaggtactatattattttattatattctttatttattaagcttaagtattttttttatatatatataaactataagacttgcatggcagctccctagctagttaaaaaaaagaataattactatatttcttaaatatttcttagtaaaaaattatattatataagacttgaccctgttatttttattattaggtatatcttaaaaatatattagctttttagttagctgaccctttcttatatactaacttaaaattaaactagctaagaaataagaactattatatatattatcttgttagttctctttggggagaagaag

SEQ ID NO: 549 - DNA, 3604 bp, Emericella nidulans
gggagggggagggggggagtataactgaaaaaaataaagtaacaactaatatggatatacccagatttgcctaacattagaaacaggatttgaattaccggagaggttaaaaatgtaaacccaagccacgtgcacccccgcagtttttaatatttccaggtgtattgcaaaactaataagccgtaataaacatggagatccaggcccgctccctggttttaagtttaccggaaagtaaagggttgaagagattaccgtccctaattttaaaaaaaatcctcaggaggcccctgttcttttgagccagagcagtataaggcccgtaaccgcacaaaccagtatagccaagcatgcctttcggttccaccccacgggactctttttcccttcgtcgatggcacccagcaagtgactcatctgcctcttcgtataaccgatctcatcctcaatgatattaagatcgtccgtatcgcaagttcgctcaatcttcaagattcgaaatcttgtatcggacaaatccataccaaccatatagaaccacgtcgccgtctcgtagagcgaaaacttgtgcatccggtatatcccatcttccccaccagtgtctaaatagacttgccgctgcttctgagctgacgcagatattgagtcgcgctggaacgaagtcgcgatgcgcggctcttcatcctcttcctcaccggcatcttcgccgatggagggcggagcgggcggcgcgttatagggccctggactgaacggtgagagaggggagcgtctcagagtatcatcatcaagttgggcgtttgttatcccatctgcctgatcttcggaagtcttgtggctggttgaggacgtaaatgaggcttcaggtgcgatgttgggctccggtgtcgcggtggagattagtgagctactgtcaccgagggaagcggtccgagaggagcgcccagcgagagaggctgcacgactggcttccgaatctggcggccgagaggctccgtcggagctcggcatggttcatgctgctgcctactgcgtgctccctcagtacggtgtagagtcgttatcgtggtcatcggtgatgtcatgtgatgtggggagctaattatctggtgcagtattatgtaaacatttacgaggaacttaacgtaaatcccgggcggaaggtagttttctcatccaccccactgctatacaaactttcgatttcaataactcgatcaattcttatccaaactaaataaactaaggatgattgggaacctgacagcttgttcttttatggccttgtactacacaatttgtacaccttggggggggggggggggcgcgcctaagtctctccgaagttggaagggtactggagcttgaacccccccccaccagcttgtaattcattatttctcgacgaaataaggtccctggcttctttaaatgagagtccatctgtaagagttattagacgcctagaacaactcttttttgccatgttatctgctataaataagcagagatccttgttttcctgtgccagcaacccagtattgtaaatagccacctcacagccctttacaaattcatccagcgcctgttttgaggggcttgaaggactcctagagccctcttttagaagctttttgactaatgaagctttttgatacacctgacggactgtataaggtgtacagagttgagaggaggggattgaagcagtacctctgcttgggaggtactgcttggggggggggggggggtgtaggagtcaatggtcttaactgcagcttatccagtactgcagcaggtgagaaaggatgtaatccagttgctctgaatctactttaaatgttctctattataaagactttcttataggcttctgaataagccttcaagaaatcaagcttgtcaatatagttatatcctaggcgtgccttctgcttaatcagggatctgtataccctctttaaggggccaaaacagcccacatccaggggttgcaggaggtaagatgaataaggaggcatgcagacagggataatattattatccttgtatatagtgtcaaaggctggggtcaagtagcttctatggctgtccagaataaggagtatatactcccccctttgccacctctgtatagctggaataaagcatttttgaagccagcaaagcctaattatatctatagtctatttattattactaacctcaatcctccaggcatgtggaatagagagttccttaaaccatccctctctatagcactttcccttaaagataatggttgatagaactgaccatccagttgaattgatgtatttaatggtagtaacctacttgtaatcccccagctgtataagccatggtttgcctggcatttctgctcaagatactacttttattattgcaattaggcccatagcaaagccagttttatcaaagttgtagatattattatctgatatcctatactcaactttaatcctttatatctcattgaaaaataggcgaattatcttgggatctttacaaagtactctctgacaattaatcttccaagcaaacctggttttgatttcagggcgcctttttgtaaactctgttacccagttctttctgattggtcgagatgaggttgaggattcatccaggataagttgtgccatctcacatacgcgcgagggcctgggagctgctccatgaatgtcaagtgatactatccatcctatcaagacctcttcttgatgtagggatagcctatgctggtggttgcggagttctgcttgagattggcggccatgaagtctccctcgaagtgtattgggatgaattttgtatgcacgcgctgcgggcgcaattttttgaaattttccatttttaatgtcttgaatcgcgcattggatcctgccctcttgctcaatcaaatctcgctttgttttacgcgcttttggtggcatgatggttgttgaaagttgaggttgataaacgcgttggggtggacgagaaaactaccttccgcccgggacgcacctaccgcccgggatttacgttatgactttcgcgcagaactctgtccaggtcatgtaatatcacgtgataagcaaggtacacgcaaaacgaggtacatttacgaatagtttcaacattggctttacgggaagagctgagattaataatgaacagcggatttgaagttcaggaatcataatccattgtagaatcaactacataacaagtctaattccatttctttcattcgtaaaggcttttttaaggaagtcataacggcataaatcgaatgtccgcttatttcttaccagccttctgggcggccttggtgaccttaccagcaccagcggtggacttctcgacgctcttgacgacaccgacagcaacggtctggcgcatgtcacggacggcgaaacgaccaaagggagggtagtcggtgaaagactcgacacacatgggcttggaaggaatcatcttgacgatagcagcatcaccagacttgatgaactttgggctggactcgacagacttttccgtacggcggtcgatctttctcttgaagctcacgaacttgcaagcaatgtgggcagtgtggcaa

SEQ ID NO: 550 - DNA, 953 bp, Emericella nidulans
ggccatataattcgactcactatagcgatcacttgagcggttagagcgagatttagagggtgaaattattacagcgagggctcagggcaccttagatagttggcttagtaatgcttagataataataaaaacttcaccttggcgataacctcggataggcgatattttttgctgggatgacttgtatcgactaaacggggccgcactgtaatattactgagccgaatctggactcgatatacagaatagaagttggattgaaataatgtctaaccgcttttgtataatcgtttaagatctagatgtatcccttgataactgccacttcggcgttgaggattgaagatccagcagccccgatgacagtgttgtgtgagagagctgcgaatcgtatatcgaaataaccaccctggttaccctcgcgcactcgtcccacgctgactgtgtaacccctgttgatgtctcggtctagtcttggctgcggcctgtcgggctcatcgaacactttgatggcctcggccggggcagatggacatccaagcttctgagcttctgactggtattctctcatggcttgcaccacttgttcagcgctgggagctgggcggttcttgaaacgcagagaaacgaacgccatgtggccgtcggtgacaccaactcttgtgcaggtggctccgatcctaagtccttgctgctcgtcgaaagcggtggcatccgctgtcagtgaaccaaggatcttctgggcttcattctcaagtttatcctcctcgccgctgatgaaggggataacgttgtccatgatatccatactgggaacgcccgggtagccagctccagacacggcttgttctgtgaaaacctctacctcttcgactgggccgaacttagcctggagggcagcaaatggaataacgattccgatgacggcgcagtgagagttcagaaaaaatccc

SEQ ID NO: 551 - DNA, 1126 bp, Emericella nidulans
cccattaataagaagggggggaattcccagctattttagcaaataaggcactgtcggggtaaaaacaaaagtcagattttgaatagccaaggaatttgaaaagaaggcgaagtcgggcaattgctcgattgtaaatggtaacacctcctggcgaacactttggacctttgtaacctccttggggggcgtcgatcaatagctggaaattaagaaacaatgaagggctgcgcttggatgctcgtggcacgaaggtgggtttgaatctccgcacaaggaatcgcaggtcgtagaagaagctcaggtgatggcacaatcaggattccgaagctgtcacatatcatgaagttgcggcgcaccttcgcatcggcgaggctggtccgttggatcccagcaatggaatgtaaaggaataaggtacgagtcgggtccaccagtagggagtctcggctctgctcgccttgatctcgagtagataaacttgtagatcagtcctcgcttcttcgcttccgaactaaaatataacaagccggctgcgatatagtgggtatgatacactagagccaaatctccaggtaccccggcctcagtccagggtcaagtcaacaccgcgtcgcttatctagtggagggcgagaggtgcgagtccatggttattgatacgctgggctgtaggtggagtcgaacggttgatcaagtttcaggctcgccaggttcaaaacgaggggcaaaagagagagagtgaggaaggcgagcgacggtcaggttttatttataatgccaatccacttcgcagccggctgaccacgcatacaaatgaccaccacatcagcgtacttgcgtggagcgttggagcgatgctgtcatgaattagtagccacctagtagccacctgggagatgcgacaacagctgaatccagcatggcaccaaatctcatcgattgcagtgcgttggccagcgggtcttcctccactcgtttcgcggaggctacctgcatggccacttggccagcgacagcccaactgatatcgcccgggcgctatgtcgagggccctgtaggaacatcaatgagggaatcacgaggcggcttgataggctctgcagtccagaccaatagcacgaagaaaaa

SEQ ID NO: 552 - DNA, 1488 bp, Emericella nidulans
tgatctgcaggtgaatgcccagtacaagcggtgggtgcagagtgatataatggggtatcgcggatattgtcccgggcgagagggggagtgctgcaccaacatgggaagccggttgctgtttacagagaccaagacgggaaccagcacaagcttagcgcaatctgcccgcacatgaagggagtagtgtgctggaatggggccgagaagagctgggactgcccggtacagtctgttagagcaacggaagctgccaacagtatagaccaggatatcgtgtagatgctgaccctgtgcctgctgagagcaccgagcctgatcttcacgcccttgcgttcttttagtctagtaccagtcgcagcacatcgccatccaacatctgatctccctctgtcgcgctgactgagttagtttgtgttgtcactgaaagacgcctcttgttgggttttatgtccttttttatcttgcttagcgccggagttgtggtgtggcatgtatatagatattgctgctttacagtggttggcatcatatagtaatatacagtttctttgatgatgacatattttgtaaatttcgaggacacaaggagaaagagtgagtctatagtctaccaattcagggcttgaacatataatactttcaccatgtataaataacagcctggttagctatagttgctgaacaaaactagggtcgatccgctgtcggtggtggatggtgttaaaacaagataaggattgcctgtgatcagggcagaacaatgagaagacgagggagtcccagacgtagctaccagcccctcatacgcagagactgaagacttaacgctaaaagaaacaactcaaagaggtacgtacagaaccgtgttttacctcaggcacgtgctcaagacaagcaagaccagtgaagaacacacaccgacgcaaatagaggagttggtataaaataggaagttacacatagtgggtggagccggtcattatcctggcatgttatcgggatacacgctttgcgcagacacaacgggtgcaaagtaaatactaacagaataaatcaaacattcaagttatacttggaccacctctcagcaatcgcaacatccaaaagtcgggccacagacagcatctaatatccgtgataggtgatagggtttcacgtttggaaagcctgttttcgaatcaaaatgcttatataacacatataagaaaataattcatcattggccggttggtgtagttggttatcacgtatcgttaacaccgataaggtcgccggatcgagcccggcactggtcagttgttttttattattatccgaagttgagtggacagtctcgtcgcgtctctttttttggttgtatttgcttaaggcagaattcaaccgtgactacaggttagactactacgctaaaacttcaggaccgcgctaaaacctcagggcgacctcgatgaggatcgctagttcacgtgacattgttaaatctgaggg

SEQ ID NO: 553 - DNA, 590 bp, Emericella nidulans
gatgacgccttcgttgcctacactttcagccggtgaatcagcagtctcaccatccagttgctcacaccactcgccttctcaatatccacaattccacccgtgatcctttccatcagctcctgcatcttcttatctgtatactcgaggcttccagcatcccgtaagtgctgcagcaccgtctccttaagcgggatatcaagacctcccgggctccgcgactgttgcaggattccgcgaactggacatttttcggctgcgtattcagcgcgtggatcagcggaaaggagaatttgcactcgtcgaggtcctcacagaaccccttttggccggtgtactccgaggagaggttcttgtagtcgtcgcggatctggaagaactcgccgaggctatcgctcaagtttgagagtcgtctatccagtctgcaatacctgtcagttagttctgctctggctgctagaaatattggataggcaacgctgggtaaggttacataccccctctggaccggtgcaatctgcgccatcagccgcgtgaggaggcggaagagaccgcttgtttctatatccgtttttttagcttcaccctccaca

SEQ ID NO: 554 - DNA, 322 bp, Emericella nidulans
accatcttcactaagtaaatattggtgatccgactcgttgttcatggccatagaatccatagcagagtctgggtattggttgggctgtcttcctcgtccgagatagatcgagccgaaattgtttccaccagtaatctcacctgggaggaaaaagttgttttgaccgacctcacgggcacactcacgataagcactcgacatgtctccaagggcgtccactgtggcctgcgtggctttgtcatagcgagatccgtcaatgtcaagagctttgagaatcatgcaggaatgctctgaatagtccctcgcgataccttggggtcca

SEQ ID NO: 555 - DNA, 4252 bp, Emericella nidulans
gagaggaggggaaaaaggtgtatagtaaagaattaggaaaataaagagatggaaagaggttaggaagaaatgttgtatagagatgaagaagatagataaagagagataagagtgaggaggagatataatgaagggaataaaatgagaaaaatgttaaagagtaataaaaaagataaggtgagaaaataagttaaagggtaaaagttagaatagattttaataagtgaaatgagacgacgggtctgggtcatcaggaaaatggaagaatttggtggagtttttcgatgttaaagcggatggttattagtattggatagagatgacaaaagaagattacagcaaatgtgaagcggtatgatccaagtgggggttagattgggccagagaagacgggcaaaaagggaacttgccaaagagacaagaaacaagcgggggtcataggatagcgatacccttcaaggagcccaaggagcagaaaagagtcatggcagtgagcggcaagcgaaaagacagacgggagccagcagcagggcggagggatccgtgactactggacgacctgagggatcccgccagcgaaaagtcagcggagtgcgacgggactcggtccagagccttacccgtcatgactgtattttacgctagactaggtacagacagccatgaagtcccttgcagggcgacgtgacatgcttgggcaattcgggggtctactcaggggccttcgagcgtctttcaagggcctttcgagaatctattcgacagtctaccagcactacgaatcacttgaatatcgcagcagtctgccgcgactaggcgacccagcgagcctccgagctcgctgcctgacctgggcttgcggatagcctgcccaaccgggtagtatcacgtgacattgtcccaaccagccaacggagtctaaatttggcggtcttcacgataaaacagcggcttccccttgaccgggggcggcttgatctaggaccggtagataggccggtgatgaattacgaggagtctataatgatgcgacatccaggtccgtgcagctcgtggagaccggattggattggattggattgggctggattggactggcttggattggagaaggagcgctttgttccgcccattccttgctgcataagtcatcagtagtcttgtcttgtcactgctgacaataccgtaccgcgttttcgccgtctcccgtgacatgctctcccacgacacagccaaccgggcatccaagtgcaaactcgacaaataatatctgcagtgcactatcgcggacgagctttgccgctgagcctgttaagccagttagcccgttagccaggctcggagactatctgctgctgtgttgcgtggacacaaccctggatccaggaaaatccctcatacaaaccgccgtctgagctcccttcctaatcctgccactacgtcggccttcagggttccgcccttcacatcatccggatagtcggacagtgcctcttctggttagccattggtgactcaacctctgtcagatcgtcggactgtgaccgtggacagagtgggagcgccgtttcctcccactgtaactgcaggctctgactcttccccgctcccttctctgtacctcatcctttcgattacataacctggattttgagaacccacaacactaagaacaacggtcttcatctgaccatactctgaaatccccggtttagccaagccatgtccgaacgaggctcgttccgtggaggtggccgcaaccgcggcggaggttatgatcgatctggcggccgtggcggacatggaaaaagtggcggtgccggtggcggtgctcaacagcaacagcaggagaagcccaaaaaggaaaacattctcgacttgaccaagtacatggacaaggaggtccgggtcaagtttaacggtggccgagaaggtacggttctctcgcatctgggacagctatttatgggatatctttgctgaaacatgaccagtttctggaatactcaagggctacgatcagcttatgaaccttgttttggatgatgtgaaagagtcgatgcgtggtaagttgcgcatttcaatctggtagaaccatcagtgactgataccgtgcagacgacgagggcaacgagaccacacgggctctcggtcttattgtcgcccgtggcactttgatcgtgctgatctctcccgccgatggtagcgaacagatcgccaacccattcgtacaggcagaggagtagacagcgacagttcgcttaaaatttgggtgcataacgatcgacgcgagtcggcgtagccagaatcccatttggactcgatggacgcgcaaggaccagccggtccacggcctgacattactctaactgggttactatttctacccgggctttcttccagaagctctcgcatctctctcgcatctgtcctcgctatcctcgtcaagcaatgctggagagcttgcgtttttgacaacgaggaataagcgttgacaataaaacctcatgtgaaatagaacaatctatctaatgaaataatgagcttaaattccatagccggccgtgacatcatctgacagctgccacattcttccccgctcaatcagcccatcaatccgcccttgattcttggttcttaggcatcgggccgcggatactggaccactgtcattgatcggttagttcatattgcgccagaatgatgaacctcgctaggtcagcttccatcgcccaggctggacgctgatccagctctatatatggtcgagtccgcccgggcaacggtataccgatccattagtttatattattcttacttcactgcagaagagtatattactaaccaacatgaagctccagcttcatctgacgctagcaggccttttctgctcggtcctcgcaatccaagatgttctcagcgaggttaaagattccaggaatgggcttctcgaagctggtgccaaaaacccactcgactcagccctcgagttatcccccacattctcccccgcagagatcttcgacaccaccgagatcaccaaatacctgaatagcatcaacgtcgacaccatccccaacaccgacagctggataagcggttttcttgccagcaatctcttcaacgaaatcaccaatgccccttctgacttcgtcaacgaaatcgatgcccgcactgagactcaccccattcagagcgacaaaacaatctaccagctcatctcagaaagcaaatacaccaatattctcgctaaaattatcgaccaagaccccaaactagtcgagtttcttaactctacccaccacaagatcactgtctttgctccaactgacgatgcgttccgcaagattctgcatcatcatcaccaccgtcatcatgatggccatgacggaaatggacacgaacgcgatggcgacggcgacaaagaccaccatatcccgaaagaagtgattcgctacttcgcgagctaccactcttcccccgagatccttaccgccgcaaagctcttccacgctcatacggtcaatagcgccctgaacgattccctcctcggtaccgacaagcacgataacggtctcccgcagcgtcttgccgtgcgcgctggcttcaaagggctgacaataaacttctacagccatgtcgttgcagcggatattgtaagcctttcaacacggattattcagatccttagagaaatataaaaaaaaagaggaggaaaagctaatgtatgatgctttagggcgcatccaacggcctgatccacggcctcgactcgattctcctcccgccaccgccagccctattgctattagacatcctccctacaaagttctcaacattcaacctaggcttgataaaaacaggcctaacccagtacctgaacaccacaaaagaagagtcagcacacggcttcacaattttcaccccttcaaaccgcgccttcgaccatcttgggctccggattaacgcgttcctcttctccccatatggcattccgtacctccgtgcattacttaagtaccatatcgtgccgaatcaaacgctttatagcgatgtgctctatacgtctgacggacagattaagccgtttggagtcaagggttcaacgcatttagatctggagaccctgctggacgatcatgagattagcgccgatgtggcgaggttcggcccgtacacaagaatcaaggtgaatggatggcagcgagtagcatttgcagatccctggggatagatggaataattcatgtgg

SEQ ID NO: 556 - DNA, 1052 bp, Emericella nidulans
atccagcagcttacaaggaagtctttataatagagaatattcaaagcagattcagagcaacagggatagtccccttcaaccccaatacagtgttggataagttgaatataagactatcaactccaaccccccctccgagcagagggagtgcttcaatcccttcctcccagctctgtacgcctcatacagtccgccaaatacatcgaaaagcttgctcagttgaaaagctgctaaagaatggctctaagagtccttcatccccttccaaacgagcatttgatgagcttgtaaaggggtgtgagttggccatgtacaatgctgccttgttagccaaagaaaactctgatctccgcgcagctattaagaataacaagcaaaaaaagagtcgctctaaaagccaaataactcctatacatgggatttcagttcaggaagctagggatcttattttgttgagaaatgagcaattggaggcagaggggggtggtgctagtagaagtactatcccaacttcaacagctcctaaacgtgccctaccaacatgttctgaatgtaatattaaggggcatactagaatcagatgtcctagccggcaagacttttagtttatctaatttaaattgcttttggttgtgctatagagctttaaatttgagatagaatgatttttggagggggatttacgaaccgaccgggattcacgaaccgaccgggaattacgttatttcaagccatcttactaagcaagcagactgtgaattcatttcttaggtttatgccaattgataggcacaggttccgtgttcgaccatcagtcgtactcgccgctaggaaatgaagcttgtggttgtgcttcgtttctacctcgtccatcagaggaaagcagctagagggatctttagaaatgggatattatctgtaagactcgttgggacagattttgtctcagtaatcactgtatcgtggctctgagttctgggtgcccatgcatacatcgtacacagggatatagggaagctgcagtaatatgccgccagaacgaggtttgctag

SEQ ID NO: 557 - DNA, 1360 bp, Emericella nidulans
  unsure (1)..(1360): unsure at all n locations
ctgggatataactatattgacaagctagattttttaaaagcttatctagtagcttattaggaagtctttatggcagagaatattcaaagcagatttaaagcaactaggatacttccttcaactcccaaggtagtgcttgaaaaattaaatattaacctgggtactccaaccccccctctaagctataggggtgcttcaatccctttatcacagcttggtacgccttatactgtgcgctatgtacattgaaaaggctctttagttaaaaagctgctttggagaaggtctaaaagtcctccaactcctaccaaaaaagtcctagatgagttagtgaaagggtgtgagttggtaatctataatgccagcttactagcaaaggaaaattgtgatctctgctcagctatagagaatgacaggcagaaaaaggctcattctaaatgccagatgtcccctatagaaggtcttttatttcaggaagccagagacctgattttgttgagaaataaggaaataggggcaagataggggggttctggtggaggtacgccccaatctttaggtataccaaaacatactccaccaacatattcagaatataatattcaggggcataagagaaccagctgtcctaaacattatggtatttagtttatttgatttgaatcactgttggttgttttacaggacttcaaagttgagcaagcatgggttttgatgggaaaattacggatcacccgggaaccacggatcacccgggaaatacgttatagaaaccttttaaaaagattaatatactaagctcttatataagacagtatactctatctttctaagaagaaagtactaaataataaaattattaaagaatcctagttatacctgcctaaactaatatataaaaagctatttaaaataatctataataattataattattaaggccctaaaaaatatatctaagatatatataaatttattctatattaacaatattattatttataataatatatatcatagtacctaagctgcagagctaatattttttattaatataaattatataataatctttagctaatagtccctgtactaattctttttaatattattataataaactttattatataactacttctaattggcctctataatatcttattagtaattattaataaatttactaaatacctaggactacttcctagtttatttaattcaaatattaaatattagagtatagctctagttaaatatttctaattttatagttaagatattccttacaaatttatcttagattataatatttattttatattagaattctagtagnagatttccttaaacttaatta

SEQ ID NO: 558 - DNA, 3713 bp, Emericella nidulans
ctacagcatttagcattgctgagatcgacggagttgtataccggctcttgagaaattcttgcttttgtgctttcttccttcgctcgtcagtatatagaagcatttcctagttcaattcgccttattggtgatcatgggaaaccatatatccaacttttaacgaagcctatgtgcgtagcaatccctagcagttgcgaatacagttttaaactgtccaagagttgcgcgagcatctgactacgaaggaacaaaatatgaattcttcatttgtgatgggtgacgattggctacttttattgaaccgccattaagacatgtgcttgggcagagagtcagtcgaccgacagactacacttgctcatgaatacaaataatatcaactacttcggttcagatattgaagctatggcctctgattgtatggaaaacaacaaggaggaaaagggcaaggggtcaacggtggaaggcgataagtgagaaaacgtggactaacacattgtatcttgctggggtgggaataaaaaagagagaataaaagagagatagataacgtccacttcgcccctttcctccgctctccgaatgtcaaactccgctggccgacccagataattccgaacaagtggaagataagtgccggtccaaacctgtcacgcagctaaaaaagacctttgcaaaacacttccaggggtgtattcgcacgtccagcaaagacgccgagcacttaacgcggtttttgatacaacaaagcagtaaaagggaaacaccgcccttacgactcgggagccttggcttcctcgggcttctcctcgggagcagcagcgtcctcctcaggcttctcctccttgggggcagacacgttctcgggttcgttgccgtcggacgaagtccacagagtaaggttatcacgcagcaactgcatgatgagagtgctatcacggtagctttcctcggaaagtgagtccagctccgcaatagcgtcatcgaaagcctgcttggcaaggtggcaggcacggtcaggggagttcaggatctcgtagtaaaacacggagaagttcagggcaagtcccaggcggatggggtgcgtgggggtaagctcagtctgagcaacgtcggttgcgttctattatgtttatttagctcatgctctaataacaggtgcagagttagagtctaatcataccttgtaagcctcgtgggcagcggtggcggcaagcttgcgcttgttgccagacgcgaattcagcaaggtagcggtggtagtcacccttcctatttatcacatcagacacttcattcaattgctgaatatgactgaacacacatcttgtagtagaacaccttagactcgcctgtctcagccttagggatgagggactcgtccagtacatcgagaacgtcttggcagaccttctcaagctcggtctcgatcttttgacggtactcgcggataatgctgacgtgctgctcagagcccttagattcctccttctgttcaatggaggagatgatacgccacgaggcacgtcgagtaccgacgacgttcttgtaggcgacagagagaaggttacgctcgtcaacggtaagttcgccgccaatctgggacggtgttagtcatttcgaaggcggctgggccgaaaaagagaaagggtattttggtatcgagacgcgggaattcatacgttggcgacttcctaacatcgagtcagcggtaacgctcgaaacaaaacatttcttcgcaggcgcttagcgactcaccttcatatacgtgaccatctctatgcggggcagaccatacattagcgctcaagacaaaaaaaattcagactccggaagtctaagcatcttaccatcgtaacgctcggcctgctcgcagaggcgggcgaggaatgttttgctggaggaggaggggtgttagtttggttcttatctggggcaaccagaaagtctagacccttacttctcacgctgtacagagaggaagattattagtaaagcataggcaaggtggacaagaagccttcataataagaaagacagggatgagagatacaagacaaagtcaaaacgacaagctcatgatgctcgtgctgaattgataacaccagatggaggggttgggccaagaacaacatacctaagaagtcatggtcgacggttaggttgagatcgggaaagataagaggcaaggggcgatatcgagaggttataagttggactaaagaagcgaaagacgtggaaggggagagccagaagcacagacgcaacgaagatcggggggagtttgaatgcgatcacagcaaccaggaagcgatggaacaacggtgaggtgacgaccactctggcttagcgagaaagcggcagccagtgtttgtgtttgttttgtttgtccagggggtcaccgcttcggcgactgttgagcacatgacctgccgctagatgccaagccagtatatcacatgacatgctgttcagagtatatctgatctgaagccaaccatccatggtgaactatccaggtattctcttacctcggagtatatgcaagggaggaagaggcagaacctataacaaaataggttagctggcgagttgaatgaatcagacattgagattggagaggaaaagtcgttccccttagaacaatcttaaaagcctacttcaaaagcaaggtctcctacagccctacggtgtacagctactgatttatgacacactcttgttggcatagcatcatatagggccagcagaagcccacaagctcatcaaactgacccgtcaaaaagcgctaactggctcataactttactgagaaccacctgggtttccttggttgtggatctggtacaggcatcagcatttctcgcagcatttgcaggtaatatgtgtaatggtatagtaaccacttggttacgacgagaagtaaatgaggcatggaatcagattcgatatatgataaggcgctctctcttgagtcttacggcagctttaagtaggccgctagatagtgcgatcagaaatatcgtggcgattgagagcatttggcactttgttgaaagtcgcagcgaatgagataggtaacaaagtgcgtatggaagcgttcagccctgttgtttggtaccggcagtcatccgctgaaagaacacgttggaatgcctgtcccagcctctcgaactagacagaagcggatatctatgcttagtttttgtcgagaacatcagaatttcgcgggttgtaagcttagaatttgaagattattttcttttagaaaaatgaatcagaatagcatattacgtcgaaaggtcatagcagaaagttttcttgccctggatcattactatgcaacatgctccagttgcctcagggccatttgtttctagatctttccgctgggtttttcaacgccctcgttattatattacggttcgtcggccctgccaacttaatgctgatgcttgcccgattttttaatgcaaccttcggccttttttatctgttactttttgtcccgcctacacattggtttatggccggacattttttggccgggaggtgaatttcgtcttaattgtatttccgctactaaaaatttcaaagggttctctggaaaaggtttaaaaaactttctttgccggaacacactttggtgtttaataggaccctttttacttttattttttttttaaaagatgttgggaaaatccaatgtttatg

SEQ ID NO: 559 - DNA, 2753 bp, Emericella nidulans
aattataatataatattttaatataataataataaaaatgtagatatagatatataataaaaataatgagtataatgtgtgaaagagaaaaaaaatgaaagattaatattaaagaataataaaaaaaaaaaaaataattaataaaattaagaagatagtttataatagtaaaaatattgagagagatgatagaggaaataaaatattaaaattaagaataaaaaaagaatgtaaagaagaaaaaaaagataagaataaggggaagaaagatataaaagtaacacaaagaattagttataaaagaataaaaaaaaatgacaatgcaaataaaatattgaaaaagaatagaatataagaagaagagagggaaaattgaaaggaagatttataacaagaaaaataaagaataaatataaaaaagaaaaataataaagaagtaaatgaatagaaaaaccagaaggaaaagagacgaaaataaaaaaaatcaaatactgaaagggcacaatataaaaataaggaaattaaggcaaaaaccaacaacaccaaataaacgagtaaagggtattaaaaagcctatccaacatcatgcagtcacctaaaataacagtagcattgttatatttcaactttcaccacaatcaagagccatatttgcttacaaagtcagtggggtcagtttctaaagggctaaagaattatgaacagtcatactgtccaacaattaacttgttccttatctttttgatctttaagttcagtaattttgtcgaatggtggtgatctgaacaacaaaaggcgctgcgtcaatgatatcatcatgaccactctaacctttctgcttcatgggccgtgcctagccgccagagaaattgaggatggatcgtgtggataatttttcgggttgcactgttctcctactgatcatcgagggtttaatatctactcctgactgtttactcaatagggaaccaaaccaaaatacggcgggttttgtgcataaacccgtcttgcccagttaaatcggcattcagctgctccttagcacctatatgttgtctcatgaagggaatgagtcggattagagtaagccgacctagactgatgcgaactttgaaccctagcaataggcccaccccttacggtcttggaggtaccaccaagtgtacataccggaaagggaaagggcgcaaagaggcaaccaaattaaccactgtctgggcaagagggccgcttgagcgggatgtgggacatcatagaaggtcatcgtctttgcgcttgttagaccggatgtccggtttgagatgttttgctttcatgtttgtacacttaaggtctaagctggtgttgcctactcctgcgactggatctggtttgtcccatttccacgaattaaaggtgttcgctcagacacaggcagagccgtcgaatacccatccatgatgtggttattggccgctgtgtcttcaactgctgttgggagcatagaaaaatgcgggaattgtgagctgccgcgggactggaggaaaatttgggggtgcttgtgtatgatatgcctcagtcgtccgccacggaccttcttcatgaacgttagctggtcgcgggtttcttttactgccaaatcccacccgtagtggcggctttccccggagatatctggctcgggggccttcgagcggggccagatatatgaaataagcttggagatgaatttatccgggattagacgtatcattacccccaatggtactgcaagagccccaaataacacactcgctgcccactgtgagggctggtcaagacgctgcacggaaaagacttgaccaccgaggaagatgatcatgatctggccgccgatgatgattacctgaatggcgatgaaccatctgttgtttaaaatgccctctataacatttagacggttatcaacccgacggcagctgcagggatcagtcagtaagtgactctactaagatggaaccctattacttacttgtactggttgaatatctgcatgaagacaaatgtattgaacaccactgtctgaatacatctgctatcccactttgggaaaatgtgctggccagcaaagttcaagacgagcgtcactgccagttgatagatggcctgactgatgatcatcttccacattgtcagagtgattagaggcgcagatttgggctcgggtttgcgctcgagaacgtgaggcgaaggaggatccgttgctatagcagcattaggcatcctttttttttttaaaaaaaaaaaaaaaatacaaaaaacaaaaaaaaaaaaggcggcgaggggaagcataccaagtgcaagagcggcgaaagtgtccatgatgaggttgacccacagcagctgcactgcgctaaggacaggatcctcatcattactggcaacagcggaaacaaaagtgaggataacagcagtaatgttgacggtaaattgaactgaaaaaataacaatttttggtttccaaaagggtatttatggcctaaccaaaaaaatttttaaaggggttttaaaacgggaaccccttttttttttgaaaatgagaaaaaatatcccccactataaaaaaattccccccttgaaaaaattgcggcccccccctcttaaaaaaaaaaaaaaagagttgagggggtgaaaatcccccccccccacaacagagggggtccctcatcaatttggggaaaaaaaattttttttttccccccccccccccccccctacttatttttcttatcttc

SEQ ID NO: 560 - DNA, 2068 bp, Emericella nidulans
agctagctcagctcgagatcaaggactatccaccctgtatggtagacactaggtgctagcctcggcccggcagaccctaagcacccaaagccagtgggccgctacatgggtagccatggtggtcttagaacatagacgaaggtcagttagacgcatattatatctattccccgtttgaggaaccgacattcagaaatggagacgaccgtccggggaagaaggtcctccagacagattttggatcttttctcatcctccgcacccgctgtctgaacgtcggaggccgccgacgccaaccaaggcccgtccaagccactctagcagcgatagagtgataagcagctagcttgacagtttgcattactcgatcgcgtttctttaccggttcaactgtggctgacgccacgctaatcgtccccgtgaagcgcttatctctccgctcccagctccatttcccatatcttgacccatcttccaccatggttatctttctcttgaaactcaggaataaaagcgactgcgatgccagcatgatagggccggcctggaccattcaccagcaccagcagtcggccctgatccctattcgagtgacgacagcatggacaactccatccattcaaccgacggccccgactccgtcatccccaactccaaccccaagaagaccgtccgacagagagtccgcttgctggctaggcatctgacgacccgcgagggcctgatcggcgactatgactatggcttccttttccggcccgagctacccttcatgaagaaagatccacgggcgccgcctttttttggcctcaacgagaagattcccgtgctgttggcgtttatcctgggtcttcagcatgcgcttgccatgttggcgggtgtggtcactcctcctctgatcatatcaagctcgctgagcctgccgtccgatctccagcagtatctcgtttcgacctcgcttatcgtctgcgggctgctgtcgatggtccagataacgcgatttcatatctacaagacaccgtaagttagcttcatgtcggagtggctagccataagaatcaagctcatgccggctaccaggtactatatcggcagtggcgtcctctcagttatgggggtctcgttctccatcatctccgtcgccagcggcgccttcaaccagatgtactcgaacgggttctgtcaactcgacgaggctggaaacagactcccttgccccgaagcgtacggcgccttgattggcacctcggcctgctgtgctttggtggagatcctcctcgctttcgtgcctcccaaagtgatacagaaaatcttcccgcccatcgtcactggtcccactgtaatgcttatcgggataagtctgattggaactgggttcaaagactgggctggcggctcggcgtgtatggatgacgggatgctgtgcccgtccgcaactgcaccgcgccctctcccgtgggggagtccagagttcatcggcctgggttttctagtctttgtatcgatcatcctctgcgaacgatttggagccccgattatgaagtcctgttctgttgtcatcaagctgctcctcggttgtatagtcgctgcagcctgcggctactttagccacgccgatattgacgctgggtggtccttcatttacctacccttccctttggggctactgagctgacattggcttttgctaggcccctgccgtctgattcatctggggcaagacattacctatctctgggtatggtcccaaggttctcccaatcatccccggtttcatcatctgcgcctgcgagtgcataagcgatgtaagccgctaatgttaagatttggggaacaaatcccagccgggggtccagtgggcattcatgcccccgccctttgccgggggagattaacgtttctgccttggacaaggcccgcaaaaaaaccttgcggtaaaacgccggttgacatatacgtgtatacccctggcgtttgggttgtccaatgggaggccctattttttcaacctttctattggcgccccatcggcccggggggaaatgttgttttcccttttccaaggact

SEQ ID NO: 561 - DNA, 1883 bp, Emericella nidulans
ttgtactcaatgtaatgggcgccatggtgtaaggttgcggggaaggccttcagatgatactgacaagagtgtgcatgtcaatttgggagctgcgcgggcgataagattcccggggtatcgtcggtctaacctgattaggtgggtagtttacttcaggtccgccagccggaccctgaaattatcactggaattcagaaatacattgggctttgatacctcgaaatcatcccagatggatctggggttatatataagtatgctaggtacatgtacacagcggacattaaaaccggtctatcagaccaacataaacaaagcagatatggtcaattcctgcaatacatatgcgaccccgctccgagcaccaaagacccaaatgaatggaagaaacaatgtatggctaatctaagcagaatgatgaaagtatgtgcaggcgatggcacggatagcttacacttccttggtccgcacggtcgggaatttgggcgcctcgatctctgtctctaccatttctagcccagaaagactcggaaatcgccggctaaagttcttctcccagtcatcgcctgggcttgcggggattccttgtgctggttggtttgggagacgatcaaagccgctgagtgcggttgggtctgtgccagtatttccgctacggaggctctgcggctttggaggcgctgcaggccgcggcaccgtgcgctgtgtggccgcatatcctgctgatggtatttcttgtttcggcgctgaaggaggtgcagcaccgccacgtgtgttgggtcgtggttgcccttcctgctgctttgcctgcaaagcaggatcggaagattccgtatatttcccatatcctgtggcggtttttggtggtggaggcttgctggcttcaccaagtagcgtttgcaccctattcaagattgcaggggagcgggtcacgtcgttcgccgatctcctgcctccctctccttgctcagccactcggcggcggtattcggcagcagcattggccacacgcttctcttcctgcgagagacgccggcgttcgagctcacggcgcatctcaggtgagatgtcgtcgtcgtcatcatcatcatcatcatcatcatcacctgggtaaatgatggattcaccggccgtttcagagcccggcactggggacagtaatggcttgggaaagtcttccttgcccggagactgagctttgttgtcttggctcccctcgaagcggcggaaggcgtcaccaaaccgacccgccagtagtgtcttagtaccggaaagagacaatgttgacagactggagcgcttcgtatgtttcgaagaactcccgctataacgcttctcgcgcttccgaatagactcctcctccttcgcccgcaaaaaatctacatccgaggatatattacttcgatcatagtccacttcagtccgcgcatgctgcagcggcaacccatcatcataaggtgattttggcgaatcaagtgatgagcgagcgctgtccgcggcacgtggcggaagctcaagcttcgtgcctgcgtgcattgatacggggcgagacctattgttggaggatcttgatcgaggcaaggagtggtcagcttccggctgcaacggccgaagagcctccatcgaaggttgcggggatgccgatacattggatagtctgtctgaggagatcctcgggtctacctccaacttcgacgagacaggcgatacgcccgacctggattttctcttttcattgtctgatatttgcggctgtttctccgacgacgggaacctgtagattggacgactgggtggtttcaactccgacagccctggactttgtggcggtgaggtcatggtaccggtggagaccatggtaggcctttgtggtgctggttgat

SEQ ID NO: 562 - DNA, 600 bp, Emericella nidulans
gccaaaagaccgatcgtaaaggcaccaacggtattggcaacctgggaggaggagcccagtctttgtgtactgaaatagttggtgacgtacccggttgtgccgatgaaaaccatgactggtaattggcggaatttggcttggttgattagagcagcaattagagagtagacggcgacaaaagggaagtgctgtgtgtaggcgctaccccagacggactggcgcgcgcaggtggtgtcgctggtggcgttggaatcgatggcgccgtagattgtcgtgcctacagtcacaccgtagccgagaaagagggagtagatgatcgtgtaaacgagtcgaattgaaccggcaatcatctggtgcgattgtagttcaagactgctagttaacacggagaaaccagggagaatgagcgcaatggaagattgagtgatcgaggcgtagcagaagacaggatcggtgcggccgggcaatcgtatacttccgaacgcgcgggcgaggaacgagacgacgatagctgcgctgacttcgaaaacgtttgcatagagtgctgaacggggtgcaagaatatgctgcatgaaacaacgcagcagccaaggaagaaga

SEQ ID NO: 563 - DNA, 2348 bp, Emericella nidulans
cacgcttctccccaataacaccctcactggtggctcgctgccacacatcgggcagctttcctgggaccaggctcttatctacccggtgcaggcgacgcagccgtacaatactaacacggtggccatcacgactaacgaagaggatcgggtattcagcgacgaaacgagcaggaccacctctgacgcggtcttcaattatgtctacctcggcgagactctcgaggacggtctacttggatgggtgacagttgctgtggatctgtctgctgagtactcgcctgcctacagctttgtctggactgagagcggcagcgaggctgtctccggacacagcgatgataacgtgagcggcggcggtgctggtggccctggcgaatctggagctcctggtggagagcctacgagtgttcctactggcgcacctaccggtggtgctggattctgaatttatgactgggagaacatgaattactctctactactgtcgctaccgagtttgtggatctatgccgctttaggctactgatatgtctgctgtttctgcttcgggtataccgtctacgggcagattatgtacttagttgcctgttgtcttcatttgtgtccttgatcgataagcccatatattaaggatggtcaacgatttgtatgcaatacgaacttgttgagttctgtttctaagcttgaaaattcaatgggtgctacctctgagtataggtgcaaagggtagtcgaggggcgtctatctataactaacaggaccactagtttctctagcctggggagaccactaactatggatgcaagatgatgctattgacctaacagatattacaccaagcttaatcatatctttgcgccggcgcaggcaacggagagcctgcaaaaaactaaatatgctggttgaggaaaccacgaagacaccgaaatgtgatcaaatatacattatatattatccaacaccattaatacaacacaatacctcctgtaccctaacccgagccatttttccatatccagaaaggcagaacgctagacacccgaatcatactgctcaaccccatactcctcaccatacccattccacgtattacacgcattgacaacaaaatctctatcgacattttcccgaatctcatcgatccgctctacaaactgtagtgcaaacccttccgtcgtatgccagccaatatggcaatgcatcagccatgcgccagggttatccgtctcccatgccatgactaggtacccgttccccgggagaacggcggtatcccgtcgtgggggattagatgtctgatactttccgtcccagggatttgtgccctgcgcaaggatgaagaagtcgtgtccgtgtaggtggatgggatgggagacggggattgttgtgttcacgatcatgtagacccattcattcgcgttggggagctcgatcacggcggaggagttctcaaaggaatcatcgccgttgagaatctgcagcagcgtcggatcttcccagtagacctgcattgtagtggaattcaagaaccagcggaagaagtggtcttcattgaaggagacgctggcgagggcgttattctgatagtctggcggttgcacgtctcgtgctacatgaggaactagactggccataggctcgtccatgcagctgtcttcaaaggggtagggctcggtttttggtgtggacggtctatcgccatagtagaagatgccgcggatgttgcctggatcttcgacatcggagcaggattgctgggggatcgaacgtaaccagaaactgtcggattttgagcgttggttggcagtgacgatgacatcgtagcgctggcctgtgatcattcattagtatatactctcttattggatgggaggtcaggggcgtacccatcgcaagactaacagccgtcgtcttatacggcttgaccggcaccaaatccattgcgatgacggttagttcatgactgtcaatcatgaacttgtagtgcgtgtcaatggcgccgttgatcaagcgcagacgatacgaggtcccctcttcaaccttcatgctaaaccgctcgcccgtctccttttggcccttggcccggtgcccagagaaactagagccatagacgcccgtgccgttgatcagcgagttgttgagtagcggagggcccacgatctgcgcgtaccaaaagagctcctcgaatgtttggtgcgtccagtcattgagaaagattgtgcccgcatcgacgtcgtagttctctgttgccgggccgttgatgatgataggccctacacacaccgtcccacgcttgaagacttatgtgtgaaaggtaccaagttgtcccgtacagctaggcgccgttg

SEQ ID NO: 564 - DNA, 117 bp, Emericella nidulans
attatttgtttctacgacggtaacacgttagtggggtcctagcctgcagacctgtctcaagtgtaggagcgcaagtatagcgggagcatgacatggacagtccgttcggatacattt

SEQ ID NO: 565 - DNA, 2605 bp, Emericella nidulans
accttctgccataccgcatgcttattgtttgttgatacgctattcgctatctgacgcactgtggtactgatagcgggtgctctggtgaaggggaattgaccacaattgtcagattcctggatgtaagcactgagctgataaccgtgcctcgactgtctacaggtatcgtgttgctcgggaacctcctcggaagccgaccgaaagcgatgatgtacatcgaagacgtggcagagtttgctcacatgctattgtcaacaacagaggtgacatttcagctggtggttttggatacaactcttctgccagctggccgcaattactggtagccctgggctgctggacttccgctataagaaactgacagccggtatattagtcagagcttactacccaaggagggttagcccaattgggctgcgtgagaagctcaatagaatcttgagctgattctatctgtcaatatggggcttttaacccgctaactgactaagctttattacataaacataccctctggcatcgtacgtctacaatatgatacgtactcggagtacatataggctcatcctaagcaccgtggttaacataagatgaaggtattcgtaacacataacagagaaagagcttgaatagagctgttccatagcttgcttacaacatcaccttggtgccatacttccagtagttgaattattctaggcttggtatacgttcagcccaaccatcatcattatctccaagctgccagttatctctaacatagttaattcaatcgcccagccagcaccttttttctcctccttatacttgaccaccgcatctggatggaacataaataacccataaccgcagcctgtcttgcagtctccacctcaaccatactgtctactaaaaccaaacatttactaggcaagatgtttttttatggttgagcttgcagctgaatttagtatctgcaagataactaaatatatatcaggtgctggctttccttaaccctgttaagcttgtaggctattacccacgacctgctcgttggctggaagaagctaaacagctgttgtttctggcattaatattttcagctcatagctatggctcttagggttggatgaataccgtctcaagtctgtcgaaacattactatcattccagtcttttcccagatttatacccgacgattgcccttgtccagcacggcatctacagattgaatagctagtacctccatcagatccgctggacgcttatgaacccttactgctcccaaatagcctccgcaaatgatcttagtgccgccgcgtggactgaaatggttgcccccccatcagtgctgggagggcacaagaagattctctcgaatgacagctcaagggcatctttcgagacctctactttggggcctgtttttgtaattataacgcgctgctctcgctcttcgcggcagttcttcaccacccactgttcaatgataatattaggctcatggcgctcgatggcaacagtaaataccaccttgacatttccacccgatgcgcctaaccaacggcgaatgtcgggcatgagcttctgcctcgtttcagagaagctgacttcgagcacagcactaggccagtcaagcgaccgatttttgggcagtcgaagtgggcgccacgcctcggttgggaatcttgccccaatccgccgctgagtgatagcctccgtagcccggagctttactccatgccgactggtggcattgtgcagaaggaggctaaactaatgaactgagcctcatgtggctctgaaacaaccatcctgagtagcagtatctccagctgcttgttgtaggacgaaacgtcgaaaacggatgttcttcagattctaggaagtcggcctgaaatatctcgttggtaacttcagtgaataacaaccactcactataggtttgaaatgtattgagtgcatgctgaaagtctttatctttacaagggacatgcttattaaggccatgattcgtacttaacaagcttatctgttaatgagcaaggttcgtttgatgtatgaagtaggaatgattgtagattgttttctagagctacgataatgatatcattgaatatcctgtcctacaacgaccgcctgtgtcgcgggccaggccatcatcctgcgagccgcgagccaggctcttgggaacgggatagggcaacagggcggtatgtctatatccagtactttctgcgaatagaccatgtatacgagcgctactgcagtgcagtaatgattataacataagacataggtaatggcaatgtccaaatcagtttcagactaaattttagtgaaatgaaattattaggttgatagtgtccaaaaattgcatatacatggaactggagcggtggcccgcttgtttatggcctactcgcctacaagacacgttattttacgtttaacttacctttgcctacatattatatctttgaatggagggtctgcaatcatgcatactgttaccttgtcgcataccatgcgctcacggcccccgtaagcaacgtggaacagatcctaggaacacatgaatatacctgcattcgaagaagagattcaagcctgttcatcgatg

SEQ ID NO: 566 - DNA, 1556 bp, Emericella nidulans
gagtcaggagggagctcaagcacacaacaaggatgtcgaaaataggtttaaaagcgttaggcacaaccaaacgtattttaagaccggcctaaaaacgcctctactgtaaccaaaaatagccttgaaaattacacttctgacttcggccgacggaatcgtgttgataacggggcttctgatattggaacaagctctttgcattgctggtcggttggaagggtgtagcagactggactgatatcataagcaaacatgtcaggggaccatagattgacaaatagatatgtcgagtacttcattaccaagcagcattttgcacaaggtatcaatttccaggagagcctggaagcaattagtgctagttttattacccatagtgtgggacaaaatggactgcggcccgagacagactgagtactcgcccatcctactctgtgcatgaactccctcccgccccaaagaatcacctttaggttgagtgtatacagcaggcttcggcgtcttgactgtattaggcattaagctgaggcccgccgcatctactgggcccagaacaatccgtattctgatgattatatgctctaattctttcagtctagtgcaaacgttatcaagatacccgcgtgcaacggacactcgtcgatcatttgccgccaaacttgcatggctgctcattcgcagctcctgcgaaggtagagagctgccagacgggcccgcgccctcactgtttgcttcctcaaccggcacctttctggtagagccatccttatacggagtgtggactgactcagcgatagctcgtctccttcgggaccgttcgtaccaacagagctcggtatgagcgtgcttgacgcacttgatacacgggcgatcgtagtcacattaaccttccgcatacaacaggggtatcaggtctggagtttgcgtgccttctgctttgcgcgaataatagcatgagctcgcggggtcttgatgtccgaaattgatctggacgatcccatgtcaggtcgaagggtagagagcttcgatcgttgtcggcactgtacgatttgtcagaaagctccctagtgagatatttcaaatcatgttagcgcaatcatctatagcatatcaggtgagatgccccagggtaagaataggaaatagggtgccccagtgcatttggatgaatctcactaagcttgccttattagggccgcgtgggtgagtggtgctaacatcactatattatggtcctttgcacatatgcaattttaataatatgtttcgtacataagtttggcctttattcaagcactaatgtggtccatgaagagtctagagactctcgcttaggccctacctactccaaccaaaagattcgccacatttaatgctttcataggcaactcgcttaatcaactttatggaccgaactcctgatcaagctaagctcacaccgcgtgccaggtaccttggatcaccatcaaatattagacgactaggttcagtaaacattaataagttattgaaggccattatcgtgtccggaatatgttctgccaagtgcatcttta

SEQ ID NO: 567 - DNA, 563 bp, Emericella nidulans
tatgagatctaagattatggattatggatgtaatgtacatataactttgagaagacaatgtgaactaactaagttagtttttcttcttgaagtatttttcctctttctttctatgggcctgctcctccagagtacacttgtgtttatgagtaacattatttttcttgtagaccttattcctgttaagggacgtatttagatggatcttcctatctagacgtgccgtacgtacaggaaggaatcgctaaagaagaaaggagaaagaaggattgttgttgtgaggaagtcttgtaggtggctcaccgccttcaggacagcgcaggccttggccgagtcactaaggtctaaggtccttgtataggcaaaggacccataacagtaccccccccctttcttcatgtaggaagtacaggtcataggggtaggtcatgtcgctttagcctttatatatgcatctctgtttagtgagccgtcctgaagtctatactattttgtacaatccagccactcatccagagcttgtgcttcctccaaagctgtggcagcttcccaggttggctgag

SEQ ID NO: 568 - DNA, 1989 bp, Emericella nidulans
aacgctggatttacaatcaaaaccagttgatgatgttcctgacggaaaaatgcatattctaggctctgatcttccacggccagacaatgtcgtaatctgtactccgcctggagagtcattgatcagcccggttcgcgtagacaatttatcttggaatttgttcaaacgaggaatcgaatctcaagtgatatcacaactgtacccgatagcgattcagagtcagcattcagatccagaaggtccaaatgccagcgaacttcatgcattcaacctttcccaactcacaacctttggaagtcccacaacacctagcgcagctatctactccttcgatcaggcaaatctgagctcagcagatcaatttaatacagataattgggactggacccttctgaacgatttcgcatatagctcgttatctgatacgatgttctcttcagcttctcctggaaccaaccaaacaagattggtgactagcccatctgatgctgttactatcagtatccaacctgcgctatcattactttccgagatttcacagaggcataccatcgacttaccatccttttttagacgatacacaacggatgagcaagacctggagttcgacgcgtcatctttcagtatttcgattcctacagatcatgtggcattatttcgcttcttttgctcgtttatattcttgataacaaataacatcttgaccgaccacgacatccatgaactttttacttggattgtggagaacaattgcgtttggataattgcgaaaatacttgaattaccaccaacagggacagtggatgtattagcagacaggatatttcctgcggttataagggcaggcgagatagggcttgtgcgcaaactcattgctcgcagagttgatgtacactgtcaaaaaaagtgggagacaccattatcacttgcagttcagcgtcgagacatggaaatggtcaacctgctttgtgaatgtggggtgaagcctgctatacgacggttttctgtcctgaaaagtgaccaaaacaacgacaccttgtggtctgacagaaacaaccagcttctctcacttctcctcgaacttggtgcagacccggattcgttcatttataatgaacccagtggatatcccctcgtaagtgccgctgccgaaggggaggtgggagctgtcgaactccttagagctagtgcacggacggatcttgctattcccaaacttggaactgcactgcaagctgctgctgcgccaggccataaagctgttgttcggcttcttgttgaagcaggcgcaaatgtcaatgcaatctgtagtattatagaaagcgaccgcattcatttgcacttctctgcagcgtttatgacgccaattcagctagcagcacacggaaacagcggagacattatgcagattctgatacagagcggaggtctagtgaatcacctccctattattccgcatctggggctccgtgtcatagaagaaatattctccaactcgagcagatcgagctatagcaatgcgattatagtgattgtttttgtagacaaaagggggcatttctggccaagattgtgtggtaagtgaagcagcgattgaggcagggatatgttggcttttacccgtaagaattccattcttatagtcggctggggtggggaagaataataggatgagacttcttatattgtttctggggataagtattatccgcttaaggtcactttatattaccacttgccaacatttgccaaaacacctccttggagttgtaaacaaacttgcttagcagcttatcctaaatctagctaagttagattttgtcttaagcaatataaataacttacaaaatcaagactacccagcacaacatttaagccccaggcgactgtgaaatgacttgcgctatatcttgtttgatagtactgagcaattccagcacaaagatcactctgtaaaataataagtaaacatgctgttttactgccact

SEQ ID NO: 569 - DNA, 805 bp, Emericella nidulans
tgagtgttcagctggcgacactattcagtagcaaataaccctgaccgctggcagcggtgaccgttctgcctgggcctgcaagtggcgaatccgtgcgaacaaggcttcgcttcagtggctgctctcggccggtcatgtttattgcagacgatggtggacatgatggggcggccagacgcagcatagttcaccctgctccgtaagcgacctgaggttcatactacatgacggacagaggcccgcatacagaatggtaaggtactgtatcacataccctggtcagtccggacggtgacactgtctctattagagaagtagctcagcgtgaaagagcaactaccgctccaatcaccttatgactgatgaatccacctctccaccatcactactctgtgaaaatcttaccgatacttgtgatactcatcattattactataacaaatctctgccacacaataaaatacgatcttaacatataaggcgactgtctatgaactggcatttatactgatgttatcgcgtgtgcatttccccaacgcgtattgaaattccatctatacttaatccactccactatcactgataaactcataactttttcctctcactacatctcatcatttaatcacttataaccactcgctataatgcaatttgtcactccacatctataattacctttttagtgagaactcctatctccaactctccttcccctcactccataaaacgggtgtctccttttatatttgcaatactccacctcaaatcgtccacttgcaaccgctcaacgaatacatccccc

SEQ ID NO: 570 - DNA, 1153 bp, Emericella nidulans
cctttgggcaccgggtcataatactaggtaggcagttattttaggtaaaaactaccacttcccttccttctcccccagaatcgcctcttaacgactttctcagctccagaccggatatgtggctcgccaccaagcgagcccagaaaatcaccaacataattcttcgccttgatgcccttttcaaatccaccctcccagttatccagaataccctcgataactttaataccagctcggtaaaggttctcaaacgcaggagtcgacgcgccctgctcatcagccgtgaaaagattctcgaacggcgactcgcccagatgaggcctgtcgaagtcggacgccgtgcgcattatgataatccggctgaagtcgactaggcccgccaacgcaccgcggagcagagactccagggtcgcgttatcttcctgctgcgtagtgcagtaaatccctttgccgttcgtaaatgtcttggtggtgttcgagaatgcctcacccagcagccggccggagaagtagacatcgctggtggaagtgtcacactcgagaacgagggggtcctgcgttgcggcgtcgtagataccgctgtcagacttgtacagcttcctgtatgccttggcggactcggagtccgcgagcgtggcattctttgcaaacgctgctgcaatgcttcgcagctgggcgtttacctcgaacacctcggtgccgtagatggacgacgggtactggtccggtgtggtggaggttgatccctgcgggaggtagccggttgacatgttggcataaatctcacgcgcgtcaaactcatattgtagcgctacttgcacagcaaatcgggcgaaggtgacagaagctgtgggaccaacttccgggttgatacctgcgatgccggcgaggaggaagtaggttgatgtcaggttaaaggtgttggagtaaagcagggcggataccgtgctggctgcgttaatctcgccttcgcctgtaatgagctggcaaacctcatagtcggcagagcagtggattgaggggaagaggggggaaaggccggggagagagatgttgtgtgatagcaggtcaaattcggggatgccgtgccagatttcggcttcaggagtgaactggacgttggttacaaagagtaacaaatcgatgtaagagg

SEQ ID NO: 571 - DNA, 1183 bp, Emericella nidulans
tcggggcttgtggctgtctacgtcacggttagggctaagtccgacctcagtctccacaccccttcggtgttaacagtactccatctgaagccagcagccgactggaccaagtcccctcagatggaaccgcagcatccgagatggaacaaccaggccatatcaaggcaatctaggctgtctcatctcggtcaggtagacctggagtcatattcgacacggaaactcgtctgggacgttcctccctcactcacgtccaaagcgtaatcaagaccatccaaactgataccaccatgaaactcccagttctctatattcctctcctcctatcgccacccgttgtctcgatagtcgcctacgagagcacgcttacaccaccgctgcaaaacgcaaatcacatcttcaacgcgatccacgcttcaatgcggtagttcgggtcctccatccaccacaacggcatgtccttctctttctcgcctcagtgcgaaagttacaaagctataccatggagacgcatctgcagaccctctgaaggaaataggctggatggcgtttgtgagccagaacgtgcaatggtctttgcacggccttcccgcaaacagagagacaaggtgacgataatagatatggaagatgaaaccgcgcaggagcacttattagctgatgatgatgataataaagagaagcatccctctggtgtgtccgggtacctgcacacctatgctacagccaaagacctgcgattactctacgtcgacggcacctcggctggaacatcggccattggacactcgacagtcaagaccgcattttgtttaacgacactatcaccgggggcatcagtagcgaggatcagcgcgcaagagctgtctgtcagcttgcgaaggatgaatgggaggaccgtcttgacggagtcattcgtatggcggccggcttcgagattatcctgtgtgagccggaagtgaatctggtgtcagtgcgggtcatgcccgtgccttctaagacgaaggacggggagcagaagcagatgcgggaccgcgagcatctacagatcgggtcaggagggaacggagggaaagcaggtaaagcaggaaaagcaggaaaagcaggaaaagctgctcccttccagactcgtgccagcttcatcctgcgcttcatcccctgtgatcaaaacagcgtggaagca

SEQ ID NO: 572 - DNA, 497 bp, Emericella nidulans
  unsure (1)..(497): unsure at all n locations
gccccgccgccccctggcttcccttccccccccccccctggcttctcttccctcccccggccctccgcgggctcttctcgtcgtcctgggccgtccccttctccgccgcttttgcgtgcgcggcccccgcctgccctgtctctcccggcccttgggcccgcctcgcttcccggccctcgccttcgtcccggcccgcttccccggccccgtggccctgtgcgcccccctctggcgttcccctcgccgccctccgctccccgcctgtccgcgcgttttcctctccccgcgttccgccgtgcccggcttcccgccggtccctctttgctccctcgctccctccctcctccgcccccccgcgtttcgtctctggcccccccctttgcgcccctgcgccgtgcgtttgcgcccgcccagccgcgtgcgcngccccgcgcgctgcccccggtcgccactcccgtgcgtccctcttgcttcgtccccgcctcttgtggccgtgt

SEQ ID NO: 573 - DNA, 2589 bp, Emericella nidulans
  unsure (1)..(2589): unsure at all n locations
nnnnnnnnnnnnnnnnnnnnnnnnnnnnnnnnnnnnnnnnnnnnnnnnnnnnnnnnnnnnnnnnnnnnnnnnnnnnnnnnnnnnnnnnnnnnnnnnnnnnnnnnnnnnnnnnnnnnnnnnnnnnnnnnnnnnnnnnnnnnnnnnnnnnnnnnnnnnnnnnnnnnnnnnnnnnnnnnnttataaaaggtctaccgcacaagcggacgttggcaaaaatatcaaagccggtaatacttccaaatcaaaacgcgagccgtaatgtctaatttggaggacgatggaaaagctgaacacgcttcattgacaaaagcgaacccggatacctctctttcgcagatcgagcaccttatgcaaagcgcaaaaggctatcaggcgggacggcaagccccgctggatgcagctgacgggcctcatccacgatctcggcaagctccttttcttctatgacgcccgcgggcagtgggatgttgtcggcgatacgttccctgtcgggtgcgcatttgacgatcgcatcatctacgggaccgagtccttcaaagacaacgaggatttcaatcaccccatctattcaactgagaacggcatctacaccccgggctgcggtctcgacaacgtcatgctcagctggggccacgacgaatacttgtaccatgttgtcaaggaccagagcacgctgcctgatgaggcgctcgccatgatccggtaccactctttctacccctggcacaacgctggggcgtaccggcacctaatgaacgagaaggatgaggcgatgctgaaggccgtcaaggcgttcaacccatatgacctgtacagcaaaagtgatgaggtgccgagtgtggaggagctgaagccgtactatctggagctgatcgatgagttcttccctaataagcagatcaagtggtagaacctctttctaacatttgtggctttggatggatttgtgttgatattctggttatattacgagttacgatttagctttatcttttgattctttgaatattaccttcttggacctcactgattggaggatctcatctcaaatcgagtgattgtatcttaactccacattccatcgccctttcaccgtgctctgtagatctagtagtagtataagaggaaagaagctaaagccttttagcttcccctccttatgcaggttagatagggaattattccccgcactccaatgctcaagcccaagctccgctgcctgtgcggtccactgttcaacagcgatagggtcaaaggtgcccaagccatgaagcattatggacgctagagctacctcccaggtgacttagttcaggcggacgagtctgtctttcctctcttttatccttataaggggaagattgtagctagaaaggtaagagatgtgcgtttccaattcataagattatgtctatcgacaatctagctttatacccataaaagtcaataccaatgccaagtcataattcattcacagcttattcttctccacccgccgtccattctcatcgaagaagatcttttcccccgtgatcagactctcctgcaacgatgcgccaatgcgcaccgcctgcacggccccctccagttttaagggcacgggcttgttctccaaaacagccgcagtaaactcattcgcttcggtaacaaatgcatactcaaagcggtcatagtagtgctgcggaatctccttcttaacgccgcctgcgtcgaacgtttgcaccagatttagctgaggctgcgcgttcactgtgaccttgcctttggtcccaatgaactcggacgtgtcctcctggcccgcggccatcatccgggaggcgtaaaagtacgccatcttgccgtcgtagaactcgacgagcccgacggcgttgtcgcggtcgttgtgcttgcgaagatccggctcaacagctgtgatgccaaccgcggaaacagagcggaccttggagtcttggccgaagaaccacagggtcagatcgatgtcgtggatggagcagtcgacaaaaatgccgcccgagaactcggcgtacgccacaaagaaccccgtcggatcgagcttatcacaggtctggctgcggatgacgctgggcgttcccagcgcaccagaggacatcttgttgtacgcatcccggtacgaagcatcgaaccggcgcgagaatccgcacatgactttgaggtgcggctttgcgttcgcggcatcaaggacggactgggagatctcaacgctcgtgctcagcggcttctcgcagaggacatgcttctcagcttcgatggccttgatggcttgttcggcgtgcacggcagtagcggaggcaacaatgacggcttcgaggccttcgtgcttcagcatatcgtcgtagttcttgtagagcttgacgccgtacggctccaggtggaccttagcccattcgatctcggtgtcgtccggtgtgctggcggcgacgagctcggcgcgcggagtgcgctcaaggaagttgagcgcatgccgcttacccatgcgcccgaggccggcacagccgatcttgagtcgtttagcggccattgtgatgtttttggaaatgagaaacgtttaggtggaagagagctgtatcg

SEQ ID NO: 574 - DNA, 1297 bp, Emericella nidulans
cattgctcatgtggtgtcatcaaggctttagaagagctggcattccagttgacattgttgggggacatctattgtgcctttataggcggtctctatgccagagatgcagatgttgtcccaatgtacggtcgcgcaaagaagtttgccgggcgtatggggagtatatggcggtttgccttggaccttacctacccgtccgtgtcgtacacaacaggccatgaattcaatcgcggaattttcaaaacctttggcgatagccaaattgaggatttctggttggagttctattgtaatactaccaatattagccgctccagggctgagtatcactcctccggctatgtctggcgttatgtgcgcgcatcaatgtcactggcaggtctactcccgcccatttgcgacgaagggagcatgcttctcgacggcggctacattgataacctcacggtagcccatatgaagacgctcggcgcagacgtcattttcgcaatcgacgtgggctccatcgacgacaatacccctcagggctacggtgattccttgtcaggcatgtggtcagtcatcaatcgctggaacccgttctcttccatcccaaatccaccaactttatccgagattcaagcacgactggcctatgtctcgtccatcgacaatcttgaacgggccaagaatatccccggctgtctctacatgcgtccgccaatcgaccgctacgggacccttgaattcggcaattttgatgaaatttaccaggttggatatgcctatggtaaggagtacttgcaaaagttgaagagccaagggtctctacctcttcccgaggaaaatgaagagaagaagaagcttcagcgtaccctggctcctcggcgtgccagtatctagcttggtcaacgtaccaattacgaagtcacgggtgttatcggcgctatttccagacctatatgtttgtgatgttgggaacagcgtgcttggcattgtattctatataagattttcagcagcgttggtacgatcgtatctagcacaacaatcaattgaaatacgaacgtgatacaagcaaattaaccgcaacatagaatcttttagtggagggtttacagttagaatgtgaggatcctgtgggatcgactctgaaaatgaccgttactgaggccgtaaacgaccgcatttccacccgtaaccctcaacagcgagcatcccgacgacatgtcaatcatctcgctgcagcaagttttcaagcatcaaccagaagaactcatctttatacgtagcattttctggtttctcttaatgacgt

SEQ ID NO: 575 - DNA, 1474 bp, Emericella nidulans
acacacaaaattgaataaagggaagtttgacgctgaatgttaagacacgtgcagtgagatggataacaagtcttaccgtgtgaatctcaattctcccagagcaagctaaatgccgagcgacacgatgctgtgttgcttaatgatatggaaatgtcaggtgacagctcatcctatgcaccagtacacagggtgaggttgctggctgctgagccacgtgatatatgcagcctggcagtgatgcccaaccccagaggacctgacccctcaatatactgagtaatcaaggattacacaagaagaggtgagatctatcgtcaacaagatagagaatcaatcgtcatatggcatccgatccttagtaggctacgtccgtgtagttgatacagcttccttctgccctttcctctcttagcattcacacacttaacaaacaaaataggaaacaacaaggccagtccagaagccatggtcaatcgatggatatctcttcaattgaaccaaggtctgcccctcctacgaaaccggatctgtggcaacgcgcttttgatgaccttagacccgaagaccaagaacttatcaagtccgtatcgatgccatcgtgcaacaaaaaaatcgaatgcaacggtgagaataacagttcagctattgtgagccgtctaaggatactcagtgagttagtcgaatctgtgaagatccaatatcaaaccgaccaagaaaattccaggattaaagaaccagcccagagaatcgtcaaggctgttcctaatttccagtcctttatccagaaagctgtggccatcgacccgacaggacacgcaactagcgtctgggcgatcgtatccctgggatttactgtatgtgcatattttccccttcaaaatattctagacaatataaccaacagagataactcaagataacgcaaaaactacagcactcagaaagaggcttggttggagtcttgcgcctccctcacaaatgttattacccggtatagcctcgtggaggacgaatatcgaaagaacccaactaccgacgaacacgttgagaccgctctcgtccaggtatacgccgcagtattaacgttcgcagcccgggcccagtcactttatgatcgcgggcgtgccgtctggatctggaagagtgtgacgagctacgcccgaagtcttgatttgagcattgcccgaatcaagacgagccggtccactatgaaccaactgccgattgaatctctggtccgggataagccctgtacaggccagttctcgtatgattgttgctgacttccggaatgacgagtcaaggttggcactaacgtcggtccgtgacacatataggaagctcgacggtcactgtgtattaattctctagcgaattcttctagtctaatactatctgttagtacaacgactctagctcgtgacaaagagcatacctggggattcacttacagaactctggaagtccattgctg

SEQ ID NO: 576 - DNA, 2271 bp, Emericella nidulans
  unsure (1)..(2271): unsure at all n locations
gaggtgtgacagacccttacttatcgcctaggcgaatactttctatcactctctagcccttggatggggggatggacagggaaccagtactttccgacgaatttagggcctagtaacagcctgagggggccagagcctggtgttctgttcagcagccctgcggtgcgtggctatagaacctctgtaatacctctgcaaagtccagtactgcacctaagatactattatcttatatattattctgcttacttttcttacctagagatcctcctcctagtatacctgaaatattattaaatacagtccctatcttcctctatagcttttattagacttgttaaaccacgggttggggcgggttttcaggcctagctgatccgcccacgcggtttttggggtgggttacctgaacagtaaaccgcccatgggtttagcaaataattctaacccaacctaaataacccaaaataacccagttatgcatatcattactatattacatagtgatctacgtagttaataaaatactgtatttaaatactgtattataactatctaagtaagaaaatataatctaaatacagtaatatacctattcagatatcttggcaacccagtgggttgctccgccgggctttggggcagccaaaaatatccaaaacccaatggattattagaagctcgaacccaacccaagtcttggcgggttggggcgggttggggctgggtttcgcgggttgggtttaacaagtctaaatagaccaagcttatagtatagtatattactattagttcagctgtgtatactgaccagtactctattaagctaatatagactttctagtattaggtaatattctgattctgatccagggctaccgccgcagcactaagaaggttatattgacctaatatatcagagaaaactgcaatcctatcctctttctgtcttgcagaagctctggctttggctttgtcatggtctggtttaatatcaattttcacaaatgctggtatctgccatggtggttgtggccttgggtcgatggtttccagggcctgtagtcgggcgaggtccattgtcttcagggtttcttcccgctacagtaacatattggtgcctctgtaacatatcggactgtacttaagaagagagcaggtacactacggcttcaggtatctagtcggctcttgcttgctggctgttgaaaaatatcgaatctgtggttgagtctgtgtgccaagcgggagctaaactcggcccgatggcgatagccgaagacggcccgcagacgccggaaaactctgcacgggatgaggctatcccaacagtcctaggtcggagaggaaatccccaagcagaaaccctataagctccagtggttgagtttccctcactggatgatagcaaaaggatcacaaaccagatgatcgccagcctggttatcagcctaaggaaagccgtcgcacaacaaaccaacataattgaggcagcccgggcagagatccgggagatcaaaacagaacaaaaggccctgaaaggacagaatacagagctccaagaggagatccagacactgcgcgcccagattgagacccaggcaaccgcaaacccacctcctaaatcatgggcagaagtggcagccagcaacagtccctacaacactaataccataatctgccaaccccagagagagctaaactgtatccaaatcagcacagctcggcgtacagaggaccacaatgacaaggccaataacaatactttcacgagattcttacctacagataccgcgaacaactatattagaactgccctagctaacacaggacctacaaaagatgttcaagtggcaggagttggcactacaaaaacaggctatataatcagattcagagatactcagtcagctgaaacagcccagaacaacacagcatggctagaggaactagggaataagtctaagctagtaaaaccccagttcagtattgtggtctactgagtcccaatagaagactttgccctggacagaaaaaagcaagaggcaattaagaagattataggggagaataatctggcagagaagggatttcagattaaggacattgcatggttgaagaaagacagactactaggaaggtctgcatctatagggatttagcttaatatacctgaagcagcagaattgatcatcagcaatagcctcctagttggacaaagatatattggcagtatagaccccaaaagattgtatcccancattccctctt

SEQ ID NO: 577 - DNA, 1864 bp, Emericella nidulans
tggacacgtctctcacaagtatgatcagaccccatagattagaggtcttgcgtttgaagccagctgtagccattcaaccaaaaggattggtctgacaaccctaaaggcctgtttttgtatccaacaggtgccggaaagaccacatgataggcagggttataatagggttccagggctggaggcaagtcctgctgggccatatagatcttcaccagggctgggccctaggtgcgttgcgaaacttgttcagtcgggagatgcttgcctggacacgccctcttacaaatatagctttacgaacatagcgttaaaaatctgggatctaatatctctcggcaaccttgcagtttcatcttctccgtgttcgtgagtataaattgcaactacttatcttggcgctgaagctcatgatccatatcaaaagtactttcgaccgcaacacgaagtgcgggtacagatctaccatgcgcagaattgatagacattaatgtatttgcagtgcctcaaggacggaacctaccacggcggttactacaacgacaagaagtagaatcccttataattctgctgatccatataaactgactgagctcgcagtgtctgcatctgcacccactagatctatgcatgcttcagcgaagcgcacaaatgaaacttgtaattgtttgggagagattgctgcggagggtcacgaatggtattcctaattcttgcttgcttgacaatagcaaaaacttgttttggctctctattttgcttcctctcgtggcacaagcagtgcttgccagttgaccctgtagattgctttgctttgcttacgatactccagatagatatgtccgtaagaactgggaacatactgcggaacagttactcagtaggaattttatacctgttgactaaaagtactgttcccagctagctcaagtcagcaagttgtaacttataacgtttaaattaaaagcctttcttgactgtatggccgccggtctgtcaaaagctttcatgtgaacagtttaatatacctcaagtatgaacctgtcaacgcttctcaacggttaactcctattagagaaataataacgacacttttcttttgagcctggcgctaatcctcaagcagccattgaggtattgttgcgagttgcaatagttatcaatgtactatctatctggaccatgactatcataaatgtcccacatggtgatctatttaatagtttgaaagcaattacctaatgattcttataagagtgagatactgtacggccaataaagaatctgaataaagtaaagctagcaaatttctaacatgagttaaattcctgaacttcgtgcgcggactacgcaccagcagtggcccttgaagctgggatctacgtcaacgtagttgatcacgttttgaccgccgtttagttcatccccattcggtaggccgtttgtgaggagactgccggagaacttgtagtggtcttcccagaaccagcacaagcagctggtgttgttacactgcttggtgaaactatacaatcaaaaacatcaccgcatcgcactaaggtagcagtttgtcctgcctgccattgttattcggcggcttaacttcaaaccctccatatggtggaaccgtcacaatagaccccacttagcatgttcttcttgactcctcaaaattccactagttaggctccctcgagtagacatactgataattgttactgacggttgtgtcttcatggaagcagagatggttgagatctactaagcgagactagaactcgataaattgaacgctacaaagccctcgtggaagaatgcgacatccacctcgtagttttagccatcagaagcagaaagcggttcttac

SEQ ID NO: 578 - DNA, 2843 bp, Emericella nidulans
agaaggtggcaacgggtctccctttaaacataccaccgcaccattttggcccgccgagtcgaaaggcgggcttggcacgctataatgggcaggattggacctccacccttttacttaacccccagcggccggacaattaatagttcgcagccaatgaacgtgacatgggtcccctcgtttccaacaggccatgaaacaggccggtaccttgccattgacatgggcggcacaaatctgcgaatctgcgatgtgaccctgaccgaggaaaagggcgcgtatacgatcgagcaggacaaataccggcttccaatccatctgaggaagggcaaaggggttgaattatgggagttcattgcagcaaaactcgaggactttctcgctaaacacaagctggccagagaggatggggaaaaactgccgctggcctttaccttttcgtacccagtcacacaggaccacatccggcatggggtcctgcaacggtggacaaagggttttgatatatccggtgttgagggggaggatgtcgtcgcacatctggaggaggtgtttgagaagaggaatgtgcccgttaggcttgtggcactggtgaatgatacagtcggcactctcatcgcgtctgcctacaagaacccagctatcaagatcggcagcatctttgcgacggggtgcaatgccgcctatatggagaaggtgtcgcgaatccccaagattgcagatcacggctccgagttcgagagcgacgccctcgtctctatcaactgcgaatacggcgcttttgataacgcacacaaggtcctccccatgacgcggtttgacgaagagattgatcagacctctgcaaggcccgggcaacaggcctacgagaagatggtagccgggatgtacatgggcgaactactgcggctcctcctcctccacttgcacgagtccagtgggtttttcaccgatgccgagattgaccggctacgaggctatggcacgatggattctgcgtctctgtcgcgaatggaagcgggaggatccgaggcagagcggatgagtgacgccaagtgtatattgaaggacttgtatgggattgaggcgaccgacgaagaggcaagggtttgctgcctcttgggggagattgtgtgcactcgtgcagcgaggttatatgcatgcggtattgcagcattgtgccggaaacagggcatcagcgagtgtgccgtcggagtcgacgggtcgacttttgagaagtactcgcagttccgcgaacgtgcggtcgatgccctgggcgagattctggactggcctgaagggcaacagcttgtgaagctggtcacggcagaggacgggtctggagtagggtctgctctgattggggccatcacactgaatcaatagaccattgtatagaatatagacagcgttgaatcattcgatgaccagattaggtggcaaactaatgatcaatcatactcctttggagaaatcctaagccggcgtatccactgaatcgatttattgggttaatgccaatgctgagcctggccttaatcatagatcatgtgctcaacattagacgcctggaggggttgatgcccgctctttcttccatttcttcttaagctaatctttgttgttgctcaattgaagatcgcttctggcgcgtcaccggtttttggcccaacactgcctatactctcgatcgtgatgggatcttaacgaaccgaattagactatgctaaccactctagtcccctaagtctttcctgggctaaaaaatactgaaattgctctcgcgtattgatttctgtgggcaggcatatcgtggggacgagatcatagaaatacaagtgtccttcttagcacctttattagataacgatcgctacagccagatttgacaccctgaccatgtgctgctgttcttcgcaccgggcatcaggtgagcaatggggctagtctagctctcacagcgcgatggctcgggtgtatatctgcgacccatttcattgtaacagggctacttatacaaggctggcacatcgacatcttttaaggccatatcaacttctttatctgtatgacagcggactgagatgggaaaaatcaaccctcgaaggaatcagtattatggggacagagtaatacaagggacggcctctggtgaataggtatctgtctgtacgtgctaccaccgtacctaggttgggacttccaccgcgcaaagaataggaagagcacctttcagcctgatccacatattatggctctaagagggtgagctggttacttaccattaaacgttatatctggacaaaaactcaggcctgcatatcttattcaatgtgcaaagctatgtagtctaatatcaaattctggctagaaaaaagtactataaaagaagcccaaattatgcatcggtcaccagcatgcatgtccatgaaggaatctgttcagtttggaaatatataaaaaaaatgccagacatcagctggttagggacatagtcgctaaagcagcctgttcaagcagccttctaacggcgatggttcagatagagtattcatcgatcgccttgattacctgcttggatgtgaacatgccgtgggcaattctcaacagcgatctctgcttgcctagggtgatcaattacaaagcagcactgcccagtctctagaacatgatgggcaatggtcatggcgtccgtatttttctgcttcgggaactattctgacagctactaaattagtcagaatttagcaccccaagagcgttagcccttttggctcactgggaagttcgacgtatttgactcagcgcctcacttcgcttctctatactttattgccatatcatct

SEQ ID NO: 579 - DNA, 2755 bp, Emericella nidulans
gttgggcatgttacgtggccagaattgtgcaacgcatagatgattaatatatgcaaaactcgttttatgtctgttctacgatggtatttttgtgcggttattgctccaatattcacaccagcctttacccagagtagacaataatcagttcatgaattaatttagatatttaagctattcagacgaggataagaggctatgtaagaacgtccatatgtgcaaaaatcatcgtgtcgaagaccgaatgtacaaaaagataagcagaaatcctatggtacaaaaagaaatttatacaaatccagaaccatttaatccttttttgccctaggcacccggaacagcttgtagaagacgattgctccgacggtgttgacaataacgtagacccagaggaggccgaaatcccgccaccggttattgaagtcaatactaagactgctcaggtactggttggtgtactccaagctgcagaactgacattgatcactgccttgcgcatccgggttgagcaagtaacccccattgacagaccggtaatcttccatatactcgcgacaggttagccccggtggcgcgaagaatgtcaagacctcattattggcgcagtgcatgggtgcatctccaagagtggctgatagcaaggaggacacgaggtatgtaagcggattgacacggtacatgaaaatccagaagccgggaagcgcatttggaccggcaagaataccgcagaatgcgtacatcatgatgaagaagatattggagagggcggatgccatctccgcactatccacgccggcaatcagcatgtgcgcgaatgaactggcgaaaaggaagaccgcccagatgataagcaatgtgagagtgcttcgggagtgaatggtgtccgtatatcgcgcgttctggtacaagccgacaggatagaaccagacgaggtagcagaagatggccatgatctaggcatgacgttagtgggagccatagaaggtggaagtcataaaagacgaagtgaggagcgtactgtattccacacaaactcgacgatgatgttggaaagaacaaatgcttgccatgcataagttttcgactgtcgttcccgcgactcatagagagttcgctgtgtgacgaaggaggggatgacttgcatgacgagctgaacgactacaaaaagaaatacaaagacaccgaacatctgattctgaaggccttgtctggtgttgtccgctttgaagaacgagaatccaataaagagggactgatctagttagggaaaagcaagctctagagactgggagacgacttacacagccaacagtcaacaaagctttcgaataaatgtaggacgggctgcgccagtactgctgaaacactcggcggccgacttgaaggagctgctcagagaacggtgctgcaaactcagcatagctagacttgtcattcgggtctgagactggcgatggacgattggccaactctcttagtcttgcaagttcacttcgtacttgctggtactcaggactgctcctccacacttcaggccagtcgatatctgtctgtgcccctggcgcagccccaatcacctcaagcatatgctcagctggattggcccctggaggacaagccgaaccaccattgcggacaaagtagtccataagggttcttgctccttggccaacttcgccaaaatacacagtcttgccccctttcgctagcagtaggagtcggtcaaacctctgaaataacattgccgaaggttgatggatagtacacagaattgcctggccattctttgtcaaggtctccatgaggttgcagatcgaccatgaggtttgactatccagcccagaggtaggttcatccaagaagagtagcaacttcggacgggcagccagctcgacaccaattgtgaggcgttttcgttgctcgacattcaggccctcacccggaactccgacaattgcgtcagcgtactctctcatgttgagcagatcaatgacggtctcaacataggctaacctctcagccctgctgtactgaggcggctgccggagaagagcactgaacttcaatgcttctcgtacggtcgacgtatgcaaatgcaggtcttgctgctgaacatagccggttttacgttggaaggattcatctcgagatcggccgtcaaccagcatattccctccaacaacgccgatcgtggtgcgactcgccaatacatccagaagagtcgtcttgccagcaccggaaacgccctatgaagatcagtctcaatccttgtgaagagcaaggctgcttaccatcagcgctgtcaaagtccccggccgaatccagccgtctacacgatcgaggatccgccttgtctcgcccttgatcttgatgtcataggtcacatcttcccagtgaaaaattgaagactgctgctccacacctgaaaccaggccaggctcctcttggataaccttttcgttctgcgctgcgggtgctgctatctgctcctcatcggtgtggtgtcgcttttcccgcatcttttgcgccttgcctctacggaaaacgagcacctctcccttggagcgctgagaagagaccagctcggatgtgaccaaatggcacatcgtcaagaaaacggtgagagcaacaatgatcccgaagttgcgccaacgatggctatattcgtagccatatgatgatcgaacaaaatcagcaccctgaacaacatccgacccaggcaccgccccaactgtcgagcagaccctgtcctggc

SEQ ID NO: 580 - DNA, 1924 bp, Emericella nidulans
  unsure (1)..(1924): unsure at all n locations
ttggatagcaacagccagtgtcagcaaataaagatctattggttggaaaatgcctaatcaacatatattaggaactatgagtctataagaaggttagtaataaaaaccgttttccttcaattacagatatactatgttcttgtaatatcggatcaactccctcttggctaccttctgtaaccgacaacctccattagcaaaataatattggagagaagatattccagtatattttgcagctagatatgcaagtattgctttatactccttacacataacctttggttgcctgctttgctcatgtacaacttgctcaaatccttgctagactgtagcttttttcttaccatcccaatgtatatttgactgccctttatattgcatgctatatctagttataagccactacttaatagattgcttccaggagtcctccatattagggtatgtgttatataaaacctacacttgctggagtagaggcccaatgtgtactagatcttttggggcgcaggctggtaaaggtggtagaggaaggaagctagaatttgccttatagagacttggctggctgcttgggagctctgatatatctggaagactatctagtagtatattctcagcattaaagagagagtctgaatagaaagaggtatataattgagatattataaagtttgccagtagaaaagcatctctatcaggggtaacaaaaagaccaagggaggctatagagagatagacttataagtattttctctgatcaggccttcatggtagcagacaacacaaatttgacatgcttaggaggtatattagatgctgattagccatatgagtaagccagcgcggggatggcgaggttaactgcggggatggcgaggttaactgcagggacggcgaggttaaccatggttaatcttactatagccgcatgaaagctgcagcaggaccttacttgattgctattatggtgcctgacctgattaccctgagcactgtactatacttaggataagctggcacataggaccagccaaagcctcatcctgggcacggtgcctggaatgagccttggttctgccactcctgaccaccgagtagcagagacttcttgagtaccctttaagaatctcagcatttttgaatgcatgttactcaaaataaatatatagattactattaaaattactagctcttctagatgctctaatactactatatagtactatactgtttatattagcttaatcaacaatttaagtggctatagccttacctgaagtataccagcagaaaatagaggcaaagtatatatataaaatatatatttgatttgttcaatatcctgtgttttaagaacatggctatatttaggaaaaatacttcaaagatagcatatatctattttaatagagactcctttttatatttcattctaatttcctatatttacagtgcaattgtcttcaaataagatgtctgtattggaaaaactcgaacgtgtgtttaaaatggacggtaataagtatttgtaagcttcataactaccatgcagggcgctcaaaactgataattaagcgagagttatgctagtgcggccacagtgaggtgtttttncttttttctttttttgccttttgttttttcgcatttgtacttctcttctgggggttgccctaaggaaacgaccaccgtttggatagccttttattctcctattatttaacttggcttattatgtggctgttctcttctccactttaaacggccattgaaggagaggttgaccgcaggatcgatccggtcagttgatttttctaaggtcttattttttctgcttagtgaggagattcaatgataatttttcttatacatccaactgtggttttgtcctccaacattatggccgtgccgttaaatg

SEQ ID NO: 581 - DNA, 232 bp, Emericella nidulans
  unsure (1)..(232): unsure at all n locations
gagtagtcaggtcgcaactgtaaaacggcctggccattaagcacgctgtattgattgtatacgagcagtagacgctataaagacatcnnnnnnnnnnnnnnnnnnnnnnnnnnnnnnnnnnnnnnnnnnnnnnnnnnnnnnnnnnnnnnnnnnnnnnnnnnnnnnnnnnnnnnnnnnnnnnnnnnnnnnnnnnnnnnnnnnnnnnngagccacttgtctacttgactgtcac

SEQ ID NO: 582 - DNA, 1727 bp, Emericella nidulans
tgaatatccttaatccaggtaagggagtgctcctcgagggtggtgttcagggagtctcggctcaatattataatccagaacagcgggagactctggttatattctgagaaagtctttccaagaagactgcataggatctcctactccttggggtcagcctcgtccagaccatcaataataaaacatgtcccctgcaatagaaccttggtgagatagtccagcaaaagctttcgccacacagtataagtattatcaggatcctcttttagacaaaactcctctgcatattcagcaaagcctacttgctgagtcacaacctgccatgccagtatttgcagtgccttgtttatagagcgcaagtctatattattattcctgcaaaagaatgatgcaactacaggtgcctgtgccacagacaacttccccttagagagctcagtgatgatctttgatgcaatatatgacttgcccactccggggcctccgtgaagccagagaataggctcagacctctcccatcaagaccaaagcttttcttcaacccatgcgccagaccctgagatctgattctcgttgatggaagagaaaacctgacttgaaccagagactggattcagtgcagccttaactctctgcagtctcttgcaatcatctctctgattatctctttctagtagctcctctgtattcctgagcgcctggtatgagaggttcaaaccatgcactgacactattatatactcctgacttgtcaactcccccagctctccaagcagcccactaatctcatgatcctccaagaatgtactctttgcccactttccaagccttgcctttaatgacctgcaacttacaagcttctggctcgctgcacaaaccctcaagatatttgctaagactttaacaatgatcatcttcatccccttgcttagttggacacccttgtacaaatctagccgcaaggcaaagtggccaagcttccggaacaagtctgaaatcatgttgaatgcttcactaactttcctcactccacggattacatacatcatcgtgctcatgattgccgaggctggagggaatgaggtggccgcgatgagactgccccatgttttgaacggatatatcactgtctgtattgcgtgtaatagcgggcgttgtttcatgcgaaaatcgtcaaaattgtccttctctgcgtccagctgccgcgagaggtcctctggcccccgcagttcggggagctcgccatcagctagcagctttccagtctgcttcgcataatctgcgcaggcggcctgccagagagctgacagcttgttgttggaggtaggtttcacttgcacggccatggtcatgtatcaagtcgtttgagcagaaagggagagaagatgaaaccaatgaaccacgcggcgacccctcagtttctgctgcttgttttgcagtgctcagctgcaccaagtgtctctattttcggattagctgctgcatccctggcgtatgaagggatacttggtcgacatcatcgtctttaattagctagaccccacatccgattctcagttacggccttgtttataatggactgacggggcttgtggcgtatgttctttggaatgtattcgtaaacatcctttagagcctgcagtgaccctacggtactgcattaaagggagtcttgattaagaagagagggcgatcatacttcattactccataatgactctacgttc

SEQ ID NO: 583 - DNA, 1062 bp, Emericella nidulans
cttaatttgtactctgtagtcccgggcgatggcactcttctattctttagattggttggcgggccacctggccagctgcattccgctgtgcaatgcataagcttcatgcgcatcccaggtgttcagttcgttgtctcgtaatctagagtggcggaaacatggataccagcgcaataacccgaggtgccaacacttcgggtcaacaccacgggtcgattccccgtgtgcaaaaataatgactaatgctttcagttgattagtgatccggacaaagaaacaagggtcagggccagaactccgtcattcttaagtagttcagtgagcagtgtacatcggcggatgacaacaagtatattagtcaaaacttagctttccaaggagggttagcccttcttggctgagtgggaagttcgatggtggatgacatgcacgtgataaggaacctgggcggatgtggggaccttcctagtgcaagggcctttcattagcgtgtactggggacctgcaagcctgattaaatcacaagtgggtttccaagattgtcataattatacctaaactgccttaagaagggtctaatctagtggaaaatatgatagatgtcaatttcaaacagtacatcagagcatgcgatttagaatcagatcagcctaacgcagaatacggaaaatctcagtgcaattgcttaaccgtgaactctgcgactaatgcaacccaatatgaccagggtggacatcatggtattactgctccccctgtaatgtttaatgacttttgccccttttgtacatttctgtctgtctaccttaatatgtacttgatcgggtgctgctgtgacgagattgccaaacgtcccgtccctgtaggccactgtgctcgctatctcgggcgagattcaacatccctagcctcacgacactcacgcttgccaattgagagacaacggattatgtctcaatctgacagtattgattacgtcaggatcaaagccatataactagtctgtgcttcttaacaatgcgactacagtacttgttctgtcgcaaaaaaaaaaaaaaagaa

SEQ ID NO: 584 - DNA, 986 bp, Emericella nidulans
  unsure (1)..(986): unsure at all n locations
taatatatactagctagcttttcttcttagacagctataaatataataaatttattttttttttttataaaataataaacagtattaattataaactttatataaaaatctatttttaaaaaaggatagttcttagaatcttttctagtaaaaaatctaatatctaggtaataagaataaaaatagctttatttatagagaatagatattgcataactataataataactaataaataatttcttagttataagttctatacagcctgtaattctatttataagttattattctttttttttaaagctattatttctaagtctatatctttatataaagctcctagagctgctataataataatataatatttttttcttttattattatagttaaagatctttttatactattattaagattagcaagcaattcctaatattaagggatatatttagataaatcttcctatctagatatactgtaaatataagaaggaattactaaaaaagaaataagaaaggattattattataaggaagtcttataggtggctcactgccttcaggacagtacaggccttggccaagtcacttggtctaaggtccttgtataggcaaagcacccataacagggcccttatatatacttataagtaaatataggcccttaaaggctatcatcttagacaagggaagctaatttataagtaatatataagcttatatatatattttaatagggatcaattattaattatttatagtctattaccactacactgacagattaataaagaaaatgaataataaaaatctatctctatatctatacctgctataactagagagactaaaatangttacttctattaaaaagctaataagtatagctatatataaatagtaataagatcagcctttttatctagctataatataatctagcctattattctactaagaggtgagtactagtaaaaactg

SEQ ID NO: 585 - DNA, 788 bp, Emericella nidulans
ccaaataaatacttgacaaggattttatgtcctcaccctatatactggcatatgtgcggaccatacctagaaggctatccaggctacagcctaagtccaagaccccaaccctattattgctaattgcccctgcatccgatgtgcaaaaaacctctttgtccttgacacagctactggcaaggtggtaagtctggctgtctgtgtactgaagcattgccgggcaaagtatcgtactcagtatactgaagggaataaaaagtatattcccctccctacaagcctggtccaacaggctttgtccctggtacagatgccctggacaaaggaggccgcctattaaacccttgagttctgtttcaacatcaatactgagctgcagaaggctaataaatagaaggcaagggttattacagggagtagatataatactggcactgtacttaaaatataccagttctagtgccaggtatagctgtcagtactatactacacctttcagctgcagaataagatctgcttgctcaagaactttgctctagtcccagtatctgagatactggtaggcctggataagtttaataataccctggctgccagtactgataataatcttgacttcctagaggaggataataataacaaccacaatatagaggaggataataataataataataataataacaataacagagacagtaataataataataagtaaggtcatgacactgtgcttgggtaaatataatatagatttcatttctttatagcaccctgggtagttattt

SEQ ID NO: 586 - DNA, 1946 bp, Emericella nidulans
gatgcctactcatacgtgcatgctccaggtaaaggagtgccacttgtaatcggcaagtgctcataccatgtccggtctgacaatcgagagccgatcacgctggggtgaccttctcatggtaccccacatcccgctgaagcgcccgcttaccagggcagcgatgcctaactaagcagtgcaactcgattagtaaagcccaccaaagtcatcatagtcttactgcgcgtcaatcaagccacttgcttccctttcttgacatcacacgccaagattgaaatgtaaaatggctcgcagcctcgcagccctcccaacggagataattgcaattatcgccggctacctaccaaacagtggcatcaagaccctgcgtctcacatgcagaaccctctgcaacaccgtccgcctccgtctagaccgcgtcttcctctccgcaaacccgctcaacatcgccgtctttcgcgccatcgccgatagcgaaacattccgccacggaatcaaggagataatctgggacgatgcccggtttctccaagtcccatacggagagttccacattgccgattcccgcgaggatctccggatagataaggagagcggatgtcttcaatggttcgtcgacgcatgtaaaaagaatagggaggatctacagatgcgcaagttcgcacatctggacaggggcaaaatgcccaaacagatcgttgttgcagaggagcaagcagccactgagctgcctctgtggatttgctggcagtattaccagaatctactgcaacagcaggaggaggttattgtctttaacaaggacgctcaggcgctggaatatggacttcgccggtttccggcgctcaagagggttactgttacgcctgcggcgcatggatggattttcactccgttgtacgagacgcctatgattcgcgcgttccccagggggtttaattaccccatcccacgcggttggcccagcgtctccagtagcgggacgtacaggcccagagcgcagccgtgggaggacgaagctaccaaaaaggactatcgcgggtttggcatcataacgcgtgccctggcttcgtatacaaagcatcaagtctcagaactgataatagacgcccacgcccttgacacaggcctaaactgccgtgttttcgaagagccaaatcccgaatacgacgatttagtgacgatcctccgccgacctggcttcacccgccttgacctatccctttcagtccgcggccaggagtggacaggttggccctgtttccgcaacggctacctccgccgcgcccttgccgaagcccacgacctcaaacacatcgccctatccacagacgtcgaggaggacccagcatccgataccactgttccagaaaccggcggtggtcgcgcacaactcgtttccctacgcacaatcctccccacggaaaaatggcactcgctccgctacttcagcctttcaaacttcctcgttgataaaaatgacattatcgccatcctttcctccctcccgcccaccctccgcttcgtccacattggcttcctctacttcgttgaccatggtggctcataccgcgaactccttgaggatatgcgtgatcaactcgactggcgcagccgcgaccctaccatccgtccagttgtttctgtggcgaagcctaccatgtatatccagatcgggcatgcgatctggcttgatggcgaggttagtcagtttctttacggggatgggccgaatccgttttataacgggggtgatgcggtgggtgaggttggggttgtgagggatgcgtttatggatggggttgagtggaggaatcggggatattaatccctctggtagattggggagggacggggattgggtggagatggggcggatatcgagagtactcggtacttagatacctagtcgtgttttgcactttctcgtaacgggattgagaatt

SEQ ID NO: 587 - DNA, 1533 bp, Emericella nidulans
ccctaacaactttttttcccggcctattttttagcatcctccacttcgggacttagagacggaggcttaccgcttctttgcctgaaaactagttatgggcaagctctgaaagttcctagtggagaggcacgatttgacagcagtcattgactttacaaaaaggttgcaacaccaaaggcaactctttggcctgaccggactatcaaggcccacccagcctaagcagaggcctctgcgattcacctgatgccgctgcttccatgagatacaagatctgccacatgcagctaaatgcgtggatcgtgctgcatatccttagaacaggaatgtaactactatgggcaggatatcaactactgcagcctatatgcagcagacttctaaaaatgcctacccagaccccatatgcagaggaatactgtcacccgcctcttaaaagatgctctagctgctatctgcaaggcaggccagcttgccttccaacaggagcagaagaaagcagaagaaagctctaaataataaacagataatacccatactacaaaccatcctacaagacagctcacccaggagctcttaaaccaaaccctgaccttccctgaactatgaaaatactataagctaatataggaagggggggcgctgtacatgacctgctactctcctttgaagcagatattattcttgtccaagaaccttggacaaatacagcaaaacacctaaccaagacccacctataatatcagctgttcagccccccgacctgatggactgctaggcccagaactctaacatatatataaagggatctcccagcctattccctcctagaacctatctttccagatattaccacaatctatacagcaggccttactattattaatatctattagcctcctaataacccagttgcccctgctagtactggctcaataccctctatactttctatactcctagaatatactctgccagagaacaccatcctagcaggagactttaatacctggcacctattctggcagctagatactgagtctcatgctgtcacacctggtgcaacaggactattagactagcttgatacccataagctggaactttgcctcgagccaggcacccccacctgtggaccaaacaccctagaccttgtcttctctaacctactactaagggccctagtagaagaccatctaaagactccaagtaaccatataataattagaataatactagaacaggaagagcccctgcctatatacaagcttagctctaccaactaggagaaagccagagcactggcaagcccacctgacccaaccctactaattgacctactagctaagcaactggtctagatatcccaacttgcaatacaaggtatattaagatacaatacttgcagactccctaggaccccatagtagactccagaactaacagtcatactatactaaacaagacagtaacaaaaccctgactataaacagctctggaaggctattatacaggcaaaggctgaatactgga

SEQ ID NO: 588 - DNA, 1222 bp, Emericella nidulans
ttcaagggatccaaaacaaccaacatcaagaggttgcaagaggtgagatgaatgtgaaggcatgcagatatttcacaacattattctccttgcatgtacgatcaaattcaggtgttaggtggcttccatggccatccagaacaaggagtcgatacccccccctagaacagctgtatgtagctggaataaagactttttgaagccagcgaagcctgatctcatctgaggtccatccattggtgcttgtttcaatcctccaagtgcctgggattgcttctttgtcaaaccatccctctatatagacctttcccttgaagataatagtggagggaactgaccaccaccccatagagttgacacatttaatagttgtaacccactccctgttccctggttgaataagccatggtttaccaggcatttcagctctagtaaccacctttgttgttgcaataagtcctatagcaaagccagtttcatcaaagttgtagatatcttcatcctggatcccctactgagctttaaccctctgcaactcagcaaactatttaccaataactttagaatcttcacaaagagctctttggcgatttatctttcaagcaaacctgcttttaatctctgggcggcgcttggtaaactctgtaacccagttctttccgaccagttgagggggggtagaggaatcagcttccaggataatttgtgccatatcttgtacttggaagtgcctggggggtgctccacatatatcaagtaatactatccatgctaccaatacctcttcctgacgcagggatagcctatgcctgtggttgcggagttctgcttgagattaaagtcccttcaaccgatcatatagggtttagggaggtagattgtaaatcaatgcagcttgacgaggattgggaatttttttattttttaaatcatttatcgcgcattggatcctgccctcttgctcgatcaattcttgttttgttttacgcgcttttcgtggcatggtggtcggttgaagttcgtggtggctggcgcgttcggaatttttggaggtttacgaaccgaccgggattcacgaaccgaccgggaattacgttaatgaactccttccagttggggttattggtggacatcgtatctgtagcttttgctgtagccgcattccctgattaggcatttagttttgctactcatagaaagaattttttctacttgctagtta

SEQ ID NO: 589 - DNA, 758 bp, Emericella nidulans
ctgctatctttcttctattatattagctatattaagcctgtccagatactgtcttcctaatctcctaccccctaatcttgataaggcttgcaaatcaagattatctataccctctaaggtatcagggagatttacagtctctctgcttgcctgattctgatcttcttagagtaattcaaggagatatcagcttagtaagtcctctctttcttgttctgcagattctgactattcttctgcttctgtaaaggctcctggcatctaattcaagccagaattgcctgagttcagtgttctatcaggtgtaggtaatagcagaggcaaagatggtatagtttttctggcagaatatctatatttctctgcatcttccttttgtggttcctcaataccagcttcttctatctcagttaattttttgtcatttctaatactctgcttattaggagattctgcttgtattatactaggtattatatattcagggagcttgatatctatattaattacttccctgttagccctgccaggtaatatctatatctctactggtagtataggtaagctaatacttaactcatcctctacaaaaggatctgatagattgtatagccttggtttattaaactaaatatctcttgctgtctcaactcgctgcttcttcaagttctattaaactataattgaggctataagcctctagaaaccttggaagctttgagctattttacacctttttactactgctgttaagaatc

SEQ ID NO: 590 - DNA, 1254 bp, Emericella nidulans
gagcaaaagcaggaaatgagcgctttgtggagtttctgctcaaccagggcgtccatgcgaatggaatcagtaatgatacacccctccccccaacaccactcattttgcagcagaaggccgtggtatcatcttcaggattctgctagctcatgaagcggatccgttgctcaaagatgaccttggcgaaacggccctgcattatcttgttagggctgtgatccaaaggaaaagtgaggtatcaaattccaaagctacgatgatattctccatgtgctgatttacggctttaacgggtggccgataaaaccgccgcgatgggcacattcgctcatccactctcgtgacgaaaagggtagaaccgcgctggatcacgctgaaaccgctggggagacgatggtgtaccaggaactctccgaagctaaacgtcgatttacaccgctccataaaatgctcggccgtctaagtcgcctaactcgtagggaacgagaactaatcgatatcgaattaccagtaccatacagtgcgggcccgtcaagccggtccttgtttagccgacattctcgcttatccaaagttttaacgttcgatcagttcgagaaagagatgaaggcaatacgtacgattgttggccagtataatgaggatgatatttataatatggatgaaactgggcttttctggtgtatgcctcctttaaggagtctatcttccatcaataggacaggaatctggaaggataaaagtcggatatctataatatgctgtgtcaatgcctccgggtctgatcgattaccaatcttggtgattgaacgcgcgtacgccacgagctcttcgcaatatcaatatctcagcaatcggggttcggttgcaatggaacaaaaatgccttgatgagccaaactatcatgcgagaatggctcctggaattctatcaacatattggccagcgatcaatccttcttacgatcgacaacctccctgcgcatctttctggtctagagccagcaccacctcctccaatgtacgcatctgctggctcccaaaggatgtagcgcccccgccttttgaacagggcattatcgagaacctgatgatatattatcgaaaacagtggttaagatatatgctttctcactatgcgaggtatccggttccgcttcaatctgcaacgtttttacattgcatacgatggcttgtacagtcctgacatcatcgtgtccagagctcaattatcctagcctgcttttatgcttac

SEQ ID NO: 591 - DNA, 2553 bp, Emericella nidulans
aggatcagtagtcagctcttcgcctgagatcttgcttaataaggacaagcaagaggccaccataaagttctctgaaaccatctctgccggttcgtcagctcagctcaagctgaccttcaccggcacgctcaatgacaatatggccggtttctaccgctcgtcttacaagacaccgcaaggagagacaaagtacatcgcctcgacgcagatggaaccgaccgatgcccgccgagctttcccttgcttcgacgagcccgcgctcaaggccaagtttactgttagtctgattgcggataagagcatgacctgcctcggtaacatggatgttgcttcagagcaggagcttgagggtggaaaaaagattgtcaagtttaacacatccccggttatgtcaacatatctggtggctttcattgttggccatctcaactacattgagactaagaacttccgcgtccccatccgggtatatgctacaccggaccaggacattgaacacggtcggttctctctagaacttgcggcgaagacactggcgttctacgaaaaggccttcgatagcgagttcccgctcccgaagatggatatggttgcggtgcccgattttagtgccggagccatggagaactggggcttgatcacgtaccgtattgtggatgtgcttttggatgagaagaccagcagtgcctcgcggaaggagcgcattgctgagaccgttcagcacgagcttgcccaccagtggtttggaaacctggttaccatggatttctgggacggcctctggctcaacgaaggttttgccacctggatgtcctggtattcttgcaacagcttctatcccgaatggaaggtctggcagacgtacgttatcgacaacctgcaaagtgctctttctcttgattcgcttcgcagcagtcaccccattgaagtacctgtgaaacgtgcggatgaaatcaatcagatttttgatgccatctcttactccaagggatcctccgtcctgcgcatgatttccaagtatctgggtgaagatatcttcctccagggcgttcgtaactacatcaagaagcatgcttatggcaatacacaaactggcgatctttggtccgctcttgccaatgccagtggcaagcctgttgaagaagttatggatatctggacaaagaatgttggattccctgtagtcaccgtctcggagaaccctacctcttcgtccatcaaggtcaagcagaatcgattccttcgcacaggcgacgtccgtcctgaggaggataccaccatcttcccagtcatgcttggcttgcgcacgaagcagggtgtcgacgaggacactctactgtctgagcgggagggcgagttcaagcttccagaccttgatttctacaagctcaacgctgaccattccgctatctaccgcacgtcgtacaccccagagcgtcttaccaagctcggtgaggctgccaaggcgggcttgcttaccgttgaggatcgcgcaggtatgatcgctgacgccggtgccttggctgcctcgggataccagagcacttccggactcctctcactgctggctggattcgacagcgaacctgagttcgttgtctggaatgagattttgacccgtgtaggtgctcttcgcgctgcttgggttttcgaagatgcccagaccaaagacgcattggaggggttccagcgcgctctggtcagcgacaaggcgcacacactgggctggcagttttctgagaacgacggccacatcatccaacagttcaaggctctgctgttcagcgccgccggaaatgccggagacaaaactgtggtccaggccgcccaggacatgttccagcgcttcgctgctggtgatattagcgccattcacccgaacattcgcggtagcgtcttctccattgttctgaagaacggcggtaagaaggaatacgatgtcgtgtatgatcgcttccgcaacgcccccacctctgatgaaaagactaccgctctccgctgccttggcgccgccgaagaccctgagctcatccaacgcactcttggcctggctcttggtgatgaggtcaagaaccaggacatttacatgccacttggtggccttcgcaatcacgccgccggtatcgacgcacgttgggcttggatgaaggacaactgggacaccctctaccaacgcctaccccccggactaggcatgctcggaactgttgttcagatttgcactgctagcttctgtacggaagagcaactcaagggtgtgcaaaacttcttcgcaaacaaggataccaaggtgagttcatacgtcttttttttttttttttggtgcatttgactgacaaaattatagggctacgatcgtgctattgagcaaagtctcgacgcaattcgcgccaagatcagctgggtccagcgcgaccgtgctgatgttggatcatggttgaagtcgaagggataccttccgggtaatggcaaactataagccagggatgaaggcattatatcaaggacaatgtcagcatacaatgcatggctacttactagtctaaaggaaat

SEQ ID NO: 592 - DNA, 1304 bp, Emericella nidulans
gtacgcagtcctcagctcctaattggagcgcgcggaagctctgcaacactaagcggcccatacttgggctcacgatcagcataaaagtcacagcgggccccgccatccatccatttgcaaccagcacaggcaccattccagtaaccaggaatccgtacatgctccccaaagacagagcgggtgctcatagaacatggctcacgagtcttgacaccacgcgaagcaatcaaaatggcattaacgtacgatggccgagcggtgcggacctaatcataggtcagtctgaactgatgataggtaaacatttcggacgagctaggggtaggcctacctgtttcaccgtgagagcgccaacacgaacaacaaactcgtatgagggaaatcgccacacctctctctgcacattgttatggcagaggtcgaacagagcccggtcacccttggcagtgagacggactacagcgtacgaataaccagtctgctcatcctggaacccggacacaggggtggtgaacttgttgagaaactgaccagcagttccctgtgttgttgggtcaataggcggcgcaggagggcattgtctgcattaggatctggattattggcagcttcagatggcatgatgacctgatcagagacagtgaagatcaggaggtagagatggagaatggtaagcttggaggaggatgctagagaagaacttggaagagctggcagaagccaggataggaagaaggaattttcagattggaagtgtatatatcttggcattggctgctggccctacagatgcctcccgtactatacatgaagatcaacaactcgacaaccacaaccattaaacccttttgcctcggacgacacaacatatcaagaggacgcctgccttttccaggggggaggacctacacttatgggttccttgtacgcggtagcctttttctcgagactcggccaatcagatgcctcgtacaagtggatactcgcttagcacggtccttatttctacccatacactctggatattacctttctcttccttagcaaacccttcttgtatatatggcaggatatagcttagaacaagcatatcgtcccctaacaattatctatatagatattaatcgccttgttcttgacctgtctctttagccaggcaatatccttatttatgtggttttactaattatccagttcctgccccgtgtactgcacttccatagtattaagttccctgcccataaaagctgttaacatctaaataaacccaaaaatgttgttttaaacccccagggctagtcaga

SEQ ID NO: 593 - DNA, 538 bp, Emericella nidulans
gaatagtacggtcgagtgtggcctgaaattctccggaagtctttttccctgaaatacttaaacaaaaacatcaaaaataacaagaaagcaatatatacaaggatagacatgggacttcctcccaagtgagcttgtttaaagtcactaagcttgactctcacaatgtttaggtagagaagagatcgaggagaggaactgagaagtcctcatcctcacttgttgaatcctcaaagtctgaatcatactccgcattttctcttgatagctggagtgtggagtactcatttgatctttcctcgaagtaagcctctttctcatcagtactatagtcctcttctccaagatcgggttcctcaaagtatttatcgatctcaggatctggataacctttaatcatctccttaagctccaggatagcgtagttcagctcctccatcttgaggtccaacttttccatggtctctccttgagctccatactgtttcctgagctccataagctctctagcaataggaccaacatccaaatggttccctta

SEQ ID NO: 594 - DNA, 521 bp, Emericella nidulans
tttataattaatcttatttttctagtatagtagtggttctttagctttattttatttaaaaaatgctaaatatttctagtattatcttagtagctttatacagggattaatttatctctttaaaactagtatcttctatatatttattaataatactataaatatcctaatatcttagctatagtactttttttttataaaaattcttttataattacagctaatatttatactatatctagctttgataagagcctctttataatacttcatagatagattctagtagtatagagatatagcttatctttcttagtctctaattttttattatattattctagccaggggaatcctaagattaagttatagcctagattattaggtattatataaagataggctcttttttttatatataccctaatatctagctaaacttatataatttattaaaatttttcatatttctagttactcccttgaaaaagttttaggtagataaatattataaatattta

SEQ ID NO: 595 - DNA, 1576 bp, Emericella nidulans
gtcctaagcatgctcctacaaccatttcctcgccccgagtgtttggagggtttgaagaccaaggtagccgttgttcccgagctcgtcaatatgtgcctcaaggccatttgtctcttcagaagtagcagcccagaagaaatacacgcggttgttcatgggtgcctcaccaaggcggcggcgggtggttcgtggttgaccgcgaggtattctttggcttgcgctttcaggagtcaactcagcccttacccgcatcgatcttccgttcagtcgttccatataacctgtcatcctctgcaagcaccctcttagcagtaattgcctgacctagcatgtcttagtagtgcccgcggattcttcctgaatggtgtgccaaaaaaaagacaaagccaacaatgtttcacattgaagagtcaaatcaaaagggcaacagagccagggagacattatctgttgagttcttcccgagactgatctacgcagatcagccccgaagtgtgtcgtcgtatctcagctcttcggcggctgaggtaaatgtgccgggcatttagaagcgcggctctccagttcagtagggtagtcgttgggatctagttcgcgtcccagcctgagcccgaaagtgacattgttgagattggattgaagacagaagtcgggttgcaatgattcttctgctgataagagatgctttggataacttgggttggtagacgcggataaacacagcactcaagagaatttgtgttatcataccagggcagcgggctgagccactggctacactaaccactttcacacatttctactatggatacactttcaaccttgtcgaagaaatcaatagctctccttcttgtacatctagcaagatttacaaacactgtgaaaacactcaatcactaccgggcagctccacagactgtcgcagacgatgttcagccagccaatccgcttcgtttgatttgacttcatctttctgcggtccccgtactcatcgcagcagcgctactcgacattgttgtggttaagtccgcataatactagtgagcgtcgccatggtagccatgcctgggtttgactcattattgacttcccacgaaatacggctgcaagatttccgagtactcctggtatgcaatacccgaagtaggctccatgttgaacatataatcaccccaccaaggcccagcagcccaccaaagggccccaagccatacatcactgttttcctcaagatactccagcagatctgcgactgcgtccttgcagacctggttgtttgcgcctgcaaactcaccgagcacccccagtttcccgttctctcgcagccagtttgtagcggctgtcacgcgttcgctgccgatagtagaactgacgcaggccgtgttcgtcccagagccgtcggagtcaagatactggtgcatctcgtagatgagcttatcttggggatcggtgagcgctttcatgttgtcgttgacatccacccaggtccaggctccagtccaagagtttccttccgcgaagatatattggctggtggcaccggaggcgcgaatagcgtctatggccgctgattgag

SEQ ID NO: 596 - DNA, 1265 bp, Emericella nidulans
tggctgctggccgcctcgagcttattgaatttcaaagtatttccgtaattttttttgtagctcgctcgagacgttctgcttgttaatggccttggcgtcacgtgctttgaggggtaacgctcatatgagctctggcggactacggatgagctgtgtgctctttccacatagttaaaacatcacaagaccctattaggtaatcattttggcggcggatcggagaaacaatgtcccgccaggaaggaacgtctgacgctgtcctacgatttctcgtcaaccatggcgtaaaaagccagatagaattgcgatgaggatctaaatatcttctaagtattatacttcatcttaaaacaggatgaggaacctgacatgtctggagccgttgcttaacggatgatagaggccaacggccaaagacaccacttgcgtacacctaaagcaaccgcgaccacacaatcatcaccatagctcagacttagctggatattatccaaaccagccttttgcgctgcagcaagtgcatcgccgtgtaactgggcgcgtcagcgtcgtttcaagaagaagagaaggcaacttaccaccacagacggagccccttgtacgcgcacaatctcgatctcgctcatcgccgcccctgcgcccttggataccgtctgtaagcatttgaaaacggcttctttggcgcaccagccactcgcgactgcggaccggaagctgcgatggctctgtagttgcagggactggcgttcgcgctcggtgtagttgcgctgcaggaagatggcgttctcgtgcgcattgaaactgctcaaggttacggtatcgacgccgatcgttgacggacgaggatcttcacgtttgtcgtgaggcctctggaagcccgtataaactggagtggacgcttttgtgacgcggtaggaattggtggatgaatccaggcatatacgagcagaaggatccagtaggatggagtgcatctctgcgggaccaaagggagggtgtgactgcacgcagacaatggaatttgtcatcatcgcgctgatataggctcgttcagctcctgcgatgcgaagttgccgtcgggttctgtattcttcgaactctggctctgagagtagaccaaaaagtatcgaggatgaacacccacgagctgcgcctccttctgtccgaaaccgcacgaattcagcaagaatggcttgatgccatcggtctgtattgaacggattgggaaacacagatgactgaacgatcggagagcaggatcgacg

SEQ ID NO: 597 - DNA, 1471 bp, Emericella nidulans
catatctacggtgtacatattcactctttgctgcaagcgggtcgcgccaaccacagtatttttatttgcactttcttcctgcatggcaattgtacatgtccagtacgaggattgtcacaatgtaagcatgccaggtcccaaaggctacggacggactcagtcaaatcggcaggcgcgtgtaagtaaccttgcaccgtcaccattcccacacagtgctccgagccatctgatactcctggagaacaaatgtcgaaccaagatataggtggcccagttgatcaaggagagaagatgggaagggaaaaaaaaattagaaaaatatgagctccgatgcggggaatcgaaccccgagctgccgtgtgaaagacggcgatgttagccgttacaccacatcggattacttgttatattgattaatttatttaaactgagtacaacctatattgaataactcaagccctagcaactgttggatgttgtgcatgagactcgttgaaagccgaaatagtatgtgtggatctcaaactatcacgactatacgaggtcaggcgcctataatcgaaactgcggcccgctatttgagagagtttggctgctgaatggcaatgactagtactctgtataatccgtaggtacaggtatatatatttgaccggataccggcacaacccagtttatggttttgtcttcgatacgtctaggaataagggcacagtgatccccacagccgatattacgctccatatcggcatagataacgtcgtactttccttttaaatataaaatgccttgcaatggtcgattgtctaccgcagtgaagccaacctggaggtttgatcatgggctagccagtgtgaacattgttctactgtatattggtacgttacgctgcagcatgcttggaccaggaaacttacaattacctccatattcttgtggtccgggacctcctccctacccttttacgggggtgaaacagggatgtgaacacaaggttgactatccatgcaggtagtaaggtctcttctctggggacgctacctctatctccacgtgagcactgaatctcagagacatacgactatgactggaaccgctgtagatagagtgaaaatatggtcaaaaggagtaccctgtactccgaacacaatgttctaatattgatagtccattagcacagctaattgtcaatctatcaatccaatgcaacccaatgcaatccaattgaatccagtcaaaacctagctaggagggccaggcctggttatgtcaggtagtttaggtgactcatcatacatacataaagggtttctctgcgaacaaccagactaacatagcacaacacagcaacaaacagcacacaaacaccccaactcccctgcttccagaaatcaaacaagaccattaaaagcaaggaaaaaccatggcaagccatagctacggcggctggcggcattgccggcgatcaaca

SEQ ID NO: 598 - DNA, 5316 bp, Emericella nidulans
aggtctgggtcaccacaaagctggacaatagatggcatacgcgtgtccaggaagctctggatatgtctctaagtgagctgggtatggactatgttgacctctatctcatggtacgggcgggtctcgtctgaaatacaagaggaagggctgacatgttcccacaggcattggcctataccagtcgacccaaatgactcctccacccagctggccgactgggactttgttaagacatggtatggcaagatatttctctcgcttatggctggattcctgtttctaagctctacagggaagaactgcaaaatcttgcggcaaccaaagtgcgaaatattggtgtgtcaaacttcggcatcgcacacctcaggagactgctcagccattcctcttgcaagattgtccctgctgttaaccaagttgaggtacacaatccaccagatacatgttgttcgcgtatcgactttctgacaacatagttgacaacatagcttcatccctattggccatcaagaaagcttttgcagtactgccgcaatcatgagatccattgtacagcctattcctgccttgggtctacagattctccgctactagaagacaaagttttgcttgaaatatgcaagagaaggaacaagtcaccgcagcaggttctgtacgtttcaagtccttatttagtaccatgttatgctatggtatgttgtccccagcactgacaattcaaggatcatgtgggggctccagcgcggcaccagtgtagtacccaaaaccgtcaacgctgctcgcattgaggaaaactttgatttgaatggctgggcactgagtgacgatgaattggacaaattgaaccgatgcaccacccggttcaagtcttgtaatgatgactggctgccggcaacagtcttctctgaagacgggcactgagagagggtggataccatgtcctattttcaagcacagtgcgactgggtgtcatcacacacgcatgaacagtaatttcttatctcttagcggaacaggctgccctctagagccgttatcccatgaactagtaccaaaataaactaagtaccaaggcattttgctcatgctgcaggaacaggacaggccattccatcagtcttgatacttgacattccctcttaagatggtcgcgacaaacaagagttgaataacatatttgtctccaaaggcagcaattacgttcgtagaagaaaccaatcctcgtatgttccagttcatttgtctctggatgtcaatccctgagccaatatggaatacatacgggttccgcttggtcccaacaagtaatacagccacccgttcaaagatactagctgccctgaagccatacgctcaccgaaccagagatagagccttgaccatcaaagttctcgacacatttctccgggttgacctaaatcccggcatagatctatgatcttcgatataaataaggatagtataactacgatgctgtacttcagcttatgcagaggcaaccgccttgcttaatcgtgctgataaacctgtcgatcgggcctcatgaccaacagcaagtggcctgaataaggatataaaatagaacaggacaaaaaacaaaaagaacggctccatccgcggatcgaacgcgggacctctcgcaaacaagagctgtagggtgaaccctaagcgagaatcataccactagaccaacggagcttcgtgttgtaagggttttcaactatttagtatataagcacctaatgaaatatttatacaggtcctggaagtgttaaccatcgtgcgtgattctcgaggagttgcttggaaactataaaggctttatataaccactaatcttattactcagctcccaatgtcttctaaggtgctgctgaggcgtccataagcagcagaaggcatggatgttcgaggttaaaacttctatacaccgcttggccaccatgctggccagatcaggctcgtaaatcctctgagctaactctaaatcgatcatgcctccttcctcctttggttagcacattcaaaaaagggatagccgacttagagttagcttcctcccaaccttttctttccttgttcttacatttcgttacgacaatacgttcctgtctccagaactttaaatacataactagttgaaatcctcttcaaatattttcaagcactagaaactcaagcctcatactaataagaaatagcgtgtaaatctaatcttagactattttcctgggttgaaagtcgaggtaaaattgaggaagatccatttctgacaagtggtatatatttcagctaactcgaagtcggccttactaactcgggctagcgtgcttgagctagcgtttcaagagtggtttagccgacttagagttacaaatttaccacgtcacttgtattccttgctagatcttttacgagtcagtcgctctgccttgaaggtcatctggacttggtaaatgttgtgaggtaattctaagtcggctaagccacttgcgataacactagcccaaagtattaaggtgacttcaagtttgctcagaggatttaccgagttacctgcgaccacttagcaacttagcaagccacactagggcctgccttgttttagcgtcatccctagcagcctgtatatcgtagtgtccatatagcaacgctccctagttgctcgcacaggcagcacatgaatcatatataaaatagccctaaatggcgaattgagctattcgcagcctcagaccctccaactgctctccaattcattgaactataaaccatcccatcctatttgtcctagggcagctcaactccactaacgctcctctttcggagacagcttgacgagaggcgtgtcctagcgatgtgtagacgacgagtcaagacattgatttcggcattgaagccaggtgcacagactccggttagcaggggggcaatgggaccaatttccacgacgagtggcttccatcttgatgctaggtcagagactgcttttttcctgctcgatgggcggtcagctggctatggagcagttgcttgcgtcggttatggtcaggttcgaggttatttccagctacctacgggctgattatggttgttgtgcttgctctgcgtttactgttagctcttgtctacccttactaacgggaagtataggaggcgcgagacaaacattggaccctacccgaatgggttcttacagacgtctacgtcttgagacgcatatgcgttcggtaaagcaacctgaggacgcgaccaggccgagcacaatgccagcgatcaggatcaaggcgggctggaccattgccacaacctcctcgaccagaaggcgtcgcggtgggctttcagcggttaggctacagagccagatctggtggtaagaaacctacagaagggggtaacgtggataatggaggcgacagatagaggtgccggcccgtcatagcgaagatagtatcagccttgggctcatgttcggatgatattgtgcatgtgaatgagagttcatggtgtgtgtctattcgagtagaaaatgacaccgattaataagtgctgcttctatggttagggcattggttaaaagtcggtttcttgcccatatcgtggaggaggaaccatgactagtgaaatgtggcccctaagttcccaggagcctatacctcacacttgggctgccgtctgctgtatcaacactcctttcggtatcaccgaccaagaagggaacgtagacatttgtattgacgtgtctggtaagtaaggtgactttcgctgcgtctggtcaaggctggaaatgatcccttgagcttgtgtctcttatgcggattaacctccatagcgaacgacggaattttagtaacttagtagtcgtctcgatttgttcatagtccaggggccgtttttatgatcggtgcccactgctagttgggcttagccagctaggcgtagtgttgtgcgtttattttccagtcctgaaagcccactggaccttgatgcagtacagatacccttcagcagatggcagagggtgggaaaacgctatggatgatttgcctttgacttggagctctcatagagactcgtatatggtactttccgcatgctcgtagaatgtctgttcaaaatgttctttatatctcggttctatgctctcgatctgggtacgcaacattatccactcctaggtagagtgtgtgagcctgccacccctgtcgatggcagggccaatgattctaaacggaagttcttaaaattgatctcctgcgcgagggctcttgaaccctaccttcataccgcaggtaagtattggcagaggcggaggtgcaatactgggttggtgtagaccctctctagcccggaatatatttcctgtcatacggctgccgaccctcttatgatttccaccatccagccttaggtggacaatcaataaaagcctagcctagcacaaacatctgccagctggttacactttttttcaacgccaaattttctccagggcgtttgggatatgccatatatgttattcggctcataatggcaaattttaaaacttcagagcaactgcgccctgttggtctagtggtatgattctcgcttagggttcaccctacagctcttgtttgcgagaggtcccgcgttcgatccgcggatagggccgccaacttttttcttcccaattcgcttagtctatgcctaggtttgctactcgggcctgcggacgtagcctttcttgtggacctggggtattggtcccctcgtcgagcgtgcttgtttacggtgcattttgttgaacacacgtattttttaagccttcttggtctagtgggaccattcacagaagggttttccgcagctgggctttcagttacacgcaacactgaaattttattgtagagacttcagatttctatcttgcggaaaacatcaaatatatgaggacatggagaaaacacgcagggtatgaagaaacgcaatatacattatcgtaagtcatggccgccagggacgcgtggcaataaacaagtctatctagtatcacaaattcacaagtttttcagcagggtccgtatctttgctcgactgatgggcttcgtgaggaagacgttaattccagaagcaaacgcctcatgctgcgcatccttgctgtctagcccagtcaatgccacgatcgtagtgggatgccacgatggcctcaactctggatgagcgtcaaagtacttgcgttcaaactgtcgaattctctgacttgcctcgaatccgttcatgaccggcatggagatgtcaatgatgaccagcgcgaatttgccggggtgttcttgg

SEQ ID NO: 599 - DNA, 1629 bp, Emericella nidulans
tgagaattcgcggccgcataatacgactcactatagggatccagaatctaggcatttgttggggagttgcaagtacactgagctgtttgcaatgagcgatggcatcaagaaagatctcttacccgttgaaaatgagacataacgagaacagcaactgggcgatgttgctacccgtatccggatgctcgatcccagcaatgaccatggagctgaaggttgacgtgaacatcatgaaaattaaaattagcagaaacatcgtgcctcctctctcgaccgtttcgccaggaccggcgttgcgatagagcccaatgggatagtaccagcagaagtatgctggtactgccatcaagatgttccaaggaagctctacacagatactggccatcatgaaagctttccacgaatacgccttggatggtctctcccgcacctcatacaacgcacgctgtgtgacaaagtacggcatcatctgttgaacgaggttgggaaagataacaagtaacatgaagatggcaaacatttggttctgcattccctggagacttagcggctctctccaaaatgtaaatccaatgaaaataggctacatcattagtttcctttcacgttcaaagcatagaagggaacataccggaatcacacacatggtggccttcgaataaatataggatggactgcgccagtactgctgaaacattcgctttaggcaaatgagaaactgtgaccagagcggcattgcgaactctccatactcaggagttctcggaggctctggcttttgtaagagctcggccttcatccgtgctagttctgcgcgcacttgctcgcgttcagggctttggttccacacttcagaccagtccctgtctgcatgagagcctggcgccgcaccaataacctccaacatccattcggcgggattggcattctttgggcaaggagtggaacctttcttctcaaaatactcgatcagagtccccatgttctcacctagctcaccaaagtatatggtctttccacctttggccaggaataggagccgatcgaattgctgcatcaggatagcggacggctggtgaattgtgcataagattgcctgaccatgatcggcgagcttcctcattagcgagcaaatagaccatgctgtctgactgtccagaccagacgttggctcatcaaagaaaagaagaagatcaggtttggctgcgagttccactccaatagtaaggcgcttcctttgctctacgttcaagccttcccctaggataccaaccacagcctctgcatactcttccatgcctagcatcttgatgacttcttccacataagccagtttttcctttcgtggaatgctggctggctgacggagcatcgcgctgaagattagcgcctcacggacagtgctggtctccagatgcaggtcttgttgctggacgtagcccgtcttgcgctggaacgagtcatcccgtaagcgtccgtccaccagcatctctccggtaatcacacccatcgtcacgcgatccgctagaacatccaataaagaggtcttaccagctccagtgactcccatcaaggctgtcagagtccccggcttcacccaaccatcaatatgatcaaggatacgccgat

SEQ ID NO: 600 - DNA, 3715 bp, Emericella nidulans
gagaggataagtgaagaaggaagaagggaggaggaggagagataaagaaagagaatgaggtgtgaggaagagattgaagagtgagaatctaataaagtgagaaaggtagcgaggaagagaaagaagagaaaagggagggtgaggaagaagatattgtgaagtggagaattgaaagggtagtgaggaataggtatgaaaaggagaataattgagataaagggaggtatgagagttagggagtgatcaggggagggaagagaagagaggtgtgtagtaggaggaagtaggaataagagagatagtggtgtgaggaatgggagaggaaagggaggggttgtggaaggggaaaagagggaatgggagatgaagagtataggaaaggataagaggagataatggggtagggaaaataaggggaaagaaatgagcataaagcaaaggattaaaaggtagagtaaataaaaagtaccacccagagtgggattaaaatagcgtgcaaggaaataggagaaagcttgatgattcaggatggaaacgccttcataagtagtaagctgtgggagtgtttctgagaaaggtggcgggaggagttgttacaggcagcataaactcgtgaaaaaagtgctcgttaggggcagcaccgtagtaggtatcatcggcgccatttgtcctagagcacaactcacggcagattgctacctgggcagcaaggcccacgattccaacacgaattttatcatcgataagtgtggtgatagtctgatgaatgtcaccagggtcggaggaaagcagtgagccgaaggcaatgaatatttctcgcgttccatggctgggggtatggctggaatggcacagtcgttagtacgcgtcatggagggaagggtgtctcttgatgtgaaagaaccctacaagagtgcacctctggccatttcaagcccattttgcagactaggaaggcccttcggatcctgactccttaaatcctgtatcgcgctgatatgttcggtcggatttccgctcatatcactgatccgtagcgcaaggccatctctcagcccgataacaccaacctgagagataggattctgttcgaagaattcccttacaaactcttgggcatatcgtagtgtcagaagataccgcgttggtcgtaggtctttctccatcatcgactgtgatagatccaggatcaatattatatggcgtataattccgcgctgcagtggtgttgtgtcctttagaagccttcacccaaccatcagcaaagcgccataatgcccatacttgtgacgcgggcgatgcttgagacgaacacttgctaactcacctctttctcttactggcttccaataaccctcccactgttgagctgatcgtgccatctgctccttcaaccagggtttcccacgttcgcgcaagctcgaattccgctccgcccttctgtttcctccgcttcggagcctggccgacggcgcctcgcgtttctcgaatgatatcatcgtccccctcatctcctgagagacctccaatatattcatcatcagaatccgccattaggtgtacgcaattatgtaatgaacgaagtccgggttttgtcttggtgatgtagggtagactgctatgactgtgtacctagtaaggatcggcagagaaaggtccaagctctcccgcctgacgtaccgcggaattttctcagtaagttcgatacttgagtatatgtttggacgaaaccagtcagttcttatggcgattctggggaccgtaacttttatatgaaatcattatcttggtcatatcagtttcagaatatctttcctccggcgatagccgctgaaagcaattagatgtgggggagacgcagcatcacgtcaaccagatgcaccgggctccgttgcccaccagtgcctcgagtttatcgacccctccaaacactatcgtctctgtgccgccctccctcgtcacacccgatctttcgctcccgctctcatcaattatcacgtacacttccttatctgcacaggcccgttatacctattatctccacaaggcagtgctcctctgagattcgagcaatggcatcaaaggacagagatattcttcccaatgtgtaagttattatcagcgaatgagcgtggtgagcctaattgaaatcatagggtcaaacctgcccattatgacatttccctcttcgacctgcagctcggtggctcgtggagctacaagggtatagtcaacatcacttcaaaggtctacagtcccacaagggaagtggtgctcaatgcaaaagaaattgaagtgcaccatgcgaaggttctaggattagacggtaagtggtatttttatctcgctaagtcatgatatttacgcgtatggatttaattaatggagatgctacttcaggcgtagagttgaccaaaacgtctgagatcacctacgatcagaaatcggaaagggtgacaattaggttccccaaggaactccctcagtccgaactcgtcgtctccatatcgttcaccggcaccatgaataatgccatggctgggttttaccgctccaaatataagcctgctgtcgagccgacgtctgacacccccaaggaaggagaattttattatatgctgagcactcagtttgagtcctgtgatgcacgcagagcatttccttgttttgatgagccaaacctcaaggcgacatttgacttcgaaattgaagtgcctaagggtcagacggctatcagcaacatgccagtcaagtccgaaagggagggcagcaagcctgagctcaaagtggtttctttcgatacgaccccagtgatgagcacttatgttcgtattcaccctccaccaaaattgacctcacactgaacacattttcctcttctagcttttggcgtgggcaattggtgactttgactacgtcgaggcattgaccgaacgtaaataccagggaaagagtattcctgttcgtgtctatacgacgaagggacttaaagaacaagcccgctttgctcttgaatgtgcacatcggaccgtcgactacttctcggagattttcgagatcgaatatcctctgcctaaggcagatcttctagcggtacatgaatttgtaagttgtctctcgacactgccggaccttcataatgacctttcgtgaaaaatataggcaatgggagctatggaaaactggggtcttgtgacgtatcgcacgactgccgttctgttcgacgaaggcaaatcagatactcgttataagaatcgaattgcttatgttgtcgctcatggtgagtcaagcattaccttaagccgctctccaccctagctaactaggctattatagaacttgcacaccagtggtttggcaatctcgtaacaatggattggtgggatgagctctggctcaatgagggctttgctacatgggtcggatggcttgctgtcgatcacttctatccaggtaaggaatccatggccccctctagcgatcacagctgaaagtatctaataccatggtagaatggaatatctggtcgcagttcgtggtatgtacttctagtggtgattcaatgttgaaagtaaaaataatgacagctgacggctgcacaggctgaaggtgtccagcaagcatttcaactcgattcgttgcgtgcatctcacccgatccaagtacccgtcaaaaacgctctagaggtcgaccagatctttgaccacatcagcta

SEQ ID NO: 601 - DNA, 3305 bp, Emericella nidulans
tttttgtaaacgttatgcgtgtcggcaagacgaccgaggtcgacgccttgaacaacacggacgagcttgacttcggcggtgcgggtcgttggatcatcaaaagacatgatcatgcagccaggcaggtagagaaattggccttcgacctcgagaacccgtgcggtcatcttcatgtactcttccatacgatgagttggggctccgtagcgcatcagggctcggcacagctgcataatataccgctggcgcgcaaggatctcggcaatatgcacagtcacccggatctcgtcttccagtcttgtcttgcgatatgcttttctccggcccctcttcggggtcatcaatgcctccgcgggtgcaggtagagtagccgaactcagattcatcgacgccccgaccagcgaggcagtcgaatggtggttcggcttcttgtaccatttcagcttttctttcttcggtgtcgcagcacctgaggaaattggcgactcggtatcggactcggcatcgctcacaggcgcactggtgctacctgaactctgcacagcctgaagtcgaagcagctgcgacagaatccctccgcctccaaacttgccagacccgtaccaggagtctggacggagcccttccggcgtgcttgcgccggaccgcgcatacgccgaccggggccgccggcgacgggcatggctctgggtcacactgcgcacgagacggtgggcctccgcgctgggcagcggctccgcgggcgcattgggatcaccggccttctcctcatcgtgcggccgcgagcgatgaagcggagggaacgaaccctccaaatcatccggcagcaaagaagcgccaagatcgccgccgtcatcgtagacatcccggcccagccgttcgcccagaaacaccgtcttcttacgaatcagctcgccggcgtggcggaaacgctcgcgcacagacatattgcggtcaggagtcgccggtgtaccttcactttggccgtcgacaggcttctccttgagctggcccagttcatgaattgggatatcttctcgcgagttctgtcggctatcggaatcgggcggggaccgcgagatcaggtctgcggcggaagcctcggatgcattggcagagaccggatcatagtccatcatggaatggtaggaacgaaccgagtaatcagagtcattgcgtagaataggaggccgggtcacggcaggtgcaggctcggtcgtgaacccacggtcgtcggcctcgcggtagctgctgaacgaccggaaccgcacacggttgccgcgatgctcgccggtaacattgacaggcggtgccgtagcaggcagagctaaccctgcatcaaccggctcattgtcgaggtcgaccccagcgggtactggattggggtcgtccaaggcctgtgttactggagaggtgttgtgcggggtgagcggttcataggaaggacggccttccggtgtggacattggcccgacgaacggttctgaattctcagcaagatcaaactactgaagcaaagatgaaacagaaacggctggctaggatagagaaaaattcaaggacggggcggcgatttatgctggaggggtcgtgagtgttctagaaggcggagtctagaattcgctatcgagttgcgagcggaccacgacggccggtggagagctcagtcccagacttccaggcacgaccaaaaatatcacggtctagactttgcttgcacgatcgcgtcacaagatgaacagacacttgaatccgcaaactcgactgtctcgacagtcgagaccgtcgagccccgcgagacccagtgggggttataacacaacgatcaagagcgtcttgagcgtccaagagcggccaagacgacgcgaaagccatgacctcaccgccaggatgattggagcgccgtcaatgagtgacggtggagttcggatggtaaagggattgatagactatggaggtgttatggaggtgtgagctgacgaatgtggactgttgagtggtgaatcacgcccaattgatatcacgccgggctattctgccacacccagccatagtttctgccatgtgctcccagaaccctgcctgcactacatcgagtcacactagaagtaacgcggctatttttttcttttttttttcttttactttgcccctgtggatcccacgctgacgcttgtacgggctttttatcgcagccaatcacagctcgggatttgttctcggcctgctcgccgccggctcggcatctgctctgactctttcacaagccgagcagtccgtgtgtctgtatctcaatccattatcgatccagtatccactatctgggaactggagcagaacaggcagaaaggggttcgtcgggcatcaaccatcgattttctcgatatcaagagctatccctgagtcttctgaccagctttcagagcggttgccgcggtggatgtagatatccacctagatcggcagtctgcatagccatgccctgataatcatccatctctcacccacccggaagtctaatgcccaaccgcgggccaatggtgctcagcgagttttctgctcagagtatgtgacttggacgccggagtagaccagtttttcattctaccaacgtccatcttgacctccttttgctgtgccgtctggatcaacggaccacacgggccaacccgaacccaccatgaggtgatcatcgcgaccaccagtagctcagagctcgttttgtttcaattcatctctcagagtagtctcgagggatatttgcgagtgagatttgccaccttcagctatacgctcagttacagtcgacgaggatggtgtgatttgattgatctacgtcacagtgacgaaaccaagaagcggaatgttctccccggcgtaatggagcgacttgacacttccgtctgtcaacctgtcaaggtgatgaccacatttctgaaacagacccattggagtgaaactgagtcctcggaattggtgtggctcggcaatgcaaatcatgagcaatgcgttaaaatggttgaaaaactggccgccaaccaatttgatacatgccaagagcgacttgggagagggatatgtaacaatatgtcagataatatggaagttgctacaataccaatacaacaaaggtcaatcaggcgtatcggcaccagaagggtgtggaaacaccaaagttgatctcaaggctgtttctaagcactttcacctggccatcaacagcagtgatttggcaaaacactccatattcgaaatatgatcgaaatatgaaggactacaccggaggatacgagaaatgccagccg

SEQ ID NO: 602 - DNA, 1630 bp, Emericella nidulans
tgctggtaggtcaatcattaatcagccacttgggaatcacttgataagtagttaacaactagctaggcctggctcgatatcttaaagagattgatccctaccatcgttccctattatggcaactacagagcatcattattttctgccgggtccattttttccggactattactgagattgtcagtaatgacaataaaggaacaggcgtgtggagtcgcatggcaagtctggttgattgtaaatcagaggaggattatgatcagttatgtgacttacttgcaggtaagtgtttcgtaaatatttgggaggtacttattaacaatttatcctagcatatgaggacccaaaaattcagaattgggctctccataaaaagaatgcagttattaaagctgggcttaacaaaaactgctctaggattccatcatctttgtatgattctatatggaatcatactaattcagcagagcagtcacaccataaagcaaatgctggtggtaaacagctttcattaattgaggctgttcagaagtaagttattggcttactaactacttcctaaccacctcctaatcacaaactaactacttgcattaatatagctctgcaaagcttgacaagcaagatattattcagtatcaaaaccgtgactactttggagttcatcactcgtataggacagcgaatatggaagctaattacctacgccatttagctcgtgaaggtaggtatcttctctatcaatatattatatcagcaattaactattctagaatctcgaaaacgccgtcggtcatcatcagcacatttatcttcacgatctggtcgtacgtcacgatcacgaccaaggttaatccggtgtgtggataatatctctgccaatgcttagcaatcacttagtatccacttgctaaccaccttataaatggttaggtcatcttcttcagaaagccttataagaccctcagaggatacattatcttttgaggaacagcggcaggccttggagctggagcaaattaagatgaagctgaaaaaagaacaggaagaaattcgggttttgcagcttcaaaatgaggagaaggaattagagcttatggaaagacggaagaaactgcaggaaattgattcataactagctgtaaactaactggtaacttattagagaacttctgataattcaagctccataacgcctgacagaactctagttactaacaagatgtgtcttaattctcgtcttcgtcctcgccttccctagaacattctcagaagaccgagtgctcacggtttctgatcttgcacaatccttacgatgacatttttgcgggttgaatggccactcttgacttttgcgctgtaaaaatacacggtgtagcagcctttaagtcttacggatgacttcgtcatcctttcgggcagaagaggccgacggtacttgacggttaatctatattttcacgttttatttaggcagcgggcttttgaaagcttcttaattaaataccttggggtcatcccccaatttgggggcccccttttttattttttcggggcggttggaaggtttaaaaaacaaaccccctcagttttttccgggattaaacacaacttttttttctaaagggtg

SEQ ID NO: 603 - DNA, 1747 bp, Emericella nidulans
ttcctcgtggctgcaaaagtgtatttatatatatactaacctacaaacgtcgctgagtagcagggtattttaccgggtcgcttaagaattacgttgaattatacgtctgaatatatatcttaatatattgtatccatagagcaaattggccacctccgctctctattttatatttataagtaatatttcgggcacttcatcacccaaattaatgccgttctctatgaaagtaatttgaaacttaattaaggcattgcaacgacatatgtcctatattatggcaatcactgtactgcggtggtacttgtacgcgtggcctagctgtagtaagtgctggatgtacaggcataccaccctgagctgcagagcccatatcctcattctgatattactctaggctttgattagttaaggctcctatagacctcaactgcctagtagaacactttctttctgggagctgcttcttattagaagcggtgaatcatgttttttgcaagcaaggaagagttgttagggtccgatttatgacgttcaataagtttgattaattgcaactctactggaaatacagggctgtgtgtacaagcccttagtagtcccattttagtagtctcataattgctaatagcttccttctagctactttgctgtagcctgaatttcgaaaggtggagtttgtggaagatcgcaaaggtcgcagataggtatataacgtctttaatgcatatcttgacaaattgaggtggcgagatggctgccatgaccatcaagaactacaagatggtatctccctgttgcacgagctgtagtggcgggaacataggggtttccaagtcaacaaacacctacctcatcggcagtagttcctttagggacgatgttaagtctccaatcaggtggaagatttggattttgataccaaccctctatatgaactctccctttaaagcaatgtataaaggaagtcctccaccgtcctcaacctataagttgacttataaaagtagccagttcttgattacatagctctacgagagagtctattcgtagtcaggtggcccgctcgcttactggatatattattggaggctgttggatgtaccaaccaggcgtgtctcgtagacaatatcagaaaaattagtatcccagcgagtgcctactaaacctgtgcactacactttcgagtggcctgatagggaaaattcggtcttacccaattataacgtcactgagtcatgctcatcagggcttactatctgtaggtgactcagattgaattcgcaggcatgattccaatatccaccgataaggcttaataagcagctgcgtggttctcttcggggtccatgtggcacagatacagagctgcaaatgacgattgacattgatttgtcgagaagggtagtcaagagaattgaaaggatgatagaactaagaacggccaaggggggtcttgcggaatggtggcgatagtttccccgaaaacattctagactcttacggcaaagtaaccattattgcccctggatagtttcaccacagttcggctcggccctctagaccacttcgttcgggccagtggtctatgtgccaagtgctgggcaagaacctgatacttactttttccacggtggtgggtttcttgggctgattttgctagtagattgagatatttgagacgtgtctatactcgcatagataaaagcctgcatgttacagatgcatccattttctcactgcgtga

SEQ ID NO: 604 - DNA, 4110 bp, Emericella nidulans
gacggtatagcaatggtttttgattgaccaaggggttttaaccagcaaaagtttcattagagaagggctctacggttcaaaccggaaccccttctccctctggggatccaagaaaaatttgggcagggttcggttatcggagatgtttgggaaactcattttccccttggaacagcggaaggagccaaagagggtttcaaatttggccaaccttccctttgttaggcattcataaatcagtgtagagccaggaaaaagacatctttcatgccaacacactgtcgcaagccttgggtaaagaataccttgtccttctcaaggaccttgcgcttctctggatccaaccatcgctcaggtatgaattcgtggaagtcgggaaagatctcctcgttgtggtggatcaaaacgctggtcatgcccaccggggtctaaatcgttagccaatgctttcggtgcaaataccactgaacttactcctgctgggatcgaccactccttgaacttgaggtcgcggtcaggagcgatacgttgcaatcttgagctcgaaccataggacagtctggaggatccattagctttttcggacagcttgcgtatacagagtatttaccgaagtccctcgagcataacagaagtcaagtacggcatcttctcaaagtccacgagagtcgccgtctggtccggatccaatctgttcaactcctctttgagtgcgttcattttgtccggattctccagaagatagtacatcgtccacgtcaacatcttccccgtcgtttccgatccggctccaatcacagcttgaacctcgcgtgccagccggtcgggagtcttcagctctttcggaaggttgctggtaaggacgtcatggaagaatgttggatgatcgaactgattcttgacctcctcatagccccgctccttctgctcttccatgattctctgcacgatccggttgcagcggtcctgaaactggaaaaccaaacccatgcctggatagatgcgagagagtaaccacggcggcacggagttgaggagagcgcccgaccacggaaaggccttgagatacacgccgtttttcacgctccaggccagcgtatcgctccagtcagggatgaagtccggttcgtcgaggtaatggaatcccactcccatggagtagtcagaaactacatctgtcgcgaaacaggtaaaggcatgctgtaggttgatcggagtttgtgtgcccttgtatgcctggaggcgctcgatcagtttgttcaccagcgcttggacgagcggctcttgtttgcgcgcgcgagtaatcgaaaagtatgggttcatgttcgaccggatgacccggtggtggtaatggtccaccgtcgcgatcgagctgccggcaacagggaactgtttggtaaaatattcatatttattccgtgggctatcgcgcgagtagaggacttcgtagtaatcggggtcgttgatgtgcagttcgtgtgggctgatgcggacaatgggtcctgtcctggttagctttgtcgtatttacctcgaccagaggcataccgtatttctcatgcattttcgcgatctcaaacgtatattttccccatttgaacgcatcatagtaagtctcataccatagcgtcgcggctgccagctttgggccgggaaatttggccagcggcgacagccatagccgatagatcaccaggctgaccacataggcgacccaggcgaggaagatataaggcacaagatgaagcatccttgacttcgatggcttctgcagcttttgcgacttgctgctggtaggaaacgcaccttcaaataatcgcagaaagccccccttctccaacattttctccaaccgtgtgatttccctgtgccccatcttccatgagctgcccgcttcttagccactagctagcggctctagctgcattgcagcggcagtatcggagcgccgctattcgttcgagtaatgctagtttgggttggtgaaacagccagttcactagtgacagcatgctgaatacagactcgcgctcatttgccggttctcaatgccattgtcaaacggtgggatccttcgcggctggagtggttcgccgttaaaaaaccctaggcatcttgccccctttcctggcccgtgcaagtctgcggtcaccgcaatagagtatcacttgttcttttaactccggctctactccggagtataaaccatgacccacctgtcgcaacccagcgccccatcgttccagaggcaggcgcaatgccaattaccagtcaaaaaaatagagttcacctagctgactgatcggcgaccaggttaagtaaacctctataaagacggtgagcatgggtgctgtccagtgagcctcttagggctactactgaatctaagatttcaactaacatacgtacagggccagcgggaagctccacggaatctctcgcattcagcatcctaaattatcaggtacggcccaccttgactccatttcaaacgtccagaaaccagcctacagctagatacgagatctggcgttcggcttctcgaattgccggtattgacggagtagaatgggcggcgatgccatgcgtatcggcgggggaactatatgcttgtatgcagccgctcacaaagacgtcaattttcgccaatggccctccagcccaatgacaagcaagaacaagagcagctcgacctcgtaagacgaaccgggaggaccatcatgcaatgtaacgggtgtgtctagcactcccatatctgtgacctcacgctgggaggattattgtaccgagcggctgtcaaaccagaaatacagcagatcctcgatctaggaacgaaaaccggaacgtggggactggatatggcagattacggcatatagcgcatatcccgtctttaggcgacacttgctcaactcatggcgacctctttcccaaggccactgttaccggtttgtctcgcgctcgacctcaacatactggctgttgaccgtcggttgtaggaatggacctgagcctcattcaacctagatggtaaattgagaacggaattttcccctgcataacctgccgaccaaaattgcgaggatcccttctaattgcaaatttgaaaccgacgactctgaattggattggaattttcgcatcctttcgactacatgcacatgcaaggcatcgaaggattcgttgagagactttcacagactatttaggcagtcccacgacaaccttaaccggcgcggttggtttgagatctgcgacttcacagtcggcatcttttccgacgacgattctgcggaagaagcgacaagcctgcagcgccggtgagtcctgtttgaagcaagcaaaaagtttagtaagcagttcagcgtcgcctagagctataaacagcggatgatcgacgcggcattcagggacgtccaagaggaaatctacaaggtaccgttttctccgtggcaaagacccaaatctcaaggagctgggtaggttccagcaagccaatatgctagaggctttggatgcgtactcgctggctctaaagacccggttgtgggctgagtggtgaaaggaagtccagctgctcttgacgagcgtacgcaaggagttggatcggaacctgcatatatcctgcagggtgaatgtagtcttcgaacgaagggactgagcctattcatttcgcatgcaacgcgggcaataatggttgattgttgtgctccgtctgtatataccacagtgcgacttcgtgcagtgagtgccacggaaggtcccacctcggatatgacgcaatccggatggcgagaggcgacaaaatatgccggttacgcggggccgtagatattaggcgatgggatcggacggcgagagctggtaggtagagaaaacaacacaaaaggaagacctagagctgtagtctgtgctagtaatgcacgaagtgggtgctgcattcgtagtgagtggtgggaaaggccgagacttttgagagtagcagaacgcagaaaaagtccgcgccacttctctggcttgaaaccatccatctgctctccaagattccttcaactccctttgattcctcattcctcatttctgatcctgcattcctcttctctcctcatgt

SEQ ID NO: 605 - DNA, 758 bp, Emericella nidulans
cgagatttcttgtgaggaagcggcagaaaaagaagtcaagcttggggtctttagttgaattcttgtaaggtcttcctacattccgccttgtgacctttcttcctatcactcccccagctgcgtcctcagctgcctccagctacagacggagcctctgatgaagctacggttccaggctctttacaaccaaagcattccatactagattccacaaattcacccttacgggtaatacaagcaatggtagccagatataagggcaaggtgctagttcttcggcacgcctggcaccactccaggcggcgatgccagtgaatgaggcaaggaaaggagcggattaagcgaagcctcgtagaagcggcggccggtatattagactaagtgtttctgagggggaaatgtaaaaaagattgtggatgaaattgatttatcactcctagcgctttaaccggctaacgggcgttggccatgaaggtatttttgcaaggttccatattggacggcatagaggaaagaaaggaatgcgctcctcctattgaataggacttatgaacttcttgaagggcctgtcatgatgagttggagctttattggtagaagccctatgttgtcacagtcctacgtgctgtgatcatgagccaacatagattacagagcttcatcgtggacaccggtgccagggatgagcgtcgtgtgattggccatttatcgtgtataccagtgtacacgacgaactgatttctgccatctctgactgc

SEQ ID NO: 606 - DNA, 898 bp, Emericella nidulans
gccatcttcatagttggtccaaccatggatatggatcgttagtcatttatagtaaagagcaccacttgaggctgtcagcagcaattacccgtcatgattcctactgaagctgttttcgtcaccatgtgtgatacttatacatctagcatgtctacagtccttgaacgatgtttgctatcacctgcatgttactgcatgccgtagcctgaatcggtgacatggaatggtgacaagggcttgcacttcaagcgaggtgctagaggcgtggacacggtgttgatgaacctagagtaggtgatgctatgaaatctatatatagatataacgcgcgaaataacgccgcaaatttgacccccatatatccactatatatactatgacgagcagcggatatagcggcactacgggctcgacccctcacatagtaggaaagggaattgtagcgtatcccccgggttgtgcccttcccaggcctcgaccttctttgtcaacgtccatcccacggaaaccttgacgtcctgaaacccgacctctttcatcaggttctccatccaccgcgcagggatcccatgcctctcaacgccctccagcttcgtcggcggatggaatttgatcgcttcagggccaaaatcctcgaaatccgtaagagcgaccctcccgccaggcgtcaaacaccctcgcaatgtactcaagaatgacttgaggtcggggacgtggtgcatgacaaggtgtgagaggatgagatcgaactttcgccggcgcccttcaagattgtcgacagtctgaggagggagggcaggatcctcagggtcttcaagtagacgacaaatggggacgacattacgaccgctgtctttgttgctctgctgcatatctaccggctggacatcaatattcc

SEQ ID NO: 607 - DNA, 1830 bp, Emericella nidulans
acactactatagggagacccaagcttaggatctccttgtgtcctataaaggaagcagccgcagcctggagggcagtcccataatgaccaccctggatattgatttcagctccctggtcaagaagcagcttcacaatctcctggtatccttcatatgccgcagcctggagggcggttccataatagccccctcggctattgatttcagctccccggtctagaagtagcttcacaatctcctggtgtcctataaatgaagcagccgcagcctgaagagcatttccataatagccaccctggctattgatttccgctcgtcggtctagaagcagcttcacaattgtttgatctccactaaaggaagcagcctgtagagctgttccataattgccaccctggatgttgatatctgctccatggtccagaagcagcttcacaatcgcttgatctccactaaaggcagaagcctggagagcagttccataatagccgccttggctattgatttcagctccctggtcaagaagcagcttcacgatctcctcgtatcctttatatgcagcagcctggagggcggttccataataacccccctggctattgtttcagctccttggtctagaagcagcttcacaatctcctggtgtcctataaaggaagcagccgcagcctggagggcagtcccataatggccaccctggatattgatttcagctccccggtctagaagcagcttcataattgctggatctccactaaaagaagcagcctgtagagctgttccataattgccaccctgaatgttgacatctgctccatggtccagaagcagctccacaatatcttgatgttcctggtatgcagcagcttggagagcggttccataatggccaccctggatattgatttcagctccttggtctagaagcagcttcacgatctcctggtgtcctttatatgcagcagcctggagagcatttccataatagccaccctggctattgatatctgctccgctgtcaagaagcaacttcacaatcgcttgatctccactaaaggcagcagcctgtagagctgttccataattgccaccctgaatgttggcatctgctccatggtccagaagcaactttataatatcttgatatccctggtgtgcagcagcctggagagcagttccatgttcaccagcctggatgttggcatctgctccatggtccagaagcaacttcacggtctctagatctccactatctgcagcaacctgaagagacatcttcgtgtgacctcttgtttgatattcttatttgctaaaatacctatcataattgctcagcctgatttcgcatatctttatgaataacatggtacaacctttggatctccgactcagtagaatggggtggcatctccttgcatcggtgatcagcgctgctagttgctcttgcgctgactttcatgcgcaactaaaatctcaacagaactttgccggttcctcaggatttccgaggctctcgaggattggatggtgccagtagtcataaacagaatgtggcggttcgaccaggctgagagagggatgaaaaagcaataaatgagccagcaagagattgaaatagcgcctgagcgcaccaatcatgtcggacaagcatggctctgccgtctctctgcccggaccatttgctgatcctatccacttatcccctccattgtgctgcatgatttgtctgagctaagatgcgctgggatttgagttgttgcccctctttgccaatgaaatggcccaacatgacagcatcctaaaacggcttcacgaagctgggcaggcacc

SEQ ID NO: 608 - DNA, 1684 bp, Emericella nidulans
caaattgggacaaattttctagctgttgacagtctgtctgaaattcacctttcctaatccaagtcctccgtcgtagtcggcctgcaacctcaagtgacgctataccagtactctgagctgaggatgcaggatggtgttcccagagtaggattccaggcatcttcaatatcgccgtatatcggcttatctgagccgatgccatatctcctgcttaaatcattgctggcgtcgacatggggcaactcaggttcggtgcacagtaatatagagcagcaggtttatctcacgacaagtcgatttcctctccgttggtagcctaaactgtacagttctaaaaactggcgctggctatctcagcagcctgatcgttggtcgtgtctatcttgcaatcctcctatgcattgatcatctacctctccgggccatctgcctatcgttggataaaatgcatacagattttgcatcaacatgacatgattcatgcctcctgttagtttgctggcgtatagtcctctagatctcgcaacccgaagagtgtctgcgaggcgttttcagtgtttgctggctggaagctcacagcagcttcgaacgtaaatctcgcgctttttattagagtcagcgggcagagcctattcaggaaaaagtagtccatgaggatgtgcttaccaaccgcggagtggggctgtatgacctaggagttttatggcgactttagacggaaagtaaatgtccagcattgactcagctgtcctaatcagcaaatctcgcctcgtctaacaaaatcggaaacacgcgtgcaccgagtcaggcttgaaaaccaggttaccggggattgatcattatagacgagccagcataatactcctcaagatcccggtgtatgaccaccaccgcgcatcctcttcccatcggcattgccgcccacatttgcattatcagcgccatcctccctagcccgcttatttccctgagggacaaactggcgtgtaccggcattcagctcacctcggcgtgcactaaattgcgcagatatgctaattgtatacacccagctaccgggataaacatcagctttcacgagactgcggtctacgcgccaaaatggagtaagcattccatgtattcgcaagtctcttctggatatctgagaagaccttggctgcgatagtatgccactattgatgcttcgttgttgaaacaagcagaataacccaaagatgcatattggtctcatttgcctcggaacagtgtcgtgtggccatccatccacagccattaaggagaataatgtcgttgggctcgataaggaagaggccagagatctagatgccatccagtgtgtgctcataaatagtatgcaattgggctgatagccatgagaacaagctgttgccactgctgctgcttgtgctaaggctttcgtacgtcagcagtgagattaataacctaacatactcgaacagtcgtgtatcaagcgtaagtataatccagtattggcgaagattaccaatcgcagcctctatactagtcctgcttctgtctctttttctctggttgctcgccttctggagtatccgtctcagtctccttttcatcggcctgctgattctgttcctcgtcctcgtcttaacatccaaagttgtctccgctctcttcattctcgccatctaagtcttgcccatct

SEQ ID NO: 609 - DNA, 2617 bp, Emericella nidulans
ggacaagtgggaagaatccgaattatacggccagctggtgggatgagcaatacgagcaaaggttgcacaccgtgatctgacaaatacggccagtcggcgtagggaaatggaagttgatacggtacccgtatggtctagcccctatcgaccctggccagccctataagtcttacccgtgtcttattcgtagtggtgcaatacctagaaacatggttacaccatgtgactgagagaccgaatgactccataatccgattatgctcacattcgtttagtatcgtcaacatgtttgctcatccaaggacataaagttacgttagcgttgatgaggatagttctatatggtgtactttcttccgccatgacaatgctagacttcactcttagtatggatcttcacaatactgcgttcaatgttctaaccaatgttcctggagtggaacatcgagcgggattaggtctagagatccaaactccgtagaatattcctacacatttgaatatgggatatgtgaaatggacgctgaaaatgacagtcctggcgccagaaatggccgccttccatgatatctacagcctggggaccaatgagcatatcagaattaagacaacttataagagtctctgctcgcttcatatactctcagcaaagcttttcagcacttgctcatgtatctttaaccctctctctaagatctggtgaggtagacggtcaacaattttgtcgaaaggtagatccagctgcgtagtagtcgtagttgtgccgtctatgtaggactctccagtaacagacatctcgttatttgttcgagataatttgagggatgcagtacaacgcgctggagaggacgaccctgtacggacgccatatccatgagaaacaagaaacaagttcttatcggcgcaagacaatctcatggtttcgtatttaatgctgattgtaaccacaagtttcacagatgagaagtaagtctcaagccaactgcgtgcatcaagagcaagttatcgcgcagactctgacaatcctacttctactacaaaactcagtcttgtgattgtcgaagcccgaacccagcagcagtcagcctcctttttccagtttcaaccgtaactgttgtcgaaccgaaaggcctcatgtcatgatagatattcatcacacgcagctcgagagagatcagccaatcaaatgaccttatgcaagttcatgtgcgggatttggcatgactttcgcgatcaaggttcctgtttctgcatgaacgagaatcaacagtacttgcttggtggcaccgatcatcacctagtttagacgattcgccggcaggacagatgtgaagacaaggtactgaccccgagtttggccttgctgaagcgctcactgacggcattccaaggactcttctaggctgttgctggtggtgaatggctgctgcttcacttcctttgtcagttgcacaagagaatcttcagattcggattcaactgacgagaactcagaacctgagagctcggaagacgaaggctgatacgcgttcgaggtggatggaaggaagtccacggtgagtggcagtaagagaaaatgagaagagtaagcaggtagaattggcattcacgacctaaaaaaaaaagaaaggtggtaaaatgcgctatgaaggagatgacggcatctggtagggtatcagatgtatggatatctctttatttctcagccctgcagagactccgcggggcttattggctctagtaatgagatatactcagggtcattacttaagcaactagctgctgagcttctggagatgcagatctggcagctacaggtcatagtacaatagggtagccttcagggcggaatccttggagaatctccacctgttgggcccaagtctctgcctttcgctcgaggcggagtggaagctggagtggaccctggatagaaataggctaatgcggttgaataggctatgtgcagtattacaggagtatcagtactgcaaagtactgcattgtagcggcagatacactcgtggtttgtaagaccatgcgctctcagaatggcgagattgatatagccagtaggtctacatctgtacataactactagcttataagcttgttactgagagcttcttgaccgtctacttaactctgagtaaccccccgtaagcgggtaagggcccccagaagaggtagaggacttgtgggtgagtgtctctgtacgagataggtctaaggtaacagtgtggttgataaaactagtatagcctgctcagcaccgggcttttctaacaagccaccaaatagaaagtaagtaggagctaataaaattgacaaataagtcgacgatccaaatcaagcaatttcgacgggctgcagacaaccttcgcctggggatcctcaaggctcgtacctatacgttcggggaatattacatctgcaagataccggagggtatggagaatagactccaacgggatttgatcgcgcaatttaactattgattgaatatttcgctatttatggcgtacgtggactcataatctcactttcttattaagcaacccatccccaaggtacataacccctcaccaccccgctcgcagtcaaatatcacaaagac

SEQ ID NO: 610 - DNA, 104 bp, Emericella nidulans
  unsure (1)..(104): unsure at all n locations
tttccaccgcctgtagggtataggctgactctgcaagctgaacntagattgctactggtatcagtgggtatcccctcagttaggataaccctgtgcttgcattg

SEQ ID NO: 611 - DNA, 2859 bp, Emericella nidulans
ctataaccctgaagtgccttcggtgcatgacttctgcctcttcatgtttgccctgacatccaagtactaagccaaagtagctgagactgataagggttaggatgctcaggacaaagcacctttgtataaccctgaagtgcctgtcggtgcacggcctctgcctcctcatatttgccctggtgtgtaagcactgacccaaggctgctggcactggcataagtagcaggatgctcaggaccaaacaccttcttgtaaccttcaagtgcctgccgatgcatggcttttgctgtctgatatttgccctggcttgcaagtactgaaccaagattgctaatactggcaaggctgtcagggtgctctggtccgcgagctctctctcggaatctcaagacataaaacaagagtctttctgcctcagcatatcttccatcacttcccaggcatcttcctatctttgtaagaagattgtcgaattcaaaaggtgggtccggaattctgcactgtccaccagatacagtgcatggggtagatagtctctccacacttgctgattgccatggttctcattcggaataaccttgtccaactgaccagcgactctctccactcaactatcaagggtccctctttttcttgaccaatttcgactagcaaggtgcacaatcggtgaagactaagaatattgtcatcagcctgtgtgctgacaaaagaatatgcttctggaacacccaatgcttccactttgttttgctgaagttgttgagggaagaactgcctctggtatatctcgtggattaatgcaagcccttgaatgacagatagtcacttgcaacttcatcaacctcctggatctccaagaaagagatcagcaaggttgttgccactgtggtctgagtttctgcatacagtctatcattttcaaactcctcactgagcagttctattgtgctcctctcgctcacccaacgatgacatatagtttgctaaagaaatattgttttgattgaaataggccgcggcttggctgattgctagagggagaaaagcaagctgctcgaggagtgcgcttgttaaatgattgtcttgtagaaaatccttttcaaccaatagtttcctgaatatctctttggcagttctctgatccacgtccgagatagagagtatttttggcgatgccagtttcactgcaagcatatggttccgggatgtaaagagtatatggccattttcactccagggaatgacgttgttgagtggtggtgctgtagggttgcccttagtccacatatccatttgatctgcgttgtcaataatcagaatccatttgttgtaggtttagctgaagtaggtcttcagacgctctttgacctctgctggctgcacattttttattccttgtgcgatgttcatacaagcctgctcaacagcctcgtagttggtgcatgagatccaaaaaattgaacaatcaggctctctttctcgcatgcagtaagctagctccagcgcaatatgggtcttccctatgcctcacagtccggttatggcaacttttcttggtccgttggtcatagagattaaattctctatcttctgaatttcttcctggcggccaacagattgcggattccttgcaaaggggaccacgaagtgacgatctctgctcccacctgtccagatttataagtactcagcatcacaagactcctgattcctaccagatacttcactaacgttcccgattggcaggcatccagtactccaagaaggactttgccgccgagactccggcagcagcagcatatgcttgccagtatttgctcttgtgactgtcggcatagtcacacacacacccttgataatgatacatggaatatttttccaatacccctgctccctccatctcaaaaccaatcaccttctctttcctggcaatttcatcacgatgccgtccagacttcatgacagtgtctgccgaagcaactggtccaatatatatagagctctgggtggcatctaagaggcttcgatgccggattcgttgacttttgtcacaactaaggctgtcacagtccgtcgctaatgcctcctcacaaatttgattagctaagtcactctgaaaacaagagcaagtagcaggatgagcaggagcagaatgcttatggacataaaaggctttgaaaagtatatcatctagccttggatgatggccacttgacccctgtttgttgaagtatgtgaagacattgttgcatttgagtctgaagttcactgcgggcattctcggcacgaaggccgtttagaagagcccgaattgctcgatgcggcccgcccagtgtgttctcgataccagtcgtccgctgaaagactccagggtattgtctgccgaagtcatatttgattacagaatcgctgatgataacgtcgccaaggaatatatcttgatatttcggtggtgctggtgcccctcacagatcccaactactaaggccagctcgacgtccgtgtagctgacttgcagactggaggtgacacttgctgcacttcccttgcccattcctggcaagtagcacaggaccacattatgcttaccgattctcccattcatatatgcattcgcatcacctggttgtttgccataagtgttttcccagccgatcgtaggtttcatcgaaaagggcttcgacggcatcagcctctagaggaagggcgcacataatcgcgattgtaaagtcattgcggcttctcggccgcaattgactaacagcagtacaggtcattgcagggctcaggaaagagttttaagcagacctgctgtgccaacgtgccgaaaacgacgcctaaagatggaagggaaacaga

SEQ ID NO: 612 - DNA, 931 bp, Emericella nidulans
caggtctaatgtcattgaagggtcgagtccaggtgttggagactgatcaggttctaaataccagtgagcttggtagcacgccggatctcggtgtagggttacttgagaccttgttcgattcttttcggctttcttgcctatgctgttggatttgcttccagatcattagttttatggtgcctgttttcaggctatagctatggtgctggacaccgtgcagcagataaatattcagttgccaagcgacaagttcccaaatctggagctccgaggtttataggaaatactagacacccaagccccgtaagatgatctttgctgacataccttagtggttcagtcctgtatgcaagggtagctaggagagagcatagaaactaactcacgaagatcactgcgtcagtagcccattagctgtcagataggagtatgcaagtctggccaggtgagcctacatacccgagcgttagcgtctgcgttgggacaatgtcgttattgatggtctcttttatgctcgccgacctatatcggactactcaatatactctttgctctgacagttggtatgtcaatctttgtcctgtctcgatgtagttggcattcagaaaaataggactgaccagcacgattaatgacaggtattttgtctaagggtgcatggatgctgtaactgtcatggatatgttttggtggggtgaaacacctgtctgctagggaaagtgggtggttcaatatccgaaacccgtatatatatactaacgcgcgaaataatgccgcaaaattgacacccatatatccaccatatatccaagtcgtcaggctgtttccactcactgagaacctccccacaagacacaggacctgtgtcacctatgagttatgcaataatctcggctcctcacatagtccattgccaagcttatataatgag

SEQ ID NO: 613 - DNA, 1012 bp, Emericella nidulans
gatgggaacagcgcgcggcaaatacaccgccaataattgcaccggttggagccgccgttcctaacagcgcaaacagcatatccttcttctttcccggcgcatatgtcgcgccgagaatagccagcccattgggcaggagcatcgcggggcctaggccctgcagaacacgcgatataataaacaggatatagttcgagtacacgctaatgcccgcgacaagcgaccagagagccaaccaaaggaatccgatgatatacatccggtggtacccgaagagatccccgcatcgaccaaagacaagaataaacgtgccgactgtcagggagtatccggccaggaaccaggccagtccgccctgctcactgagcccaaagtccccgccgacgatattcaggggcgacaggcagacaccgacattcgcctgcgtgatgaactgcgacatgcatactataataacgaagacgatttcgcgcggccgaaagaatgtatccccggaggactgggtgggttttgagcgcgagaagcccgtgcccgggctcgacttttcctgctcgggcattgcgggtattatgccagcctcggcttaagctttaagcctagttgcttgttggcaggcagttggaacctgaaaagggcaagatgaggatttttgcggtcccaccacaccgtaggtaaaagttgccgcttccgttggtttaaaaaagtaaagttgggcctggcctttcgaaactgaaccggggaggcgaaacctaacacagaagaccagattggccatttaaaacactatgtttggaatttaaacaaccaacagccggttttttaattgaaaccaaaaaggaaaggttttctaagttgtgtctttccccccacccttgtagaaaaaatccgggctgggtatggccttctattcctcaaatacgtctgtgccccgctcctcttctatatatggagggaggtaataacttctcttttttatttttattttggttgtattatcacccccccccccccc

SEQ ID NO: 614 - DNA, 5578 bp, Emericella nidulans
  unsure (1)..(5578): unsure at all n locations
acaaacgcgtatagtctgccctggcgccatctctgcgcggcctcatatatccccagcctcacatgtgcgaccgcattatccccccagtggcatttgaagaatccgaggcgctcaccaactcgtacggtgtccttctcgcaaatggggatctgttcagtatcaacccgcggaatacgacagaaggttcggctttcatcggaggcagcaaccccggtcagcctgcgttcgaacgatggctcgaagctcacccggaaagggggatagacgatagcttgcaggggttcaggcccgtgaccgaagccgtccgagccttcgcccagtcccagatcatcgggtggaaggccgagttcaacaatgacagctggagtggcatcattgctagggaatatattcctcactttatatgtagcaagaagctaatcgatggatagagcgccgacggagtgccgtgggtaggagagttgcccgggctgccggggcagtggctttgcgctggccataacggacagtatgtcccctgagtgcctcctcgcggctcaattgaccgtgactgacgactgcagtggcatggcacgcatcttcacagcagcacccgggttggtcaagctcatgggaggaagcacatggcggaacacagctaccagaggtgtactaaatcactccagcgcgggttcaaaatgcagcttctcgctgatgacgatgagcttcaatcacgcttttgaggtcaaagcgataatcctgtagatgatcaaagcggcgccagtgagaaggatgattgtttcgagactccgctgtcaagaagttactattgttgatccagcaatcttgtgcatgcttattcaggtgcataaatactacattaatgacaggacataactatgtcggagtttcaagcccatcaccctcttgaacacttcgcttacttaactcccccaaactggctcgggtgaacatgacataccctccaagtacaaaaggcaccagatgtctattgcattgcagagctgaccttatcgagatcgccttaaccactttgcgcgatgataccgataggactgaacggcaatgaaccctgagcccaatgtttcagccgcaagcaaaatcaccgacagctctcccatttcttggtatttttcccattgatgatagatttcggtggtggccttaagctgacctaaatgatgttgtcgtcggctcacggcatcctcatttagaaagactatccgagaatgtcccacatcccgtgcccaacaacatgcgttctcaacggtgactgaaatccgaattgatgccgacttccgagatagtcaatgctactgcctaccatgcatcttcaaatcatggaacaagccatgtgttctgccctacggatggagactcagcgagctgctctccaatggagtggttgaccgacaaagacgtccccgcccaggaacagtccagcgaatcactgccccgcttggtgtaggcatcagccagccctgtccaacgccccgttgatctccaagttcgaacggtgagcgatcttagtgactcgagtttctttcctcctgcagtattcctaacctcttgtctttacagtcattggaggtgcgctggattacagtgtttgaccttgttgcgcctagccgaggaatccccgagaacagtaagcagcgttataatccacgaggctcaagtgcacctatgaattgattccgacaccaatataacatataccacgccatcaactgcttcttacgactccagacgaatatatgtactatcaccacccccctcccccaacgccgcctcgcccgtcgagttggaacggccacggccagcaatggggccctccgcagccatacaggtacctttttccctcccacaccatatatctatacatgttgaccatgctggacagtccccaatatgcacccccgccataccccccgccaagttcctaccgatatccgccaccaaattaccctccagcttcagcaccctatgcacccagggaccctcgatactcaccttcaccctacggcacaccgccgcttccaccccgcccatcctcggaatctcagtctcactcgcctagcttacgctcgtacccaagtgcgccacctttgccaaacccccatccattcgtctaccctctttctaactctaccagcgtccccgccctccggggttcaaccgctcccaccccggcccccctcaggtttccaaccctttggccatggcgcgccatcaaactaccacttccagtactccagctgtaccggccggcggcgcgccctcttaattgggataaactactttggccagccgaaccaattgcagggatgtatcaacgacgtgacgaacgtctcgacattcctagcggagcggtatgggtatcggcgagaggacatggtgatcctcacagacgaccagcagaacccgaagagtttgccaacgaaagcaaatatccttcgcgcgatgcagtggcttgttaacggggccgttgcgaacgacagtctttttatccatttttctggtatgtttagccgccgcgttcagtcgtgtggaattcaatttaacggactcaggacatggtggtcggacacccgatcttgatggggatgaggatgatggttagtcgtactccgtattctctttactgtattgtcacgacatggctgtcagtggcaaagcggaccagactttgacatgggtgtctaggcttcgacgacgtgatctacccggtggactaccgggtggccgggcacatcgttgacgatgaaatgcacgatattatgttcgtccactctttttacgttcacaactaccatctactaatgccagcagggttcggccccttcagcctggagctctgacggcggtcttcgactcctgccactccggaacagccctcgacctcccctacgtctactccacccaggtctgtcttccattcctcctcgccaattcgcaagatagcatcactgacaagcgtacggcagggcatcctcaaagagccgaacctcgccaaagaagctgcatccgacctgttctccgcgatcacctcctacggccgcggtgacttgagcggcgtcgcgcaaaccgccattgggttcttcaagaaggccgcgataggtgactcggcgcggcgccggactgtgcgcacaaagacctcaccggccgatgtagtcatgttttcagggtcgaaggactcacagacatcgtacgtccgtccgtcatctatcaatattcagacggaagagacaacggtagcaaatgctgacattgtacagtgccgacacattccaggacggcgaagcacggggggccttaagctgggcatttatcaaggtgctgcagcggcatccgcacctgagctatgtgcaactgctgaatctgatccgagcggagctggaagggaagtatacgcagaagccgcaattgagttgcagtcatccgttaggtaagttcccatgctgggttccgacgaggagactccacatctaatccaacgattctgttagataccaatttattgttcgtgatgtaagtgcggtaaaggacgggtgtggttagcgtggcctcgagcggtggctaggcttggacctggatctctcaaatgggactctggatgcgtcgggtttcacttgacctcgaatattcgagaatacgtgtgtaattgcgcgtcctgagggggtgattcagggccattccataagacatatcctagtcctttagatcgagaataaacgactttgtgcctaggaaagtcgatgcaagataaaaatagccggcatccagttaacggatcttatatccgatcctggtttagcatcactgtcgcaggtacaccgctcttgaacgcggtcatatacatccataactcgtttgcctcgatcccaatgcccgtttcttcattttctcaggcgagcatgattcgctcacgagcccttctagaaataacacaactcatccatggaacgccgaccgagattcgtggaagagtctggatctagtcggtgatctcgatccggccttgcaggcgcagccatttgcagccaaacccgttggtgaactggctggaaccacggagatacacaacagcgacccagggatcatgcaaggaaaaggtaaataaaaaaataaaaataaaaaataaccaaaaactgcacatagcttttgcacaggtagtcgccggctacacactcgtcagaatatcgacattcaaatgccataacacttgattgtgacgtcagatcaaggaggtaccgatgatcggtcgatcttgactgcctttgacttgtagcatggagaatacggggttccccaatggacaagggattcagaatgctgaaaagacatggccaaatccaccgagcaccgacactcgacgaggcaacggcgaggccacgggaaggccacaacacggccacggcgaaccacggcgagaccacagagttcatgaggtggcattgcggttatttcatgcgatctcgagtcttgttcattcacctgcagtggtacggcgatgccgactcggagaaccagcctgattcaaaatacagacaaagcacgtagcacggacagcgcatatctgcaatgcgaacagaccgagaggggaactgttgaggtaatgctccggtatatggcgatcaaacaccaggtgcactgtgcggttatgtaccccgtatactagctccagcctccagtctccagtctccagtctccagtctcccgtctccaagtcacagtaggtcccgataggagccgccgtttcactgacgaccgtcatgtttcagtggcctcccgggtcggaacatgtaggcgacgtggtctcagcgctgaatctcagactcggacactattacactattgttgccgaaaaatgagccaatgagccaataaggggcgttttccgagcacgcactccatcgcaatcaatcgcattccggaaacccgagaggagatgagccgattgtgagaaaaatgacgggagatgagctgcgggtgggggtgtcagagattcaacgcgttttataggcagcagctctaggacgactccccacagtctaaatctctgctgggagcgccacgccatgcctattggcattggcgctggcgtgctggcagcacttggcggtggtgaatggttaaatggatttcctaatttcttttttgggatcagacagggatacgcgcttcgttttgttcgaaaaggttgtttgctagaagaagaatttggacgacgcaaaatgatactgccaagtggactggaatgctgatgatcaccatctgctgggcatgttattgttagcgactccgccgggtccgccgtggttccacgctcgcagtctctggatagtcaagagtagttttctcgatggtttggacggcttttggacgggtacggagtaatgagtctacgccggtacataccgagtacgtatgccgtgctttagctacgtttagctacggtcttatgtcgacgacgtctgaggttgagacgcagtgaccatcaaacacagacgccggctagctggtagcctgatgctcagccgcgtaatgtcgacgttttcattgagacattcntgcc

SEQ ID NO: 615 - DNA, 1462 bp, Emericella nidulans
gtactggaggggggacattgtagagatatgcttcagattagaaaaagtgattctgaaggcgagagtttggtgaagacgataaagaaaatatgtcgaaggatgaatcatggacaatgaagaatggagattcgaggtggggagagaatgtggtgaatggtggagatgcctagatatggaaacatcccggcagcatccttcgttgttcatctacttatctcaccacgagcatcgtcatcatcaccatcatcatcatcatcatcatcatcatcatcatcatcacattagatagtctacatcgaagtatagatgtaagaaagactccatgtcagtttcccatagaggaaggtgcgagtgagccgcacctttcccgttactataatcgcaagcggtttcctcattataattcttctactgcttcaatttctggaatgagctctcctcatggccagccttatagcgactctcctgacgatgaccgacttttcacagccaagctcaggtctactttctgagtgggactccggtcaacattacatagacgacctcgaaagccaagatgagggttctgtcgttagaaatgtcaatgtcggaaacacctttgcccttatgagagcagtcgtcgagcttcgggttctgcaaacaacgacggccatccttcgtttcaccagaacgaacccagtgtcaatctccgacccagactcatccattcgccgcgccatagatcgcagggaacagcgcatttcccgcctgatcgatgcgatgactaaagatgacttcgagaagagtgttggcgaaatcgcgtcgcggatggaaattccagccccgcccgtgcctcagcgaattctttccccgtctgagatgttagaggaacttacaatcgaggagcaggtctcgcatgaagaggaccaaatgtttctgtgcgcccccgtgtctgctgattcgatccgttcgactgtttctactgcttcggatgcgagcacgccaaagcttaacactttgattagtgatgatccaattccaatagtggatgagaatatccggggccgaacagagggcacgctgagcgaggacgataggagagcgtctggttctatggcctcgtcaggtccaacacctggcaccgagtcgagctactcatcgcttgggagaagcttgtctgtaagcaatatgaactcagttacgtcgatcccgcgacagtacaagattgtctcggcagctcaatataccaagatcatcgcagagagacaaccgcagttcagctttctcaactacccctactccatcgattctctggtggcagagggccctcggcttgatcggtccgcactcgagcttgacgagcatgctaacgagtataaaagaatgtctgccgacagctttccaggagagtttccggttagcgaagggttggaggtttgtttcttgtcgccgttaattcacttactttcttttcttttttttg

SEQ ID NO: 616 - DNA, 1146 bp, Emericella nidulans
aaccatacttatcctagattcagtttgtcaccgtatccagggtaatttgccacaaattcgtggccatgtgatgctgcatatgaaagaggtgtctggccagaactggtttcggagtctgcttgagcgccatactgcaggagcaacctgaccacagattcatggccctttgatgctgcatatgaaagaggtgtgtggctgtctttatctctagagtttgcccgagcgccgttctccagaagtatcctgactacagattcgtagccccttgatgctgcatatgaaaggggtgtttgactgtctttgtccttagagtccgttcgtgcaccatgctccaggagtaacttgaccacagattcatagccatatgatgccgcgtacgaaagaggtgtccgaaaatcgtcatccttagagtccgctcgagcaccatgctctaggagtaacttgaccacagattcatagccatttgatgccgcgtacgaaagaggtgtccgacaatcgtcatccttagagtctgcctgagcaccatgcttcaggagtaatctgaccacagattcatggccagttgctgctgcagatgaaagaggtgtcccgccatccccatccttacagtctgcttgagcaccatgctccagaaataacctgaccacagattcatggccatcaaatgctgcacgtgaaagaggcgtctgaccccagttggctttagagtctgcttgagcaccgtgcgttaggagcaacctgaccacagattcatggccctttgatgctgcatatgaaataggggtctgaccagtgttgttcttagagtctgcttgagcaccatgctgcaggagtagtctaaccaccgattctttgccctttgatgctgcatatgaaagaggtgttttaccagagatggttttagagtctgcttgagcaccatgctgcaggagtagtttaaccacagattcgtggccatgtactaccgcaaatataagaggtgtctgaccagagtcggttttagagtctgcttgagcaccatgctgcaggaatagtttaaccacagactcgtggccatttgatgctgcatgtgaaagaggagttcgcctttgaaaatctttcaggttcaagtacagtcacgttccttaaaagcggcgaaattattgg

SEQ ID NO: 617 - DNA, 556 bp, Emericella nidulans
cgcgactcatttcgagcgcacgtagaacctggagtaccctggcccgtcgctactctgacgttgtttgatctttccaaaaggtgttcacactgtggtggcaaaccacattgtgacactgacctggctaagctagacccatgtactagtagcgagctccggctttgaactgatgctaaaggtggctatgatgtgccgatcgtggcgctaaggaagcgcccagtggatccttgacggcagaattacattcacaaattgaccccactaaaagaggcaggctgctacccacatttaaggcaggtggacactacgagccggcctggtaaactagagacgactgattccgagctgattgactgtgcagagctgtacatactcgcacaatgagtgcctactcccatacataaatcaaaggttaggctgatggcaaatgacctagccctggatgctggtatagagccctgcctttatcgctgtacggctacgtgcacccaatattgaacgtccgatcttgcgttcggccacaatatggtggatggatgaagtcctgtatacatac

SEQ ID NO: 618 - DNA, 3206 bp, Emericella nidulans
ccaaaagcacatctcgataagcaagaaagacttcagcgcgatcgagtatcttttgcgcaaaggctcaaggcagcttgagatgtattcatccccaggaattcgcaatattcgctaagtgccattggtctcggacgaacggtgacgggtatcacctctttgaggtattgagacgccggaagtgtttcgttctcgagagctttgccgtccttttccttcagtggcgagcttgaaggctagtctttttaaatgtgcgactgatggttgtcctgatgaccggcactagtactccaagtgggtggaatagaccggttcgaccaaaatcttgggaatagtcagcgtgcgctttccgtctggttgcccacgatacgcactcaacctcaaaacagatcactaccagggttgattatatggtgatataaggaggattctcttccacttgtaagaaaagcaaatgaggatggaactgatcaaagcggccttacctttgagagggaaagaggtaaatacatagagctgtatattgttgtactgggtggcggcatgtatactgtataccatgaggactactttctttgatcaagacgaaccagattgaaggtgacaccagacatgagcatgagcgaatacgtcatacgtaaattacccttctgagctaacttcataccctcatctagctagacagcttcgattcttcatgattcttcatatatcacgtgactacattttgccgaggtcttttcgtgaactttcgcggactttctggaaacagtttatcttatcgctctggaaggacccagacacatcatgcagcgccacgaacgatctcaataatgaactagctgtgttggaagcgccctgtatgttctccgtaagcgttcttggagataccaggtctttccagaaaacagaatactctgtatataaaagatggctgaagctcagctctggttgtctcatcatcagcaaattcacatcactctgagttcactaaagcttcatcaattagacgcttcaaaacaaagcatcctcgcaatccacaaggcatcaatttcctcgacattctcataaacaaacccacgtcacaggtacaatggctttcttcccccgctactgctcaggcgacttcgcccctttgtttcagctcctcgacgactacgatatgcaccaggccacccgccgaccaaacaagaaggtcaccaacgtgagaacatttgttcctaaatttgacgtctacgagcaaggggatcgctactatcttgatggagaacttcctggagtctcacagagcaacattgagatcgaattcaccgaccctcaaaccctagttatcaagggtcactctaagagaaattaccaccacaaatccgagcctgataccgatgacaagtccgagacatcatcggtcaagtctcttcaacccacagtcgaggattgggatgagatggaagatgctacacctgcggtcgagcaaactccatctttgggccccaaggaaaaagctgtagagaagaactccagcaccaggagtcaggaacctgcctacaagttctgggcatctgagcgcttggttggagaattctctcgaacctttgccttccctaccagagtggaccaggacgccgttagggcgagcttgaacaacggtattctgtccgtggttcttccgaaagaaccagctcctcaactcaagaaagtccgcgtggagtagagaacaaatacaaataccttccaacctgccagtacgacgacgacgacgacgacgacgacgatgactcctaatgactccgtgaatgcattgcgacacattggactactcaattagcatgatatgatgacgtcaagtacgcttggttgcttctgttatacttctgacaagttatgttcggtttcgtcaaggacggatctgggattacatgggctagctctatcttcttttgtacctttaccacctccagcatgttaactttgtactatagcggcaagggtactggaatctaatctacactatcagatttaatctgtatggtcttctggtacgtagtagtgctcagtacacgagaagtagatgcaaaacttgtgagtatgcactattttgatagagaactattggtcaactagaagttatcataccaagtagaacaactacctagtctttacaagtcgcgggcttctgcgatcccctgcttcccgaattgcagcctagtctacagatcattcaacacgatatctaaccctatgcctttagtgctggaagaacccacttctgcccaacgccgagcctgctgtcagtcttagatattttgactcgccgatttcattattgtctcgattttgaactcttcaagttataatatagctgtaaagtaattgattgtgaatgattgattgtgaatgattgattgtgaatgattgatcgtgagtgaagataagaaggctagtaaaaaaaaaccgccagggtcaaggaacgagggaatggttactgaaagccgggactccatgaagggtatacctagaaccaagcatgaaagacagacgccgccgccgccgacgacagggttttattacgaaagaaaatactcaaggttgaagattgaatgtgcaatgcgaggatcatgcgaaaactgccgccaagttggcaattctctgcccagaaggctcgcggtattgatatcctatgctccgactgcgcgttcgaccgcgcggtggctcaactgcaaacttagtgctcttttggtctggcagtgagagaggagaaaaggcattgccaggcatagggggcaagttgtccgctttcgcagcgctgctgtaagacgggtatgatagcgttgcagtgcccgtttgacatccttctggttctgcgggatgtgaattgatggaacaattctgattgcgcatggcgtgatggctagtgaatagggctgcagtgttgtcgctgaagtctgtcctttcgcgaatatcaactcgggaaccgcaatatcctgaggtagatatggccgcatactgacataaactatccaaattgcagtttggacgggatgttccgtactcctgccccattccggaatcgatagtatgtagtgtagtaggaaaaagggaatcctgctgttgcgtaagaaaggctacctggttgggtggaatgtaacgggacgggatatgtgctatctgaactcctaagtactggaaatgatagcccccttgaccggctg

SEQ ID NO: 619 - DNA, 581 bp, Emericella nidulans
agggggtaggagatcaggaagatggtgtctggacaggctcgatacagccaatataatagaaggaagacagcagacttgtccttgaaaagatcaagcagattaccaggcctatacagccattgaagcactatttatcaaagagccagaaagggttgaatatgcatttgctatagtactaaatactgcagaagagagcaagaaataatagcattgcagcaagcttcctgaactactaaagaactggtttaatttactacagcatctgctgaagaatgaatttatagcagcagcgtgcctagaaattggaggattagagacaaaagaagtatttatgcctgttaaacaagaggagacagcagggaagcagatcctgccgctcaaataggtatttatatacaagtttgacaaggatagttactttacaaaggcaaaggcacatatctgtataaggggagatcttgaaaaggattatactgttaataactatactgcaactacttcagcaagagtatttagagcagtcatagctttaatagcagcctttgacctggatacagaccagaaagatgctatcaatacat

SEQ ID NO: 620 - DNA, 1385 bp, Emericella nidulans
acggaacatattccttctttaatacgttcgtaaatccaattatccttgatgcgattgtgtggaagtactacattgtttattgtgtgatccttgtcgttattagtgtcacgatctggctctgggatcctgagacgaaggggtacaacctggaggagacagctgctcttttcggtttggatgtggataagaagatctgggagtcaaaagaaaatactcttacagtggagactatattatggtaaatattaaacatatttggcccagatagctcctctctggcacgattcaggcaaccgctctcttcccacttccgaatcttaaaccctgcttgacgcatggtattttgataatgttaggttcaagactgtacagcgtcgggtcgaaatgattgcacattttaccccattgcggaacgcctaattgaggagttcaacccagtgcttcgtaaacctagtatattggactgtcttgtagacacactgagagctttataacaacaaataggtcttgtggtctaatggttatgacatcagactctgatatctatccgagtcacatctggtaatcccggttcgatcccgggcaggacctcttcttccttttttatctcttaagtttttttaaccttgatttcttgttccgcggaacgcccttcacctaatttagcgttcccgcggccgactacccaacttttgttcagggcagacccacttttgttcggttttgactgcaaattgagccctatctcaacagtcaaatttttcagccgctcagtaacaaacaggtcttgtggtctaatggtcatgacatcagactctgatatctatccgagtcatatctggtaatcccggttcgatcccgggcaggaccttttatttcctttttgttctttctggtccacctgaccaagggtgcccgtaccattcagtttgattttgccagcaattgtgcgattgttcgtgacgatggtcgaagtaatgattgttaccgtttttactgcgcgtctatagtatatgacgacaaggaggtttgctggtgtgctgagagtataagacatactcatataactggcttcagaagagtcggcggctttgtaccgcgctgggatgaacgagagggcgtgatattaccagcggaccaacaagttttctaaactcggcaccccgaccggtctgggctcctacttgtggcgggatgatccgggccggctgctttgcaggtacatgcctgccaacaatccgtcgctctcggccacagtagttgcagcgatcatgctgtcaagcagcatctggagacaattgccgtctagacattaggacgcggtgggtctgatataacaccataatggaaactatcacctgtcttgggaaccatgtacttgctac

SEQ ID NO: 621 - DNA, 614 bp, Emericella nidulans
aactggcgcaggtatgcatgaagtctcatggaatgaaagtaaaaaggacatgtactggcctacacatatattatgaggatcaatttgctgagctgggtatcagtgagactgtacaaaatgtctacagtaccaaataacccgaggatctgggagcagtgatggatgatgatctggatccaagaatgaatttgaaagaattcgaacgagctactggcggatcgtgatatctagatacaaaactagggcagatatgcagcgtggactgcctctcggcgctgctctctgcatgtcaaccggaagacagttcaaatctggagacaatagctcttgctggtgagccggcgacacaggcgatagtccacacttgggtgacgagacacgtacttaatctatatggaggtgtagaggctctgacctgtgcgtgcttaatcagaggaaagtcaacacgggacatgacagcgcggaatgatctgaaccggtcacgccttttccctggtaaaaatgactatcggacgcctgtgcgggaatgaccatattatgcaccaccgacgatgccatttctgtggggtattgggggatgtctttttgggagaagtggcccgggtctggattta

SEQ ID NO: 622 - DNA, 2867 bp, Emericella nidulans
aggggcaaacaggtagttgatagaccaagctagtacgtacagctcgcagttttgtccaatggatatatgagcaggccagcgggacatcccattcacttcgcatattgttgctcagcggcaacggtcgggaggttgtattggtggtcgcacatcgatgatttctagagaaggaaaaaatccaaacaaaagagaaaaaagtattgaggctgacccgattcgaacggataaccttgtgatctggagtcacacgcgctaccgttgcgccacagccccattggatgtggggaggctttagtatttcgtcccacaagcctgaaccttttcaggaacaatatacaactgattgagaacgcattcactcacctcagatcctggttagcccttcagcctctagccacgctctagtagtatagaaaaagaacgactagtcaataatcagcgcaccttcgtatagtgggtctcagctggagcctcccgttccatctacagacgacatagttagaaccgctattagggcccaagaattttaaattcgcaacatgtccctgtcgtcgcctcagggtattgatggctgccgacttccaatatcttgctacggttacttaataccttcataacatgaagacaaactcgctcagacctcctcatttatagataaacaggtcgtatattgttctttctagaaaaaacgaaacattcagtcctgcccaaggtcacaacataagatcacgtattggttccaattgcctatagcttcgtcattgtcctgtccgttagtttgcttcgtcacccatccattcatcaggtaacatcgtagcgggtggcattgcgcatctagtaagtcaacccgccttctcacttcattcctcagttcaaaacaggctgaaaaccgcatctctgctcaaacagactcaacagcggcacgaacaacttcttcccctctgtttcccttttcgcctgatcagcttcgacctgctttttccggtcatcggcgagctcttcccagctcacccacctccactcggcacacttgagttgctccttgatttcaggctcctggcctccatcgactcttacccccacaaatatagtaacgtagtgcttcccgtccttctcaaagacatcgtttgtcgcggtaaggtactgaactgagttcttatcgacatgtacccccgtttcttctattaattcgcgagccgcgcactcttcccaggactcgccgaattcgaggtgtccgccggggagaccccatgtgtctatttatctgttagcattattcatgcattattcatactttttctcgatattgactttatagatggaggtaagtggctggggggattcacctgcgccatgagagccgatcctcttgcccaggatgaacttgttttcggggctgagggcgaaaacagcgacgccaacgcgaacggattttgtctctgtgggcatttccgctgctagacaagtatgggaggtaagagttaaagttgttttgcgttgagtgtggattagttaggattatcgtcggagcgaagaggcctcgaaattcgataagaagcctggtatcgggtggagatgagaaaagttcgtattggcacgatagtgaaggagtatatatatgtagatctataaatctttaatcattctagacgaaaggcactatagcaaggctcttttgttactcgtttgttttcctagtcgggggctgtacaaaggactgcgcttcctttgtgcaaacggttgtttgtgtgattggttcaagccgcggagctagaaagcgcagggcccaagttatggtggggctgctcaagggcgccatctgcatagcacctgacaatctagcttatggaaaatctgccttgtgtggctagggcctataggatagtgcaataatatacatgattaataacatatagtacaggggggtgtggctgatagtataagtgtggctgatacacggaaggacatacagctgttacagctgtgctaataacgactgcacaaagggcagcaatcctccatctggcacatcctgacggatccctaagcgccggcattggacctctaggatacgattcgtcttccagccattgcccacaacaacgatcaccggatacccgatgaggtctgcgtctcctagcttccagcccgttgtcttgtcgcggtcatcaaggagcacatcgatcggcgaggctttatcggaagctagcaaatcgtagacccccaaggcatcctcttggttacctggcgctgggacgatgacaacttcccatggcgctataatctttggccagttgaggcccttagcgtccgcaagagagtcggcgactgcggtgatcattcgcgagaccccaataccgtggcagcccatttgcattggtaccctgtcattttcgctgttcacgatgcgggcctttagaacctcgctgtaccgcgtgcccaggtgaaatgtgtggcccaactcaacggtggtttgagatttaagcacgccctgtgtgcactttgggcattgatccccatcctggactctggtaaggctcagcttgcggtttgtcttggggaaactgtcgagtcgcagacagtctatgtcttcgatgacgcagcccgcttcctccagaatctttagcggtggcctattgtaggcgtgcacgtgggagtcgtacaggtccagcacttgtggacgctctgtggaactctcgtggtctgccttggcggattttatgtgcgcagtccattggagcacagggttctctatgctagcgtcaagatcatagcctgcagcgctgacaatggctttgacggcgtgtgcatttacctgcctggtcaccggcttcgtactgccctcctggaccgtgaatttcgggtac

SEQ ID NO: 623 - DNA, 4605 bp, Emericella nidulans
aaacctcaaaaagttcaccgacatgaaggatgcaaatacgaaccccagacggcgttcttgaggatgcgccaggacattgacaaccccaatcctcagatgtgggtaagtacggctgcccgtttgaccacgtcaagctaactgtcctaggatcttgccgcctaccgagtcctgaagaaggaacaccacaaagcgcccggctgggttatcttcccaacatacgattttgcggtatgtagcctgtttctcattgtcggctcgtctaacgagagtagcactgtctctgcgatagcttcgaaggaatcacccacagtctgtgcacgactgagttcgtcttgtcacgggaaagttatgaatggcttaactcgactcttggagtctacgagcccatgcagcgcgagtacggccggttaaacgtcagtggaacgatcatgagcaagcgaggcctgaagaagctggtcgacgggggctatgttcgagcatgggacgacccccgtctgtacactgttattgctctccgtcgacgcggtgtccctccggaggctatcttgtcgtttgttaacgagctcggggtgactaccgctaactctgtcatcaacatcgctcgtttcgaacagtctatccgtacctacctcgaatcgcgtgtaccccgtcttatgctcgttcttgacccgctccctgttgttattgaagactttgataccctcagtgcagaacagctcaacctcgatattcctttctcgcccaaagaccctgcgatgggctcacaccaggtcggcttcaccaaaacggtctacatcgatcgttctgacttccgagaggaagatgccaagggttacttccgtcttgcacctggcaagagtgtcggtctgtggaaggccccgtacccgatcaaggcgaccaccttcactaaggatgccgatggaaaaatcacggaagttcgtgccgtcctggacaaggatggtggaaagccaaagacgtacatccactgggtccctgagggatcgcgcaagcttgaagtccgcatccacgaccaactgttcaagtccgacgagcctgccgctgccgagggtggcttcctcgcggacattaacccgaacagtgagaccatctacgcagacgccatgattgagtcaggtttcgacgaggtgcggcgcagggcaccgtggcctgaagccgcgggtgagacgagcgagggaactcctcgaccagagactgttcgcttccagggcatgcgggtggcctactttgccatggactcggactccaccgacagccacgttgtgctcaaccggattgtatccctgaaacaggatacgggcaaggcgtaatgaccgatcaggcgataaccccggcgagacttcatctatctcgtggaatgccggtaacttgggaaggtagaagatatattgatattaaatagttagcgtacaattcaacctccaatcaaccaaggaacaccgagactccaaccgtataaacgaattatgcagcatttctccagaagtgacattggccactgactcgtcggtggtctccgacgccagattggcattggcttggcattgcaacgtgatatctatgcgccttctaagtggccgccagctcagggacacccgccgataacaggggctggagaagctataagtaagagcgccagagcgggctattcgctgtcgatgcagatcggcgcgccatgaagattttcgcgactgtgctgtccctggccctgcccgccgcggcagtgaccatcagcgagatcaatggcaatgcattcctctctccgtttaacggcgaaagtgtctctggcgtggaaggcctggtaacagccataggcggagagggtttcttccttcgctcgacaaaccctgactccgacgatgctacgtccgagtccatctatgtctacggaaacagctctgtctccaaagtcagcgtgggcgacatcatcaccctcagcggaaaggtgtctgagtatcgctcttcagacgactacctgtacctgacggagatcacctccccgtccagtattgtcgtgaagtctagtgggaatgaagtaacgcccgtcgtgattggaaaagaccgctcgcccccgacagaagagtattctagccttgatactggcgatgtccttgccgtgccgaacaacgtcagtcagatctctgtcgataacccggttctccagcccgataaatacgggatggacttttgggagagtctcagtggcgagcttgtctcgcttactggcgtgactctcatcaccaagccgaaccagtatggcgatgtctttgtgcgcggtgactgggccgtaactgggctaaacgggcatggtggcttgacacagacggaaaaaggtgagtcccatgaactaccatccagggccgactaacaatgcagactccaaccctgaagcaattaaaatcggtacacccctcgacggaacgagcaactcggactcgtcaaaggtcggcgataccgttgaagacgttaccggcgtcgtgcagtggaattacggccagtacatggtccttccgttgacagccctaaaagtaactgggtcaaacgacacgaccgcctctccttcagccttaaccggcgacggaacgtgcgaggcccttgcgatcggctcgtacaatgtggagaacctgacgcctacatctgacaacattgaggctatcgcagaccacatcgccaactacctcaacgggccggcgatcatgtgcctgcaagaaatccaggacaacaccggtgcaacagacgatggcgtcgttgatgcaaacgtcacgctgtccacgctggcggaactcatctccgccgccggcggcccagactacgacttcaccgagatcgctcctatcgacggcgaagacggcggcgaaccgggtgggaatatccgtgtcgcatacctgtacgatccaacgatcgtgcagctgcacaacccaaacccaggcacatccaccgatgcaaacgaggtccagtcgggcccggagctgaaatacaaccccggtctcattgacccgaccaatgaagcgtgggaggcatcccgcaagcccctcgtcgcagcgtgggagacagttgacggcaagaatacgttctacaccatcaacgtccatttcacgagcaagggtggcggctcatacctgcaaggcgatgagcgtccgcccgtaaacggtggcgttgagcaacgcaccgcgcaggccgaagttgtcgctgtaagccctcccccgtccaaaaagatgaccctagccaaaccaactaatatcataaataaaacagtccttcatcacctccatccttgaagaagacgcctcggccaaaatcctcacaaccggtgacttcaacgagttcaccttcgcggcgccgctcaagacattcgtctcggcttctggactccaagacctcgacgaggtggtcggggtagacccactagaacgctacacgtatatctatgacagtaaccacgagcagctggaccatatgtttgtttctgaggcgttggcggaaggggcgcgcatggaacatgtccatgttaatacgtgggtcaattatgatgacgcgccgtcggatcatgatccgtctgtggctgtcctgaatgtttgtgaatgaatcatattggactgaaataggatgggagacgaggccggtttaaagtgtaaatacattggttggatgaaggctatgtatatatgacttggaatatatctctaccctaacaaggaataaaccgaatcctgacatgtataaacctcatgtaacgctttgagtattgtaatataacgatataagtgcgacatagagaagacatatacacctaaatctgtgaaccgtgtgaaataaccaagcgaaataatgccggtcccatcaactagatcgtctcatcgttcatctgccaggtacctaattattaagcagaattcaccaatttgccaactggtaactaaataacggtcaagatgctccaataactggcccggtttactacaggcttttatgatatagtacgtatccgctgattagtagcaatactccttgtgtccgctcgtcgctgagttaaatgggagctttggatacgtacttgcgaatgtcaggatatctgctacggatggccatcatgcaaaatagtgagactcgcaatgggtatccattttagggcttgattgtggcacaccgaagactcgaaaggcattacatttagtagtattaactggcaatttgcattatatagtgggtatattgcattcccacactcgtgatcttatccgacagtatattaaaagctttgcataagcaacagttaaattatttagacgcggcagctgggaggatacagaaagtccttcactaccatcagaacacaccaaaatccaagaaatccagtacctaggcaaagaggagatacaggcgtactttgcgctataggcttgaattgctcccacatccccaatactagtatacgatgacaccattagcagggcgctggaaatggtccacattgcaccgtccgcctgccactaccggacaataaatacgatgggaaaggtaaactagcaaaagcatgaggttcaggtgaacttgtaaaacatcattcgagcgaaccttatgcgattt

SEQ ID NO: 624 - DNA, 4346 bp, Emericella nidulans
atattgttcaatttgtgattgagaaggtatggtcgaatattctgactatttctaattggcttacaagtgacaggatgggctgcgtgctttggacgatcagccggcctctcgtacgaccgctttggactttggcgaacgacaggacacacctctacagagaaaacgcaaggttgacgagatcgcagatagcgaggatgaaggtgattctgatgcagaatacggatgggtggacgacggcttcgcgaagtgacactgtgcgggaaaacgaaacacgatgctcccagttccttcatggctacataccactatgaatacacactccgaaagtctgccgcgtcctctgtcaaaatatgccaaatccatactaaagatcaccgcctctcgggcgtctctcaacccaggttgaaacttccgtcattgctaaaatcttgtcatccggcacatcgatgtttgtttgagatggaggcgcttttgaagcagcgttcatcattgagctgtgaccgagattgaccccgccacggacggccgccgacactccacctgggggacgggaagcctggagagagcatagatggatcgggctcccgactaaaccggtgcgtttattgccatggacaacgtcgacgagctttcccagaaccgcaaactccagcttcaacttcacgctgtagacgacccccttcaacgttatttggatagcatacaagctggcgtactcaagtcccagaagcactaaatccattgtgacaatcatcacgttgatcccgaccagctgatgcattattttccggttctcacgactggaggtgagctgaagcatcctgattgtctcccagacgtatagtactgagatgatgacttcctgaatcgtgaacccggtcatctgaatcttctccatgacgttatagcctactacccaaggctcgtcagcgacgacatttgccccgtacgtcaagacggttgttggcacgtgcagaaggaagacatttgctatgatcatgtacaaaacgcgatgaaggatccgttcgtctcgaagcacaagatgtaaccgagaatagaggacgaaagattggcctgtcaccattgtccaccagccgacggtaaggatactgacagagaacgtcgagtcaacatgactgaaaaacttcaacaggaaaccgattgagtatggcacaactcccacaactccggagatcaaaagactccagaagtatagccccttccaccgccgaaaagtggagagcaccagaacaacgagctcaaggacattgtaacaggagagcgcgataaatatcgtcagaaccgccaagagaccttcacttctatcctcacccgtaagggaccctgagattccatcataaatgtcttgggccatcgacaccatatcgtcaatgcaactgcaactggaaactggtcagttacaggacaacaagaggagggatggaatattgcctattcttcaaaggaaaaaagacccaagcacagaagattttaaaatcgcctgtaacggaagcactcaccatccaatctcaaagggagacggtcaaaaaagcagaagtaccacaccagggaacactgtcaagctgggccatggtcctggatctggcaatgtttttataaagaacagaataacaatacatgcacacagaccactacaacgtatcctcttcctcaagtagccatccattaaattgcaagcaaacaaaaccaatagtaacgacaaccaccacaaggacttcgagcttgcttagaagccgcaatggcaaagcaagacgccgatcccgcatcagccagttactcctatctctccatatccggaactccgcttatagaacgtgctcagtgacaaagacagaggagtcgaggcctggagtgacagtaacaatcaatcgactcctgtcccgaaatccaccacgaagaacccagaccagatctaagaccaggaccagttaaacggcgcaccgatgaaacagcgcaacaagggattcagggtgctaatgttgcacgaggccgccgggtgttgactcctatgcatggtgagtctggagaatgagggtgataatatggagagagacgccaaggttcggccggtaatactttttcaagtctacggcctagggcacacgaccggcattctgaacaaagcggaaaaagtaagtcaaatgtgcaccacggtgtgattgggtgaagccaggcatgggattaaatcttaacagactatgactagactttatctggggtatgaaagatctttggaaggtttggtgccttaaggccctaaagaggcacaggtggcagggattatacgagccctggccagttaaaagaagctatggagagggctgggagcataggattgagcctagctagagtctagacaggcacagatccgctggagagtcccaagttggatctcaacaaacatctctcttagccagtcaaactatagtgtcgctaatctctccaatgaaagggggagcaagagatttaagctatcaacgatcattcctgggctccctgggtcaccaatctctcaagcaaacacgaagaacaaggagattgtgccccaggaatgaagtcctttgctcaaacgatgcgagaagagtttacttagtccaacgcaccacactgtaacgggtaccctatggagcgtactgtacagggcatcaagacataggctctctttcaacctaggactgtgtaacacgcatgtagtgagccggttccggtgactgggatggtgctacaatgtacgcccaagatacgaagcatgatgatggacaaagttttcctttcccacccgaggatgattgtcaatccgtgaatggacacagggttgcatgtttagagttgcgttggttggttctttatggcttccttagcagcccctgccgccactatgatattgcggggaagctcatttgtttgaagaggtcactaggcgcacagatggcttactttggtgttgcctttttgttctttttctttttcattttttccatagacatgaaaagaggcgtacgcgttgcagccgtcctatcagcatcgtatggttgaagcccatgcttcgggactaagtgacacaatgtagagggagaaaagcgagtaattcttgtcagactcaatgcaataggagtctattatgctacagatctcgacgggattaacatgaacgaatcatttatagactggtcagatagtcttcgatctcctctttcgtaagcttcctgaatcggggaccacgggctccttcaacgccctcgtagccaagcaaatgatcggcgggagggccaacgatgcctatagcgacaattagcttttcgcgccccgagttgcgaatactcttccaaacactcaccaatttctatcgtgtcaccattcatctcgccttcgattgtttccttcaaagtcagtagagcaatgtggatggcatcttcaagctcgagcccctccgtgtaacgcttctcaaggaacgtctttgcactcgtggcgtgctttccgatggccggagccttccaggggtaatagctgccgctggggtcgacctggtataagctgggacctcccttcagaatgccgcctgtctttccagtagccttcttgggctcttcctcctctcccttctgagcctgggcggtctcaggctcgacaccctcgtcccaacccgcaatcagcaagctgacaccatatggccgaacaccaccggactgtgttgcctcttgaacgacgcgggcaacatcctgcactaatatccgggtgggggggtattcgttgtagatgcgcttatagccggtgtgtgagaccttgcgggccttgtcgacaagcactcgatagtcggggctcataccggcgtagaccatgccgatgtcgggtgtgatgagggagatcttggagagcgagggaggatcaatcaagggcgaggaagacttcttctcagtggccaaaacgattccatttgtagctgcagcgagagatcagtagctgtcacgtctagtcggaggtcagccaactgcacctttaattccaagagcggttactccttggttgactgcgttcaatgcatattctatatcaattagcacggtcgcttaagattggcagttaagactcataccaatctgaacgagtttcccgctagaaggttgttagcaagccgtggtgcctcatcattagacgtccgcttaccttggagaaaaggtggtcagggagaaagaatatctgtcggccatcgggacgtctgtatatctttgcaagcttcacagtgattaaaattatgaggagatgaaggagatattcagcagagttaatggagatgggatggaggatagcactggctggttgacgtg

SEQ ID NO: 625 - DNA, 2796 bp, Emericella nidulans
tggacggcggacccgtggtgattggcaaggtcagggcttcgaacgtgatttattattggctgtttaacgagtaagaaagttcatggctcaggatctgagcaccatatacgataatcattgggcttatggctaggccaggtgacaggaataagccatttcctttttccaatccatcaggtcatgggttgtgaaggcagattatctcaataccggcgctttcaaaacggcggatggttaatctgcagttgcactttttttttgacggagtcagacaggggcagcctgtctgccaaacatggaaagcttagcagtacattccctatgccggaaggcatctgcaattgcactcagcccttgggcagagcacataaggaacattcccttcccagggagacaaccgatccccgcaattttcggtttggcagcttttcatggacacgctttctgtcctttagaaacttacgggccttcgctgttaacagcaaagctggcatttcactcttaatcttaatatgacatttggggttttattaacggaagatggtgaggaaagttgctattgtacacatgttgacacccctggctgactaacgcaagtctcttatcacgtgattaggactatatttgacgatttgaacatctgagtctccaggccttcgcgagcaaactggcgggatgctctgtttagacagtatgcgccatggccttggtgcaatactctgactcagaatctgactcggagaaagaagcccctcccagaaaaatcaataaaccaagtcaaaacctgagtcataacccagcctcaacgctaccgccgttgcctgcatcattccacgatctttacgcttctagcgtcaaagtcagtgtcagagatgacccaagccttcacggtgggcggaagagggtaattcctcatgttgagggaaactggcccactcatatatatctcgagtgtgcgtctcatatctaactgtttgatttgtctacttgctaagaagcgtagggtatccatcgaagaaggagcttgagattctgggcaacataatccgccaagcagaacatatgtttcgcgctgaacaagcgaaactcaatagcttcttgtatagtgatctaggcgtacggcttccccttcatattagcctctcaaggcctgtggttcttagaacggaggagaggcagccgtttatggacacatttggagcggcactaagtggctctggcatctcaccgtttgtgccatttgtccctcagtgtaagtgtttatgctaactattcacatcagatttgaggtccagatcgacagtttagactgggtctccaactttgagagaacacggtggttttatgtgctccgagtaaaacggccagagggagacggtctgaaccgccttttgcatatctctaaccgctcgcttggtctttttaatcaaccgccactatacgcacctttatttaactcgaaatctggaacccaaccaagtattcgagtcagcaagcctacatcaacgggcgattacaccgagtgcttccatatctctattgcgtggagcctagaagagccatctgctgaagagaagaaaagcatggaaagcatagatattcagcggcttaaagctctcaagatcaagtttgattgtttgaaggcgaagatcggcaacaatgtctcgagcataccactttgattcggcagtggaggggcatatagatcgattggatataccgttgcagcctataaagagcattgtacaccttgagccctaaaaggtgcgagtaaatcatggtggtaatcacaacagaaaatggacagacgtgcctgatctctagtcggcagtgcaggaggcatatatatcgggaatcacttctgctctttgcgacttcaaatcatccactatgccggaacatatatattctagtaaactataattctgaacagtactattcattgatacacttgtctctggctcctttgtacttgcctttctaaatgtcgtccttcatggactggtacgagacttatgtaaaataccgtaataatacaaaccgcagtcgcgcttcttgagcctcatctccctttaccaaactacagcgtgtcacgaagccttattttgtcagcggcgtgtaatgcctatagaaaacatggctcatgttcatatcccaaccgtaactttagtgagtatccttccacaatctcccttttcttgactgaccaaacaccaggaagacctccaagcctttcaagccaagcactttcctgccaccgtcaaaccgcaacctctgcaatctacctcgtacccgacccacgatgcctacaacgaagacttctacgccaacgctgatgaagaagatgttgatgacgaagatgacgatctcggctactaccccgacggcgtgaaacgcacactcacagatgaacagattcgcattttcagacatagtgagatccatgcacttttgagagagaagcagataaagcaggaaaacgaggagtatgagaagggccttgggggtaaaactgaagcacagcctgaggccggagctcaggtgcatactagcctcgatgagagagatggagcaatttctcgtccgccgaaggatgttgccaaggcagtcgccggcaggaaacgctgtgctgataaggttggatgtgatgcaggcgcagacgaaccggttttgaagagaaagcccacatcggactcgggggccccaagcgaagtgcaactggattacaacgaggagagtgctgctgctccaacaactgcaagtcagtccaggctacgcgagcaactccgtttatgg

SEQ ID NO: 626 - DNA, 3098 bp, Emericella nidulans
cctcaaacttgcccaggacatttttgaacgggcggacgagaagctcgacaaagctcaggctcaataccaggaccaagataggaagctgactgaactgcttaccagggagattcccagagtttgttcaccggcagagattcttgagaagctctcggagattatccctcaagacagcgatagtacgttcgcttcctttacaccttgccatgaacaatcactaaacctgtcttagaatggcccggccttagaagaatctggagagctttctggagtggcgagaagccaccgagagggcgttcgacgatcgactgaaaatgcacatgcaaagcctaacagaggcaatcaaaatatcatctgcagaggccgaaagggagcaaatcgctttgagagagcaaactgaagtcgtcagcgtcaaaatcaagaaagcagaagcggacctggacgtcgcaaagcaagagtacgcagaggcttctgagaatctgatacgagtctcgcgcagggtttctcagcaaaacctccggttgttgggtggaaacaaacttgatctggtcagtaacatgtttcaactagtgggtcattgatgcagtttacctgacttccctattatagaaagcgattcaacaaatcctaagtaaatcagcccagcagctcaggatccttcggcagcgaatctcaaccctcgcaaccatgttcaccgatctgtcgaacctgatagaaaataccattcacaaatacgagaacttccagcgtggcctgcaattggggcagtcagacgacccccataaggctgcagagttcaccaaggatgaaaaatttgtatgagattccttgcctttttttacattgccagctattcacaaccaataaacaggatctccttgaggacgttttcgaaatcagagggcgcctgattaccgttttacatgtctcgcaaatgtatacccatatttatagacgatacattcgaccaggccttgacgacatggagaatttcagccgcacagacttggaactatacaagagacaacatcaaaagcttgaatcctggtgtacaaagtctgtccaggagattgaacaactgacccttgaggtatgtacagtctgactttgcggggccagattgcatggattattctgagtctctatagcgcatcgacaaaatatctgtcgatatcgaaagcagcgttagagctgcattggcgactgcaatcaacagatgccacttctgggcaggagaatgagtttcttatcaaccattggttgactggtgattcaacatcacgctatctgagccctatgcccttgatgcgtctcggttcaacaccgaatattggtattgcagtttagttacgattcaggtagcaggtgccttcagactgaaatagcgcttatttcatcaataattgtatttgctctctagttgaacaacctgtggtcttgagccttcatcgaattatgctagtgctgaatatgtctatatttgtccagctttcactgaatgtaaatgttctagggccatatatcgccattcccgttccactgggtcatgggatcatctgaaaagaagaaatttccagcagccacatgcattgtcaggcgcctcccatataccaagcagtactgaagctgaggggctggcaacaggatgacctggacacgagcgaggctggcaaacgttcaacatggcccgctctatttctcccaagaataaagtactgtcgcagctcaatcagcactaacatcgcctcttgcgtcatataagccggtaacccatttagattcctacacccaataaaggcgtaagcctggccacatcagctaaccaccacgccctctatgaaatggtactacagtgaatcctaatcctggtgcgcatgttcccagcggtcctcttctgtcgcaatgaaggctccaaaagtgttatgggtcctttgcctatacaaggaccttagaccttagtgactcggccaaggcctgcgctgtcctgaaggcggtgagccacctacaagacttccctccaacaacaatccttctttctcctttcttctttagcgattccttcttgtacgtacggcacgtctagataggaagatccatctaaatacgtcccttaacaatatagatgtgatgaatagatcctcgagctaaggatcagcatttgtcctgcctctcctttttctcccgtcgagtccaggcatctccttcaacataagacccctttagagcatcatggatactgaggctcaactcaattccaagatcgaaagtcgagggtgggaattccacctggagtgggtttatcaaggggaagcttgcagtattagagaacatttattattcagtaagaaataaatataaatatatattataatttgtatgtgcatatgaatatttgaatttaatcaacatatatagttagttattaggcaatttgcagccgaagctattctcagtactatgtcagtagtctgcagcttgtctattgcacttttagttgtacttcactatggacgtaccaatgcgcttgatgagctttttcaacgaaagtcagaattttggaagtcagatcttgattattgaagcccaagttgcatatcatcgaagcatgacttagggattcggataccgcagccgaggataaccccgcattgtgatctcataccccaactctgccgcacgtcttgatcacccctttacacctaattttctgtctcctaatgtcagtcacagcaagcgcccggaacccgcctcctctgtcagagctcggctcgataattgcacgggcgctccagcagaacttcgcccatgcaagcgcatcagtgacccaatgccccgacctccgcaagcccccgtacggcctcgctgcttccggtcttagcgggaaccctcgcatcgcagatgtaggaggccaagctaatctctttccaagtcctaacttcaatgccaagtattctctgctgtcactggcgcgagatatggagatgtctgccgaaagaggttttgttcttggtgcaggcgcggcgccgtttcaggatatcggacataatgcagaacctgcgccgaatgttgcttggcaggctagagagggtgtgaaagac

SEQ ID NO: 627 - DNA, 1850 bp, Emericella nidulans
gcccgaactatgttctcaatagacgacgctagactctccccctttaaaaagtcagctatatagtagaggtgacatacaagaaaacttacgttctgtagctcaagctttgcttcgctcaggagcgtagtacttagctatcggcacatctccgtgtccttcgcattggctttgagataatagagcccttctttttcattactcagcatgccagtgtattcaacctctgtgatgagctctggaaaggcttttccgaagtggtataaccagctcatgcagaaattcagacagttcatgtcatgggactctctagcaatagagacggcttcctgcatcgcggacacagcttcttcataacagccgaaatccgcttgcagtattgcgagatttagaagcgcgtattgataggttcccttatcccgactatgcattgtgtagtcaaagtagcgatgaagattgtcaaatgatgacgggtagtctcctgccctccaagcatcgagaaatctagaagtgattaacgctggaaggtaaaaaaattccacgctcgcggctcaccttaggtaatgtatcaggtcaggcagtgtcactccggaggcaatgatgcgcttcagctgtgccttcaattcttctggcactcgcccgccaaatcctacattgtcagtaagaagtgtgcataaacttagggcaaacacatactttgcaactcgccgatctggaactccaggagccgctcgacttccttcgtactgacgtagcagtcgtcttcttcattgtcttcgatattgccgtatgctacctgagcaagatgactgctcgtatcaagacccagctcgaggagattgatgtcgacaggaacctgctcgtcggaagggtttctgcgtgcccaggctcggtaggttggaaggcgatatttgacaaaacctttccataacttgaccgaatcatgaaattgaagcctggtgaactccagttgagctctccttacaaaagcgcccagaggggagcatcgggcaaggcgcatgcagccagactccggagcgagaccggcatccctctctcgaattcgttcttcacgcgtctttgcaagggtagtggatatctctgtgaagaacaactctaacgcgtcacatgagtcgattgaccatatcttccgcaggaaaagatcccatatagatctgcccggtatggaagaagggtgtactttcagtgctttttctagatcctctatggatactgaatactgtgctggccaaccgtccgaggatgacggcgcatctcctgcacccaaggggctcaggtaagaaaccacaaacgagagaacatggatagccgacgaattcggaaccacgccttcggtgtaaatagaaataaggctcaggagggcaacttttgaaggagtgagatatcgactcattgcagctggatagcgtgcattgtttgcgtcaggctatatctgagattgtgggtctgggaaggagcgtagagaaagtggcgcgtcaggagggttggaaagataaacaagatcaaagaattgctatcgaccctagactggatacttcgcccatctccaatggagaaagcctgaagaataagaaggtgtggatgcagcaacaaagcgggaaaaggttttgtcaagcagaagctgtctatgttattttgtgctgtgttattctaatacatacgaccatagggtgtggaaaacagggcttcccgtccgctcagccgtacttaagccacacgccggctggttagtagtatggtgggtgaccacatgcgaatcccagctgttgtatgtttttgcctttttgccttttttttttttttctctctctctctccctaaaatcgcatcct

SEQ ID NO: 628 - DNA, 2693 bp, Emericella nidulans
gtacatcgtgttcgaaaacttcacgttcatgattgtcgcatcacaggttcaccgtgatacctacaccgttgccccgatggagatgtcgattaagcacgtttcaaggggctgcagtgcctttagttcgtagataaattcctcacgacggactcagggtctgaccttgaaacgtcaaaactcaacaacacggacatttgcccttgtcattcttctgcatgtctattgtgcactttgcatcgatctacctttcttgacctgccataacaatgcacattccaaccccaaccctttcccgccctttcggcgttcagctctggccgcacttcagcagggcattcactgcactgtcaggcaaatcccccgctgatttccagctcgtccctggcgagacgccgatgacgacgctgcagggcacgcttctgtctctggcgacttactacgtcgttgtcctgggcggccggcagctcatgaagagtcaggccccgtttaaactacgaatcccgttcatcatccataatttcatcttaaccgtgataagtggtgtgttgttggcacttttcctggagcagattctcccaacgctctcaaatgatggcgttctccatgcaatttgcgatgcgcgcggtgggtggacggacgagttggtgcttctttactacgtacgttttacaccagctaagaaaaccaacgaaattgaaagctggcctatgctaaagagactcgcagctgaactacctgaccaagtatctcgaactggcagatacagtcttcctcgttctgaagaagaaaccactgacattcctgcacacctaccaccacggtgccacagcgctgctatgctacgttgagctcgtcggccgtacttctgtctcatgggttcctatcacgctgaacctgatggttcacgtcgtgatgtactggtactatttccagagcgcgcgcggcatccgcatctggtggaagcggtacatcacgctgctgcaaattgcgcagtttgtcattgatatcggtattgcaccagtctccaactcacagttataccctttgctgattgtggttgacagggtttatctacttcgcctcctatacgtactttgcctcaacgtatttcccctgggtaccgaatgcgggctactgcatgggtgaggagtatgcggctggcttcggcgtgttcattatcagctcttatctgttgctcttcatctcattctatcttacaacgtacagggaaaaggcgccgcggtttttgagtcaggcgagggccctaggcgcaaagaaggggctctgagcgtggccgtccaaatctgtatggaggtagtgagatgcccttttgcactatcaaaggcctttcctcagcgaagtattaaatagtcttgtgttggttgaattgagagttcaggtcgacctggtgtgtgggaggtttatctgttccgttctatttaatgtgttcagtaacatctatctatacgaggaatatgacatagagttccaatatcttagctaccaacatttcagcgcatatacatctagcatgctctgcattaccctcagttattcctgcagctcgcatggtttgcagcctgaggcacagtctgaaagacagtcgaactacaacataacaaccaccagccgctgcagtgcaggcgcatgaaccgagtttcgagttccggctctgcccgcctgcaagtgaccagctgcatttcgtgcgtcttgtgcgtctgaggaggtcaatgctccggcttgaagatcacgaacgtgcagggttcgctggataggacagcaaacatccaaaggtagcttgatctcaacacggagtgcgtccgttgacgaaactatcggccacaatcaaactttggtatggcaagtcctaaaggtccgggatcctacttgatgcagttcggtccggggctcctcggtagaaccccggctagccatgtacaacgagttatggtgaaattggcctggagttcaatagcttaagtcttacaccgcattgtctttcagctcaaatcgagaaagcaaggccaccccgaggtatggctgacgcaagacctccattgcgaggcgctaccaggatatccaatattcgagaaatgccatggcattcacctctagtcttccaaccccatcctggcgaattcggtcaactgcccaggctaggcagtgatctgaacgcaggtccgctcaacactggcccactcgcggcacttccaggtacgggtttatcccgatgtcgatgacagccgttgctggtggcggtgttcctgtccttgttcctgctttgttcacaatgctgttgctagctcccgggtttaaaatcatcgctcagaccacaaggtactttgttactaattcgggcatcaaccagtccatacacacagttggcaccggggaggagtacatttctggggcgaccgccggacgcggtgggttctccctatgggtggactacagatctctctatcgcatttctggtgctcatgaggagctcgtggatggactgatcaccctgtagcaggtcgactcacactgaagtataagctaggcagtgccaacgtcatgacggtcgttaccatagttggcgatgtacactagctctgaccaagggccacctttatgcccttgctgacacgctactcgcttatctcaataaggcccatactaagagagcaccatttgtaggggcactggga

SEQ ID NO: 629 - DNA, 3715 bp, Emericella nidulans
tgcatcattctgaactgacatacagatgctgcatcgccttctcagcctgtttgtctcagctgctgtcttgtatcgaggagtttgcccagctacaggtctccatgttgagaggctacagagagcattacagttagttcatggctctgtccgcaccatcagatgcagttcgaggtatcccaatgcagacgccaaggtgcaccaatcaccaggactgtctgcagcgacctgatcccaggtatttcctggagtcatcaagggtctcgactcctcgagatagcgtctgtatggataatgcctccgatcttaacagcgactgctaaatatcgcaggcacttcaccagctacgcagcggctgcataaagccttcctggataccggtagaagcccagctgtttcgagccgtctggttcttcacccagacggccgtcagcagagaccccaccaagatcagagcaatgtcaggcacctgatccctgatcctctggccgtccagtaaggcagcaatactctgcacacgacagtgctggatagggccattttctggtctgaacacagaccggttgttggtcggcatccagtgtatggcgagaagacgtaataattcatttgcctgctttctggccaaacaaccctggatggtcactgcttcctcgagtttggactgattccaatggcaaacgccgtcagatatagtctttccccacaccagacgacaaaagatgcagcggaaacttatgcattgctgtacgctgagcattgcttgtacctagacctgccggttcatgccaacccccagccggtggctgccgtccagttcttcgaccctgggctactgcgagccaagcgggaagggacagctagcaatccctagaatgcttgaaagataagtagtctgcgcggaaatattccgtgttatctgtacatcccgaaagagcacttgaaattcagtaagatttcaatacacacccaatagcggcacgatagcgtccgagacggaacggaggactgctcgtatcgtacagtctcgaaacatgagggaatcgccgcctaaaggtaatgagagttcagaaattacaggaaaacaataaaaatgaaaaatgagacggaccaaaaaggagagataaagaaaaaaaaaagaaaaagaaaaaagagatagaaaaggaccgacagttgaaacctctggatgtcagccttgcaatataatggctgaacgatcgttagcagttgcgcaaaatggcatagcgagcgcggaactatcttccagcaatctgcaatgccagtactttggcgtacgtacattgcgggacgcccggccagtgccgctgtgggggcgtacttgtaccagactgtcagcttagctctcaggccggctgtcagtaaatgtcacagtcaccgtcacagctctcccgaggtttaactggctcgttttgctggtttagctggtttggctggttttgtctggttttggttgatactggctgaattttcgcccccaacaatggccagacgtccccgcaaatgcaactgtaattgattctgtaccccgctgtacggctttataagagacagggatcccagttgacatcgcagtggacatccagccaaacttcccagtcaacgtcatctctgcagtcgtaccactcatgtacaaccccccacataattaccaaaaataccaatatcaatacgattacgagtctacgaatctaggatgtcttctcagatcgatactacggtcagtccctaaccaccaggcttaaggtagagcgcatctgacgagtccaagcattatccggggaacatcatcaataaccagttcgtgccctccgcgaggacccgtcactccaccaacccttccaccggcgagcccttatatgaggtgccctgggctacagaggaagatgtcgaccgcgccgtagagcacgcccgtactgccttcaagtcgtggtcccggcttccgttccaggagcgttcgcggcttctggtcgcgtatgcggatgccgtggaggcagagcgtgcgccattggcgaaactgctggtcctggaacagggtaagcctctgagcctggcccagacggagctcgacatgagcgtgcagtggttgcgcacatttgtgacaatggaggtcaaggacgagctcctggacgataacgaggagcgctctatcacccagacctttccgccgctgggcgtgtgctgcggcatcgttccctgaaactggccggtcctgctcgccctgggcaaggtcggcccagccctcatcaccgggaatactatgatcatcaagccgtccccgtacacgccttactgcgatctgaagctcggcgaaattggcatgcgcatcttcccgccgggtgtcctccaggtgctcagcggcggcgacgagctgggtccgatacttacgcagcatcctggcattgataagattacatttacagggtcgagcgctacggggaagctggtcatgcagagctgcgccaaaacactgaaacgcgtgactctggagctcgggggcaacgacccggctatcatctgtgaggatgttgatatcgatgctattgtgcccaagatcaccagtctcgcgttcctcaactccggccagatctgtatgctcattaaacgggtatacatccacgagagtatctacgatgcctttcgtgacgctatggtcgcgtttgcaaagtcgatcaagaccgcagacgggtttgagccagacgcgttcgtcagcacgatccagaacagcatgcagtaagtttttgtcgtatatttattccctgatcttgaattttttggagacttcacgctaatcggaataagaggtacgaaaaagtcaaagacatgtactctgagatcggaaagcgcaactggaaacaggctctcgagggcaaggtattcgagaactccaagggctattacatcagccctgccatcattgacaaccctcctgaagattcgcgtatcgtcctcgaggagcccttcggccccatcgttcctcttctcaaatggtctgacgaggaggatgtgattgcacgcgccaacagcctgaaagacgggctaggtgcctccgtctggagcaaggatctcgatcgggcggagcgaatcggcaggcaactgtctgccggcagcgtttggctcaactcgcactttgatgtcgctccgaacgttccattcggcgggcataaatggagcggcctcggcagtgaatggggcatgaccggcttgaagcagtattgcaattccacctcgctttggaagtggaagaaggtcatgtagtccggtcattgaaccaatccataataccaaaaccaagaatagcagtagctaaggaatgctcagcccttgggttctttattagaagtaagcgttctctcaacaggcataatagcccagcgtgccaggccggatcaagatggccaccggcctcctgctaaatatatcttagctaaatcaaacttatttaacctctgttaagcaattttattctatattctaaaaagaaaaaagaagaagaagaagaagaaaagaaagaatatccgcaggtcaatattatactgctataccggccgtctacaagaaaggtttgttcattggtagcatcgcaagcggattcagcgcgaaaagagatcctgagctgaaagatacagctgccgcataactctacagattcgataaacagttgccaattaaaaccgctggatattccaccacggaggaa

SEQ ID NO: 630 - DNA, 2867 bp, Emericella nidulans
acattaaatgcaatagacgaacattattcaagaaaagatatgagcactcaaggagatataattagataaaaagtgaaaagagagcacaaaaaggaaagtagaagagaaatatgattggtttatagagatatcagctagaaaaggttgggagattaatagaggccattgttaagaacgctggagcattccgccacatactaaacaggtacgggggcggaatcccctgagcacaaagattgttatgatgatttagataaaaagtggcagacccaggtacgaatgccgtttacgaattaattacccggaccagccagtttggatttccatgggaagaatacggaataccaggatcgcgcaggcgatcaatgagtacaaaagggtttcaattgctcatggctgttaggtgcctaaggatctagagcaaattcggtggtagcatctaagtccagtaatctgtcaagacaatgctccaagctcaagtacgtacggcgctgctaggggcattaatatgacatgccgtaatcatgcagctgcaggtgtatctacttcttacattcccttttgtaactgcacggtatcctcaatacaaccttccctgacttgctactttcgaattttgatcatggtaagactaaacggccgcttatagctcggcgcataccaggactggaagtttcgcccgcgatcgcgaacagcgcattcgacaccctgcttatacctaggataacaaagttggagccttttatggcgtatttttcgccaacaatgttgcgagcaatgatccaccggcaatgcacggctaagacatgtgctagccctaagagggcggcgcagtcggcaagcgactagccccctgtgggttctctttccttacagtacctgccctctatttctgctggagacgatgcaatataaaccaccaccgaatccctgatggtatgaatatcaggtaacggcctgatatcctctgacttgggaacacctagtgcaaccttcccatgtacactccctctcttgaacaatctgtgagcttctaaagccgtaccagatccatatccagcgctccctgtatcttggagcgcataaaaaaaattaaaataaaataatgattgctcagactacatgccattctaggatgtagcaggccggcataaatatagtggaccgacagattcctcttcagggatataaagacctcgcctccgcaaattccctggtcagggatccaaggcatgtcaacatgaaatgatatcacaaagaagctaggtcacactccaaaatggacatatggaacccaaagtgcttctccaaaccctcgatcatcctcaccgtcgttgtcatatgggacaacgtctcttttcaatctattcccactcccaacggcattggttgcactctttactcccatctcgtcagccgtcgaggacacgtcggctttcatacgtgtacttctcccacggctgacttccgatggtttgttcaaccaacgatctctaagccctctgatagccttgtgcagccctcgacacacagagtcgtctgtcatatctccatctcgaatcccttcatatgtgtttctcgcaatttccacacaaatttcgtcattgacctcccacaaagtaccgataacgtggcgaaaccctgcaagctgaaacccgctgatcagatgaatgctctcatcgaggaatctttcatccctgatctgaccagtcccgcatgccgagaggtaggcgagaaacggtaaatgttcccggatgtttatctgaagaagattcgcgacactcaatggatggcatcctccagaagtaaatagcttttggatgggtctgaattgtcagtatagccatgaccggcaaaatggaagatcttgcactgaggtaaatgtgcctcaacatcggctttgcgtcgccctggttctatcgtagtcaaacccattgacgtgcacaggctatgtagcattgccacctcttccgttgcaaaaggaagcggcggactaccgggggtgtagtccatggcaacaagaagcgcctgggctgaggtaggtcgcacactaggatgccggcggccgtgtatgatcgctttcacagatgaactataggatgacatgacgctatctagcactgattcaaagggttcattcgtataccgacccgccgcatgtagagcgaatttggtcagtagaccggtagggatccaccatatgtgcggccaactgtcggcacgagggcactgagagaagcccaaggtttgaaggactgggcttgcaatcgcatcccagagccactcaagggtgttgggactggctagatctcccttttctgccctcttcttgatatcgtgattgttgaggccaggtagatttagggatcttatctggtgctcctctacaatgatcgcgtcgcagcggtaatcactggtattgatcagaatgataggacccctttttgcagcagcttgcatctccactgtgtttggcgggagcagaaagtcattgaacccgggtcgtgtgtggatctcatcaatcagtttgtcaaggtcgctggctgctttgtgacgtgcattcgcgtgggcctggtcaaaggattggctatcttcctctgctgggaaattgttgttgtcgataggtagctctagcttgtctcggagggaaacaaatttctctgcaagcagagggtattgctcctgtaaatctaggatatcagtccgcatctcctcaagggacgttgcaagcagagcccggccctgctcaagatagcctagagcaactgcccgacccttctctacattcagtgccaaagaagctgcgtcagaagcgaagccgaccacctgaccaagcatatgccgcttatcagaaatcaccagtgatg

SEQ ID NO: 631 - DNA, 1473 bp, Emericella nidulans
tggtagaatctacaaagtttcctcacagtggaaatcaacgctttttgaacagggctaaacaaatgatcatatggcctttcagtggcttcagcattttaatacatctacaaaaagcaaggttcaacaaggccaacattggctacttctctttgactgccatggctcacatcttacatatgaattaattgcatattgtcataataatcaaatcattcctttctgctttatcccaaagacaacctattttattcagccccttgatggtcaagtttttcagtcatacaaattccactataaaaccaacaacaaccacatcgcggagtggggtggctctacaacagataaagctgacttccttgaacaagtcccaaaggcacgtgaagatgcatttaccaaaaagacaatccgtgatttatttgctaaatgaggcatcttccctttacgtccccagattatcctttataaacttgaggcagaacgtgaaccagctccagagcttcagatatttgatactaatacaccaccaccaccatcaagttcaacaaattcaccacctcaaaccattcgtacgcttagacgaagcattgacaaggctcaagattttattcaggaaagcccaaatcttgacaaaagctttatacgtcggcttgatcgggtgttccacagttcaattcaaacagccgagcttgccgcgcaacttaagtctgattatcacactcatcttttgccggcaaccaaaaaaaagaatactagtcgaagaccatccctaaaatatttggagaagtcacagtcaagcataccaacgtcatattgctgttgataaagaacgagaggcaaagcgggttgagaatcgagctcggaaggagcaagtccctttaggggctgagcccctacacaggagccctaacgagccagacttgcccctaagtgaaagcgcagggcatatttaccacggcaggatattactgttttggatgaaccagttattttctataaaaagaggtagaaattcaaaattgttcgtatgactgaaatttacgtttgactgaagaccacgtacaacgtaaggcggtgtacgtgggtgcagccacggctacacctgtaacaagcactgccacccttgaacggcatttgtttacatgagatctcaatcctagtgcttagtgaatctgaattcatagggaaatagttttcgaaaaggccgcgggcgtcttgttccgtgacatgtcttttgattgcacttgtcaaaagctcgtcgaacaaaatattacgtgattactaggccacgacgggtggtcacaacaatcgaagccaaaatcaagacgtgcttggaaactataaacccatgcctagggcaataatagccctgtacatgctggacagggtgttagaacgttctcctagggcgggtaggtcccctgcaaataaagtccaagtttgctctctaggctgtccggtattgccttgtattgc

SEQ ID NO: 632 - DNA, 189 bp, Emericella nidulans
taggcggggcgatccgttgtgagggatgcggccataggcctcatgagcatatgttaggcatgtgctggacaccaggggaggacctactcaagctatgacattagcatagatcgcatctgtgcgtcgctgaatccctattgggcccgagagggtccgagcagtagatgtaatatagtattcccgggtcct

SEQ ID NO: 633 - DNA, 537 bp, Emericella nidulans
tactatatttctgtgaaatatgatttgattgttgttcctttgaagtaatgattgttgtggtggcgtggctaggccaccaggaactagagatcattaccctgcttaaaggcagcaatataagacaagaatacaatacaagaaaaaaagaagtagttgcaggcttttataggctattatatattatatatgattatagacataatattatacaggattataatagtagtagtagttttaatattctagagtttatttttaatagctaactttgaaaatactattactatgaagaataatatttaattgttataagctatctaaaatctaggataaaataatgatacaataaatctagctattctaacggctgcagaggacctctaatatatatatagattaaaggggaaaaaaatagatctacttccagggaggctaacctactaaatatatactagtaagtagtctctagtttgggctatctatatgggaagctagagatcttatagtatgttcacatagtaattagatgattgaaat

SEQ ID NO: 634 - DNA, 576 bp, Emericella nidulans
ggcaaatcgggaggcgccgctgaacgcggacccgtccatttcagagaacacacaccgagagggggggaagggtctagcaggggacccgggggggccacccggcgcacgagcggggggagcggaccaacacccacggggagaggaagaagggcacgagccccagagcccgcagtctcagcacccccacagcggctggcacggacagggtgagcaatgcacccccagaaggcatgagggcgcgaagccgatggccaacggacacaatcgataaacgcgggcacgagtaaccaccgagaacgacacgggtggcgccaaggcccgctgggaaagcacacaaagccacgacaaaaaggattgaaggagaccagcccagcagggctagaggcaccacgaccacaggggggaccggagcgcatgaccaccatggagaggcagcgcagggaccacacggcgacagggccataacggagcccataagaccccagagaaggcacatacagggaacgcacaccgcagacacgatgcaggactagacagccacacagcctcctggaggccgggaagaagaaccaggac

SEQ ID NO: 635 - DNA, 2653 bp, Emericella nidulans
gccaaagtatgtcagaaacctccacgctccggccaggagtctctcggagtacgataggaatgacagtgctgttgtttgggtaggatactcggtaatgagatcgccgcacttgttagcaagcacagccgatggcttcagctgcgtcaactggggatagttgtaggatgcggagaacatataatcccccggtgtgaaagtcactgtcctgcccgcaattgaaacctggctatagctcgagttcatgggcacgaagttaagactagtggtggtaacattatccagccagaggcgttcaagcgtaacgcccccatctggagtggtgccaaacatgatagcgtcctgcacctcagggtacagaagactgggtccttcgacaaaatctctgatcgtcctaatacttcccaaaataggaacggtcaggacagccgatgcgttgaacctcacgattccctgtacacccactatcggcaaatcggtcccagaattctcaggtggctcagtgtggatagcggttaatggagggccagctgtcgaattaacaagcgagattgagagactgccattgaccccattctgcggcgcgaagaaggcacatactccgctattaccagcaggccaggccacgatcaagcgcgggccgatgatttccagatcgctgtctggaaggggacttgtaacgacaagctgggcagcggtgttgcagtcagagtagaagaagttctggtacggagggtcgcttaatgttagagtggcaggctctccgctgcattgtgactgccgggttagctgcggaaggttagcctttatggtgttcagaaggaattaagcgttcagagctagactcaccaagctggcggtggtcagccttgcgagggcaccaagcttcacaaggacagagaccttcatggtagaatggtagacaggcagtgtgagcaagaaagttatcgaaagcaagggtgcgcaagagtctttatattcgcacaaagtcagcgagatccaggacggtggatcatgtctatgacaggcacaaccttattttgctccagtcgctgcgcaatttgatgaagaaatacactgtgaagtcaacagaggaccatgtggcatcgacatttccctcagagttacaatgatagtaatgatagtgggcatgcggggaaatttctgactccacgagaaaacgttttgttgcgtccattggatgcttctttttcattccttttaggcgagaccacatgtgacgtggtaaatgtcgcgagctaactctaagtcggctattcctcttttgagcgcactaacccaaaggagtaaggtcaacttagagttagctaaaatataatactacttgtcagtaatggacttttcctcctttatttacctcaacttcaatctgccaataagaaatagtctcagactagtcactgactagtttgcaacttgctgccaccatgtctacaactctgcaaattccaggtgctattgacgttccagaacaggtacaagacttcatttttcttacctagtttgtgactagttgctaactagcagcagattgacagagttattcttagcaatcatccaacacgtcctctaatcacatctaaacttgaatactgctatatgttaccttactatcctgaatctcatcagaatagctatacctatattgtcctacttgatccgaaccaggtaaggagcagggaagataagggaagacttattaaaaatatttattctataactaataagggactagttgctgactagtcacagactcaataccatgcttgccagttggagtgttataatactcaatcaccctatattcaaggcagggttacttaaatacagtactagtattcaggcgttcaaatatactcttatctctatcctaaccttagaaatatatactattacaaggttacagaagatgactggaactatatctgacaggagcaacaacttattaaagagacagaaatagatcctaaaaaacagaaagcaatctcatgagtaactagtctttatttaattagagactaatcaaggactaattatatttatatagacatttctttggtgtgctttatatatttaagagatatcaagcttgtcagctgcaacaagtaggggtgtgctcctaagataatacttggcaaagctgtaagtaccttagggtagactagtctgggtctagttactaactagtcagcttcaaataggccatgctttatcttatatatgttgctctaattcaacactggaaacctataaacaacatttttttgattctcttacattttgtacagatacagatatcctatatctagctcaattattcgagcagagaggaattattgaaccaaaatactatgcaatgattgatacaagctggtcaaagagaatatactgtaactgcagtaagttatacagctagtcttgggctagtcttggactaattactaactaattcttgctaaggctttctgcatggtgatgatatattactaataaagtcacaaccttgtactgcgatctttaatattatgattctattagacctagaggcctttccctattatctttttatatcaacaggaatatatactcatcctccacctcctccagctaagatcctggcgaaattgcagataaa

SEQ ID NO: 636 - DNA, 557 bp, Emericella nidulans
gccccagcgttcaccgtacttcgccttgaccttctccccgttaccttgctagttgcggtaccagcgccagagagtggcagagtagtgtacgccgatagtgtcaatgcccttgatctcaaacccagcagcctcgagtttatcgacaacgaatccaaggggagtgctagcatcggcgccggggaagatgtatttgttcatgaaaagaccccagatgagatcctcgtattgccaggacttgcggagaccagcaatttgcaggaagaagacaccatcgtcatccagcatctcattaacctgagccaagaacgaaccgaagtggcgaacaccaacgtgctcagccatctccaagcaagtgatcttcttatacccgccagggacacgaggagcatcgcggtagtccatacacaagatacggctctgagattcatcaataccagcagcacggagacccttattgccccaagcggtttggttgcggcccagcgtaataccggtaacctgagcgccataatggacagaagcgtatttcgccagagtaccccagccacagccaagaa

SEQ ID NO: 637 - DNA, 919 bp, Emericella nidulans
cccaaccctcactaaagggatcacactaaccagtgaatagtgcaaacaactaccagcaagaagaaagtgagatgtggatcggcgagtggctgaagaagcgcggtaaccgtgatcagatggtgtatgtccaacaccattttctcccagtggtctccctgatgctctatctcactgattttcgttcagcattgcaacaaaatatacaaccgggttccgcacctctcactgtgcgaccgagcctcttcaatccaacttcgttggcaacagcttcaagtccatgcgcgtctccgtcgacaactccctccgcaagcttcagacagactacatcgacatcctctacctgcactggtgggactttacaacgagcgtggaagaagtcatgcacgggctcaatagcctggtaactgccggaaaagtgctctaccttggtgtgagtgatacacccgcatgggtcgtcgtcaaagcgaacgactatgcgcgcgcgcacggcctcaagcctttctcggtctaccaggggaagtggaacgccggctaccgcgatatggagagagagattgtccccatgtgccgcgatcaggggatggggggattgcgccgtgggcgccgcttggtggcggcaagtctaagagcgcagacgcccggaaggctgcgagcagcggggggagtaaccgcggagcgcagatgagcgagagcgatatcaggaactcagacgcgcccgaaaagattgcggagaggaagaagaccactttgcatgctatcgtgagccacccttgccagtaccccatattgtattcgatcactgaccagtgcccatgccaggcccttgcatatgtcatgcacaaaacgcccaactttttcccatggtggccagcacaagaccagcattgaaggccacattgagcgtgagaattcctttttg

SEQ ID NO: 638 - DNA, 542 bp, Emericella nidulans
actataatttaatcttaataaaatatcctagctataaccttttaaagataattattaattaaagatttacttagctaggtttattatagaatatataataatttctttctaattataatatctatagcagcaaagctatatagaaggaaaaaaaatataattttttaaaactattacctattctaaagcagtaatagagttaaaatatttattaattttataactaatttgcctgtatctaggtctaggactgtcttagtaatagttattataaattaattatttaagaactgtatctttaaggctataaaaaaaataataattaaagtagttatagtcttattaatagaatacctaattcagcactataggccttttttaatagttatactaaataaaggcccctaatttatctctctatatagaaataaatctactctctaattaaaattactagaatactattaatagtattatacagtggtatgacaaaaatattggcgagttcagacgccccataattaacgctagtatgaaaacag

SEQ ID NO: 639 - DNA, 1021 bp, Emericella nidulans
ctatcatgccagctgggcagttattcctgccattgcagtctccgttgcggtggccataccagccgcaggtcggtagttttgagcttggtggacaacagaagaaatggtcgcttccgctcagacagccggtatggtcgatcatgccttctccagagccatcgtcgtccatacgtttgacgatcgtccacccagagggacaatcctcgtagcagtccgtccacatacattgctggtggacttttctcacctcgttatcttcggagtgcgcactcatagctattgctttgatcttgcggttcgcagcctcccctaaggcacgagagaaattgccatacggaaggtcatgagaaacagcccagaccataacccctcccaagcactggctgctcgcgaactgcgccttgagtttaaaggtttcggcatcatcgtacgtaagccactgattgatgtcgaacttgaggattttaaccgcagcctccttgtcaagagatggtttcactgttgctcgttcatgatgtcgacaatttccgagttgagcagaattcctacctcgttactgcagggccctgcatttccgccagattggaataaacaacctggttccatgcagctgggactcgcagctgcgaaaacacgggcgtaaaatgccatgcccaggactaccttgccaggcttgatattattccgccatagcaggtccaatgcgttcgtaatctcagtgaggtttgtgtgagaattcaactgcggttcgagccacttattgttttggtcccaggcgccatgcaaatcataggacataatattgaaaaagtccacatgatcttgtaaattgatgatatcgaaatgctgaagataccagtacgacgctggcagggtgatactgagaccatctcgtcctcctgaacccttcagtgctttcttaaggttggcaatgaacctaggaaagtaatagatagtccgcagggcggccgcttcgatcgtcagcaacagggtattcccaatctaggtcaatacaatcaaa

SEQ ID NO: 640 - DNA, 1031 bp, Emericella nidulans
caactcacagtagggcgtactagcataaatctctactgcccccctaataatctagttgcccctgctagtactttctttttaccctctatactttctatactcttagaatatatacccctagagaatactatcctagtaggagactttaatacctggtacctattctagcagccagatactaagtcttatactattatacctggtacaataggattattagactagcttaatacctataagctggaacttcgccttaagccaggcacccctacctgtggaccaaataccctagaccttgtcttctctaacctactactaagggccctagtagaagaccatctaaagactctaagtaaccatgcaataattagaataatactagaataagaagagcccttgcctatatataagcttagatctactaactaggagaaagccagagccctagcaagcctgcctgacccaaccctattaattaacctactagctaaataactagtccagatatcctagcttgcaatataaggtatattaagatataatacttatagactccctagaccctatgggggactccagaactgatagatctactatactaaaaaggatagtaatacaaccctgactataaacagctttggaaggctatttacaggcaaagactaatactaaaagtgtggattaaacaggttttgaccaaagattatttaacttgtaattgacatatactagacagctactacttacctaaatgaagggccgttctccctcaagacggtacaccttccaattctctaaaaaggggctgttcaataaaaaaagggctcaattaccttggtattactggcactaaactgtggcatttttggccattattgccggggcaatttttcgtagggggcgccaaaaggccttatcgcccgttaagacgtttttctctcccgtttcttataacgatggtcccctacccgatttcttttgaagtaataaaaaacttaataaattccttttgccaactatgtttatgaaac

SEQ ID NO: 641 - DNA, 399 bp, Emericella nidulans
ataaaactactttttaataatcctaggattcttatatttagcttattaataattatagtaccttgcaaagcaagattttagttctggataatactatttaaagttagtaacctagtttctaccaactagttctagggaggtattagatttagtttagaggattatattagctatttcctctatatatataagccttagaggacagccgtgcttatccctagatactatctattatactaagtaatcctcctaaattttagatagccttaagttatggttgcaggctttttgcctaaattcatagctattaagttaatctcagagtatactttgcagaatattaaaaaccaccactgcttgatgctgagacatgattttgctattttttaatatatttat

SEQ ID NO: 642 - DNA, 586 bp, Emericella nidulans
taatatatatcttaagaaagttatatttattaatataattatatctaagccttatccagcccttaacaaggcctttatataccttttttaagggtctaaagtaactaatattaagtaattataaaaagtataataaatctgtagaaatatagaatagaatatatctaattatctgcaaatctagttaaatttaggtattaagtagcttttataactatctaagattagtagataataatagctgactttataggcctgtaataataaaataaagactctttaaaactattaaaagcttatcttatttattatctagctattagggctgactttaattttctaatctaataataagttattattctagtactaatcatctaggtaaagcctttttttaaagataactattataggaagtacctaactatttaacttaatatatttagttattattacctatttctaattacctaggtatataagatatagtttactagttttttaaaattataatataatttctatagtagctataatctttatagtaaatcctattttattaaaactatagatattattatatata

SEQ ID NO: 643 - DNA, 133 bp, Emericella nidulans
cgttgatgatatagccccccatggaagagccgttatcacagcgcgatatatgagtacgtctacatagcttgacatagagttgacgcagtcgaatcagtactttagtgtcattactcgtaaagtatggctggta

SEQ ID NO: 644 - DNA, 1477 bp, Emericella nidulans
  unsure (1)..(1477): unsure at all n locations
agaatatgaccagaatgaatatcttaaggtatgtaaagattagtctctatctagttactgactagtcggggattagtggataacatctaactagcattatgtgcgagaaatctattatgaaggtaatattataattattatttgtatattgcaagatcaggccaagctatttcaaagcctatgctcatttgaagttgacatgtccttcaaacgtgtatgtgagggcaggtttaacaaggttatctttgctgtttttttagaggatcatggaaaaggtaagtataatactagtcctgctctagtcccagactagttaataactaatcaccttctagttattatactcctttgtgtatttatgaaccaacaaacaggctgtgcctactattttctatttaaaaaggtctttgagataattcatgacctttcaggctatctagtacagtttttctatcttcatagaaccggcattgaaactatcattgttgatatggatgaaggacagagggatggtatgttttctttgtgcactgactagttacctactagttgctaactagttaggtttgggaaaatgcctacaagagcttgatccagaatatcatgaaccagactggtagttagaaagaattcttatcttctgccgggttcattttatctgtgggattaagaatataattggccagaaccaatgtcatacagtcttatttaaggtaatgattagtcttttacatgcccctacccgagcctagtatatggatattttagagcaattactaggtaagtccagaccataactagttagcaactagtaactaattaatatagaggatccaactctaggcatggcaacttgggctgaatataagctgtatccagtagtttctgctggattaaataaagcttgcttacaaatccctgaacagtattttaattaaacctgtatatatactaatgcaggtgaacaaacctaccaaaaattatatacttttagtaggaagcacctaccaattctaaaggcagttactaggtaagtttctaagtcaagactaggctttgtttagactctgactagttctcatagtacatattttcttgatgtacgagatatgtatcagtactctgtgcggatatattataatattacctattcctatcggccagataataagatctcaagaattacagagaatttaatcagggactataagtctagccttgactagtgcctaactggttactaaccagtattagaaagaaaacaataccataatcaggagattaaggaagaggaaaatatagaaggagttctacctagaagagcatgtccttctagatctttctcatcctctggatctccgcgaccgcaccgctccaggtctagtaccaggggtagtagttatactagaggagtgatctgaagttctcnaccacaaacaaaaaagtttatgcaggcactaatccagtactagttgct

SEQ ID NO: 645 - DNA, 1203 bp, Emericella nidulans
cgggatccttaacaaattgtggccaagctaatatgtatgagcctaatcttagataacatcttacaagatatgatgctatgctccctacgcctatggggacagaagttttatttatacaaaacttgacaagttcttgttctgcggtcgtggaccaatcaaaaacctagatattgcagcatcggcagaccaattagtggcttgatcagcattcttcaacaataaatatatcccacaggatccgcatgagttcaggcttgaaaataaatatcgtacgagccttacagagcaaaaggatccttcctgagcaaaacgcgatgatcaggagtcaaagcctacacgtacagaaaccctatgtcaagcatgcggcaaaggatatcataaggctgataattgttggacattgcatcctgaaaaggcgcctaaacgccatggaaaccaagcactcggaaaccaagcgtctggaaaccaagcatctggaacctctaataataataagaaccaacaactaacaggacaggagctagtcctacggaaccatccgcaagccaactcaattgccatatctgttaaagagcctatcttaataaggagccccaatggcttttagacaccagtacagtcttccatatatctaataagtattatattttcagcaacctccaagaccacaaggcatttatagatgatgtcggtggttatatgcatcagattattggaatcggaactgtattagttcatgggatagaggttccagatgtctaatatgcacctacagcaaaggcagacctgctgtctttcagccaactagataaccaggattttgatatatctatatatagcaatattaacaagaagcatttctatatcacatcactaacaggagcttccctggatgctatcaaagaggaaaatatatgcctatatcaggtcaaacagttgcatatgcaatacagctaaccctatacacaaagaatacccaaaataatatagtacctatagcaactatggaggaatggcatcagcacctatcccatattcatttccgagccatattgaagatggcacaacagaaaatcatcaaatcaaaggcccaaaaaccttggctttctgcgatatctgtcgacaggctaaagaaagaagaaaaagctccaaggagtcagtattacatgctacaaagatccgtggcgcagataactattgatc

SEQ ID NO: 646 - DNA, 2438 bp, Emericella nidulans
ctggaaagacagcgtcctaggtactgaatggcagatcaaacccccgaatcatcctcgactaccatatactcctcctggtactgttcccaagagtgacagttctcctccagtccttcagaatacttagtcttcaataagtcttgaatctcgctgtaccactcaataaactgcatcgcgaagccctcctcggtatgccatccaatatggcaatgcataagccacgcaccagggttatcagtgtaaaatccaactataaggtacacagtttccttgagcatggctgtgtcgcgacgtggcaggtttgccgcacccagtgtgtcgatcaggttgtcactgctactattgtaagttcccgtgccctgggcaataatgacggagacatgtccgtgcagatggatgggatagggaacggtgagctccgtttcgataacgacatagacccattcgtttgctttggggagctccacgacgccactagtattcgcaaacgtcgataccgaatggttgcgatatatctccagtaggataggatctgtccagtcaacgtgcatcgaggtactatttagcttccaacggaagagattctctgtgttcgttccgagtgtcactgattctgacttgtatagaaggcgctgcttgagacgcttagcgggttcaccatcggtgtgaggtttgaggggtcttcgccggagcaggagtccgtgtagtcgtaggccgacgtctttggggtcgaggtagaagagtcgtagtatattatacctctgatgttatcggacgactcgttttcagagcaggcttcttgcgggattgctcggagccagaaactgtctgccacagaggcttgatcggcggtgatgatgacatcgtagcgttggcctgtaccacaatatatgactagcatgaagacgggaagcccagagggtttgcaggaatgggtcgactcacccattgcaatatcaagaacggttgtctcatacggttgggtgggcacaagatcattcgcaatcacagtgagtgtgtagttatcaaccatgaacttggagtgtgtgtcgacagcttcattcactaagcggagcctgtagcttgtgcttttgacgaacgtagtgttccatctccgtccagttttgttaccctcatcagagccgtatacgttagttccgttaatcaacacgttatccagcgttggtggtccctctgactgtgcatagtcacgaagctcgtcaactgtgcttatatcccagtaattcaagaacattacccccagatctttgtcgtaattctcactcgcagggccatgaatcccgatgcctccaaagagtccctcccacgcttgaagtccaatgtggctatgataccaggttgtgccgtactgcatcgcgcgccacctatacgtgaccgagctacccgttcagccggacactgcgtgattgaaacgactccgtccacgggattagtgtaatactgccttactccgtgaaaatgcacactggtgccatttttgacgctgtccggcaaactatttgcgacatagacgaccacggtatcaccccaacggcttttatggtgggcccagggatggagtcgttgatgaccagcgcgaatcgctcgcggccatcggagaatgcggtgatccgctcgagattaaagtgatattcgcgaattacgcccgtttcggggacggttgtagtgtagctgtgtagatgtcgtaggagcaccattgttggcgagtggtggcggtgttgccatcacagatactggtattggaagcagtagaagattgagaggaaagagaggaggatgttgtaaatgcagcgatagttgagggagaagaagaagaagaagaagaagaagaagaagaagaagaagaaaaggaagtagttgctgcagctattgtaatgcactgcaatatatcgacgaagaagccgaatgatctattggcttctaggataagatatacttactctgggtatagagcagtaaaagcctgcgggatccccatgaggacgcgcgttcgtcgtggaatcagagttcagttagggctaggactacgcgcgaatctatgcgccacgagccccagtggagaagatagtgcccaccctgctgtcgtaagtatacggcactaatgcttgtttaaatgtcgaacattgcgccaattagataagtacgaaatctaagtttctttagactacttggaagagaaaaactgagtgcttgaatagataacttaccgcagtctcaccctatccatcataccagcagcaatccagttctctcgcacaattgtgccgcaataaatttctctaggatggtctcctcttcgtttctaatcctcttttctgcactggcgagactggcactggctgaatcgttcaacctctacgcatacgtgatgggattggtggctttccccttcactacgctgacggcaagatccgctg

SEQ ID NO: 647 - DNA, 3633 bp, Emericella nidulans
gcggatgagcgagcgggtctatcaaacttcctacttgccaaaaagggctaaccctccttagagagctaagttcagttgtcaagatctgtggaatgggatggacccttgtcattattggatggccgacgtggccgccgatgaatatctagcttactaaatgataactaagcgagttcgacccttaggggcaggcgagcacctcaatggcatcagcctccaaaggcaaggcacacactatagcgaattcaaagtgtctaacattgaagctttactctactagaaaagaactagcacagtgtttatatcttgtgatttatctgatctaggatgttacgataacccgactcaacttattagcccagcttatatataacagccttgcattgccttcagccttgcatctgaaccctgcatttgtgccgccaatcctatacaatcccgcaggtcttcgagatccgtacagacgttttctgtagtgttgaagggaactgaaatgctggaatccttcacgggcaaaatgaagaatcacaggaaggttactcacaacagtgatccaaataccactggtacaatcggaaggcggattctttggggaacatactcaggattagcacttgcatgtttggttgactcctgggcggttgactttaccgttctcctggtagggacttgtttcgattgtccccaagactctggtgtacagcatggctttatcgaccttcctgagactcattctcaggacccaggtgtttaactcttatgttgaagctcccggaacaaatcacaaagctagcaagaaacagctacaaagagttaccatgaaaagcagcaaggcaggttatgtgattgtattagcatctgctggtatcgccatccgcttttacgagcagttccgaccagcacgagctcttagggctaaagtagtagaagtgccgccaatcaaggattccgcaacatgatcttaaacatgttaagtccgccatcttatcctctttcaaattgattactgtataaaccgctaaaaacgaaaccgaaggcaaaaacagaaccctaactaaaacgccagagacaccatccatgcatatccatcctgcaaccctaatcgcatttcatagccaaagcaaaatccatggcttctataaacctccctcgtacccacgtataaccttctctacagcattcataacctccctctgcacctctcccattcccatgcccacctgcacaggcacagtaataacatcccattctccctgccccggctcttccaaatctctaagctgactctccaccatgccctgcttcatataatgcgcctggccggccgagacgcgcgcatatagcgtcgcaggctcgagcttcaggtagacgaagtggatgcgcacattgggggacccgtaggcagcgacgcgcatcacgtcgcggtacttctttttcagagcggagcaggcaacgacgacaccggttggagcttgcgctcgcgttgatgtcgacgtgggattcgtggatgtgggtgctggggtgctgagcagggttgtggccgcgctgcgcagggagatgagccagtcccagcggtctgcatcggtgagaggcgtcccggcggacatcttggctttgttggcggcggggtgaaactattgatattcattcttcgtttagctcttgccgaaaagtgcaggtatagtcgggaaggcttgaacttacatcatcaccttctaagaagggcacgcccaattcctgctggaggtagcggccgacggtgcttttgccgcttccggcggggccagtgacgacccagatatgttgggggcactgcgaaggcatgaacgaagcctgttgttctgacgaagaggaaatttggtttgtggttgtatggctgtggctgtggttcaggtccagcgcggaaactttggtgcgcgaggggtccatgaccgcgggattgcgttcgctagcagagagcattctgaaggttgtgtttcgatcttcctaatctcagaggaactgatggtagaggtgcgagtgaaaactaggttggaggacggacgcagtgtgaaatatggatggtccgtttactggagtagactgcctaggtacgtttgaatgcgattgcgggtctagtataaggcaaggacggcctcctggagtctgcctgaggagaagagcggttcaagtttgcgcgaaacagggcggaagaaaaaagagtcaagacaaggggatttataaggacttgagccaagtgtgaaatcagggctgtctcaggagccggcaccgggtctgcgcagtgggtcacggtggaatgtgtagatatcccaggaccacatcccgattccttatccggggattaatatatatggaggacggaataatatacggagtataatacaggataccggtgggggagagtgggggaaacagggagatggaacaatcgatcatagaggaacacggaaagagtccagcggtctggttctgtttgttagcggctgatcttatactactgtccactgcactctgcccaccagttatgctacaccacgccagctgactgcagttgacttggcggggagacatgtaaaatatactgggctacaaatataataccctgtctttcctcgaaagagtcagcgtatcattttttttgctttatgatgaccaacccgtcatgaatacagaaacccctgtcagttatgatgtcacactcattagccgggaaaccggtgcgaaggctgaatcaggccgcgcaggcaaaagatacctcatcgtcacggcacatacaaaattcttccgatatccatatctaaggcgcaatctctgattagtcgagacatgaagaatccttacccagcacccaatcatgtgctgagcaatgagtcgatttcattttgaggttgcggttatacacccccacgctaggcctgattaggaaagtataattgcgtgggatgttatcggaaatgcaaaaagcgccgtactttcgctgtttcattaccctacagcctggttaaaggcccatggcgttttagatagcttgataggccagactcgaggtaaaaccgcagagacctgtctgtgccactcctgcccctctactggttgttatcagattcggccctctgcctgccgtgtcacttagatgctggtcctctcgaaagctccggctgtcagcggttattgaccaggcagcgcgacactccgggatcattagtcctccaggttgattccgctgttcaactcgcaagcacctcgttcgctgtcgcactgcgtggacgagtagcaatcggccaaaacattcgtacttccggatcctggtcgatgcgccttcagccttgatggtgtaatgtgagctgtcaatcttattcctctgacctgatcctcgcctttcgggttgtctgatgttggggacctcctcctgagagtccatcgaggacaaaacaggagagggttctgattggtggacggtgcggcagctgggtgtggctgaatccggggaagtccgctaagcggctcctgggaagccaaccatgcaaaccgtcctgcaggaagcgagaattgccaggtgattatgttgctctgcgccaataacgtagaaatgccttccgaacttgttgttctcctgcatacttttaccaatcg

SEQ ID NO: 648 - DNA, 1086 bp, Emericella nidulans
ataatattcctatctcaatgccttgaaatactaacaaatatcattggcaaattgaacttagtggtttcttgcctggtacaaataaagaaattaaatataatctaagtattaggttacctgtaattatatagagcttattgatttcctaatataattattttagaaaagctgaatatctgcttagtttttttattataatacattatataatcctgacttttaagtttcttacaagcctagaaaagggaatatcattactaatactttattatatttatctataaaattaatgaatacagcaaataataataatcttaatagaattcttacaacttaatacttattttacttactgctttattgattaaaataagtaataatttcaaagattaggtctagctaagaatagtaaaatataataggatatatttagatagatcttcctaaccagacatgctgtatgtaccaggaggacttgctaccaaggagaaaggaaaaagggattgctattataaggaagtcttacagatggctcactgccttcaggacaatgtaggccttggccgagttactaaggtcttaggcttcttgtaacgtaatccaccaccgagctacgcggaccaccgagctgcgcggctgaatatagaaaaactatattcagaaatataaacaagaactgcaggcttcaggcaatataaatattatattttcctatcagatagaacagtactatctattagtatataataatctattatatctggtctgattatagttgctgtaggttggtggcctatattgctttggtacctgttgggcaagttcttcatattctcaagccttttgctgccctttactacctgttagactgccactagtctagataaaatatcttaatatcttctgcttttttttttagtatattatacctgtataaagttgctagatctcttactatactagaatagtattctatataataatctctatacttttaattatacttttaatgatcttatctactacctattttattatactaggagatattaattagcagctttaaagatatttaatttactactt

SEQ ID NO: 649 - DNA, 2105 bp, Emericella nidulans
ggcttttatacgagggtagactgccgccctcgctaacaagggggtccgctccaagatgttgaggtgcccttccatcagatctgaccgcggtgtactctgtgtttaagccgaaggtacaggataaaggcctcgtcccgctgttaggaaaaggtgctcgggcggtgcgcagtctgctccatatgaagaggcccctgctaatagtcctatttatggatggtctctcccaggaatctctcctattcctaatactcttcctactatatatagcaagaatagtctctaccttagaggactccttctactatataaataatataggtatattaaataggaataccctggaagagagcttacaacaactagtaggggcctataaataaataactaccctagggacagagacaggcctccctttcttaatagaaaaaatagagatataatacttctctagaaagcagcagtagtatctccctataattactctacctagtataggggagattatactatctttatatatatattggttaggagtttttctggatacaaagcttacttttaaagcctatattaatttagtctttagccacaggaaacaacttgcctagtacctaaagagacttagcaatacctagcatagctacctagtagcctctatacaggcagcagttaaatagtatattctcctaacagctctgtacagggcagaagtcttttatacaggcaaaagataaaaggggtagttaactccctgctttctctcttctgcacagcagccctggctattatcctagcctacaagactacccctactacagtacttctctgcaaagcagacctactagatctagaagctctacttaacagcatcctttggagggcagcagtaagatatataagccttgatactaaatacctaattatctaaatagctacagagactactataggcaggcctaaaaccaggcttaaaaaaatcctataactccttctcagccccctgccagagcatgctataatagagctgcctctccttctattatatatactcctaacagataacaaagactatagccctgccctattatagatattagtatacttagatagcttgtaaactggccaaggaacaggatatggctatatagtctactttggccctatcctagtaactaagggacatggccccgcgggccccaggatagaggtctataatatagaaatcatgggtactgtagaaggcctatgcacagccctgggacaactatatataggttactccctttaacgatgaaacagttatccagcagccaaaaacggctacccttgacgccgttttacgcggcctgctaacgctcagcagtcttggcatcacgtgtaaataatcgcacggccaacacaattaccaccacggcccgcgctagtcggtcgtcctggtgcctggttcctcttgacgcccatgcaccacgctgccgctgactgaggggctagttcttcgtatctttcaacatcccccagtcttctgaggagggagccattttcagctccccttgcgaccgtctttccttcagttcttttaaagcctttcagcagccatgactttccccctctttcctcttgtttcgagcggactccgtacaaccttcccaggcattaattgcccttttttccttgttttacgaacaaccttgttattctactctacgctttttcgaatccacaaaaccttcctccttattgtttgcctgcgaaaataatcagctttggtcggatatgcagcggacccacacccatgtatggcatttttttgacagagcaccatgataatctggcaggcccctaaaaaatgatattattgtgtgatctgcaggatcatctggtaagggcaaacgacccctgaaggtccctaaaaggtgagccttgtttatctcagaagataagtaaaccagtgtttaaaaacggttcggacgggaaaatggttaaccaaatcataaatttttattttaagaacaaacttatctttttttggaaataacacaatctttttttgggaagaggagcgtaataaatttctatttttttcggggtttaaacaatataagtta

SEQ ID NO: 650 - DNA, 546 bp, Emericella nidulans
atttatcatctattatctattattaattattaattatctaatattataactttaatactagtaagaccttataagtaaatagctaaaccagtatattagttagctattttaattaatattatttttactagataccttggactttaaatataaaataaaatatattttaattactctaataaagtataattattatagatagttaggctaccaggaactagagattattaattaccctgtttaaagatagcaatattagacaagaatataatataaaagaagtagttgcaggctattatatagtatacaggatcttaatatatgccctcccagggaaaataatatccttattaatatttattttttattagtttttatattagctaatagattctttataacaaggttttttttatatttatactaattattaattaagctatatctttttctcataaataagatattgaagatattagatctagttataatctttataaatataatatcttataatagatttttttatttttatatttgcaaagt

SEQ ID NO: 651 - DNA, 476 bp, Emericella nidulans
tagagggactatatttagattctatattataaatctttatatatattaattatctagtaatactataattcaatcttaataaaatatcctagctataatcctttaaagataattattaattaaagatatacttaactaagtttattataggatatataataatttctttttaattataatatctataacagcaaagctatataaagagaaaataaatataatttcttaaaattattacttattctagaatagtaatagagtaagatatctattaattttataactaatttatttatatctaggtctgggactgtcttagtaataataataattataattaattattcaagaactatatctttaaggctataaaaaaaatcataattaaaataattatagccttattaatagaatacgtaatttagtactatagactctttttaatagttatattagataaaggcccctagttattt

SEQ ID NO: 652 - DNA, 1117 bp, Emericella nidulans
  unsure (1)..(1117): unsure at all n locations
aaacagctttgtatttaagcctcatcttagcctgatcaagatagttgaatagcttattatagatactgaagatatgctggatagttacatctcttatctttaatagcacattagtaaagtcaaagaaaggctttgtaagtaataaaagatactcaacctgacgctactcctctggattgagtttaaattaagtatggtgataagtatcacagtattaatcaatatctgactaaatcctttgagcctgatcaagtattaggaaggttgagttctattatatataaatatcttagattagtaccagtcttggctctgttgtttatagctcaagaaataccttccagcactgcagactggcattaataaagacagctagatcttgaatctataaggagaatagatagctgttagtaactaagtttaaaaacagaaggtataacttttctgctaggaaaagggaagaaagctagtattacntaccttctatagagtctttataatatcagggtgttattaattctttgactgctttgattgttgtggcatgtcaacctataataatctaatcttattattgactgggtttattttcatctctctaagcaattccctgagacttaattgtataacatgaattatataaggaatatagaagagctgatcttcaccaagcccaagtaattagccaacttcctagatacctgcaaccattgtattgttgtttaatatattgttagtagtaactaagagaactctttttataatattatgctgctgaaggaccttaattacagttttactgagataagtaccagaatatgagctatctagtagttcaaatccaagaagcacctcacagtaattccaatcttgatctaagaagtagctagtaactgccatgaatgcttgggagaagggggatatctagcagtctagtataattaatagactactcctagctggaagtctattaagcatatttagctggcttgtagtaacattattattaagaaggtgttgaatactgtatacagacaggatattaagctgtgattcagcatgctgggtagtttggaggaggtcatagaaggctgggtattcacaatttggaatagga

SEQ ID NO: 653 - DNA, 2147 bp, Emericella nidulans
aactctgctcagttctgactgagcatgtacgttcagcctcgacttacttgcaaccttatatgttattccataaacctaaggtcagttgaaggactgggagggactgcaagcccacaactattgccaacagtcccgaaacgtcgatgggaagtagaagctcgattcaagcgccagttcataccgataatctttattgattttaaccattataagttccaataattctgataagcaagaaactcgcagagggctgccatatattgtattttatgagcttctccagggctttagggtcaatagaggcagcatattcaacttcgtaaacttgtcaagcccagatacctatgatcatgccttcctgagcgcggggttttggccacagattcacctgcgaagcatctccgcagttaccggcccgtccccgccctagtgatggagcttgggctactagattcgaactagcgcatcctactttggacgtttcttccaacagacaagaaaagaatcatcacctacatgacaatatgatagatataagagcgtaagctgtgtgggcaaatctagtttgcggcaagacagaagttacgggtcaaacacttggactgccgtcccctaacctggccctcgtcgttttcctccacgaacgggctagcagcacttagttgcttgaagatgagctcgaatttgttcaattagaaagggtaattttccgacgagtgaagccgtcgggtcaggaattgtacaactcgtttatgtcggactcttgactgcgcgcatgtgaaaaaggaggcgggggcaattagtcgcttaagtcattctcttggaatcgcacagtccagcaggaacgcacaaggaagctcttaaggtaatgcgtcccatgatcggcggaagaggcggaatctcctctgaggctgagagaagacaagatcgtcccaggtcaaagatgacaaggttatcctcgaagcagtatcctaggaggagcccaaacgcgatgcaggctttctggtacggctggtgaacgaaccctgaccgaaaagatcctctcctgttggaaataatgatatgtcagcttggaaatatgactggctaagactaatctggtaattgtgacgccttttttgcttagcggtatattttgccgatatgataccatgttaagttagtaaactcaaaaggccttattgccgtcccccaccaaccgttgcaaataggcgtttggcttgccgtaggactgtaaaatggcaatccagtgcgtcgcaaaccggccgtggtggaatcaggcgaggtctctggcagctctcttccattcccgcagttttgctcaagccagcagactccctagccatcaatgtgggctataacatatcccaaaccggtctgttagcaaacgttcgcctattactgcccgcttctggttcgtcgagaagatttcgccattttgatcgtacccatttctcgtactagcgcttgcagtgggtctagaaatatggacaagaagttgagacggtgaaggtgcttctgcaacctggccgtgacagaaacttgtgtcactgaaagttctggcaacggtagctgaggccaaagcctgcgggtggtgtgattgagcaatcccattcgggttagctcctccacgtgctccttgtcgagggtactggactacctcctccaagtacgtcaacctacgacgctatcacccgatcctcctcgccgaggtcacttgctacactaagccgtctgacttgatgggaagagtccggatagacagccgacttccggttcacgtggttccgccgagctctgccgttgccatcgacggttgccaataacgaaggaacactgctgcgagtcggcgagccgaaaacttccatccagcagctcgggcatcgcataaattcagagagttagtccttcgagaatctggcttgaatagctcaacctgctcattggtcattgatttccgacgcgaatccttgaaagctagcgaagacgagaccgtgtctcatccggcttagtgagcttttgcttgaggaccccaccggactgtcatcacgtacggcagattcgttgttcaccagccaaggccgcacaacgcttggagctggtttcgctatggaggccgattggtgacggtagtcatgcttgcacgc

SEQ ID NO: 654 - DNA, 2002 bp, Emericella nidulans
tctatcggtactcgaaatcggagactgaaccgcccgttgaagtcctcccctcgaaatgtgaccatgtccgtgttgatcccggggacctgcttgaatgggtaacctggggaggtggtggactgggcgaccctctcacacgaccagctgagaaagtcgcactggacgtgcgtcgcaagcttgtgacgatcgaaggagcgtatcagaattatggagtggtcgtgggtacggaagacctcattctcaacgaagctaaaactgaagctctacgaaagacccttgccgcagcccgtgatgcagcaggaggagcgagagagggatatgatcggggcgggagcatcgaggagttgaggcagtcctgcctgaaggaaacgggacttgcgcctccaagcccacagtgggaggtcgacctttacgggccgcacgtgcagattccctatgtgcagaagtggtacaagcatatgaaggaagctggcgggtgggatttgaagtaggtgatggccttaatggtggcattcatgtagcgcccaagaacgcggaggaagttaatgttgggccagctcaattcaagcacgatagaactgatcactctagacaatcaaatatcctaaccactattattcgaatcaagtgcgtgcacacgagcactttgttctcgtgataacaccctgtagaccgataatataagcaactcaactgataagccaattcccctgatgaatcattgtcatgtatatgaaacaagagcaagagtgcgagccctcaggctatcttcattgaggatgacatggtggtgtccgtgactacataccacagtgggttccgtaccagcaatgatatcaagatcatctataatgttcttcccggtccgcaggcaagctggtggtgtggtacctgtggtatgttaagcatagtggtcgaggaaagagacactaagttggctgcatgccttggggtcagtggctctaccgcaggctgaggattagcaatcttttaaatacactctaaagagcagctactcgctggtggctgaccgtctaggctgtgggtagcctatcattcatatcctattctcgcatagctaatcgatcaaggcaagatatgtcgcagcatgggtggaatttgccacggtaacagtcaagcgcatcggtgtcattctcggttcaattgtccgaatctggagagcagccatctaagttcttcaagggtgggctgtcgccgaatcggagccgtaatgttgagaggctcagtgtggtcactcgcagcaagcgtccgggtaactgctcgtatccccaattgaagccaggatttgcctaaaatcagactgggggggcaggtcctgatgggccgtgacagtcgtatcccatcgtcgagtgaacttttgccttcaccccaatttgttcagcgttgtgaagattggaggcattggaagcagaatacccttcttgttgcaggtctcttttagatcataaaaaccactttttgatgaccttgatgtccttatattcagctcgccgctgattatagcgctttataacgcggatcacaacaaatgttccagccgctgcgtttgataacaggaaacctcctaagcggactattcagagggttttgttgtcatcaattatttcgaactggatatattcagtgtactgtcatactgatgataacggaaaaaagggccagccttggtaaattaagaggatccatataatgagtaaactgatttgccataaccgagtgatagaggtaaatacattaacatctagaagctttatactttccagatatgctctatacaaacatataccatagtaaatacaaccagagaatctggaaaacacggcataccatcagttcaaccgtgcttgagccataagtgttaacgcggtcaacgtataacgtgccctcactgccttgccaattttagcagcgcgggcgggatcggcgataaaaagaaaggctgttgcgacgatagggtcctataattgctggcagtggactg

SEQ ID NO: 655 - DNA, 3059 bp, Emericella nidulans
  unsure (1)..(3059): unsure at all n locations
tgatcaatatgtgacagatagcttcaggttatcgatggtgatactctatcgtacctaatcgatcctccatcctcaacacctgtcacacagatagccagcgtagcttgaatcaatgcacttcaacctgctgctatcaaccaggtagcacaactacaggataactctgcaaaacatgccatggtctagattatttatagctggattattctgaagtgcagccacccgctcctcctccggtggcagattatagcagcacttatctgtaccttacacagccaccaggatgattccaggtccgagcaacaaatcagcaagcatgccctggccttgttggcaaacagctgctatgtagcatacaaactgctagggagaataataatgcagctcaaactactctgttagcttaccaataatattgagtgtaggatctaaaagtcgcatgcaacagacagtagttgccaaagcacggtttctattctgtaccatatctgtcaaaggagatccgttctcataacttcgggaaagggttccatcgtcatacaggtccgggaagtcagaaaggttgataaagggagatggaagatatctgcgcttctatcttctatttctttctctaagcttgtggtactcgtttatacaggacagccagttgaaaataataagcctacacccattacacctaatagaaattagtagagggggcactgcagcaggtggcccatccttattgtctaacatcctggcttggaaatccttagtatagtttctgatgtctggacagacttatttgcgcaggccgggccctatcgaatgcttcgaactgagaaagcgatgccaacgcaacatccgtcgcgggtttgactgtcagtactgtcagattatcctcggttgaattctctgcatcctctaatagcgagcgcgagatgttggtctctctatatgtgacaccataacgaagtcgggtcgccactgagcaattgttcctgcagtctgtgaatgagccttaggtgggatcggccgagcaatatgcctatcgcacgactttgcggccgcagtggatcgtaatattgaagccatgcagagtgttatagcatccgtcaggttgaactagtatatatagatgtcatgcgaaataagaaagatatatcgcattctccttccaaaagtgcgtgaggcaggaagcactggttcaacctcttgaaaaagaatctcatcatatttccaacactatcagcctctgagcaagtcacccgtcacatgtactaaggaggtgttgcacataactgcaccaattagaggttgaggaagtcgtatttatagaggaatctacagagcatccaaggaactggagaaagcctcggaggcaaggcgggccgcggccatattctgcggaatgtgtgaaaaagcctgcaaataaatgcaattgagcggggtgatcgaaatgctaatggcagggacactggtgataagcaggaaacataagataaataattgctgaagagaacaggggcgcacgtggcacgagcagcccctgtgaatgtgcacattgctaggaagcctatgggatggaataaggcaataggcgcaaaatgcaaccggattaggtctagacgatccaaacatcctctgactggcacgactggtggacgagcacccattcatgttcgacggagagacctgttaattggacagtagtcacaacattgctgtcagatttgactgcccgagtcatcgaggaacgagataagaacgcccttccattgatgggcacctgcaaggcgtggaccgggcacatcacgcccgctcaattggtcagagtcggacgaacctcatccgatgaggagagcgagattgtaaggcttcaagatcatcttccgactttggggcagattttcggggctggctctgctgacacaccatttgggccgtagcgcaccgtacagggtggcgggctcgccaatgaaattatactgtgagcagcatgcttgtaacatacttgcaggcttactctgcagagatctagttgattggcataagcggtccacagagaaagtatagccgacaggcgtgaaagtttccaaactccgacaaggtttcaagtccgtggcactgtctgttttctatttttctttcctcatgctgaaatgagtaactcctgatgtttcttctgtctctcatcttgcctattcagccctttgtactatccgtgctttcgaccgttcgcccccactgcttacccgacatgccaaattcttgtgacgtaggaattggccgttcccgcgagatagacaagtctatggacatcaacaatcttatcgtcagaatatcgcaactggcagatagcttgggcaatgactatacgctcactccgcaccaggaaaagcatcttcgggctgcatgcgcaaaattgtcctctcgaatgaaagaaaggactctggaactggaggtgagaaagtacttactcgagtgcagccagatcaagaatgaccggtgcatctagtttcctgacggccctgccgtcaagattgctgtcgatatgggattatttgactttgtttgcggcagtgagaaggacgagtttacggccgctgagatagcagagcacactggagctgaccctgttcttgtgggtatgaatttgtttttttcttccagtacaaatagtggctgatagtctgctacagaacgcctaatgcgccctttgatcctggctcgtctcttcagccctacctcaaacaatacttacaaggcgcaccaaagtgcccacgacctagcgcccggtgcatatgtgagggacatgctcattttcactcagtacgttgcagcttgacgttgcgtatatctaaacgactgacacgggtctcctatccagggaagtcgccggccctattttgctcaagcttcctgaatttctcgagaaacaaaaatacccaaaacccggccgtccggatgccttcgccttncatacgcgcatcagacagaagacactttctaccgntggcttcagcagcgtccgaccctctattcgcattcttgtggatgatgaatgtaccggagag

SEQ ID NO: 656 - DNA, 2130 bp, Emericella nidulans
gccacagtgggagctgagtgcatgcgcatatgggcaccgcctgactctgatggtctcatggcgcaatcatacatacaggtgggatcggggaattaatgactggtttcagatcttgtgtcacgagtgaagtgacttctgcagtttcttatataattatcatgagtgccgccaattttgttgttggcttggagaagagacatggtttagataccaaaaggtctgatgaagtgtccactactgattcttgctaatccatcactagagacatggtccttacgataatcattacccatcaatcctggcctcctgcagaatcatcaagctagccaatccatgcctctgaatctcatcaacagcaccacaaacgccaggaaagcccgaccgcgtgcgatatacgacagtggcagttagatacatcctattcactccatctggtaggtaggcgatgactatatgatggccgttgagttcattgagctcgtaggcattcagattagtcatttgctgggatgggcggtggattatgtcgagcatggcctcgacagctgcagcctccagaggtaaggcacagatttacgcaatacatcatgtactcatcaaacttcagggtagtcatatcggtatagaaggaaccagagaaaagagtcgagccaataccaaaagagtggaagaacccaaggacagtagccgactaataaaatgaacaagatgaaaaggagaaggtagtcagctattgaggcgccctgctgactcactcagcctgccagttgtgtgaactctcataattcgctgggagttcgaagagtgcagctgacttcccagggtaaagcttcgtacgttaatctttagtctctacagctcatagcatgaattaactacctacggcagatatggtctagtcgccggctgtggcgctaagaaagagccaaagagtgggaataggcaagctaaacctgaaatcccatgtaggacaaaatccctgtgcaatataatggtcaagtttccacgtaaacatgacatcacgcctggctaggtcggcaaccaccgcaaggcgtgctagagcagctttaaacacagcccaaggccatcagaagtctccattcaaactctcagaacaaaacagagatttattcacatatagcaagaaagaggacgagtcacataacggaataggcgtagtcaagaccaagcaacatgcaatccgttctccagcctattatcggccccaagaagacggccgaagatctgtccggccgtgttgcaataataacgggcggagcatttggcatagggtgagtctctgagccctgaagtagattcacgctgacaaaatgccagctatgaaatctcccggacgtttgtacagaacggcgcccgcgtcattatggtcaaccgtaaggaagaccaagggcaagaagcgatcgacaaaatcaaggaggaagccgggtccgatgcaaagatcgagtgggtgccgtgtgacatgggcaatctggcccaaatcagagaggtcgcatcgagatttgtcgagaaagaggagcggttggatctggtcagtcgcgttccatatcctggtgacaagatatgagcagtgggggcgcatatgagtatacagggctaaatcttctttagcttatcctatcagcaggcatcaacgtgcatcaatatggcgaaacacacgacaaaatcgagcggcacttccaagtaaactggctagggcagttttacctgacgaatttgttatggccgctgctccgcaagaccgcgaagctgccagatacgcctgcgcctcgggtggtctttgagtcgtctgagcagcaccgcgcggcaccgtcaggggtcaagttcggatctctcgaggaaatcaacaaccctgatctcggaccgctggagcgatacgggcggacaaagcttgctatcattctcggagtcaagtacggccttctagagaaagtcatcaagcctaatggtgacaacatttatgctctctccgtccaccccggcgctgttagtctccctgcttcttcttgatcggttcggttctggatcgtgaggcactaactggaacaggtcaacacggctatgcagcagcaatggaaagatgcgtaccctggcctcttcggaaaattgttg

SEQ ID NO: 657 - DNA, 535 bp, Emericella nidulans
accactcaggaggctgaggcagaagaatcgcttgaacccgggaggcagaggttgcagtgagccaagatcgtgccactgcactccagcctaggtgacagagcgagactccatctcaaaaaataaaaaaaaagaaaaagaaaaatgcagatcctctcatgttcaaggttgtcttgtatttaggcacactgggtatatacagtatgtaacagattacattgtattatcgaccttctgcaatgaaagccactttaaaattaaaacagccagatttttttttaagctttcatttttgaagcctagcctccaagtaatctgaagaattggggtttcggatgaagaaaggaaatgtcactgttggtgttccagtgatggggatggcaacagcagtagctaagaagacattggcagaggttgccgggggggtggtggggggaagtaaagatgcagcgatggccacagcagcacaggggaccatgacaaaagaggcatcactacagtcgaaatggagctcattggagatgactgcaagagtgag

SEQ ID NO: 658 - DNA, 4024 bp, Emericella nidulans
ctccatctccaatcaacccgcccagtccggttgtaaatcgtcactgccttgcgcattgctggcaaaatgagcgcacctcaacaaacgactctttcgtactatccaccgggcgtctcgctgggcccgcaaggtgcgtcatctacttactttttcttgttcttgtcatcttgcaccatccagtgttatccattatcgccaccagcgatctgtttcatgtcggggggcggtgttgtcctgacacgccgttgcgacggctttgatccctttcatctgtggtgtattaggctggatccatcgccacgtctgtcggggtttgttctggcatactgactttaatcgtctgtctagcctctccctctccttctcgccagcagtttcctgtcaatctaggctccaacaacccctttcgcacccgtactctgtctccctctagctctatcacctcaggaggccgacctgaacgaccgaagtcgacaaatcctttccttgatgatacagaacctatttcccctcaatcagctccaagcaattccctgattgaccaacaagacatgacgcagaatacgcgcgaccttttcgtaagttccccgcggtgtccgaaccaaagcagacctgaccgattgtcctcggataataggagaacctttcgctgaacccggctccgaaaaccaatggaatgcgaccagcacccccgcggcctgagaaaccgtcgcaaaatgggccgttgaaaagtcggccaccccgccccacgagggaacgctctgaaggcgcatcggatgacccctttaacatcttcgcagatcccccgtccagacctaagcctagtggatccggatctcgatctcgagatagagagagacgacctcgtcgaaactctgaatcatccatcatggaacggaggccaaagctaatcgatgacgatgatgagcgacgacgacgcgaaaggcgccgacgggagcgagaacgcgagggtcgccataaggatggcaagtctagttcgcgaaggggcaactaccagctcgatatcattgataaactggatgtcactagtatctacgggactgggagtaagaacgcaacacttatctccttttggaacttaggcactgacagggactctagtgttccatcatgatggaccattcgatgcgtgtaaccccaaccgcaaccgcaaaggccagcgcgctgcccctatgcaggcattcccagaaaactcgacaaacatggctctcggtggtgccggtccgaataacgacaaaatagatcttgatcgtttccatggcagaatggaggaaggatacaatgactttgcttctactggcatagatcgaagcaaaacggaaggcgggtcatttgatcccacgtcgcgcatcgaaccaattcacggcgcagtgacgatgggcttaggcaccagtaccttcttagacggagctcctgccagtcgtgcggcaatccgtgagaatcagaatgaacagaacgctcttaatggctcgggcggcttgcagcggaaaaagagtcttgcacagagaatccgtggtggtatcaaccgccccaaccctcgggtcacatctccgcaggctgcatacgggtcacctcacgcttccacctccccacgcaatgagaagaacccattctttcaggattatgatgatgcttgggataagaaaggtgctcgcattaactcggaagaaccacgtgctgttccggaaactggccgggtccgctcatccagcagtcctaagcaaacggtttcttcattagaacgacggcatactgatgatcgatctaatggggttgatgaaaacaagaacgcaggtggaggtggtttcatcagtcgcatgaagagcttgcgcaaaccgcctcaaccaaagagacgtgtcaccgatgactgaaccgttaaattatatttcctacgctgccagataacgtgtttgtacctgtcgttgacagaaaaaaccaaacgggttgagtgcgtccagtcggcactcatgacatcaatcccgtcgttgatgccggtcgagatatttctaaggtgtgctactgtacgaacgctacgtatccagttctacagaactaccattcgccttggagcaatgcattgaatgtaccttacatgcgacttatcatctcgacgcaatctgttatcacaaatacctagcatggcggaaaactggtggacacggtgcaatgacattttgtcttttacttctgttctttgcaggctttcaagagcgcattgaatcaagggatggttgggcgtttgatgatatctgattcggttcgacagctcgtggttggaaattggtatgaggctggccttatgtgtttctcacctctcttcactccatcttttttgtgcattccagctagctagctacctcgaaatgattgcactgcgttcatagtactttatgtccttgtttcgccgtcagttcgctttggcgtacttagattgtcgaccatctgcctgatgctgtcatcgttcctagtagcatgcccacgacagcctgtgcagctctattttcaaccagcctacaatgataatactagttataaagccgtggccttcaaacagactccgagtaatagcagaaatgcctttttgttaaatgcccgaaaataaacaatataccttgttttggttggtttgataaatatccctaaactctaacctagtaaccgacccataaccctaactttaactccataaaccaattcggaatattaatggagagcaaagatcatcaacatcaacgtcagcatcaacatccaacccagcaccccaacatcatcaaacagaagaggcgcaagcgcaaacacgcaaatagtgtatcgacctttcaatgagtatcatatgtatgcatggatgtataaaagaattgcaattcagaacgccaaaaattacgaggtcgggtcaaaggcgccaggcttcaacaactggtttggcatagcatggcatcacacggaattaaaatttacctggctgcctgaggtctcctctcgaaggaaacaggcgccgggatgccagctcgtcgctttgactgtggttttgggcgggaaagggtgtatctaaattttgaccgttagctttcttcaattatcgtgacgaggtgcgatgacgtacttggcgaaagctcttgaaagagcgcgcttcgcgctgaccttctggctgccgatgaaggagtccacggtcacagcgatcgcgcggtcgatgtcctgagcggaacagtactccgagagacgcatcttgcagaatgcttctgcgatacgcattatggcttcgaggtggcggacctgaatgggttagtattttgtcatgtagaatgtggttaaacgaaacacaggacgtactgttatcgggtaggcgccggtagcaagagactcgcgacgcatgtccgcgaagagacgcgcgaccttgtcctgatcgatctggtagagcttagggcggcagtgttccctcgcgtagaggatgtacttccggagaagttcctggggaatctcgccttccttctcgtcgtcgttgtccctagccgcgttacgggcttctatctcgtctgggcggagcgggagacgaattccgtcgtcatcaatgcggtatccttcctcgtctatccgctctccgtcggcgttaatgaggttcccatgttcatcacgcagcggcttggaggggttcgcgcggtggtgagactcgatgacgaagctggcaaggcgctcgtcttcagaggggtcgacaaggtcgcgcacgacgcagaggatgtcgaaacgcgaaaggatgggttctgtgagttgaacgttctcagagaatggggcgctgctgttgtagcggccgccgatggggtttgcggcagcgacgacggcgcagcgggcttggagtgttgtaacaataccggccttggaaatggagatggtttgctgttccatggcttcgtgaatcgatgtgcggtcttgatcgttcatcttgtcgaattcgtcgattaggcaagtgccgcggtcagcaaggacgagggcgcctccttcaagtgtc

SEQ ID NO: 659 - DNA, 6389 bp, Emericella nidulans
ccacatgacaattcgcgcgccgcataatacgactcactatagggatctctcgccggggatgccacaagggtcgctgcacggcggcgcaattgatttcagcgcgctggcgaaggacggaagggatggggaatggagagctggcccccaggcacctccctcgctgcatgcagtgaaacacctcaaggtatatagcccgtcctcgacattgttacccaagacggttgaggagcgtgcggggcaggtcgttgaacagtggacgcagttcgcgcctggcgggatgcccgcgcggtggtctaatggcgctggtgtgccttgcggatatctttcctgcggcgttggatcggatgggggcgatggaggcaatgagacttcttgccactggtgcgggtgggacgagcgcagcctgccgaagagagcgacggtgatgatctcaatggtagggcgacgacataccagggactggtgcagttttggtatccgcctgtaataatggacattgacctgaagacgcggctccctcccagtgggatggagtggctgtattcgcgggtggtgacgaggatggtccgtgggagcctcgcagacttggaggtccttattctagatcaggacggggagctcattgctactagtacgcaggtggccttggtggttgacccggcgaggaatgtcaaagggagattgcaggcggatttgggaaagctgtgattactagctatattgcactgcacctacctactactagaccagaaaaagacgtcactacatccttcaatgggataggagactatgtcgtgaacgggagtcacggacataggaaacggggaagacaatagttgctaggttacttccagcatgaagagtcgatggcaatttcgacatcgcttctcttgaacccagggctgtggcctaggcagattccctttcgaccagagctaataatcgtcagatagccgccacgcgcatgacagaggacgcggaaagtcagcctgcctgctgcgaaatcgaccgcattcaccttgcgatacgcggtatcctcgaccggtggcgccattgagagagcgaccccatgtgttcgcacatagcccaccagatcgaacagatcgaaccagtcaccatcaaggtctttctggacctccggcgaaaacgctgagagggtatcgggaatgcgaatctcacgagaattttgctctttacccaactcggtctggttctggccggacaccccagagtaatgcgtgcctgcgccgcctagtctgaagtatggaatgtcgctgcagcgatctggctgcttattgttcaaccgggcctagacaggcataaaagaatgagataatggtttctcgcggggcaactgataagaggagccgaaacggtcgcttcaacgcctcgaggggaacagacgggtgcttgagcagtagaaagccctgatacagacatataatctcaactggttcgcaaatagcgccgccttcattgttgtcgcatcggctgcaggtggcatggactggggcgcgaaaggtgcgttgcgtgctgggggcagcacgcctaggccggcatgctgactcggccggggcacttctcatgatcgccctgcgcttgcgactgcttcggcaactgctcagactggttcgagcaagcaaagtcgtcctggcaaccgttcccatccatcgccgaaaggaggcatgtcttcactgtatcccgaagacggtgtgcaatctgctgatgcgacgtcgggattcgagccccaatcacaacatcggtggacgagataattgcctggcacatccgttccaaagcagactctagccgggcaaccgctgctgtagctccctggtgtgtgcctcgtttcgtgcccggtacgcccgtttgcgccaggaggacctgctgtcgtcggcgctatgtcttgtcaacatagtgtttttcccccttcttctctcttcatccgaatcaaatcaaacatgtatcacgaagagtaatctacctctttttatctacgctttttggctcccggccatgggctgcttggacacgtttaattgatgacagcgcttcgtggcggttactctaggaggctgcacttcgtccccttttgaagggattcgcatggattaaatgacaaagggacgtttctgagtgctgtttcctcatgtaggggaaatgtctgatgttattttggatgatacctgattcgaaaggatgagagcagtgcaggacatgctggagaactggaggtgagaaagaatcgtagtcgaacgcgggcaccgaatctcggcactcggaatgatcactcatcttaattcacagatgccagtatcaaaaagaatacttgcctcggttgcgtcgtcatcacatccaaacggaactccagctattgttcagcaaaaccattatagccagatcaatggatgcacccacggttgacaagtctataaaaggtgtcgtcttttggcgtcaaggtgaatgtagtcgaccgctcttcccccaaagtatcactcccatccattagtatctcacaaccacaaatatctcaccactatggccgccaacccacaaacctatcaacccataataagcggcccaggagacatccgcaccgcccaaaaaagacgccagatctatattcgcccgttccttctcttctggctcgcctcgttgctcgccgaaaccgtgtttctggccgtgggcatcttcgtcatgaccggcacgcgcgatctcgtctataaagtcctctggacgctcgtcttctgcccgctaggcatgggcggcgcaatgggcggcctgatcaatgtcttcatcgtcgaccactactacggcaccaaggcggcgcacttcacgggggttctcgccttgctggtccttagctcatgcaattatctctgttataatctggatagacatttcgggtggtttggcgcgtcagagcatccgatgtggttccattggcggtatccaatgatctgggcggttgggtattggaacggggtgttgctgttcacagatggcggccaggagaggcttgcgaggatggggttgtaggtcgatgagacaggaccagatctcgtacggtagtcccggtgaatatacggttggattgaaggatgcctttgcacgtgggaactcacgtgcccgctcgtcatggcaatgaatggattgctcgtgagactagtgactctgcataccgggttggatacgtatgtacgctcaaaggctaagacaagaagcaaactgtatcaattaaatgaacatagtcttcttaaggaccagacgccatatgatgattatttatctatcttggatgatagatcacttctgctatgtctctcaatacaatatgttagttagatcctccggggttggattaggctacttatatcatatggccagtaatctcatcccaaacactggtgctcgagataagtcgtcaagtggtcacatgatctttccatcgtgtataggattgaggtgaacttctgcaagggattacgctcgggaaattcaatcttggtctattttcacttttattttatttaattttcatttttactttgcgtttgtttttttgtctatttatttatttttttcttggcacctgtagcgatgtacctaggtatctattcagagtatgacctctgtgggtaactccgtacaggctcctctgcttcggcacatctacaatggagagtgatttctgatttttctaaatttgagatttgaggtatcaaaagataagatgcacctcagtaatacacgtgactatatgtttccagaccctaacccctgctcaagtatgcaccgcccatctggtcttgaattgaccaactacggcgctcggtaaaaggtttcaaaaccccgaactacatggctgtcgaccgtctctagttgcaccgcgcctagccatacgaccagagactagtcttgagtcttcggtagtctagatgcagtattgactgggaatgattactttttcctttccctttttctttttcttttcttttatttaccattttctgctcaaggccggtctgggtcctattacacggtgtctacttatatccaggggcgtctgccccgcatcctgccgacagtggctggctgtacgtgagacaccaaacgattgctctactgcatgccgcccaatttctcaccaccctcgtatcgatgcgttgctcgcagaattattattggtgagtgttgacgactgttcgctagtcgaggacgtgtaacaatgtgttttcgcttgggcgccccgcatatgctcgcgggcacttgcagcttgcctatatctatttctagttgtggaatagcgctgataggcttactgttgtgacagcggttcgccagaccggagagtgagaactcgtcatctggtcctgcgaggcgggaggcggcggcaggaagttgcggccgatggttgatggtgcaggctgtcgctgttttggagtaatgcatcggggttcaacggtagagactggacggcgatctagatataatttgttcaatttatcctggtatagtcgggtacggatcgcttgggtattgttcagaggccgcttagtgggctggcaagcaagcgtcgccagatgaaggtcaagggttagtaggaacctacttcgtgcatgtacatacgaacctggggaactcacgcagcccgtggaccacgtcgccacacgtgacagtatccgagcgagtagagaagggtaacaatgccataccctggaaactcttctaagaaccaaggatggatgccgttaatataagagcgttcagacaaaggagatccggggtttcagccggtgcccgtcaaggatggacgaatatgacgaatagcccacccgtagacgcgagctctgagaaagtatacatggcccacaagcatcatcattataataaatgccactggagcagttgggtcgactacgcaaatttgcagtgcagccgatcatgaccttattggaagccccacgcttcagagcgaactgatgtttgcacgaccaggaggaataatatctcaaacacaaaccacggaatatagtcatttaaatcgaccgatatgagcggcgccggagtacttagtaaaagggtcaattaccagttcatcgccaaggtgaggtataaatgcatttcaataaaattggggataaaacggcggtcgaggggaacaatctgtttatttcatcagacgaagatgctataagcggaccattcgataccggtgatgagaacggctggggcgagtgacgacaataatagtgcgaggacgtggaagtgtgctgtttcttgtttgttgcagtcgacttctcgcggtctgtgacgtaaaacgatgcgggtacctgaggttgcaattcaaggcccagtgagacagcggacgctcgagaaattgctgggtcgtagatcttgaagattatcgacacgaaactgagggctccgcatttgccgccagagcggatgggctgagtaggcaaccgaggtggaggtgcgggctggtaagtgctccgttcgcaaatcgcaaggcaaagacctgtatgcattatcttttagctcattaactcaagatttgacaagagcaatacgatcaatgagatacaccagtcaatctgtattcgctggaccatccaccataggcagtagagaaggactaactgcacaacagaaagttagagacttgtaaaaccgagcaggataggagagctgcagagaataacaagcaaggtgagacaccacggacggggcacgtatcagaaggcaatataatgcatgttttttggggatttgtgatgaacatgacttgagcatcgtcgtctgtttgagggccgttgcatccgcctagcgaatttggagagagtgtcaggtggactaacgaaataataattcttgacagcgacgcgcgagcatctgccggaaagtataggagtataggctctagaccgcgagcagggctgtggcatccatcatatctcatcatatcaacgagccgagcctgagtggggccggtgccatgaacgcggttccaaagggcgacgagcaggatcggcgaatcgccggctgaccttagaatggtcggttggactagcattgctctgtcaatcaagttgacgatcgaggacaagagtaaagtagggatctcgaaagaattctgccatagtaatctggctgacaacggttcttgttggagaatatgcggtctacgaaactctgagcacgcgagacgctcttactagaacaagtataactcttcaagcggcgatggcgatagcaatatcttcccgtgaggttcgagcgcaggttctccagtgaccgggcgtgttcatagccgtgagtccagggatcctgaaaagctggagccgtaggagcatcttccgtatcacataggatatttaaattcccgt

SEQ ID NO: 660 - DNA, 4818 bp, Emericella nidulans
tgcccctcccttcaatttaaagtccattgtttcctggccagtcattcgtgaagtgcttagcttcttcctaatttttgcaccttgcgcctttttcattttctttcactctttcttcatttcttttctttttcttcccttgtctctataaacttgttggtaactaattgcgtgtggctccaaaatgaacagtactatgttttttggtagtcagcacgcaatcacggaacaattaagagaaaacagtttaaattaagagtttcaaatcatgaataacctgaataccttgatggaagcctggaaattaggatcgtacgaccaaatagactgttaccaaggaggagctaccctaaggaaggaatggatttgttttgaccaatgtacacactcggggttgcatgaacgcgaaaataatatctttgacatagatatattatcgagcagaacgtagaaaaacatattataccgactgagataatgatcctaagagaaacagccatggcgggtcagcattagcagaaataccttttctggggccaggagagtggtggtagaacgaggtgtcctttaattcagtcgctagcttgcttaatgaagctgattttaaaagactttgaagaaaggaagtcgttctagagtgggatatcagaaagtgtacggcaggaggagctttttgatatcgatggccaaagatgaactatattgatcagatatactcagggactggtgaagggacggagagaaatggggactaatggacttcaatctgggacttggaatgaggtggcagatggacaagtcaatacacatatcgcaaccctttcgggtattattcatgtatctgctacttgatggcgaattcaattaggcgtgccaaaacgtagaacttgattatatccccagtgtgagaatcgaaagatgcgaggggtgtctgctggtccagtaaaatcagcaattttactgatattatcgagacagcaccggtgcagatacctgaagggttttgagctttgaaattgttaggcccttagagttggaatacgctgtctgcctggctagtgaagattaaccccggccatgactggagctggtatgtcggctgtactgactgcgacgttagagaaatggcgtccaactaggttgacacaacacaacacagtcaaaagacccggtggctgattattgcttgcgtagggcagtctattgagctgcatgcatcacatgcagacttttgtttgaactttgatattaggtttcatgccaatggggagaccaagccagagcctacgtggctgcaaatggcgcaggagataatatattagccaagggcgtggcacgccgctatttcacatctcagttccgcaacagctaaccactcgctaataccgaattgcgtggttcgccaggtctcgctttcttctgccctagattatagtgtgtccgacaaatccccgcgcgctgttgctaggtcataagtatctcggtccgacatcgtctgagtgtgcgtgccataccccgagtggctatctccgtgcagaatttcttcttaatgcggagcaactagacttttcagaatggtctagacagattaatctgagagaatcagaaaatctttgcggagagataccctatgcgctttcatccccaatgctcaagaccccgtagggatgggtataaatacagcatgagatgttctaaaaagtaagtaacaaaccacaagactcagatttggccgcttcaatctgaaaacagctcaccatgaagtctctcctcgcccttgtggcaggaaatctcgtcactgctgtgtctggtcatgggtatttgactgtccccgcaagccgtacccgtctgggcttcgaggtaagcaaatctcagtctgtttcagtatgcaccaggttctaatgcgtgcgtgagtataggctggaatagatacgtgcccggaatgctcgatcctcgagccggtatctgcatggccagatctgactgcggcccaggttggtagaagtggtccctgcggttacaacgctcgggtgagtgtggattacaatcagcctggagattactggggaaacgagccggtggtctcctatactgctggtgatgtcgttgaagtacagtggtgtgtagaccacaatggggatcatggtggaatgtttacatatggtatctgccagaaccaaaccttggtggacctgttcttgacccctggctatctgccaacaaacgaagagaagcaagctgcagaagactgctttttagaaggtgaactcagttgccttcatgtccccggacagacctgcaattacaaccccgattgcagtgcaggtgagccatgttatcaaaacgactggttcacctgcaatgctttccaggcagacaacaatcgcgcatgccaaggggtcgacggggcagcgttgaactcctgcatgaccacgatcgccggtggatacaccgtgaccaagaagatcaagatccccgattactcatccagccataccctcctccgattcagatggaattcgttccagacagcccaggtgtatctgcactgcgctgatattgctattgtgggtggtagtggttcatcacctagccctacttcgaccacatccactgctacctcaacgactacaccttcttccaccagttgcgcgtccgcaatctctataccggtgacgttcaacgcgcatgttacaactacctatggtgagaacgtgtaccttgccggatccatcagccagctaggttcctggtcgactagctctgccgttgctctatctgccagcaaatatagttcgtccagcccactatggaccgtgacagtcgacctcccagtcggggccacattcgaatacaagtatatcaagaaggagtcggatggaagtattgtctgggagagtggcccgaacaggagctacactgtgccgactggctgttcggggacaaccgccacagagagtggtgcatggcggtagactaatgataagttcctgtggatgaagatctggagagtagcttgagaaatctgcgcaacagtaaacacatatcacgcggtcaagttccgcttttcttatcacattaatgctagaccttgttcctggttttcagctcgcagtgtcttcgttccagagcgcttgctctgagccaaggaaaatactccatggcagtgcgtcatacatcaccgcctgtccctctgtctgccttggctagctctgtctccttgtatccggaacaacccctaagcctataaatgaagggcgaagcaagcgaataacaacaaattaagatggtggcaatcttccagggcctgagcaagctcaggccgctacaattttcgacaggaatagttattgacctatgaaccagctgtcaaagtcttcttgtccaagatacgctttcagtcacttcaaaagacaggtgaggcagaaacctcagtagtttgtgatctactgagtctaagcactgcttgagcaacgccacccgtctgcgttaggctgaaacagccaagactctctgattcgtggtgggaaaagccatcagagtctgccctagactgggcctaggttgatctaggcctgccatacagaggctcggttcagccccgagctgacagtagagagagtgtggagaagcctggaatcggagtcgcccgtttaggcgcggaggccgtacaggggacggacaagtggccaaccacatagccgtctattgtggattggatcatggaacttggtggaatgattggatacatagaccgttgagcctcgcaaatgatatcctcttggtcaatcctgggtcccaagaacggatcgatgtacgcacattgagctgctgtataccctattctcaccctgctctcaccggcggcaatatgtagcttccaggttcttaagcagaagatgcagaagctgagatcgttgagaggcttataccttggtagcccggcttcctcaaaactctccaagagcgttatttaacctgaaggcaggcctaattcggaaagtaatggtgaagtatactgcccatgagtctgcaaccgaaacattcaactttcttctactcgagaccccgtgttggaatgggccacgccctacgtcttttcgggagtgctacccatactgcaaccatcggcagcaaggagcctgataaggcttagaaaccgaacactttcccgtggctggtcacaagactggcctattgccgttttggaagttgcgtttctgaagccagggcgaagctacagacggatgtgcgctattggctgcgagcctcagaaggtgatgtaaagattgtcttcaccatccatattggccataacgtgccgaaaatcaccattgagaaataggaatcaaacagtaatggctgcaagcacctcgagcaacgcatcatcatttctagaacaggcaataacatcaccctctcagagtctccactccggattggcttccaaaagcttttcttaagactgccaagtacctcgaaagaacttgatgcggaggttggtgaagaggagctacagttgctggcagaagatgtctgggacgtgcaaagcttctaggaggtaagacagagtctgtaacggtatgctgcattctatcctaacgttgtgcttctcttgcctttcccctgcataataccaggcttgaagatacttcgagcagcatttttgcgttgggtctaattctccatttacagacctgagcttaaagtacagactacctcctgagtcaggattctggtggtccagaaaattttactttaagcagatagtcgcttttcacccagcaaggtaatagggttcttcaggctcttcacatcact

SEQ ID NO: 661 - DNA, 596 bp, Emericella nidulans
  unsure (1)..(596): unsure at all n locations
tacgctcgccgttgctgtaacactcacgctatcgatgccgttgttggtcatcgaatgggactngctaagcatgaacgaacgcccgaggtggatggtcaggcggtgcttcttgtgctacgcgggacaccacagccggctcctgatttggagcgccagctgtgggagggtcaatgggatatcccggaggagaccagggatgtctgttgcgcgcacggtctgagccatgagctgggttcagtcaattggggcacgatgcgtctgagaaggcgattcagcacagctcgtgtgagtgcaaggtggatatagccaggctctggagctcgaaggtcactaatgtatggacgcgcccgtagtgcctacgggcggatacagaggcagaactgccttcaaactggcagctttgcgagcctatggtgagatggccagaagtggatgctgtatgcctagtcggatgttgatgcttgcattagcatttggagggcgcctattgcaatggcttgaacagacgctctgatgcagctgaacgatccgcgtttggtttacaaatggtcaaaccgacaggcgtttcatatgcaagattaaatgcaaaggttttg

SEQ ID NO: 662 - DNA, 1852 bp, Emericella nidulans
gaccgataacatatgaccatgagtggaggaacctcggcattttgatagcattctggatcttcttcatcgtcgtatatctggtggctacggagctgaactcagcgacgtcttctaaagccgagttcctcgtcttccgacgtcgtcacgtaccgccgcagatgcgcattcttggcaagtcccaaggagacgcttcgcctgaaaatgtcgctctagctgagaagcctactgaagtggcgccaaatacgtccgcaattccagaacagcacagcattttcacctggcgaaatgtgtgttatgatattcctgtcaaaggcggccagcgccgcctgcttgacaatgtcaatggctgggtcaagccgggaactctgacagccttgatgggcgtgtcaggagccggtaaaactacccttctagacgtactcgcgaagcgtgtctctatcggcgtcgtgacaggggatatgtttgttgacggcagaccactggataccagcttccagaggaaaacaggttatgttcaacaacaggatctgcaccttccaaccactactgtgcgagaggcactacaattcagtgcagtactccgtcagccaaagacagttcctagggctgagaagtatgcgtatgttgaagaggttattgacatgcttaatatgcaggatttcgcggacgcgattgttggtaccccgggcgaaggtctgaacgttgaacagcggaagctgttgacaattggtgttgaacttgctgcaaaacctgcactgcttatcttccttgatgagcctactagtggtctggattcgcagagctcctggtccatttgttcgttcttacgcaagcttgcggatcgcggtcaggcagtcctatctacaattcatcagcctagcgccttgctcttccaacagtttgatcgtctattatttctggcaaaggggggtcgaacagtctactttggggatattggcgaggactcccgtacattgctcgattactttgaagcaaatggagcaagagcatgtggttcatctgagaatgttcgtccttcttgcaagaattgttacaaatactgacttcagcagcctgcagagtatatactcgaagttattggggccggtgcatctggaaaatcagacttggactggccatcaatttggaaagaaagcacagaagctcgagaagtcctgcaggaaatcgacagaatccataaagacagggcttctgcatcatcagtggaagacaaaaacacgcatcgagaatatgccatgcctttcactgaccaactgtggcaggtaactagtcgagtatttcagcagtactggcgcgaacccatctacgtctgggcaaagctaatcctagcaatcgcctctggtctcttcatcggcttcacttttttcaaaccagatagctcacaacaaggctttcaagatgttctgttcagcgcgttcatgctcacatccattttttccaccctagtccaacagtgagtacatccctaccgaacactcccatccaactcctattaacaaaagccaagaattatgcctaaattcgtcatccagcgctccctttacgaagtccgcgagcgcccctcaaaggcttactcctgggccgctttcataattgccaacgtccttgtcgaaatcccctggcagattctagccgccatcgtctcttgggctagctattactttcccgtgtacggggcctcgcagcccccgcaccgacaaggcctcatactcctcttcgtgatccaattcttcatcttcacatcaacatttgccacattaatcatttcttctctgccggatgctgaaacaggcggaaccatcgcaaccctcatgttcatgatgacgcttgt

SEQ ID NO: 663 - DNA, 2731 bp, Emericella nidulans
  unsure (1)..(2731): unsure at all n locations
gaaggaggggggctttttccaggaaaaggccagcccaagagatggcgaacggggcccgaagctgaattccaacgtaaaatggttaaggcccccggcagggtcgagggaccgtagaatgcaaaagggtttttagggctggaggacaccgcaaagtcttggccccaggcggtatgaaaagggctggctgtactcatgggtgtgccgaagcccttccgaagtggctaggggcggatataatggcaaaaaaatatccattgggcgggtggcccccaatactgcaggccattatggcaaagaccctggggcccaatcaagatggcatcctctttccctgggcaaggggccttgacatggtactcaaaccgttaagtagggtactgaaggttcacgtaaggctgggtagtccataatatcagcattataagctagggtactgagccccgccaagcagctactgtagggctttcgcaatgatagttccctacctagacacccaactaatgcctttctcgcattgcttgtcttccaaaaggaggagtcatcgcccgcctgccctcagtagtagataatgatgctgttctggatgtcggcgtcaatagagacaagctcggtgacggaacatggtattatagtaagttttgcagaagacctgctccgttgaatcggcccgacttccatgtgacttgaatagaggagcttggtaattcagtaagtaggtagcccttaaatcaacgtgactatcaataccacttattaaccaaagttttagctgtcaatcatgtttctgcggcgtctttatgattgctgttaaagttggcgtgctaggtagcgattactgtacgccaataatcctaaatcaggagctcgggtgggctgggtactgcagaaccataagacccccacaatttaactagatagtgttatcgtccggccatttaatatgggatatctggaggcgggctcgcagaatcttccatagttagaccctcatacttgttagatactgcatttccattccttctgatagccctacaaaacattttcgacaacgtgagagtatgcctttacaaaaggcagaattaggaagcaaagaactgataccctgaacattccgaaagcagctacgacaccctagcccatcttagtattcatgagtatgaggcagctaggtggttctgcacatttacccctgcagctgtatcccctagcctaccaaccgtccgagaagaatcggatctccactaccacatgcgtccagggagggggaaaaaaaaagcgggcttgtccacgagaatgaatagtcagaattgtcctgcgtgaagtagttagtatttaccgtcatgctctgaaaacgcatgggacaggtaacatgcccgttatgtgtaaactaggtacttgtgacacccctaattgcaaacgcatgctttagataaaacaaatagtcacgcaattaattgcaggtaaggagaggctccgcctatggcacagcctatattctcttcaagtaggatccaagagcctcccttttggatgaagtcacggtgccacgtaggatactgcagcagaggtcgcaggaatcgtaggagtgacgacgtttaggcctttcaattgtagcgctgacttgtgttggttgtagaagactcaggtggctgtctaaccagacgagcatgttcaagggctctgagccaactcaggcaattgtgctgggtattttcgcagctagcaatagtaatagtagtctttaaaagtgccggtgtccggtctgtgattttgcacaagctcgagatgagattgtcaattaatccagccggaactgcagagtatgcagctcaaggcggatacctccatgcgatataaaggcctgaattccagactgtgcgttagatgaagctatttcccaaccagtgaaccactgtgtgggcgtcatgtcacataagatgatcagcatatcgagagtgtggctgtcacataagtgatccgatagtggtaactgttcactcatgaccgctgggtcaccttggcagagcatatgctgggcctggagtccgtgagaacagaccacgacgagggttctgagctttattatagccggtagcgaatgaacttggccccaagcgaacggagaggtataaaatcgtataaaattgtcaagagaatggtaacgttatgatattagatacagcctgaattatgtaataccgacggccggttggcctaatggtaaggcgtggctctcctaagtgattttgactgtgttctatgcaaattcagtctccacttagagtagttaagccaagattgcgggttcgagtcccgtatcggtcggataacaacgcatctgcccatacaatagcagctaaaattgcttaccgggccaatgcttttttggttccttacactcgaactatatatacggttgtatatagtgttcctgtttgcatgtgaattagagagtcaacacaaggcttttttttttcagagcgtggtcacccagactgggagacaatgttcgattaaaatcattgtactgatctgtttggtactttaacgtgatggtgatagttacgggctagtgtggtctaaagagccggggcacggttcgttaggtattgcttacggctggcaacgacttctagactttttgcctcacccgtcagttcgattccaatactttgactgagagcgtttgtgtatttctgtactcngcgtctatcaatacagtcccccaggg

SEQ ID NO: 664 - DNA, 2108 bp, Emericella nidulans
acatacaatgccatcgccaggtacggacactaggtacagacgaggcggagagccaattttggacgtactccaagtagatctaataatatccaaaatcgagtcacggacgaatgggaggttattcgttcaaggctagaacttcgacctgagacatacaggacaccaacttccggatcatggcctcggctgaccaggaagagtttcactttgtgaacccctgcaaccgatctgctgcctaatctggaacaggggcaataaagagccggtatattgaggcaccctattactcaaaaatagacctccgattatgacgaatctcccgtagacatcgacgatcttcataagccaagttctgaatccttatcaccagtccgtaatactctgaagcaatcgtcgtacatttggcttctatttcccatacgaaagatcaaccaggagccatcgaattgagcagacacctgagatcacgtgcatctcggccagctagggagcgatcgaactagccatgtatccgaacggaggccacggagattatgtatcggtccatttttgactttctgccctacccaactccagagattgcgagcctccttcagtctcgatccgcgttacaaaagctggttttgtctgcggatgaggagttgaaaagacaaccccgtggaggacctgttctctgtagctttagcccaactggggccagattgaccaacctgattggcagcgcaagggctaaccctgataggtcaatagttaagcttggcggcctgaggccaagaagccaataagtagccaacaagtagccaacaagtagccaagtcaagctttatgtcaaccagacattcagccgttgcccagattctgtttcttcactaatagatcataaataacttacacccagatagagtgatggaaaacaaaactccgcgtcttaagtgcgcttctcctcaacggtgtcagatttgcacccgagtcaacgttctgccgttcataccgtgctcggccactttccgagccagggctaagggcttttccagcccgttcccgccgacccgggccgaagctgtcggggccagtgggaaagcggtcccgactgggcctctgactggctgacgggccgatgagtggacttagaccatgacatggattaatggagagtgaacggccactaacaccggcagaatcttctcaagtctgatggctgagcgattaaccccagactcgctcctggtgcgtcacagctcccagatggattggagttaaaccgtctccaggcggataaagaagaacagcctggggaaaatgcttccccgggcagttctctgctcctgacgtgacgctcgacgtatcgcagcttcgcattgcccactcactatgccccagacaccgtggtgaaccccaaaggaaacctgagtgtggagagggctagagttgacaaacccccgaagtttctgcggacgctttttagaagccgttcccacgtctgagtctctttcattcacaacctctttccaaaactgcctactatcatcatgggcggcgtgctgcatctggtcgaggaccggccgacccccaagtccgtgtacaactggcgaatctacgtgctagcccttattgcatcatgcggctccaacatgatcggttatacatcggcctttattggcacgacaatcacattatcgtcatttgaacatgagttcggcttcgacgagaagacggatagccaggtagacctgatcagcgagaatatcgtgtcgctgttcattgcgggagcgttctttggtgccatcctcacctacggcctcggccacttgatcggacgaaaatggaacctggtcgtcgcgtctgccatcttcacgctcggcgccggcttaacttgcggcgcaacgggctcgactggactagggatcctgtacgctggacgcgtcttgtcaggactgggcacaggcgtggcttcaaacatcatccctatctatatttccgagcttgcaccgccagctattcgaggacggctggtcggtttttatgagcttggctggcagattggtggactggttgggttctggatcaacgtaagtgctctcatctacaatacgatcaagtcgactacc

SEQ ID NO: 665 - DNA, 3734 bp, Emericella nidulans
gactgatataatgagagttattttgtatgatgatagaattgtatcaagggatgatgtaaatattaggtaatgtgttggtaaagggatacaatgtagaagaatgtgataattgggagagagtggtattggagtaaaggatataaaggctgagatatacgaaatcctaaccagagcagatgtctagctgcttccgactctcctcagaaaaatacgcttttggttaggttgagaaaaccaaaatttccggtcatcctggatagcaccatatgagcgaactgtggtattcgtcattacataaagtagatatccatttgctcatagacagggaacaaggcaagaaactggtatacacgtcataagtcgtaacatactatacagtcggaacctctgaaaaagtacagacggcagaagataaaggtgcacctcaaatagagggaggtttcgatagtacccaggaacacctgggatttagtggtggcctacacgagtggatagtgaactcattagccgacctcgcatccggctgtatccatgctgaaggagaggtatacttacggccaagcggttttgctctcttcgagatattcctggcttccttttgcttgaacttggcgagtcgcgcctcctccttcgcatcccgttccaactctctcacgttagtcctcgcctcctggactgccaaccggcttgcacggagcgcttggtccgcagctctctctgcctcctcagcgtgcataacgcgttccttggcagcgataatggacggatcttcagtgtgcttgtttcggaagaggccgtggccgcggctgccgtgactgctatggccgtagttgctcgtaccgtatccgcgtctcgtagagccggtcctgacgccggcgctggaggagctatgcccgctagaatgtgagccgcggtgaccaaagagcctgcctgatttgcggtgcgtgtgggtatgtgtgtttgggtcgtcgatgctcgagtgggaggagcttgacatggaggtgcggcggaagaggggcattacgatggttgatcagagttggctagaaaaagtatacttggatgagtctagtagaaagaaatgtagacgtagagccgctggggttatggtatattgaatcaattgagtgtactagcgatggaccattgctgtcagggagagctatatagacgaacattctctctgacgtcacgggtcacaatcctcagtatatacacagcaatgtagatggtgttgatatcgctttaactgcaatgacgttggctctagtgctggggtggcaaatggtgctgccaacacggcaagagatcgcccatatgtcaagtccattaatctccatcaactgcgattggactcggcctcaccaatagacagaaacctcgcctgccactgatggaatctcagagttaaagtggtgaagctgccatcgtcgtgagaggttgcggtcagcgacatcaacccttattgctgcatcagctcttaccgatcgacttatgtcgtcggtcatcttctagggcaagctacactttcgtcacatctgacgtcgttgctggaccgacgagtttggactctagcagccaagtaattctgtgtggtgggcgactgtgtttagtaatgtactgagaggacctggtcttgaagcagtacagcgcgagaatcaactgaattttggatttcactggagtttgagtaattatgcgcaccgccagggtccccaaagtgggagcgtataccccggaaagcagggctatggctcccgtttcttgtataaactaccagaattggtctgtagcggcgagcccgtcaacttcagatagataggtgtaaactgggcctcattgttgtttcaaagcaatgcttcttagatagttccggttattccaagtttctatctcaatctaaattcaatgggctcacggtatgcctctctaaataatgccatcatttcgcatggcgtaaagctattggcacagccacccagtggtgccggttggctttgcgaatatcgattagagattataccaaaaaaatgtaccgctaagccgaaaaggagtcatgactaccagattagcattaaacagtcatatttccaagctgacagaatattatctatgagctcgtagcgtgtatgtcttattttttgttctcttttccttttttggaagaatttcctatgcggaaccccattattgtaatcagatgccttctactatcaatcctcttgagaaaacggtagagacaaaacaaccatgccttaatggccgtctgactgatcttgtggcagcctcttttggcttccgccgacagtcgcgcttgtaagctatatttaggtagcctggggccgtacagcgtgctagctgctggctctatcaccacccagcacagccctctggcgcccaatttagcgtataaatctactgtgcttcctgcttactcgcatgggaattctcttgctttgtatcggtggatgcatggatcgagccgctccgggactgcgcctcttctgcaccaagcaccgctgagggcgataacagcgagggaatgataggcgataggctcagtagattcatctcacagcctcgtggcttcatgccaaaatatcggcgcttccttgccccgtaccacaattttgaattctgcatgatattgcgcctactgcagacctagattagcggtgcttacaaaagtatatgtctcgtcttctgcccgcaggaaaaccaaaatattctttaacctttgacacttcctctcacgattgcttggtggggaactatacatatacctcaaagtaagatggacgcatctgccctcccaccctccacggaaggatcgcacacagcaagtatcgagaaccctcagccacctgagcccccacgagcattttactgggacttccaccatatccgcctcgatttcccgccagatggcgtaagtcaagtcatcgactttgaatactggagctggaacgacgattcaaacaccgcctcaaaaccttcacatggtcgtccgccgaaaggacgagtacaaacaggaccagatcgtccagcgcctgcacgaacccattcctctgcacgagggccgtctcccgacgtcagggttccagcttgcggttgtgccgtgttcgcagcaggcgataccacaactagggagtgcgacgctaggcgcgatcaacgaggcgctgggcttgccgaatcaccaccatcattatagctctgtgcggtctggtgcgatcgggctgtttcagatgcctgacgagggctggcgtacgtccattcgaattggttttacctaaactatgtgctgatggaaagacagtattcgcccggccccgtgctcctgacttctcctccatcacaacgatgctccgctatacaccagcaacgaacattacccgcggggtcttctacttcgatcctctcttcccgcagctctacaacattatcggcgagttcgagatgtgcccgcatccgctcctcctcccgcttttagcgtgcgaactcacactggacgtgaacgtcaaccatctggagcggtatcagacgtcgctggaacagatggagggggcgacagggtatggcgtgctcaacgagaagcaagataacttccttgaccacaggatgctcgtgaagcagctgagtaaagcgaggagcggggtacacactctcccttgcaacgctgcactcgacgcggtggtgtgtcgagtttactctgaagaagatcgattgggtggatg

SEQ ID NO: 666 - DNA, 1660 bp, Emericella nidulans
agcgcgtcaaaccacccaaggcccgcgccctgattttctgttccgcgtttaccgacatcccattcatgacgctcgtcatcgccggtctcatcgccttcatgggtcttttcacgctgctattctacatctcctacgtcgcctctgcgcgccatctcacgtccaacgacatggccttctacctcgtccctatccttaacgccgcttcctgtttcggacgtacaatccccaccgctatggctgacaagttcgggcccttcaacctgatcgggcccttttgcatggtggtcggcgtcttgatcctctgcatgatggctgtcgtcaatgaagccgggattattgtgattgccgttttcgccggattcttcagcggcgccttgattggtctcccgccgctgtgctttgtcgcgctcacaaaggataagagtaagattgggacgaggcttgggatgggctttggtataatggcctttggagtgctggcggggggacccggggcgggtgatattctgggcgatactcatgatctggattggaacggggtctggatattcggtggcgctagttgtcttgctgcggcagcgatctttgctggcttgagggtttcccagtatggattcaagctgcgggtgaaagcgtagtgtttttgccaggttctcatgttcgcatgtatgatagcgtatgctttagagatactgctttatagaggatacctaaataatgataatgtcgccattcccctcccctaaacattctcacagagctcgtctttactattgaacctattggttatccatgtaggcgccgtgcatcctatatcgtccttatctagcgcgattaggaggatacgtaacgatatccccttgatatacacttaaatatataactgacccgtgaaagaacattgtcaccatttacgctaaacccgtcgcataactaggacctatacctagtaaactagattatcttcatatgaaatagttattcaagtcagactaaaattttcagtcacaaaagtcgaactgagaaagtagctcgaacaaggctcaataaaaatcgctttgaatagaaacaatattttttactgaaagcctaaaaagaagtttgatttactgagagctatctgcataaactgacagtcgtaggatttgctattgaagagctgttgagcagacttcatggcaggctaccagtagatctgccagttcatgacagtcgcaaggtacttgagcgttcgtcagcaaggagagctcgacaaatgcggcatataacctccacttcctccatctgtagggttgccggtctgactgaacttattgctgtgagcggcgttggggtatcatctagtacgaaggagcagcgtgccgctcttgacttatactattattattcactccttaattgatgttaggctgcaaattgcatctatggctggagccattatattatattatcgaagaattgtctatacaacttgttctggacatatgttctagattaccgtctcattcgaattaagcagccatgattgggttgaatagcgagcgtacaccgaatgggcacctaatgaagcactcaagaaagatagaacttcttcaattaggctacataactgcccgtatctgactaagtatccagaatatggcaacgctaagcagacctg

SEQ ID NO: 667 - DNA, 1090 bp, Emericella nidulans
tattaaactataggttggggcaggtttcaggcctagctgatccacctacatggtttctagggtggttaccttcacagtaaaccgcctataggtttagcaaataattctaacccaacccaaataacccaaaataacccagttatgtatatcattactctaataagcagtgatctatatagctaatataatactgtatttaaatactgtattataaaccatctaagtaagaaaatataatctaaatacagtaatatacccattcagatatcttggcaacccagcgggttgctccgctgggctcgggggcagccaaaaacatctaaaacccaatggattattagaaggtctaatgcaacccaattcttggcgggtttcgcgggttgggtttaacaagtctagttgctgccaccattaaatcggtctttccaaagcagcattggccatacagagacagacaaaagaaagatacggcaataccgcacctgttcaagcaggtgggtcatagtaaaagactatattctgccatttcccgtcaagtctcttgtttgtatttttttttttgtatttggatctaatgcttgctcaggtgccatatatttaggtctagctagtcacagccaaccagtcctgtgcggtgagtttgattctgctcatgtatgctgacaattaccagacggccaggctgccttgctacactcttgagaagaagtagaggtaggcgaactttttcatttcttgcacgtcgtcgacctccacaaccttctcatcattgaacatcacccaagaaagaccggactttccgggcaaatgttttcgcacaaatgcaacataatgcctatgaccagctgttaatttattttggaggtaaatatcaaggctcctggatcttacccagcatgtaccgaagcgcccttatggcaaattatggagcgaagttgataggttgccggactagtagcgaaacccgggactacggatgtatcagcatttccgctcggcgttcgtgaacagagctttcatcttcatcgcctggatgactgaaaacccagtcaatagctcggttaatatcaccacctgtggcagtcaacgc

SEQ ID NO: 668 - DNA, 623 bp, Emericella nidulans
gcatctcctgatcagggtcaagccccctcccttatctataggtagccaaaacgggcttctgcccctagaagacccggccagggtagtgccggatgcttctcccactcacttccgacatatactgtccatagttgctgcttcaaacctgtatctagctagtttgtagggagttctgtttaggcggcacgtccagatgccccctgggaggccgcagatcacgtgggccccgtgatccgccgagtgacgttaaataatcaaatcaaatcaaatcaaatcaaaccttagttcagagctggtcatttgcaggtttcgtcagcgatcaacttactatgagtcaggtcatggttctcaacatgatataaccagaaatctgctttcaaatcagatgctgacaactgcgatgcagttttgttcatcggtccaaccgaagacgctgtattctgagcaccacaaaatggcgcgagacgccttatacaagggcgaggctagctacttgtaccattactgcaccgctgcgctcgcgattcatgggctatatgtcctcgcacatttgaagtgcggtttgaacatccatcaagacatttcatagatgaacttggccgaggttaccgatgacttggaat

SEQ ID NO: 669 - DNA, 4827 bp, Emericella nidulans
cgcccgatcttcgtcgctagcggagtgctcttcgttgcgtgttttttacctcgcggcgggacaagggagatcggcggctttctggtggcccggttcttccagggcgtcggggcgtcgaccttctctaccatggtcggcggcgtgatcagtgatatctaccatgcgcatgagcggaacacgcccatggcgctgttcgccgcggccgcgctcttcggcacggggctggctcccctgctgacaagtgtgatagtagcgcatacctcgtggcggtggatctattggtcgcatgcaattgtctctggggtgtttgtgctcattatcttcttcttcttcaaggagaccagaggtagtgtgatcctgagccgcaaggcgggtgccctgaacacgtactacgagcagctcgaggccgcgggacacgttggagtcctgatgggaagtgaccccaaaccaagacggatcaggtggaaggtcaagagcgatgagcagcgccagtcgctcgtgcagatgatcagcatctcgctgtaccggccttttcgtatgtcttacccctcttaccccttatcggttcggtctgtaggtgagaagatcactaactaagggatgatacagacatgctcgtcaccgaacccgttgtcttcttcttctccctctgggtctccttcagctgggccgttctctacctgcagttcggctccatcccgctcgtattcaagacgaaccacgaattcaatatcgagcagaccggtgctgttttcacctgtacgtgcccaacccctgcacacccctttccaaacggcgcatgccatactgatcttgaaacttcaataaagcgatgtgcgttggttccctcttaatcaccgtgatttccatctaccaagagaaaatcgcaaaccggttcaacctgctccctgccactcccgaagcccggctctacttcgtctgcttcgaggccgtcctcatgcccattgggctcttctggtttggctggacctcctccccttccatccactggatctcgccgacgattgcgatcgggtgctcaactatggggatcttctccgtctacctggccgttttcaactacctcgccgatacgtaccaccggtacgcgagctcggcgattgcggcgcagagctgctgccgaaatctgctgggtggcgtgttccccctcgtcactaacgcaatgttcaataatctggggttccccgaagcaagcagtctgctcggcgccattggagcggcgctgtgccttgttccgtttgtgttggcgttttatgggcagacgattcgggcgaagagtcggatggcgagcgagcttgcaaagtagaacgcttttgtgcttagaggtggtttatctggtctgggttatgaccgttgctttatgaccatgacttttatgacgtattgcctacagttccaggtggacttggcaatatgagatgcataataattaatacttagtacgaaagctttgaagtggcaatggttccaatattgactaggaactcaatgaaactgcattttgcctatttggtttgagcgacatggctcttcttgagaccgattaattcatcacttctatcattcaagtttgtctatacactgtgaagccacgcaggccaaccgggctatctattgtgctgtcccggtgctacaattctcaaagttgctgagatttctaggacgccgggggcaaacaagtcagattgcggcggattgcggcgtcgtagctatgcgtagatatccaataaagcatgaatgattgaatgaacgaatgaaatataacggcatatctcagagttatccgttctatactgttgataatcgggatactgatcggagcgcattatcaataatccgatgaccgttccttctaaggcctcaacgacagtagtccatctttagatcttgaagcattcattgcccaataagaactgcgttcaaggctacatcctagtcgaccattgtttgatccattcgccgttatcggcagcggtgcgcgatctgacccttcaagtaccaaggcacggctgttcaacctcaaacgaccagttgaaggcgaaggagaataagcagccattgagccatgccattcagcggtaaggttctacttttggattgtttggataattccgagtccgtctttactacaaataatccggaatagagcacagtagggctgagatgacgctgcagagtggagtgcgtacgtacggcctccacttggtgtcaatccttacctgggcaacggccccgtgaaatactcccaaactgtcgagggctcggcagtcatttccagtattcgcatcacatgattgacgaactcagaaaggggaacacaattgccatggcacgacccaatgcttatggcgtaaactccgtcaaaccgtgaatatgtttggaaagcaaagcagggctgcgggagacggcacagttccccgccgggacttggaattatacatgcgtctagcagtcagatcagggggatcgccggcactcagtgtggctcattagagagtagcggctttgctgaggggcatcgttgtttctgtcgttaaataatctcaagctttacgcaagcgagcgctaagagacccaagcctttcgctgccaagcaattgaatatccactgtctcggaattaactccattatcgagccgtaggttggtacggatccaataaggctgcgccgctgcggataccccgttcttgcagccacgttgtgcttgtgaccttgggacgcaacaggatattcaaagcgagtccgctggagcctggttcgtcagagtatttaaacctatcgagtgaacgcggaatcctactacacaatcttcactttatcaatcacaccatcccttcacaatgggcttattctctcaccaccaccaccacgaacatccccctgctccaccgcgaggcggaccaccaggaggacatcacggtcccggtcctcatgggcctcctgagccgcatcatcatcacgggcaccagcatgatcaccacagacacaacccgggccttcccggcccccctggtccgccgcagggttatcccccacccggcgggataaacgggcccaacggaccgtggggatacggcaatccagccttcgcaggacctcgcggagaccgtcctcctagtccgcgcggacatagacctccgagtccccctggccctcctcaccatcatcaccacgaaccaagatttgaactcggcccccctggccctcaccactttcctcacgaacctagatttgagcccggccctcctgggcctcccgggccccatgagcgggaacctggattagggccgcatcctggaccaccggggccgggattcgggcatggacctggacatggacatgtacacggacatccacctggccacgggcatcctgggcataagcccgggccgagacctgggtggtgaggaagcaagggttcgatacttattagttactgggttgttctcttttgatatgatatgttagggatctcagattgacgagctaagactttgaggtagcggattggtagcggtcttgtttgtccttgtaagttatgtgggttgcaaaactaccccaataaagtagggagctttcgggttaaatcaaacttgcttctgccgtgatatgaaagctagctggtaggacggcattagcagtcgttcctccgccagaaaagacgtgttctaggtaagaggctttatgctttgtgttaagtagcttctgcagtaactgtatggacgtggatcgtcttagacatatgttgaatgataataggcggatataccttctccagttctatattttctcttatttttctgctgtataacagcacttatacccgttactcccggcaccatgcatacatatacccgacatttatcatgatcgttggcatagtaaaatctgatcacagcactataccccctcaccgaataactacactatatactgctgaaccaatcgaatcgtaacggtcgtaagatgaacacctataagacataccgaaaactaggaagctccagatccgtcctattggacaacccttgctccaactcctcgctctccgtaaactgcccggccggaccgtataccctatccctccgcttgttctcccacgcgtagtacgccaaaagcagaattaggaagaatacgccaaaggagagacccgagacggctgtggtcatgccggtctgtactggttagcatcaaactcctcaatttccacaggactaggtaggcaggtaggtaggcatggagaaggaactgaagcataccggataagccggctcctcgctctccaagaagaactgcggtccaacgatattcccgatgcagtagccgatgaataacatagcgctggtaaggctcctcttcgtgaaggtggccacattcgagctgatcagactcatctggagcggcatgttcgctgcaaaggccgaggccagcgctagaccggcgacgcgggcctccgcgtgcgactcgtcgagcttccacactagcgtcatgccgactactgcgaccgagctgttgaagatcatcatcaagcagcgagtgttgcggaagtaggttgcgatcgcggtgccgatggtgatgaagacgatctgcgaggcgccggtgggcatctgcatgagcagggagcggacccggccgtagccgaatccgttgataattaagccggagaactgtttacatgatcagttggttggctcatattatccgtctgcaagtagaatgaggcttagagaaaggcggcggcgggacgtacacttgtcagaccgccattgcagagatttgtcgagacagaatacaggaagaagacc

SEQ ID NO: 670 - DNA, 4946 bp, Emericella nidulans
taacggaagtcgtcccggaacaacagacggttggttgggaacgtcaatcaagaattaatttatctgacttcatactccccttccaccgcttgagaattgcgccgcaaaatagattctccgcggttcttcactggtgggggcttcgatcaccttcttgtcgcctcctactgcaactcattatcaacccaacatcttccgacttgctctctgcgcggtctgttctttagtacaacgtcatttttgacgcccaactctcacctccgacgtctcaacgttatgtaagctcgccttcttctatccgcgcccagttccttctaccccgcattatcgcaagatcgcaacacacacttgatcaatcaagaatatactaacgcaacgctcgctcgcaggcttcccgcactacagctttttacctagtatttcgataactcccaaatagtttcaacaatgtctgatccatctgctcccactcctgaggcgcctgccgtggttgaacatctgaatatcaaggtcaccgacaacaacaacgaggtttttttcaagattaagcgaacaactaccctgaaaaagctcatggatgcattctgtgaccgtcaagggaaacagccgtcaacagttcgtttccttttcgatggaacgcgcgtacgcccagaagatacaccagacacggtacgtcttgtattgatcttccgtatactcatttccttggactcaaatcaaaatttactatttggttaattctgctaacatgcttgtctacaccctagctcgacatggccgatggtgatacccttgaagttcaccaggagcaaatcggcggtggtctctaatccaccagagtccggtttccctcctgtccttcccgcgaaatctttgtcggtgtcctttttctggcgcatgggtgattgagttggcaataaacctgactgggcaggctttctatgttgcgaggagtgtcacgaatgggttgagataaatggcaggtggcagcttgtctgcatattatattgctgccgcttctgccatcttccttgttaggaggtatcatatgttagtcccttttgtcatcccttatgaaatatcctaagcgcaacataatctattgccctgcctatattaatatacatgagttttattccggcttaaactctcacccgggataaatattcctcacaaagacagtcaactccgtataaactctaccggaattaggaggggggtcaggcatgaaagaacgtttaagagtgaaagagaatcccataaaaacaaaagaaatggcagagatattaatcaagcgccccaaatagcggccttcgccttctcctcttcctccttagccttggctgcctcctccctctccctattccttcgtctaatctcctgctcctttacggcccggtcgtaagctcgctgttcctccgtcctcttgggcgctcgaatgcccaacgcgcctgcaatcaacctccctgcaacagcagtctgcttctctggccgccgatttgggtctcgtgcagatgtcgaacccgacgaaggtttggatcgagacgtagaatctggcccacatccgcccgccgtcgctgtcgccacggcattagcaatccacggctgagatgtttgcggggagattggcgtgggtggggggtcaaggggcccctctgctaccgcgggagaggtggccaggcttgtagcgacatttggtgaacctagctcgtcttcgagccctgcaccacctttgtctgtatcttgatctgacagctcgagttcatcttcccaggaatcggcgacgacaggcgctttctttttcttagccgggagggcggtggtagctgtaagtttcggccgcgcgatgtcggttatggaagaagtcttttcgccaatgtggagttcgcggagagaggactggagctcggatgttgctgttgctgttgtcggggatgttgctgcgactgtggacatttgggctggcgttagtaacgggtctccggagagcactggcgtggtttaagtgcaagcaggacgagcttcagcttcggatgtcaaagcagagctagcaaaaggacgagagcgagagaacttggaactaagaaaacaagaaagacaaaccctttgcaacagcgggagacttagcagccttgctggccatctccacgcctgaacttttatataacacctctagatgtgtctggaccgagtcgaaaaagtggttgcagttattaatagttgatgtgcgataatgtatggcgtcagtctggggtgcggcggctacctaagtaacctaacgtttcaacacaaaccccgccgtgtttgggattctcaactctggttgggtctcgtgatcgagatgaggggaggggaaatcaaaatgcggcagagcttcgtgattggaagctacgaagccgctggaacgctgagcaaaacgatcgacgccggcggagatcgactgaagaataatggaaagacccagaggccgcatgttgtgtgaatgtgcatgttacagtatgtccaggtgaatctggggttgattgcgtacagcttgatatcactctgaggtatgcgggacagagttcttctcatactttattatgctaatattcgtgcttctagggtttgacactaccaagaaccccatattccccccattttaaacggctatatgcagacggctatttggctaaaattctgggcaaccttttgcgtgcaaattatgcatactgcgtgcgcagggccatcaatatgccttcccgggggaccgtgaatagctccctctgttcccgagaaagccaatcgttactgtactatatgcccttgggctcccataatcatgcccgctaggaatggtaggcggggagtccgagaccggcgcggagcgttgttttgggaaactagtagagaccccagatttcccgaggttgtttctccaactactgtcctttgttgtagctcaatctcttactctactatgtgttatattatttatgaacgatagacttttggtttgataacggttgacttcgagtgctatactttaattgcccactcgtgatgcctggattgtgctcgttgacgctgcgggcgcacaagacgccgcttttgcgagcctcattacaccatattaagcacttttcccgctcatcatgtaagagcgactatgcggatacgctcccaaacctcaagattggcgcgcataccagagttctgttccagggatttacaggtaaatcaacccatgggtatatcactatctcgctaacaagcattgcaggcagacaggtaggctcgagtcgaagttacaacaatggagactgaccagctaggctacggcgaacgtgaaagagtcattggaatggggaacgaagatcgtcggtggtgtaaagcctggtgtggaaggggaacacctgggactgccagtcttcccatctgtcaaggcggtacgaatccattgctttgttcccgagtccattactgatactgtgataggcccaagcgcaagcaaagccggatgcctccgcaatttatgtgccaggaagtcagacggcaaaggcgattgaggaagcaattgaagccgagatccctcttgttgttgcagtggcagagcacgtcccgctccatgatattcttagggtacgtacggtttctccatgaaataggttgggtatgtgcttacagttgacaggtccactccatactcaaaacccagtccaaaaccagactcgtcggggctaattgtcccgggataatctctgcgattgggaaatgccgcatcggattccaaccgctgccctgctttgccccaggtaagataggtatagtcgcgaagtcaggtactttgagttacgagactgttgcctctactactcgtgcggggctgggtcagagcctctgtatcagtatgggtggggacccgctcgcggggacgaactttgtcgatgctttaaagatctttgaaaacgaccctgatacagaaggaattatcttggttggtgagattgggggaacggccgaaatggatgcggcggagtggattagagattaccgtcgcaggactacgagccccaagtatgtgcttcgctctgctacactccacaggactgacaggaaagaccgattatggctctagttggcggccgacaagcccctccgggacgaataatgggccacgcaggagcctggacggcacctggtgagcccgggccagaggagaagtatagagcccttgagcgcgctggcgcggtcatggtcaaccatccagagaaatttgggaaggggatgaaggcccttctcacgaacaggcgcagtacttcaagctctgccgtaggtatcttctaactacctcaggatatgtagaagcttacgacgcagtccaccttcggaggccagaaaaggagcctgcacacaatgagacgagttatcccaagacgtcaacagaccctccaaaaatgccaatctcgaaccctatacatcaagcaattccaagccctcgacatgctcaaaaaagccggcatccaagtcaatgaaacctccgtatcagcttcagacgttcatatctccctcacaatcgacaggaccgcactctcccccgcacttatcacctcaacatctcctggcttcgaacccagcaactccgcccgtcttcccttcccttacattaaagaaaaatttgaggcttcggactctatcatcacaaccgcagcaactcagctgagtcttccaacctcagcacacggcaagctcgctggaattgttcaagcgctttggcagatcttcaagcagagggaggcctttgtcttagaggtccgagcgaattactctgctgaggggggcttcgaggtacgcggcgcgagatttggatttgacgacgctgcgttcagaagctcaggtcggcaagaggaaatccatgcgcttagagatgtcaaggaggaagtgcctaagaggataaaagctagagg

SEQ ID NO: 671 - DNA, 6930 bp, Emericella nidulans
tcgtgacggcgttcttcttcgcgggcagcaatctgcgcagtcagctctggggacgtcgctcgcaaactgtacgatgaccttccaagcaaaagttttacggggaggaattgggtggaggtttgccacctcactgatggggtttggactcgctttggtgctgacgagcgagtaccctgaacattcgaccttctgaataccaaccggaccatcttgccgccgagtacgcttgctgtagggtacggattcaatattgttaaccagacgacattagctacggagcgtatctcttacttcctctttccttcgatgttaaagatggcgagtggctacatatttcgacaaagatcacccctaacggttatatcgtctcgatcaacaataagacgaccattgccgtgctctttaatgagctgcacctggtcactagcgcccaattctctgcgggaagtccctacgccggggtcatgggttttcggcccataccaagatcagctcgcatacgtgaaagatgtggcagtgcactcgcgaaacggcactcttctctaccacaatgccatgaagaacgaatctgttctggaggagtgtgacgtctcgacaaattcagctccgtctgcctcgatggcgcgaaaggcgatcgactcgtttggagtggcgatttcgcgcacacccagcgcattattagtgccagcacaaaccgttccgacttgatcaagaggacgctggaattcatcctagatcgccaggaagaatctggccctagcactggattgctcgctatgtctcctggcatgggccttgcggccaagcttgcaagtctctacaactcttacaggctgctggactaccagatgctgtatcttaacagcctcgcgcggtattatctcgactctgcagatatcaaattcatccgtgagtactgggagaaaatcgaagctggccttgaagctatgatacctcatgtaaatatgcatcgggacttgcaacagcaggttcattaggggcctttctttgtgggcgatagcaatggcactgctgcgtctgctctgctggcgtataccctgacgcgcatggctgaggtggcagagctcgtgggaaaaccagacaccgctaatcgatggaaagagagagcaacggatctttccctcgctgtcaatcagcagctgtggaacaagagccttgggacatacaattccagtctcactggtctaaatgaatcctcacttatcggataggcgtgggcaatcctctccaatacagcaagtaccagtcaagcagattcctccatcgcagctctctcaactcttcgcttgggattggatacaaaacgacctctgatactgcctcagacccgtcaacgaacctctctccgaatggtgtcaggcttcctcctcgaggcactcttcaaacgtgcccgaggccaaccgcaccatgccgccatagtagagacaatcgatgtcctactgagtggtctctgggctgcaatgactgatcaggatgaatactacacagggacatcgtgggagtacttgtacccagacggccgacctggcctggacctctttacctccccccactcgtggggcgaggcgccaacatacgtcttcaccgagtatctgctcggcatccagccaactagcccgggctttatggaatgggctttccggcctgtgattactggcatgggcctgtcctgggtggaagggagggttccgacgccgcgggggagtattaacgctggttgggcagtcgagaacgtgacggagatcaggttgcatgtttgtgcaccgactggaacgactgggatcttcgtatcccaatgtcagtgacagaatgtctagttaacaatcgagttcagtcggaaagtggtgtccatgttgatgttcgaggtgggtagtgctcgcacatcgcagtgtctctagccgactctatcttagcagctgtacttaataagacgctgcacaaagacaacaaaaaatatctgataattggctgtgaccgactgtatgatacagaaatgggcttactattcaaggctaataggttattgttacgcacccccggataccggcttttttgccttagccacaaccgcgcgcgttaatcaatctcatggcactaaaagtaccttgctaagctggcaagagaaggggtcggtcgttatctacagtccattcccgtaactttggtttattctttggacagtcaaaccccatctcgtccaaatgaggtcgcaagtgccatgcgagaaggacatgtcgtgtcgactttcgtcgctctgagttctggaccctaacttaaaatggctgttcccgcagacgggagggtaaaatggggcttgacaaggagagtttcgactgggatgagtatcagtagtaatccaagtcgatgtgtctctggcatatcgagcacgaggctgagagccggacaagagtgagcttcgtattaggaatagtctcatgcatgtgtagggaacatcgctcggtgaccccgcgacttcatatcatgtcatattccaccttcatatatcgatatcgtgctgctaaatcttgatctaatggtattttaactaccaagttcctggtatgggcgacccttttttcattgcctcgggtgttgccggactcttctcactgagtatccaggtcaccgagtcactccttaagtattatcaggccatcaagggcctaagcaaggatgttgggcgcgcaataacaaaactgaagtccccggtggattgctcagcgcagttgacaatgaggtgcgagatcgcaacagtggttctggagaggcggatatactttgagcaatttacacctctgtgaaagctgcgaggatatcatcctggaactatggagtaaatgggagaagtttgatatcaaccggccagacactagagccttggatagagtgcgagcgattggtcaccgagcgatctaccctcttcgtcaaagcactttgcaaaaactcgaagaagacaacactgaaataatacagcatcttatcactaacactagatgctctacatataaaggttcggaagcacgaggcagtaatcaaacttttattaggcagaaatgctggtgtaaaagcacagggtggacgacatggtaatgcactagaggcagccaggtatgctagtcgttgtgagatcgcgcggatcttgcaagctgcgggtggtgtatcgactgccaatatctgactatatcgtgtataataactacctagaacgtttacaaccgaattctccagcgcgtcaagcactggacgactgtctgactcctgatcatggctaactcggtaagctcctgtcactgcacttcgtcgaaaattagcgttcacttcaagtgcttcaaagccaaagctaattaattcatctgtgggaatcatgaaacaaattttcacacacagataaacggttccttggtcaatcactcccctgatggccatgttatgagtgttcaggataagtgtcaagtaaccttcattcccggatgctttaccacccagcctcctcactcacccgggctttgcggactaagcgctcatttccgatctattagagagataagggcaatgtctttggcccagttaggtatttgatatgtaggtctggtacttgttctaagattcaactcatctgcgcgtataaccacgcgcatgacgtacagcaggtcagcctacagcataagaacggtgcgcttgtcagacgattattgtacagaaacagtttaaccagagatgtagcaccatcgaggtttatgacgcacaagagcttgaacagaaagccgctgcctgggaatgcgccatagcggatgcagtagcaacaccacctcggtgaagagcgagcatacagagcacatcagactgaaataagaggctgagtcctccgaagaccataccctgcagataagtaagtacatggctcaacgccgatttgctcgtgtcgccggcgacgttactccaagagttactccgcaagctgtgctgctcgccgatcgggttgataacggggacggcctggtacttatgcagcagcacgcacccggagtgacagatcatgaaaaaagtgatcagacgcctctcctgttgtagttattgtcatttggcttaggtggcgtctctctctttctctgtgcggtatatctaaatatccatttacaacatgcctcactcagttctctacaccaaaatcgacacacgccccccagaggttatccacagccggggaaactacctgcacaccagcgatggtcgtacaatatttgatgccagcggtggcgccgcagtcgcctgtctgggccataatgaaccccaggtgaagcaggcaatcatggcgcagctagacaaggtagcctacatctactcgccgttcttcactgtgcctgctgcggaagagatagccaccttcctgaccgagtcgacggggggtgcgatgagcaaggtgtttattgtcagctctggtgggttcctttttcgtccttgccctcttgaatgttcttgattgagactataggtgctcgataattgaccgggacaggcaccgaggcaatcgaagccgcactcaaaatgacacggcagtattttacagagctctcgaagcctcaactacaacggacaaagttcattgcgcggaggcagtcgtaccatgggaatacgttaggatcgttggcggccggtgggcacaaggcgcggcgggcgatattcgagcctatactggcggcaagcacatcgcacgtctcgccatgctacccataccgggagatgaagaaaggtgaaagcaatgaggagtatgtctctcgcctggctgaggagctggagaatgagtttcagcgggtcgggcccgatactgtctgtgcattcatcgcggaaaccatgtcaggaacggtaggtcaacaactcggaccaattcgcgcttgcaagtaaactaattgaaaaaagacactgggctgtattcctgcagtgccgggatacctgaaggcaatgaaacaagtatgcgaccgccacggggcattgttcgttttggacgaggtgatgtctgggatggggcggacgggtactctgcacgcctggcagcaggagggcgttgtcccagaccttcagactgttgcaaagggactaggggcaggatatgcccctgtgggagcgctgctcgtcggcaaccgggtggcagacgttctcagcaaaggaactggcagtttcacccacagtcagacgtaccagggacaccccatcgcatgcgctgcagcatgcgctgtccaaaagattatccagaaagaaaacctgttagataatgttcgccggcaaggcgagtatctaggccggcttctcaatgagcgcctaggtgggcataggaatgtcggcgatgttcgcggacgaggactgttctgggctgtaagtatatttcatatctttacctccggcgagtattggactgacaaatcactgcatagctcgagttcgtcagagacaaagagaccaaagagcctttcccagcggaagcgggcatagcgcaaaaggtgcacttgacaggcttgcaaaaagagcactccatctccgttatccctggcgctggggttgcagatggtcgtaatggggatatcatacaaattgcgccggcgtacaatgtgtcaaaggaggatattgaattgattgttgagcgcgtggagggcgtcgtccatgctgcctttggagcatagcgtaattgaacgctgccattgttttatggactgattaggcttgttagtccaaaccaggcattacatggctattgaggctaattaggagaatgcacttccagggcaatggttgatgaatagctttattacacccgggcgtgactgcttctagtctttatacccaatgacccaaccccctttcctccaatcccagctctttgcccaccttctcccaaacctctttccgacattcttcgtctgagcagtgaggcatcgcctcgccttcccagatccggttaatatagtgcccaccacccttccccccaatctcccccaccccctgcgtgacagggtcgggtccaaactctgcactggtggctgcatacacaattgccagactcccctgctgcgggctgatggcgagaatgcttgcgacgaatttccagaatttgtacgcggtgtcaatccacgtgttcttggtctcagaaagcgggttgttccagatccctgaatttacgtagcccgggttgatgccgttgacggtgacgtgtctgtaattggggctggctaagagacggctgtggagttcggtcagccagacctggaagtagagcttgttgttagggtatgggtcgcccgccatgcctaattcgccgttgaaatgatccaggtcgaaatatcctcggaagtggaagcacgaggttgtgcagacgatccggggttgaggagcctttgcgagagagtcgagcacgcgcagcgtcagaaggacatgggaggtgaagttgacctggtgatgcggttaatgcaaattctccttctcatcattccagaccggagacgaacctgatgcagtatctctagcccgtccttcgtcagtatcggcttccttgagcccgtcggccccatgcctgcattattgcacaggatgtcaagcgcacggccggtatccagccagcgctgagcgaacgcgtccacggcgctcaagtccgccatatcaatcttccaccattctatcaccgactccgtatgtccgtttacccgggccaacgtctggcactcttcagccgccgcggccgggtgcgtctccgcatgccgccggctctcggcaccccagtatgagatttgcgccggctgaggcaaaggcctttgctgcttcaaggccgattccactgtttgaaccggtgataataatccatttgcccgagaggtcagggacaggaacttggtcgggtgtcagaaaggtagggtttccgcc

SEQ ID NO: 672 - DNA, 4846 bp, Emericella nidulans
gttgcttgccgccgcgtctgcgcttgtcttcccttcagatctagaacgttggtcaatgacttgttcggtggttcagcttgtgacgcgcaccctgccgattgatcttaaggcgctcctggtggaaattacgctgacttccttacaccaagcaaggccagggttgctaatctatatgattcctcttatgtatgactctctcaggagtagataatcaggattgcggagaaattgacaccccttcgttcgaacgacggggctgacaggcgggatgaaaggcaggctgaaacactcgttctgcaagattacccagggacaggtggggaagtggtggcttgtcttgaagcaactatcctttctgattggccctgaatttcgagctccggactagaacgggcctggtgggaactgtcaacgccagcttcagccttcatcattcaagggcctgccagatggcgctcagcattttataagtgactcgcgatgaaatgagattgcgagtaaacaggctggactagctgaagaatacgattaacacgtctctgggcctcggccgccgtcgactcgcgaaagggcccaataggttctggtctcaaaacgcacccggaggaaggtcccgcagttatgccgagacacttccagcggccaaaccgaggttgtatgaatatatcggaaggctgcctctcgggttgtctgtacacctgtgcgttgaggcgacctcgagttcttcaagctggttccgcagtttgcgaacgcaaacaccagattgtccgacccggcgcgacgcaacgcctgcaggattgaagctcgtgagagctattgagcagcaagtcgccgtcagatacatcggacgagacgatgctttgtccagaaagccagtctcgggctcgcacttccttttctggcgcatgcgtcggctgcgatggttttcgatgtatcatgattcatcgacagcatgtagaaattgagattgtccctgctaatttagaattctcgaatctggttgtcgatttgccgcggttagtgatatcacaatatcgtgtggtcgagaagggagttaaatggcggtgggttactcaccaaggcctagaacacaggttcctcaagttgacgctgtgcggcaaaccaacctcgggttcctggtcgataatcgggatgcatatgcctgcgggaaggcacatcaggatcgtaagtttcgattgagcgcttggtgatattccactcctcgggcaagagtgcactactattgtataactctgccgtatgacctcggggaggttcttgaaggaaatgcgggaggcgttggaggtcctgaggggtaaacagcttcctgattcgccaatctgacgtcccctcgtgtttcaggtccaaagctttgagccacggaaatctccgtcttggtagtctcgggagtttgatcatcgttctcatgagactcgactccttcaatccagtcgaggagccgcagtggaagaaacagacgaggatcgggaaagggactgcgagtccaccagagaccgtggtaagagcagtcaacggggctggtcgaacttccacgacgtttgcgtttgattgggaaaagtttcaagttgggccctgtgggtcagcgacaaggataccgctgctaatgctcgttctagtcctggctcgcagaagtgatcgtcgctaaggaaatgtccgtcattgctgccacaaccttcccacagttctctaactttcaggtctcaactttgagggccaacctcgacgaattgtgggtggattacttctagctccttctcggattgttgattgtctcctggaagttgaccgcagcttggctgagtgttccagtctcctcgcggaccccggatgaggcttagaagccaccaactcgttctccccggttcatcgcccctgtaaggcgaaggatcagattgggtacaaatctatagagcacagcctgtggccatgactcagtttggccccatactgataccctacacctccagtgatgtaattataatcgttcctcctctctggccgcattaatgctgttttggcgactaaccgggatctaccctgcaacccgatcttgatgcacaaaggcacgatgctcagagcgatatcttgaatcctgccaacggcatttaccatccaatgtccccggatgctggggccgctgcgcagcaaatacaagtaaagggatcctggatcactcgatatgaacagtacgtgcctccgacgtaggtggaaacggaaggatcaacgccctccaggctacaatctatgaggcagcaggtcctggagcataggtccgggtacaaaatatattgagcacccagtatgacttggaattctcagcaacaatgatggaacaatgatggcggtgcccaaccacgggaaatcatcgacttgggcatcccatggtgcaatgacgaagaaaagagctgcttacgcggtttaccgtagcaatcaggttcagaacgatgggtgtggagtgcgaaggcacccaaccgtcattcatcatctccttcgcgatcccgggactgacggttcatggaatcatgtcaagccgggcatggccgggtggtgggtcaatcgtgattacttcagattggaaggaaaaatagggcgaaatgaagaatcaatcaagcagtccggacatgctttgcgaggcgccgtatacttgctgctgccaaggccctcctcgcgttctcttgccgtctcggcaacgtcctttgtgatgttaaatcgtcgataaattgatggtccagattgcgtggatctaggcgatcgccctagccaacttcatcacattgagactgagatcctgcgtgatactatcatttatcagcaccagggttctacccctcctttagcatcgcccttgaagtctatttcctgcccacaaccctgcatgggctcgatctcaatgcaccacttccacccggttctggacttccagcttcgatgtgtcttagagctgttatctccacaatggcctctgcacaccctcttagtccttggacacgggctgtcagcagagccgtcgcaattcacttgttgatttgacctcacttgactcatccactgtcaggcatttgcgtctagacggtgataggctcagcccattatttcattgcagcgccaattgtatcactcatctaactaaattaaatggcggaggcactgatttgacacattggctgtccaagacatacctaatcactccacacaaagcctcgctgaagatgaaacgtctgggtgtggggatcccggctagtgcttgagagcaccacagtaataacatcttcttgagattattactttccgccgcacatttatggaagctggttctgatccctggaaccagttcatgagacctggtggtccagaccggtcttacaatctcgcttcgcaatcatggcggatgatacatattttctcagtagcctatggcactatcagagtaccatagccctgacgctcggcggagtactccgttggctgctgccggatctgaatcactaatggacgaatagtagcgtccagttacgaaggaggagtaggagcaacgccaccaagcccgagctcgcgaagatactggctttcgcagggaagctgactccaatctcgcgcctagtttgttcgaaacttcccgtcgtggactgttccctgatcggacgaggcagtatgtatcgagtcctagtcctctctctattcgccataaaatctccgacagcatgagacctccctcaaatgtagagcgccggacgcccggaagacatgcagctcggggttgcctgtgaaagaaggctactattactatgcatagtgtcttgtattggaagaggtgggggagtaattgtcttttgtggacttctgagttctttgacatcattatagactatggtcaggcgttcaagcacccgaggaccaaaatgaccttgaaaacgttgctcttatcaacgcgccagaccatttgaagcatttttcctcctatcgaacatattccattctcaggatgacttgtttgttttgagtaatatatgctagaaccaggcatagaagggaatgcaccttactataggcggtaagattgatgagagaaatgatagtataccttcactagaccaaaagcacggtacctatattaccagcataccaatatcagttcttgggttaaggcaaccattatccttgggtacttcctgcttcctttgtatacagctgcagctttcttgcctgccgtctctgttcacgccaatgtgtatctaagtccgatacgcgaatctgtcaaaacaaccactaaccagcctctgcgattccaagaaaggaccactcttcaatctgaaagccagtagcgcataccatcgcatcaaatggacggtgcgttttgcaagatgttgttaccccccttgtacccacaattcaatgagtctttcatctttccagttataccaatacttgatcatcaacagaccatgagaaatgtgccggcaactcaaaaaatccttatgcacatgaatggatgctataattcctatatctttaagatgttagacacattgcagtcataccttcatctagatcttgatacctacttttttgctttctaccagggccactactcacagtcgcaagtaggaatcccgagctgcaaggctgtgcgtagcacgccttgggacgagaacataacacggcagacatgaataacagctcaggagggagctctcgggatgtcatgggcattcgcctgcattggagcaatagggaaaaacggagtaagttgaacctaccctagccaaacatgtactgtcgtccctgaccacgctcagagtctagttatatagtaccatttcacttg

SEQ ID NO: 673 - DNA, 5951 bp, Emericella nidulans
  unsure (1)..(5951): unsure at all n locations
agaattcgcggccgcataattcgactcactatagggatcatatttttatttttaaacgtctcgttaacggcccaaaggctgccgttggtgatgcacaaataccaagccatgatctcatcgtaaattacgtacaatgatcctcggcacgaaacacgctaagcccaccccggaatttctgttacccaactgcaactatatgactggaagaatcagaaggatgcgcgcttcatgaccacaacctgagcacctcgctggcaataatataccctgaatctggctctcttctcctcacgaatgtcccatataaaaacggcctttccgcggagatacggttagccggatattgattctcaccgatggccatgcttcaaaatgtgtccctttgccgccttcgctgggaggtgagactggcttgagatttaagactcggttacgcagcagagattctgagtgaccttactcagattctggggtaaggcttggctccagacgggatatacttcgtaacgtcagctgtcgccgctgccccggttggttctggcaagactgggatattgaatatcgaccacgctcaggcaggcgcgtttctctcttggtccactagactgctctgaatgtgcagggtattcggtcggcagtttttaatactcttttcctcaaaacattgatcctcattgtaaggtgttggaccagcaagggaggtgccctgacggcgcgggtgatatcaataagtggaatccgtgggaactaaggtttatcagcactatccacaaggccaaaagaactatacgcatctcagacaaccgggacgcagtgcaatatgacgggaaacctgaaccgggaccgcgacgcggcgcgcgagcattcttcacagcactcacgtattgactttgcccgctggcatctggacatcgacgctgttctcaaccgatttattccgcctccgccgtggcacttgctgcctcgtcctgtctcgcattttcttgggtatagaggaaacaaaccacagaaggcgctggggaacctggtcatcgcgttctggtctttgattggggtcttctgcggcgtgcttctcatttccgaggtttcactgcgtgtacccgcattccaaaaccaccatgcgccgatcatcgtcggtagttttgtgtgtacccaaccttatccaggattgtgcttctgcgttagagcagccgctaacattagcagggtgccgcagccgtgctcgaattcagcgcaattgagtcaccctttgcgcaacctcggaacgcgcttttcagtcaggtgatcgccagcgtaattggcattggaatctccaagctcttcgctctgaaccccagtgcacaatccaagcctgaaattgccgggtcactcgcctgcgccatcaccacaatggcaatggtccttacaaacactgtccatccgcccgcaggcgcaacggctctacttgctgctacagaactccatccggtcggctggtggctgatcccagtgatgttgctgggatgctcactcatgttgacggcggccatgctgctcaataacattcagcgccggtttcccgtatactggtggacgcctcatcctttgagcaaagaagccaaggcgaaaaaacagttgcaggatatcgagaacgcgccgaaaatcaagcaggagagtgagtcgagctcctcgtctgattttgagttctcggagccgatgcaggttgttattcgtcctgggaaggttgagtggtcggataacttgtggttggacgcagatgagaaggaggtcttggagaggatcagtgagcgcatgaagcatggttgagtgtcaaaccatctatctctgtaaatacctggatactttgtacatattatactataattttacttgtctttcctgagtaatgttggtcggtaagaaaggcaagcaataacgttagaatggcggtgattagtcacgtctggtctgtgacacgtgattttagtgcccgatgtggctagtcccaccataatccaccacgaccaggctgcgaatgacgtacttcaaccagtggacgttgtgcttggcggcccaccgccaaaagatttaggccgcgtctttcaggctcaaagcacaagcacaaccactgcaatctctgatcttcgccttcctcctccccttcaattctagcggcgttatcttccttttactatagccccatcatctggctgctggaaagtcattcttctcgttgccatctcttttttcgacccactgctagttgtctatcgtctatcgataagggctttaaggaacctcccccacctcagcaacaggaaggctcgcccccccgctatttttatttctgatccaccctctcaatttttccctccttcactcttcaacgtcagactctcctcctcccaccatccctatcgagtccatcccatccctactagcacaccaaacacacagtcgagatggtgtccgcatccaaagccgcccgcctggcgaagcgtcggcgatgctaaggccaagaaggccagcaagtcgaaggacgacacccccgtcgagtccggtgctgaggaccagcctgccaccaccgacgccaagatgaaggaggtcgagaagctcacagcacagatggacaagcacggcctgtctgatcgtgtcactaccggtgtgctctcgtctatgccgtcctcccgggatgctaagatcacgtccgcgtctctcgtgtttcacggaaaggtcctcattacggactctactctcgaactcaacttcggtcgtcgctacggtctgctcggtgagaacggttgcggaaagtcgactcttctcaaggccatcgatgcccgtgagtttcctattcccgagcacatcgacatctaccttctgaacgagggtgctcctcctagcgacctcggtgcgcttgagtgggtcgttactgaggcgcagaaccagcttgaccgtatggagaagcaggcggaggagatcctggagaaggaaggtcctgacagtcctattcttgaggacttgtacgacgtatgttatcctttatttgatgtttgaagactcgctaacgtgttttagcgcatggacaaaatggacccctccacattccatactcgtgcttccctaatcttgactggtcttggtttcaacaagacgactattcacaagaagaccaaggacatgtccggtggttggcgaatgcgtgtggccctcgccaaggccctgttcgtcaagccctctctgcttcttttggacgaccccaccgctcacttggatctcgaggcttgtgtgtggttggaagagtacctgaaaaagtgggagcgtactcttgtcctggtttctcactctatggatttcctcaacggtgtctgcactaacatgatcgacatgcgcatgaagcagcttctgtactacggtggtaactacgactcttaccacaagacccgtgccgaacaggagaccaaccagatgaaggcctaccacaagcagcaggaagaaattgctcacatcaagaagtttattgcctccgccggtacctatgccaacttggtgcgtcaggcaaagtctcgtcagaagatcctcgacaagatggaggcagatggtttcatccaacccgtcattcccgaccgtgtcttcagcttccgctttgccgatgttgagaagcttccccctcctgtcctgtctttcgatgacgtttccttctcatactccggtaactgggatgacactctctacgagcaccttgacttcggtgtcgacatggactcccgaactgcccttgtcggtcccaacggtgttggtaaatcgaccctgctgcgtctcatgactggcaagctctcccctatcggtggtcgtgtcagccgtcacacccacttgaagctcggcatgtacagccagcactccgctgagcagctcgatctgaccaagtctgccctggagttcgtccgtgataagttccctgagaagtctcaggatttccaatactggcgtcacgagctcggtcgctacggtctctccggtgaggcccagaccgctctgatgggtactctatccgaaggtcagaagagccgtattgtttttgctctgcttgccatcgagtctcccaacatgctcctgctcgacgagcctaccaacggccttgatatccccaccattgacagtttggctgatgctatcaacgccttcagcggtggtgttgtcgttgtgtctcacgatttccgactcctcgacaagattgccaaggacatcatggtctgcgagcacaagactgtccgccgctgggacggcaccattggtgaatacaagaaccacctccgcaagaagatgatttccgagggtaccgtctaaacggggccgttaccttttttctcttttaacgactggcatgctagatcacgatacaacgtgggaaaagaggaaaagttcttttgttgtgtattctctgtctctaccccgggagtgatgagccgtcctggaaggatggatggatgaatgatataggggacgtttatgtcccagtttttttgttgtttgcgtctgtgtctcgtgcttctggagatatctgttttccgattttctatagggtgctttttttctacttaactttagatggcctgtgctacttctcataccttcattcctccatcatctagactttggctcggagattgaattgatatctttgccttggcatttccttgcggctcacctagcataaatttcctaatgtagtttgcctggtacagtaacctgtataaccgtcggtttacgcaagcttaaagattgccttgatgctaagctttccaggtgtgtcaaagtctggcgatcttaatcctagtgcaacgtcaaggataagtctgcttgactgggctcaatttttaccttgatagaggtccttataggttgaatatccggaagcatgctgcacaccttgagaacgcaacagaaaactgaagaaaattcgtcattcttcatgatccaatgcatatccaaatagaatttttcttcttagttgccttagtactcgtatacaaaaagtcttccgatacgggcagagcacggagtaactacactacgcctgtctctccttcgtcctctccataaccaactcccccccaaaaatatctctcgccttctgctgctctgcctctaatttccgcttcttcgccagcctctccatctcactatccggagtcgcagtctcgcttgggttcgcagatgcagacgccgccaccgccgcagcagcagcaggaacccgcttctgcccggcgaggtttaccttctctggattctggcagtgatatagtttcttcccgatccggcgcatggccttcttctgctctgggtctgaggcgagcggtttgtaggactggaggagcgtagcgcaggaggtaagggtttggaggacctttgcgcggaggtgggcaagggggtgttcgtttccagtttctgaggcgttgggtgttgggagtttcgtgttccggcttaattgccccaggtgatgatcggttatttacagttcccgagagccaaattagcgaacggggtgtatttgtactttggccaaactccattgagggatccgtattttggacttctcagtgaagtcaacgttttaattcagtcctgtaacttcgaagagactggtattggggctaatctgtgaatgtataatcgtagagtatttcctcttttgtcactatcccggatcttcattccttttgaactccaacctcttgtccaatttccctgtgttctgcctacagtttcctcttactttttaagttactgtctataatacttttatatcttgatttttctattccttcttcctctcttatcctctcttccncttctcctcctccctctcttctttttctctctcttttctttcttctctcccttcttnttcttctccctttatcttctttctaaggcggcattatccctttatttaataaaaagaaagatgaaga

SEQ ID NO: 674 - DNA, 2920 bp, Emericella nidulans
cagcaccacatttcaatggatgttctgggggtattcactcacctactcgcgggatggcggcccctacattgggacgctgcagaattttgggctcatggatgccctggcggccccatcgccagggtctgccgtgcttcccgaagtcctcttctgcttgtaccagctcctcttcggttcctgcacggtgagtaatgtgctgagactgatcaggattatactcattgattataggtcatgattgttgttggcggcgcctttgaaagaggcggtatcttggcgtcacttgtcttcgcctttgtctgggaaaccattgtgtactgtcctctcgcacggtggacttggagtagccatggctggctgtataatcttccctccgtcgacttcgccggaggcggcccggtccatattgcctcaggctgcgctgcattggcgtacgcagttgtcctcggcaagcgcaaaggctacccagacgccagtatgaagcggcctcacaacacgactctggtcttcctgggtaccgtctttatttggactggctggcttgggtttaatgtatgttccgttgacactatcttctcatgactctgatctaacttgataacagggcggttcgaccctcaacgcaagtgtccgtagttacatggccgttatgaacaccaacatcgcaggctccacgggcgtcctgggttgggtcctggtcgacatgatccggaacaagggaaaattctctatggtaggagcttgcgaaggcgccattgctggccttgttggtatcactccctgtgcgggatgtgtcactttctggctgggcgccctagttggtttccttactggcatcgtgtgttccgcgtgcaagaacctcaacgagtggattcgggttgatgaagggatggacgttttcaaactccatggagtcggcggtatggtcggctcattcctgactggcattttcgccgatcagtacatctcggcgttggatggcgattccctcattcctggagccatcaacggcgagggcgttcaggttggaaagcagcttgctgagatctgcgccatctccgcttattctttcggtgtgacctgggtcatactcatggtgatgaagttcattccatacctggggctgcgggccaacgaagaagctgagatggtcggactggaccgatccttcttcgtggacgagcagatcggcgactactccatgctggatgggatcaatagctcgccgttgatgggggtgtcgaaaacaccctcgagcgaagtacagcagacagcggccgagacgaaaagggcgtagactgtctatttttcagaattggctattgtaatgtttgtcgcaatagagagatttattaatgaattctagcgatatcgtcgctcccccttaatgttattaaggttatatgcagtttcatggagccatttgccaggagccaagggcaacatccaaggccctgaagatcgctttgtgcatgcgtgtggtctggaccgcgtattcatttgcattatttgcattactttacgtcttatcgttagcttggcaaaacataaggcccaccaccgaacagtacaccaataaacggcggcattgaggcacgccatcccaggaagcttgcgtcatcctctctctattaatatcgagggtctgccgttggcgacgaacatctggagggagagaggtagaattgggattttttgcagctgggtctagtaagtggctactcaaatatatcatatctctaccttcgtttgttcctcccatcgcaattgtggggtctctgaagagtcaaagtgctcgttcggagtgtcctgagaaaaatccgtaaatggactagcgccttggatctgcgggctgtcgcgtccactgcaactgtcgcagcctcgccagtgtcgccatcggcctccgctcccgttatcgaaacgttccactgccctgctattttctgccccaaagttggcctcaccaccctcctcccttttcaccttctctctcctatctaccccgtttccttccactcgtttcagcttccccgcgctacctccccttctttcgttcgcgaaaccgatcgtttcttccataccattctactttttacgcaaagccaaccggcacctttgatcctggaccttggattgtttctggtacaccggccgtcagtcgttatcaggacccccggattcaagatcccgcctctgcttaggacccttaggcctgtgttcgcttgctgcagttggcctttagcgtggtcatgccaatgatctaaaaatgtaccattagtgctttagatttcagctgggatttcagcctccatgggtgaacgtatgttgttcactggtgcggtctggtccaagcttatactaacgtgcgatgttttttcccaggggattacggtatttgtcctggatgcaggctcaactgggagctctcacaattactattcgaaggctctatgatttacaccgggcaagggactcgagttcacccctatcgctggctggataatgccgttgctcgcaaagagtccggtaaacacaacctcaaattgctttccaaatatcataccaaaactagactgtgggaaaacattcattcgggtaggttggatacttgctcctgtggccctgccaattatcctgtcaaccgtggcgaggttttacatatttactaggccggggaaatttgccctaaaacctttctaatcttttcttcacatggaattcttctttgtctctcttaagatatcctatatcttatcctcgtctgtttgctttaagaaactaactaatctttgtacgatattattatttcctgtcattatttatgtcatcatcgttttacgtattctaacccatcattcattcatcattttttcttctcattgatcctaacattttttacactttttcatttcttcctctc

SEQ ID NO: 675 - DNA, 3041 bp, Emericella nidulans
aaaaataatagatgaggagggaggattagagagtaactgcaaaatagaaaaggaggaaaggacgaaatgataataacacataagtgatagataagagaaaaggagagagaaaaaagagaggagcagtacagaaggggggtatatggtaaactttattgacagtaaaagattaaaggaggatgaagggataaagatgttccaagaccaccacagatggaacacaaaaggactaggcggcatcaggatataaacttggcggcagtacctcactaggaaagaagcaattcgggagctgcccaatcacatttgcaggaatccaattcagcataccaagatcagtggggtcgtaccgatggctaacggatttttatcggtagggatgaaggctgatttctgtgctgataagagttccttgacgaatcgtcaatagatagctcgaacaataagaaccatcgcacagcatcgacgttccgcagtcactttgcgtatgaaaagtatgctattggtcccttggcggttacgtatcccgggacatcacattcatatcatattttgccggattccattcccaagaaggttcctgtccttggctgcctcgcatgcatcgaatcagagtctgcatttgcatgcggctgcagagcgtcagcgtctgttttcgtggtctttgttgtccgcgtcctccttactggaaatcgagtggacggaatcccacccacgttttcgtatactgagagcgtcatgcataatcgtctttccacagagatcatctcgggttcgaccacccggtcctgaacggacggaaacccgatccggtgaaaggtctgcctagagccagaatatcttgccccatcgtacgcagcgcctatagccgccggccccatcgcagagccaactgaagcaactagtcggtggggccatcaccatgtcaagctggcgcaggctggcgttagtaaagttaaagcttgagtagcggctattaggtcccccggctcctccccggttaggagatccaaagcgagatgaagctgctgaggtttgagctactctgtagccaccctccagcctctcagtagtgagtctagggacctgctagatatagaagtaggaggacgacagtggggactatgtatggacccgagacggggaaaccactggatgagcaatggctcgaagggactatggagactggaatatcaacccgggcacgtctacacggctgtggaatatggacccggatgccaaccccgggccttcaggttggacctcgtagtcatcgcctgctcaggaggtgaaatgtaccaaggttgattcgatctttttgactcatgattgctggtatcagtcgtggaagtgaacccctcatgacgggaggataacaagcctcagccaggaacagccccgtaactccatatgccgcagactccgttcccacctcccgtgagctcaggcgcaagcttaatcgacaatttggagcaccgcttaagggacatgtccaacctgacatgggatccccggcatcgcccgacttcagccgtactgttcggcgaacagtactcgtctgccaccccaaataacctcaagattctgtacagccttggacggagttaatcacaataaaaacaaaataaaaacaaatcagattccaataaatggcgcgcttacctgccccaccacgccgctaagaacttgaagtaaaggcagaaaatctccgtgccttggtattgcagcatatttacgactttagagacgtgatcacgcagttaccctggcccgttgcaatataatcacttgtcagatatcttttccgtagactgaaacttactagcctggagtgagaaggaaggtcatctgagccaggtgtgtcaatcgagaccgagagtgattaataatcattgtggtgttggtctcgagattccacggttggcgatggctggggaggggatcgctagccagctgaaacctcacccaagaacgtttcctggaatcattaaacctagttgtttgaatggttaatgtttccccggaatcttcatccatgtggagtggagcgcctgtagtcgatactgataggcttgtcagctagctgccggccctgaggcatgtaaccgtaaccagtagcctatcaccaggagcaagcacaacctactccgtatgcacattctcctgccttaccagttccaaggaaagggcgcatagttgggagtgctcctacaacttggcatactgatgccttaccggtgccacatggagtaacgagatgcttgtcgatcgcaagccacactggccacgcttcgtatcttgtgaagggataaactctgcgggaatacgtgagttaaaggtggtattccgaagggagcgacatttccgattatcaatcgctggagtacttttcctaaccagcggtcgttatcgggcacaagaatagcgaggttgtttggtgcaaagcagactcaaaaagtaagctcaaaaaagtgtcgatcctgggctgacgtcatccggaagatagctccgattagtgagatttactgtgaagctgaagggccaattatcgcgtttcctaattaagccatcgaaaatgtgaaagattaatacgaggataaacacggctgggtgccaacagccgcctagactcatgatgatcgacctcctgttgccatacgcttgccatgttcctcgaggcatcatgagatgccacggagaggcaaagtgagggggtgagattgataagtatagtgagactggtggacttagaggaggcatatatgctgaattagtgatcgacatgttggttggtccgtcgtgtatatacaccagaattgcagctaacgtacgtttatccaacgcgttctagccaatgatattaacgtcttcactggttatatttcacatggatttcgtgataccggactcgaatgctggccgaaatagtagtgaaaatgaaataagaaaaataaacaatagacaagataccttgcgacaaactgacaactgcaatgatgtatggtatcaaacatgtgatagaacgcctctccactccgtta

SEQ ID NO: 676 - DNA, 1339 bp, Emericella nidulans
tatatttaaatacagtgttataaactatgtaagaaagaaattataatctaaatatagtaatatatctatttagatctcttggcaacctagtaggttgctctgccgggctttggggcagccaaaaatatccaaaacctaatagataattagaaggtctaacccaacccatttcttggcaggtcggggcgggttggggcgggcttcgtggtcgggtttaacaagtctaagtaaaatattaaaagctaaaaatctagtattttttttattatttatagtttgaaccttaatcctgaaccagatagtaagctaaaataaaaattatatatttttatttttatctagtattcttataaaaaaagaattatctaaatattctaaaaaatatttactatattattattgttttactactatatatataatttttgactaatagttaataagtacggaggtgtgcaccaaaagtcattgctgcgctagtattgacgctagtactgccactgtaccggcttctttaccatagcaaccaatgttcggcatacagctgtggtgatattagagaaggagaatacaataaaatatcaaagctagcatgaagctattcagaggtcctctcaaagatctggagatagatcttgacgcgcagaaagctgacctttgatccgcctgcccttccaacttcaagtattataatctgtacagccctccttgtacatattacccctattatattatataacctcctggatatgccttataagcctcttaatctagccctgtatcttctcctaagggagcttattctatatctttatctaagctgtctttctggtctttttgtccctagatactctataagttatatacttctttatctatatccagcatagcttaatagtaataagatcaggcaaattaccaggctagtcaaagatcttcttaattttataaatattataaatatagtactgagtatagtatttataagcaggggccctgtcctctaatacctttatatctagatatttaattttgcaggctttggtaaaagaaataagatatagaagaaggatttcctgttaagaaaagctagttagcctaatataagaggataaagctattaaaggacacctgctagtatctctactagttaactccttctttactcttttatagaaacttcctagttttcttagtaaatctctatataggaatatacccagggaccctataaagatgcagatactttagccttatctctatctcctatttctttctaagaataggctccagctctatatttagagctgctatctctacctctaacttcttatattag

SEQ ID NO: 677 - DNA, 4742 bp, Emericella nidulans
cataacggcaccggtaccgacaactgtccctgcaatctcgttgccctcaagcttgatacgactcgtaccgcccttccacacgatgagcatggcgaggagggtacaggtcacgaagaaatagaagggaatcgtgtagagggccttgcgagcaggattgctgcgcagcagaatcaggtactttgtgagcaggaagataatggctgcaaaggccgcggaaataaacggagcaataacccaggcgaggaagacctggacgacgcccgaattgatatttccaccccaccacttaacgccatcggcgccgacgagcgcgacacccatgccaataacaccacccataatcgagtgcgtcgtcgaaaccggcagaccaatgcgggtggcgaaggtgaggtaggtggaggagccgacgagggcgcagagcatgccaagcatgaggagggctggattgttttcgaagagatcgacgtcgacgacctttgtgcggatggtgtctgatacggttgcgcctacgccgatactggaagagtcagtactggtcatccgtgatgactagtggaggagcgccaacttaccctccagcaaactccatgattgtcgccagtaccatggcctgccagtacttgacggaccgggaggagaccgaggtagcccacgaattggcgacatcattggcgccaatgttccaggcgtcgaggaaggcgaagattgtacccagggcgagaatccagtcgtactggtgaagagccatggctgcctagtgatgtatacctgaatcgataccaggagcaaatgtcggtggatttagggctgggctgggctgggctcagggatcaggatggggatgagggagttacacctcgttatatatcagactcacagcgactgagcgtcgtatcgtatttccttgccgaacagctaccaaacatctctgctagcaattcatcgcatgaggcattctattgacggaagcccaccagtccgccgagctgccaagaggctccgcgtcgtttcttgacaagggcgaagctcacttggagggccaacgagaccaatcacggtccatgaacggaaaacgtggtccatcctcggggaagcccgtgatttgggcgtctgtatcctctctacttctttcgtatgggctcttggcctgcttggcgttgatactgaaagaaaccaatcctagacatggttttctgcatgcagtggacgatacgactcgcaggagtcagatgctatagaatagtctcgaaggaagcaacaaaaacatcatgtgattggagacccgctgcgcaagaagactcctatcgctgattgcatacatcttctgggtgagcccaggtaggttggctatactacctaatacgctcagtcgcgtggctcgccctcagctcctcaagctgtccatgcaaccgttcgatatattctacggctgcctcgactaattctgcctatatctccgagtcagcatgctcgtgctacagtatagtgtgcagattggccgtcatccaggccctggagaggcgaggccaacctaccttcgtcccacaacttgctgtccctgcatgcacaccaccagtgcccgtcgccagcatccgcgccatgcggtctaaggcggatttcatgcggtcccgctgcagcttctgcgcttgtgcatgctgctttcgtttgaattcaattgagcttgccggggcgacaaggaccagtgggcctaggcaggtagcatccatcgtcagactccgcctacaaccgtactcttttcgaacacgaggcagtttcgctcacctttcgggcgcaactcagtcagcttttgattttgctttttgctcggtatcgagaatgatgatcgtttgcttgtggattctattgctgtagttgtgcttgaccggcccagcgatgcagatcgataatcaagctcgtttgacatggttggcattgcttgtgcgtgggacttttctggagttgcacctgccaagggcttctcatttcttggtcgcctggacgtagggctgtgggggatataagtatatagtgctagagagaggtgataaaccctggcaacgtccgcctacatggtgacacgactcatctctgcttgctgcgtctctctatccgacccagaccgtcgccatttccccaaacctatgcggagcagcgttccgcgtgtgcacgtttggaggcccgccttgtgattgggtctcctgcgcctcgtcgagatttgtgctattttcgtggagattaggagtaggagatagctaacggtggacttggcagagtacgtaggtcggaggattatactcttagtcctccgttgacgcgtgagcctccttccaggaatctctctagcttacagggggttagggttcgtgcttggacgacaacgatatccctctcgcctggctggcatagatgccacatgagcatctttgtgctatgcgcgagtacgaggctgacccgccacggctcagtgaaatggatttgtacttcattgacagcttcattcaaataacgagttccagctactcctcaaacacagtcggtgaaagccctcacattgtgttgcgctgcagaaaactgtcgaaccgtaccctcgccactcctatgtatcagttttggccctctagaacatgcggcgctatgatttcgctgtacattcccaagcaatcgtaggaatatcatccatcaatctgcgacggaattctcactctctttctgcctaataaaccgtctgaaacaggagttcaaccctatattcgttcaaatgtccagcttcgcaggcccaggatcattataattgtcacggagcgtcatctgtggcaacgtaagctgtacagatctcacagcctaaaccattacatttacttcgttgcagcacgtggggaatgctaagaatctatttgatgcttcgcatgcgtactaaataaactagtggtattggtgtcttgtcatctctcctaatcgaacacccttgtaggaatgtcgtaattttggcccaaagtgcgtgacttttactatatagatactattatcgcgctccgatgcgagaaaatagtggctgataaaatcccattggctttactagatgggaaggtggcctatctgctgcggctgaaaacgccaccaaactgtccagaaacaatgtaaatatgcccacggtacttgatctgagcccaaacccctcggcgcggtgcaaaacatctgagcatgctatatttctagcttcattagacaatatgaattgagttgggtcaggctccatctccggagctgagtccgcactcatcgcagcctggcagtaggcagttttcctaaataatgccttaccgctgaggctggaggaacatggctgccatgatggatgggttatcgctgtcttgccgtggtaagtaggttattttggcagtgcaggtgcgtagctgattttgcatagggatgtagatggtacctgagtttaaagctaacagccttatatacgctttccaggagatctccagatgctctaacagatacctcgtcgatcatttaacacccttgacagtggagtcatcccgcattagccggctgcgtctctccggggtttgattgcctttcatacgagataattgttccacatactctatatttcgaccagattataggtccatcaaatcaataactaactccacttgttcgcctgtttgtaaacatgccggggcagcaacatcatcagcaaggattacgccggccgtaaccactgctcattttcatctcatttgccgtttatcccaaaggagagtcttcagcttagatcatgttccatatcctatccgaagtctaactgcttcctttccgtatgcctgccacaaccgggggtggcctctggactttggttgtcacaggactatcgtctatcagttccctttttcccagttccgacgtcttccaattccgcttcattggggctgattcttcttcatgaccgtcggctttctatctacggaaagaaaaggaagaggtaaaactctgctgcagagcccattaaattttgcgtctacgcaaggcacatgagaaaattgtgccctttgattcgccaaagagaagaccatgtaggatttttccttgctgtgcgggactgagtgttcttgtgctaaaaaaaagttgcgttggaacaacacaattaatgtttgttaaattatgaaagttgagcaggttagtcactactagtaaattgatgggtgtgagtttttttgttctcgaagcgtggttttgttgttgtcgctggagaccacaagcattgtatatatctttgacaaatattcttgaaaatgtaggtggagaagaggctttctacaatgtgtctcatcttatgttatggttagaatctcgatacttttatgccaagaaaatgcagtaataatgacatgatatgataatgtggagtcaaaaatctgtttccctaggaatatcagttgcatgcttagaggcttatgcctgctattataggtatgctacacgaatattagtgctaacaatggagtctgaacctattcaccttcatttgttgtgctataaagaatgaaagcagcataatgaaagtacaaatgtaggcatatcaaaacttgtcttttatgctattgatttccatcagtttataaaatatgtcccccacgctggtgtactagacataaaatttgtcaaaacaggtcatgaatacgaacagagagttcagcgaatgaacaagccaagattaggctcacaagagtccg

SEQ ID NO: 678 - DNA, 1427 bp, Emericella nidulans
aggttctggcgcgaatataaatgttccgtgggccatggccagaatcagctatcaggaggtggccgcagatcagtgtgtgcatttcgcagcgacggcagcgcgacgtacctcaagtaagatcaacttatgtagcaggacgcccggccgcatgtttgcaaaggtaacagcagccataatgactagtgaccccgtcataagcccttgggaccaggcttccaggaccagagcagcagggtcgtcatccgggcgtccaacagttctcctcgcaaggctagaatgcgccactgcgccggcggccggacgactgttgatcgagcttgtcatagtgctgttatcacatattatatggcgatactgtgatccggctgcaagggtgacgagaggagatgcgtgagcctttgatcgagtttcgctgggaatataaaggtcgcttcccttttctcgtggggcgcaaggcgaagggggccaaactctctccgcaattccccatggggaagttccacaaacgcgctgaaacaaactgaacgttttgcggccagaagtcgaaagggtcgaactaaagtctggaatcgccggacagacggagcgaaacccgctcgcggagtggagggcctgctccgcgatggctagtcttgcaccctctgattggagcttatccaaaagtctaaaactgacgtccaatgacactacatcggatccgatagcttcgaaccttaactcggacccgatactagctcgtaggcataggggtccagtcgctgcatgaccggcaaggccgcaccggcagtgtaccaagagtacacccaagtcccagtacatatgcaggttacaggtgaggtggcctatcttactaatcaagcatacagcaccttggtcgacctcccatacctccagtttaatatggagagatcaacatatctcctgacgatcaggagaatcaccataatagctataaaatctctatacagattgtagatataagactaagggcttcaattaaatgatttcgttgcaaacatcgatcacatgaccaaatcgccactagtatacgcgacagtccacaatatgcttctatggcgcacgacacgacgaggggaaaacagcacccctactgctctaataactgatctcttacacttggctcattgctcatcccctccaccccatggaggtggatatctcccccccaggcggaacccgtccggcgactccgctcctgggtgaaaactctgagcccccctcaggacctaccaccccgacccccctaccccggaactccctgaagagaagggccttattctccccgcagaagactcccactgcagctccagtccctgtatcccatacgccgcaagccccgtcgatctgcgaacaggtcggcatggtagcagacgaccagctagcccttcttcatgattggaaactag

SEQ ID NO: 679 - DNA, 1849 bp, Emericella nidulans
ttctccgtagcggaaagagggcaggaaagccgtggtggttcatggttaaggctcacaggtaagcaaggtcgtttggccttcataatcaaggtttcaacctcacagcaaggttgaagttatgttgtgccaacaacgatccgcgggtaaatccgtacattagcgagacctggagatgccgctcctgctcccgatcatctgcagtttctgattcggtagagctcgcctccggggtgaacccagtattacaggaagccaccttgaccccagtgccagctgcgctaaacgaatcggaagttgggtccgcagaaagattgaaggttgggattcagtgatctggtcggctgaaagaacccgaccagggcagtagaagcatgaaagacctccacactttatattttcagtgctctgctcgaccttgtccacaaacgctgcgtgtgctgtgaggatcaccagcttcataccggagctgacgatcttgctgagcctttatgtacgcacaacgcggcctgactctccattgacgtctctttcgagggcgagatcactccgcgctctctgtttgtcgtctccgtagttgagataatagtatgcgtcgtcttcgaggatgataaaattgaatcgctttgccagacggagactataggtgtcgggatggaactgtcagtctcaggtctggagcagtggctgggcagaggagtaattacatctcggccttgcggctctcggtgcaggattgaccggttgggttcgacccagtcggggttgtatagaggactttggggcgcggcgagtctccgggccactccgacaatgcctgctccaggctggccggattgaggccctgggcgtcagagtagaccgggataagctcctgtccgtctgcgcgaaggaacccggcgacgcctctgtggtccctgtcagcaaggtgctaaaatgtccactctgaaaattcctggaggaaatcatacggatatgctggtctatggcttcagtcagcggcgcctgcgtccgggaatgcatacaaagggagtgagacccacgtttcgagaagaactgggtccccaggatcagtgaagacctggatgacgcgatgaatgagctcctgacttccattgccaatgcagcacgaccagcctccgttctcatcgaggccgtggacgctcctctgaagactttcgaaccactgaacaacaatgatcagtaggaaatatggagactaagggacagagcaaacctggattagctgggcatttcctcgaggaagaccatattgaagagcctggttgagctcgtccccatcaaccacgatcctacctgtcccggctggagtatccttgagtgagatggcgatctcagcaatggggaacgtctcgggactgggttttcctgccacgagggagatcatgccaggaagggcttcgagagggagtaggctccggactgaagatctggtcagcttggaattgcgctgtcatggccaacgtggcttacttgcaccgggctcccatttctgcacccgtgacgagaaaagaggagttgggtccgccacagcattattggcccctattgagcccatggtgatgttggtacgatattcagtagcacgatggtctacagtagtgggtttgatactagacaccagcaaaattaaaagcctctatatagcatagaaggcgatgaaccacaggaatggcttcgtattcgggatctcaggctactactaccatgattgtaactgtcagtccgtgttgaatgtgtcatgacaaaccgccccagttcgtacaagtgtcgttcaaggtacaatcaccactcggcttcccttcgtatcctcatcctgccaaaccgacgc

SEQ ID NO: 680 - DNA, 5953 bp, Emericella nidulans
agatccgacgtggaggaatgcaaacaaaaacaagtgcaaccagtgcacagtattttccgaattaaggcagctaggacaagacgggcttgctgaggaaagaaagaagaaagaaagaaacgggcgaaagagaggagggcgcttgcgcatcttatgggcagcaaacaggccgcacaggcaagattcattctcatcctctcgtcacaccgcaggattaccttcacgatggccgacaagaatagaacagcaatcccagccaatccaagtgctttgcggtctgccccgcttttttgacttgatagtggattcgtgcggcggtaaatagagaaatcccattggataatgcggtgctatcctgtgggcaatcaaagccaatcatcggcatcgacctagcgcctgtgatgaagtgggcattcagccaaccaatagacgtttattaatctgtgctggagtaactctcgagtattaccgcatgcctgcatacgccctttcagattaagacagcccgggcagacgagccaggacctggacgagatacgactaaaggagacgtatggaacacttatgtcccctaaatctctgcatgtctggactcttcgagcaggaatctcgatcctcggcactcgcattgccattatgtcgtgatcattgaaggttacagatgatgatcatcatgcatgggagatgacagaaggcagggcgaatgggagtgttgaatggagagtgccagtgcagagtgcagatggagagtgcagaggaaaatgcagatggaaagggcagatggagtgcagatggagtgcagatggtactccaatagttgcaggctgaggctggcagcacgctgcctgtcatgcacacttcaacgggacaaaggcgtgcagagaattcctcgtcaagactgacccctccttcaattactcactcatcccccatcagccagtagacggactggccgcgaggctgaaagtctattttgcatatttagcgcagacatggctcaaaagctgacagtaacccgactcctaccattcactaaacgaatagtattgatgtatcataacgaccttgcctatacgccaggaaatgccaaaggctgtttttacttgatatccccaaaatacagattaagagatcgccagccgaaaaaaatgacagagaaagatagtgtagtgtactgtacagcctaccgcacggacacgccggaccgattggtgaacatccgagccgagatattcatcgccgccaattcttggaacagaagtttggctgcatacggaatatgcacctgcgaaatccggtgcttattgttgcagagccggcactcgaacaaccccttcttcaatttcctgcgctcggttagcaatgcacggaacaattcaggaacggagggggacttacgctatcggggtcatcagcccgcagtcgtcgcagatgtggactctgaacgggtccgagacgtctaataatcgctccttcaagaaggcactagctccatgcgcaatcatacagtcacgctccatctctccgaagcgaagaccaccgtcgcgagcacgaccttccactggctgccgcgtcagaatctgcgtcggaccccgcgcacgcgcgtggatcttgtcgtccaccatgtggcgcagacgctgatagtacgttggtcccaggaagacttgggctacaagcttgcgtccagtgtggccgttgtacatgacctcgaatccacgcgactggtagccgtgttcgcggagaagacgagagatcgagtcgacggtgacatctgtgaacggagtagcatcaccttcgaaaccacgcaaagcagacactttgctgagttgacactcgatcaagtgggcaatggtcatacgagagggaatggcgtgcgggttgatgatgagatccggcgtcacaccctcgcgggtaaatggcatgtcttcctgtcggtaggtgataccaatcgtacccttctgaccgtgacgagacgcgaacttgtctccaatctgaggaaccttggtcattcgcatccgaaccttgaccgacctcaagctgtctggagtggtcgtaaccaagacctggtcgacgataccattttccgtgctgcggagcggtgtcgacacatccaacttggtgtggttcttggtccgttggcccaactcttctgcatccggcgcgagcggagcggtcttgccgatgatgatatcctcaccagaaacacgcacgccaggattgacgataccatcttcatcaagtttgtcataagtacctttgcgcatgccaatcgtgtcggaacgcatgggcttctcaaaccgctcgaccactgtcaatccgaccatcttctcgctgtctgagtatgtacggtagaaaagactgcggaatagaccacgatcgatactgctttgattcatgatgactgaatcttcttggttataacctgagtaacaagcaatggcgacgatcgcattctgaccagcaggaagttctcggaatctcaagaactccatagaccgcgtggtcgccagcggcttctgcgggtagtacaggatgttcgccatggtctccatgcgctgatcgaagttggtcaagaacacacccatagcttgtttacccatagctgactggtaggtgttacgaggagactggttgtgatctgggaaggggataatactggcgcagacaccaagaatcatactggggtgaatctcgcagtgtgtccaggtgtgcgccctctggctgagaatcgaccgcacacgcttgtttggatcttgctcttccggaagtgcgtaaccagcctgcagctgctttgaaatctccaagtcctcgggcgtcataacgatcatgatcgtctcctcctcttcggcatctacgtactcaacgacaccggatttgacgagaccgtcccatccaaagtagcgctcccgtcggtcttctgggtccatatccggtggaagttccttgtcttcttccaacttgcgaatgtgctccttgttgaggactaggttgccgcagttctcactcttgggatcgttgtcaacgacgaagagtggccggcatacacgaccggcgtcggtgaagatcttgaattctcgttcacggatgtctcgaataagactgacttcgtgagaaatcatgtttcgccgacgaagggcttgcatggtctcaacaaggtgagaaggctgacggtggacaccaacccagacgccattgacaaagaccttagtggcgttcggtgttacctgaggctcaaactcctcaagcacttccatgttacgctgaatcatgaaatcgatgatgggttcgctaggagtaccaacagtaatgtagcacataagagccaagttcttgaccagaccgcaagcttggccttcaggggtttccgcaggacataccagaccccaatgcgtgttgtgtagctgacgaggtttagcaatcttgccgtcacgaccaataggcgtgtttgttcgccgaagatgagataatgttgaagcgtaggtgtagcgactgagcacttgcgacacacccgccttggcgctagctgccttcttctgctctccccagttaccagtagcgagggcatagcgcagaccttgagtaacggtgcttgccttgagaccaacattaaggtaaatctctcggtcggactccacacacctctgcacataacgctgcagatcgcgggtaactctggtaaagaggacgcggaaaaggtttgctagcaacggaccagcaagatcgagacgcttctttccgaaatgatcacgatcgtcaacatcgcgacgtccaagagcgcactggagaagtctgtgcaccatgtaaccaaggaagaaagcctttctagtttcactgccttcgctctgggagatatgaggcagcagctccttctgcataatctctcgagcatatctaacacgacgttcgtggttcatgctagactgagacgaaccacgcttggcaatgaaatccaacgccacctcacggtcctggataacaaaaccctcttcaatacagggcttcagcatctccagcataggtgtatcgttccggtcgtaacagatgtggttaagaatatcctcgtcggaaacgaccccaagcgcacggaaaacaataacgatcgggatatcggccttgatgtacggcagagtggatctgatagtagggccaaaaccccctttggcactgtcacccttaccaaatagcttaagagataactgggagagcagccttgagcccttttccaccgcactgcggatttccgcgacgtagggtgtgggactgggcggcgccttcttgaaaacctgaactgtatttccagcactgcgctcctgggcgatcaagactttttcgctcccgttgatgatgaaatagccacccgagtcatagggacactcgttccagtcgtataaagcctgctcgcccagatccctgagcagacagtatttggacttgagcataattggcattttcccaatatgaacggtttcctcctttgcctgatctggaggcagcgccatttcctcccactgtaggtaggtacccgtcgctttcctatcctcattgcccatatcgtcgtcatcacgatcgcccaccatccgttctcgcccttccatgatcttcttctttatcccgagatacaaaggactggcataggtcatatttcgaagacgggcctcgtgcggcagcataatcgtggcggcgccatctccttccatggccattggccgggaaagcatgacggttccgaatttcagctcatatcggcggacaacgacgggatcaacttcgtcttcggagggcggaatcgtctgatcaagtgtcacttggccttgttcctccactaattcctgcaacgtcgaggagatgaattcgtcaaaagaatccagctgctgtgagacgagacccttcgtatcaaaaaaagatgaaatcaccgtccagcaatcctccgacgtaattccctcatccatatcatcgtaatactcctcctcgtaggcatcgccatagtcagccatcttgacggatacttgtcgaacactctggtgaatagtcgaagttgaagagcgcaaagggcgcgacgcgctcggcggaaatcgctgcgatcgcctgctacaatatcagagcacctcggctaagctatcgacggaaagaaagagaatcgacaatatcgagtcctcagctggaaaaaatgtgaataccccagcctggtcgaggatgctggaggaacgcaggctgaatgaaggactctccgagaatcgacagtcaagcaaagccgccactagcgcaggccggggaaggcggtgaattagtgagaaattgctatcacgtgatgctattaataccttaggcataaagtatttctacatactgtcagcaaaatgtggactacagtaaactgaactcgacagttatctcgttgttataactattttacagaaactgcaacaacgtttgcagcatttctttatggtccttctgccccggctcatcttccgaaagcccttcaatttgctctatgtggcgatattagcatgaattagtcaagcctaggtgccaacgtaccttggagcgtgctacggatgagagacaagtcctcatctcgatctgatagaatcgagacaattttcatctttgccccatcatcttccgccaccagccatgctagaataacatcgatgagctgcactaggttagtatctgttgatagcccggctagcacgacgaacctgtaaagagaaaagaccagcatcgaatctccgcgaaagccattccgcttccatagccttctgctcttcctccgtgaacatctttcgctctttctcgattatttgttcgacgggcgagaccctagacgcatagtctcgcctcagtttgaccagcttctctgtcttttcgtagtctttctccataaacttggccagcgtacgaatgcccggtgctgaaccacctggcagaagccgtagtaaggaacagaaga

SEQ ID NO: 681 - DNA, 1869 bp, Emericella nidulans
acgggcgataatacgactactatagggatctgtgcttgggttgacagcaacaagaatctcgctgagggatgcccagcgtcaaccattttcctagtccggacaaagtctggaagtctgcggaccttcaccaataataatgccaatcacccaggtcaaactgcaggcgccgagcgctgtggaccaacaataagcaatggggcacgggcgtttcgggtcccgcgaacgcaaagcatttactggtttcgttatgacgttcgctgcctgctctcagggctccttgatactcagctgtttctggattcgacatgaactagcacccactaccaagtcatgacttcaggccccactgcagcactgatctttgcgctggtgtccacttgacgagggttagaagttggggagaagttaaatagattaaatgctcgtcagtcgcaagcgcttcgcatttatccgaacaattaccgttgctcgtcagagtttgaaatatgttatcgctgaagatcacggtcgtttcactaaagagaactgccttcgcatgagccctcgttttcttgtcggtacttagattggagactccccagggatgccatcccggcggagctacagggccagttctcggcatgcctgtctggagtgcagaggccggcgaatcaaggttggtttcctcccatccaggatctggcattgccacggcgcgcatgtgtatcccaccatctcttgctgcctgcatatgcaatttccttggcccctttcagcacgaattgccattaatgattcagcatatgtgctaattgtgcctggcccagtgcggaaaagaacatcctcagtgctccttctgcatcagtcgtaatctgggatgcgagtatctacatcgcgcctcctcgctgccatggccccgagtcaaatcccgttcctccacgccgtccctctctccggtgaaatcctcgccctctgttgtcgaccccgcgttattagtccaataccaagatatcatggagccttccgttcccgggtccctggacaaggagctcaatatccaggatcttgaattgatgatgcaatggtgtactacgacatatcgttccgtttcccgaaacagtaccgtcgagaatatctggcaggctgtcgttcctcgggaggccatgcgccatccattcctgatgcatggaattttggcgctctctgccctccatcttgcggttaccagtgacggcggtttgagagaacagtacatccgaatatcgaaagagcatcagaatcaagccgcgctcggtctggagagcatagcagggaagctgaaacagcatcactcgaatgcagcctttactctgtcaaatattatgattatattctcttttgctcttccagaaattatgggacagagtataggacatcatcccgtgaacgaactctacgaactttttctgtcaacaaggaagtcgagagacgtgctatataatcattggggggtgaccggagagctcaagccattgcttcagtgtgacaaggcgcagccaaaaatgcctgatacctcccggctggctatcatgtctctcaaccagttgaacgcaaatctggctcgccaggatccccatcatgataaagacacatacgatgccacaataaaacagctgagttgttcgctagacaaggtgtcaaggggcggcgagaccatgatcgtcgcctttcagtggattttccaggtgccggagaagtacatagagctttttcggaaacgcgactcattcgctctcgtgatacttgcccattacgccgtgatcctccatttcttaaggcggcattggtggatgggtgaatggggcctccgactcattcgggaaataggccaacatttagatgcgattggag

SEQ ID NO: 682 - DNA, 2487 bp, Emericella nidulans
gtcccagaaaagccatatcccagtataatccagcaaattacttctagtagcagccagttattgtcagtggggcttgatcccaaagttcttaagcaaaaggcccagtaagggctgtaccaatactatgtctgtatagtagccaggtatgacagtaaccacaagctgtacaactgctgtcaccctaatagccagactactaaacagtagatagtacagctgtgatcccagatcaactatatactattctactgttatttctagtataggatgccatagttagtctgccagggctggcaggccaggcaggagtatccatggcacagggtgctgatcttaactattgcggggatgctgtacaggccttacagggctcaggtgcagtccgcctggcagtgctatttagctggatagatggtcaagcagtagatagtatatatatagaaggcgcagtgccaggttaatacctatgtagtagatatacaggaggtcaccttggtagtggcctttctcaggcaggtaatagctgacagacagggcatggagatgcaggctgtattctgctggttacagcaggtttgtcaggagtacaaagcagcataatctgacagtaatatattaagaattagttatatagagagtcatagcagatttgttgctttattatatgtgtaggcagatagcagaatagaattataggcaagaggaacatagaccaagcttgcaagtacaggctgccagctaaaccatgagagctaattaacaccatgcatggtgctggcgatgtgttggctatgtgtccaggtcatgcaaacctggcagacgaactcaagccagcttggtctcatacaagccagttgtcagtataaacagtgtcatgactaatagatggtaccaggcttgatacaggcattgcactgcatgacctatatcatgctactagacagtcagctcaggctgtgctgtgccttaaagcttggctgtacctgcagtattgatatcagtattataccagcagtataatagtatcaagccagtacttaggagatatatatactacaagtaggcaaggatcatagttaactacattattattgcataactatataggagtattattaattattacaaacaactacccagggtgctataaagaaacaaaatctatactatattcacccaagcacagtgtcatgaccttacttattattattattactgtctctattattgttattgttattattattgttatcatcctcctctatattgtggttgtcatcgttgtcctcctccaggaagtcaagattattgtcagcactggcagccagggtattattgaacttgtccaggcccaccagcatctcagatactgggactagagtaaagttcttgagcaagcagatcttattctgcagctaaaaggtgtggtatagtaccaacagctgtacctagtaccagaactggtatatttcaagcacagtaccagcactatatctaccccctgcaataacccttgccttctgtttattagccttctgcagctcggcatcgatgtcgaaacagaactcgagggtttgatgggcggcctcctttgtccggggcatctgcgccagggacaaagcctgtcggaccaggcttgtggggaggggaatatactttttattcccttcagcgcaccaagtacaatgctttgcctggtaatgcttcagcacacagacagccagaccaaccaccttgccagtggctgtgtcaaggacaaagaggttttttgcacagtggacgcaggggtgatcagtaataacagggtcagggtctcagactcaggctgcagcctggatagccttctaggtctggtcagcatgcatgccagtatacaggctgagtactcaccttccttgtcaggtatttgtttgtgcgggcgtgtttctggcgtgtcaacagggctgggacattattgtccttgcttgcaacaagggatcaggcgcgacgctttctttaagtgttgttgacaataatagatacaggcttgctgatggggcagaggccaatgcctgtgattagggagctgggtttattgctgttactgacagtattaatgtgctggttatctgcattgtgattatcagtagtctcaataataggcttctgctgattctggtcaccattgctgttgtggtcgctgtccgcgtcgctgtctgtgtcctggctgttgttgctgttggtatcagtgttgttgttgttgttgttgttgttgttgttgttgttgtgggagttgttggtgtctgctgtgggctttgtgatcacaagctcatccacactgtccaagggagcagggcgctgaggcagagccgtcatcaggctggcctgcagcactacgtcccgctcctgttactgattgcggtggtgtctcctctttgactttgcattgacaatggttggtgtcaggccgggggggctcggagggctcgtgaggtcggtcgagcagcg

SEQ ID NO: 683 - DNA, 2654 bp, Emericella nidulans
gcaagcgcagatgtagagctcgcagcatagatcggacgcgaaggagccgtgactattcctgtaagtcctcagtatccttcttcatgccttattctcatatgtagcaatagggccgacccgaacacggtggcaactgtgatatcaagaatctctcccgcggctcaaaagtctacctccctgtccatgtccccggggccaaattctctgtaggcgacctgcacttttcccaaggggacggcgagatttctttctgcggtgccatagaaatggccggcgtcatcactttaaagttcacagtcatcaaggacggcatggccaaaatggcaatgaagtcacccatcttccacccgggccccgttgagccgcaattcgggcctggtcgttaccttactttcgagggtttttctgttgatgagaaaggcaaacagcattatcttgatgcaacggttgcgtaccgccagacttgcttgagagttattgagtatctgagaagatatgggtataacgattaccaaatttatctgttgctaagctgtgcgccggtgcagggccatattgcgggcctggttgatatcccgaatgcgtgtacgactctgggggtaccgatggatatctttgactttgatattcgacctgaggcggacgctgttaagcttgatatgggatcttgtgcttttgcttcaaagtgaccggtcctgtcattgaattattcgttctatgcttctctatatacaatcgtattcgtatgatatcatgccaacttactcatacggccagacctatttcggtcagcctatacgtcctttcttgctaaagttaagaagacctacgcagtcgcagtcgcagccgcagccccaaagtactcctcgaacatttgctccgcctctttgatgcaatcaaacccataaatctccctctgcacatccgcgtctgcccacttatccggcacagggcctttgcccgccttaagtgccgcaaactgcttgtcacgctcctccttcgccgctccctcgcccagatgcagcgcccgcccactcgcagcggccaactcaacaagcgcgtatgcccggtccttgcgcaccatctcatacacctttaatgccttgttgatgctctctgtatctgtactcggtagcttgctcagcacaacagccagcacagccccatcctcaatcgcttgggccgcgccctgcgccagatgcggcagcgtcggatgacaagcatcacccaccagcgccgtacacccgtccacccaggtcggcaaaggttcatgtgtgcgcagcttccactcacaaacctccccctcaggaacataattcagcatgcgctgaacaagcggacagaaatccgcgaacacgcccaacatcgcactcttcgaacccttcgtcgtgtaggtggcattcgtggcagccgcgaaatttgtatccggctgcgtggtgctcagattgtaaattgtgttgttagagaccgggtaagcaatgatatgtctcttctcgccaatccaccgcacaaccttattgctggccagcaacgctttcagctctggatctgcgttggggtcagactcaatctgatccttgtgaatcatgatccggtacgcggcctggtttgtgtcttttaccgcggggacgggtgagatggcgaggtcgttgagcatcgcgacgcgcgtcacggatttgattccatccgcgccgagaagaatgtctgcgtgcacggtatagggctgtttcgaagagtcccgtggcgttacggtgaatgagggctttggctgcgttccgcgcccaaaagagtgcacctcagtcacggacgtgccaaagtggaaagtgatcttgtcgctgtgcttaaggcagccctggtacaggccgtttgcgagggagtaccggtgtccaaccatatgtttgtagccatacgtcggctcaatatagtgcagatcgacatgggcgagttcggagtttgatgcgccgactgtcgcttcagttagccctcacaccaagccgcatctcttcataaaatcgcagtaaatatagaagcagacgacgcacctctcacactcgtttcctcgatgtttactgcttcggcctcgattgccttccagacaccgagcttgtccagcacccgagccatattcggtgcgagctggatgccggcgcctacaaagcccagatctgaagctgtctcgtagatgtcgatgtgcttgaaccccttttccgcgagagcgagggccgacgtgaggccgcccattcctatctttgttagtccttagcttgtcgatgggataggacgaatggagataaagggaagtggacctaccagcgcctagaatggcgactctaagatcttgtggtgccatgttgttcccttctttcctcttaaattctgtagatagatgattgaatggactggagagtctggtcgagcattgagtacagtatatatcgacttggcggaacagaccttagccgggatctcctcttccccacgcgtcccacaatcacatttatggggtcattttatcagtgtcattctacagtgcttagcgtggagagacactggagagaaagcttggtaatggggtctcatttggacaacgagtgttaatgtgggttctgcggaaaaatcatttcaggctgctttcttgacgattcgccacgcgg

SEQ ID NO: 684 - DNA, 2287 bp, Emericella nidulans
cgggaattttaaacatttttcctggagcctagggctctgcattgtcgtagccgtttaccgagcattttctagtacttgctgcaggtgctttcaagaaacctaagataagccggcggttccactcccttcgcctgatagaatcaattcaatatatgtaaatacgggcttacatcccaaagtaccttgcttgctgccctatgagtacgaatcctgatctaaacgatgattaggcctgaaatttgaccatacatagaccgcctgagtaaacggagcagccacaatggtaggtccaatgctcttactgttctgttcggttgaaccacagtgagggattggcgggaggcactaggcggcgtgccgacgactacctttactgatgccaagagcaaaatgaggcctatctgggtgtttccatcggcgtttctactactctaacggcaagctagcaagaggggcttacacaaagttagtacagttgtaggtgagtgacttggagcaaatatagccagtacggcttcattagccatagtagtcccagttactctaggcagcgagacaaccgtgacctggtctgaaagggcagaggattggatggggatgggagatgatcatacagatcgcagaaaggaacacatcttgtttatgtcgggcaaaggtagtatcaaacgctgggtggacagttctcacacctgcccggaaccaggagtaacatacgggatacgcctgctcatttccgaatcataatacactctttcaaatgtataagggtgtaagttggctgggtggtcaagcatgaccttaacatacgtaaaaccaattcttacccatgaaagcgtagtgtacattacatgcaccgacctagatcatatcatattcacttggtgactgtctaccgcttggtcttctccttggactcctccttcggctcagatgtgtttgtgaccttctttgcgccctccttctcattcttcgcgctgttggcctcctgctccctcttctgctcgacttcttcctgctgttgtcggttctgaatcttgttctcaataaggtcgtgatacgctgtaacggcacggaccaagctgcttaggtagatggccatcaattggtcgttcgtcttgatgctcatagcgcgagccaactcggcgttatctgttgattgttctggctcaccgccaacccgcgccgtggtactcggtgtagacagattgggaaggaggttgaagacatcttggagattaccgaggatggcgtggttcacgggtagttcgtggtcaagaaccttctgaagatattggccaatatcacggaggcggaggtgtaagccttgcaaggactgcagttgcgatgtgatgcgggtggagagagttcccacagcgacgtctctgatgtctcggagaaggtgttccacaccgatttcctctgcttcctctgcttcgattgtagatggggtatgcacgaacgtcctggatgtagtggtaccgtcctgacaagggttagcgtatgccttggttgtggagccgtagtacctacgtccttgatttcatccaccgcaaagtaagcatcggttgggacgccaacctccttcggttgtacatctacaataactagcagggggtttggtgtgtatcgtttgaatagctcgttgatctcgagatccgaagcgcgcagtttcgggccggagtgataccatccgatcagcttctcgcgggcgttaatcttcttgaacatgtctcgcatcgactcgacaaagttgtgatctaagaaccacactgatggatccttttcgtcttcctcgaacgggactgaagcatgttagtcaattgacaggccagcggagacgctagatcgtaccggcgaacgtgtttgacacccgcacattccctccaatgtgttctcctagcagtacgccaaccactcgcttccgagtgccctttgcagagcgtccatagtgatctgcgacggagagaagtaccaacggagcaacagtgacggtccgcgtgacgagggaaagcgtgtccgccgtggtagcaggcatggcggaacagactagcaaaaaactgagtacaacgcgatttgggggacggagaggtgaaggaaatagacggaggagaacttgagtagggaaggcgaggtaggctgacggggatgacgacggagacgaagcttaggctgttggttgtctaagagtagcgctctagctctgcttgtgccacagtggctggcagctccagccactagccgccttgtcgcaagaagcaccaggatcacccaagcactatacgcgttt

SEQ ID NO: 685 - DNA, 1918 bp, Emericella nidulans
ctcactatagggagagccacgcttaggatcggcagttccattttcgtgtgggtctttatgcgaatgcatggcatgatcaggggcgtttggaagggagccaaggcaccaggcaggtttggtatgacgagattggcattggaagtgcttttgcagatgcggacccgagtcagtggtagggtataagcgagaatattgccagtagggtcctgcttttagagtcttactctggttctattgacttgcggattgtttggttaacatccatgtcatttcactgtatttcaatcttaacgcctagacagctaaatatagagttatctacctaaatgagttatcctacgttgattttttttccctttttttctgtttcgtaggaacaaagtaatttcctgctcacctgataacccaaagtagcatggttgaaagaacgctcagaaacctaaaatacacacatgtccatatcatacagtccctgggacttttataacaggcatatgtgcaatatacataattgcattgcacaactgcgagcggccacacaagactagatgctgtagccccatctagcatgtgctgatatatttccttggcgttagggcttaggcgcttgatatgtcgtacgaatatggcatataacatctcccaataatgccgcggatagcagtatctatagaaacaaaggactcggtaattgtacatagcgcaatacggtcttctctttagcaaatgagctctgaactcttcatctcacttcaccattgcatgtccggctataaagcacgtgcagaaaatggagtcctcttctctaactctacagcttgcatttgatggcattgcttctgattgtcagcaagctttcagctgtatcaaaaatcccttttagtgcctctttttgttcgcgcatacggtacatactataatactataaaaatataaccagcagcttcgactacaggtttatcttcctttcccatactccttcatcagtatgtatagtattctaaaagggaacttcaacactatttgatttgccttcgttccgtcttggtgtttaccctttgattggtggtaaaatagggactggcgtgtgtgacaggctgtgtttgcgagcaacaactcgtaggtgcagatgattggaatgaagctcattgtggtgtagttcgaggttacactatttgtcgttagctatcctgtgtataggaaaagcagagtcaggagaagaagttggaaatgtgcagagaatgaaatgacaggttgtctgactacctcacccaactgggccacaaactgttggtcactgccgatcggttcctcgacaggctcgcgccctgactagggccgcattagtggcacgcacatggggccaagaatgaggctgaaatggctgtttggacgatcttaagcgagtcctagaccacctggttggaagaactggggaccggtattaacactgcaaatacttctattggcgtgatagtagactgcagatcgctataatcacactcaactgctggcgttcccagttgacatccaggcaaaagcttgcttctagcctgattgcacatgcatactgaaaggctaatggatatgccgcgataccagtacgtttttccgctccaaatttctgagctccactgacctgatgaacagccaaagggggtcagcttgccagtttctacggcaccattaacgacggcgacacgtttggaatcattattgaggaactggagttttaatagtttcgagcacctatagggtatgtaccacgtgtttacttggagacttttgtcctttctccaatttgagggacgatgcagcatacctcgcatatgccgacctcgctatttgataagaaaacaatagttgacatggggaccctgcgttcctagtcaatcccattccttgcaacacaccgaac

SEQ ID NO: 686 - DNA, 5608 bp, Emericella nidulans
ataatatttccattcgcagggattggatgtgttagtttattctgactttaaaatcttgggcgcaggagaagaaaacattaccatcatcagagaactgaccggagtaacattttgcgtcgtaatggatgattttatccgcggtagttccaggaataagcccctgtacgtgccctgggtaagctggctatctcgtgaacagaatacttgcacttacttgtgctatcgacgagaccctggtcctttgcagtccctgtccatccactcccaattctcgccacatcaccttctccgccagtgattttttgcgtttcatacgctcatcaacgtagctgggttccgtaccgaatttcccggatctcatcagcttgataccttcgtcactcggtatcttgggatattgaggagggcctcgccgtcttggaactctcctgcctagccccagtatcccatattcgtcttcttcgccatcgtcatcaccgtcgaagccagcattgcccgtggcgaaaccatgataccggaaaatttgttgcaggccaccagatgcgagtatatttagtaagcgagcaggcgagactattcatagtcagaatctataatatatatagtcactaaccaatcttctcctgatggagagtctaccttgagtcgtccggccggtttgattaccttccccagtctgatcatgttcatccatggtgaattcgatatgaatgttgcctaaatgcaactcggaatctaaaatgatattaaatcagcatcaagcttgctgaaaataaatgggtttgattcaaaataccggattgatcgacgttaggatcctcgtcggggtactcttcttcgtcggctctatcatcatggttgtcggaatcaggttcataatccatatcatcctcatcatcccctgtttcatcttcctcgagccacgctctcgcagggtgccatgtaccgcctgggcctactgatggcgaaccgtcccgtcggtcaccgccagcgatcgggggagaactcatggtcgtccaaagtaagccgaacagaaaataatcacgcagaatacatgtcagacaactaaagaagccaagatgaagatgcagtgacgactgcacttatctctcaattggtggactaaggaagggccataaatcgagtctcacttgagtatcagaacgcttatcgataccaggagtgagttatgtcatctagcctcggccttgggaattcttaactcctaaccccgcaacttaaatatcaggaacccctcacctcaaaacagcgctgactatcgtgattctaaagtactccgtacgccacgaacattatttagcacagttaacatggtgagagaaataacgggatctattgcataaaccgaaattcagaccgaaagaacctgaaaccaagtgcctggatagttcagtgcggtctaggcgcttcaagagtgccgcatgctaacatcacgtatattctggggttcggcggcatcctcaggaagaacactagaacctgcaccaaccaagccaggaccttgaacacgtcgtcctgggctgggtaagggattcctaactcccagccatcctccacttctgcgttatccgttgcaagtggtgccttagtgactgctgcgcgcaaagcaagcacccctgcaattgctttaacgcggactctcagatgcgcccgctttttaggcgaagcccgtcttgttgcttcaagatttgcttcagatgaactgtgatccttttccctagccagataaaatagacaatcggcgggaatttttggctgtcccgctaccccgaactcgaccgtctgatgtaagatccctggattcgacgccaagtcagcaaatgtgtcaatggatggccagccttgtgtcttcctcgcatatacgtactctgcattgaggactcaatgacatgctcgaagtacccatgttgcgatacaacgaacgtttcgtggacataggtcaggagagacccttgtttttgattctcaaggatgcaggtctcaaagtacctcaacctctgaagctcccgggagacttcgttgttcactgaaatcgacactacttgctttccgaagctggacttctcctggggttctttcatgcccagatcgctgcaggttttacgagtagagtcgccaaggcggagagagacttctactctgaaggtctcgggacaaaggctgtcgttgccgaacaacaatgcggacggattcttggtgtgtggttgcgaatccttgagatctgtgaaggttgactttgattgtgctactccggctcgacctggtcctgtcgggacgtccttcaaatccagcacctgagagcccccctgtttggaagatccgccgttggctacgccacgatactgatgtggattgataccgcttcgtccgctcaagtcaccaaactggtcgtaattatagtgaccatatgggcccccgtttgacgtgttcccataattcccgttgccggactgagggaaatagcggttaccgccaccatttccgccatccccattgttatcatcatcatcgccgtcatctccatctgatccattgtagtggtcccaatcgtcgggtatcgcacagtgtcggcaaagacaattgatgaagtcttcccaggtacggataggttgttcgcactcggtgattgcacagttttcgggtggggggaggtgctcagtcacttcttccattgcctctctgctcattcttggctggccatgctgcctcatatgcagtagatgcttatctttccttaggaacgatgtagggttcgaatcctggttgcaaatgtgacagaagtaacgtttactggggtaatgcgtcgtcgttatatgacgcgtgaacgttcctttgttcttgcagaacaacggttgtgggcagagaatgcaccggaacctcttgtcttcgtcatttgcgttttgctcccgcccttggtgcggcgaaattaattcattcactagggacaatgcctcttggagccggtcttgtacaccacgcaactgcatgatgtttggtgttgagttatcatttaatgtggcaaaaataacgcgaacgatctgtatcagtctactcaggtcacggactgatacagcagttgttgccggcggtatgttcggaggcagggcgcgtcgatgcggcctgctgtaaacgtcctggctgttgagaagagatggatgtgcggggctgtatgaggagttggtgagctgtggttcgccagccaacgcatgagaaggacttcttggagttaaaggtgtctcgtgtcggtgtcagtatcaggaaacttctgcaaataacgttaagaaataacccacctcagggctgtgggctatcgagacattgtcggcaggagcatgaactccactaggccaaaattgacccgagctggggcccagatatgtctgtactggttcattcggacggtagaagatcgatggaggttcataatatccattcgccaatccaacgctggatgtaaagtctgtgcctggaccaataattcgaggaataaaagcttccaggtcaccatgaacggcaccatcatatccgaacactgagacattaaaatcgaagttctcattagtttgcgggatttcctgatccatggctgcggcgtccaggaccggacaaggtgaatagtatggagggaagaagagaaatggaggaaggaaaagtgggcggcacggctgtagaaaagaaaagctataggaaggttgacggtgtgagcaacaacaatgaaggcgcaccgccgagtgtcaagggtattgtagacaaggctgactctccgtccacgtaggtcgcctactatgcggacagaagatcatacagaggattatacagaggaatatatatacaagctggcaacgttcttccacccgggcgatctgaagtgtggtaaatagtaaaaataatgattgctggataaggggaagcaaagaaataaaagcaagagaatggatggtaaatgcagacgaaattgatggcctccagaagtgcccgggtgagatgcgcagcagctggccacttctccgtgaaaataacaacattcattaagctaaaggggacagttgacaagatccagagggacaaataaataatctcctcaggcaaggcgaatgctttcaaaattgtacggaagcaccggtcaaggcgaatggcagtgtatgcagcggccgcgaccagtgatattgctttagagtagtcatttgattttcagcaaattttcatacttggagctacttaaaagatgatttcttcctgcagcaagtcggacggtaccaaagtacatggagaggttcaaggcaagcgaaccagggtgaagctctcaacgtcttgagcttggattgctcacatccgcctataactggcatcactttgcgtgcttcacgtctttcagtactatacgactgttctaggaatttatcagacttcctggcaaatgcatcatatagagtttttaaactcaaggcaattcctcatcacggatcctatattcgggtattgtgcggccgttctcgccactatagagttacatcttcaccgagggaaagagagcagctgcagaaaaaaaaaaaagagcaattacgagaactgccttggttttattcagaagctgagcggcacatgggcttttatggcgcaagttgtaaggcttcatcaatcatcaccaatcaacatcttgagccacgcacagctgattccattctcataggcagttgatcttcagcggttgatggaaactacgagcacattatatcagtctaatctcgccaatccaaatacaaacaaagtcagcgtagacatttccagctacttccggattctcgacctatgcgaattttgatccggaaatgcagcctctcctttcggtccaacactggtaccctcattctcttcctttagagacacaggcacagagtaatcttgagtggctgcccccaattactgaaacagacaatcggtccgcgtcttcgcccctattttcgccagtcgagcctggagccgagagtgcaagggcgaacaggcagggccaacgtctctgtactcaactcgttccgactccggcggaggtagataataatatgttacttcaggaagatcagctctttggcccactttatgaccttatgagtccctaggatacaatcccggggctgttaactgctaatccaggtgcaggtgcaggtgcgtcttgtctataagcgccggtgaggatgggccttgaattggttggcgttaggatgatttgagagaacagcaaactagggttcggtactgttagactctgcttctggtctgaaggaaaggcagctgtttgggtatgtctcagggacaatcatcagagcgtaacattctagatacgggtagccagtgtgaagcaagcggcgattattgtgcgtaccgcatgcagtgggtcccattagctatttctcagaaacatattctgggcaaacagtattgctggacactggttaacgtctgttaacatccttgaagcaataacttctagcgtgtttggaatttgaacttcgtcgtgcgcattaaagtgggaaacgccccaatggggtgtcctgacaaatattggggtccaccataccgacctgcgccc

SEQ ID NO: 687 - DNA, 5985 bp, Emericella nidulans
gacacgcgatgctccaagtatcccagagagatctcccactggaataaggacttgtacttgaagagatcgttattctttatgtaactttgctgcgcaagcttttagcatgatgggctctgttgtagttttcaccacaccgcactggaataatggcaacccagattgtctcgggaagttcatcaaagtagtagtattttgctagagcacggtttaccgcgtcaaggggacgatttatgacagaaactaacactgtaggctgtgtgtttctttgtatctgatgttttttgaattcgttaaggagctgcgttccaggtaatttcggatgaccttcgtaataccttccagattgtaattggccagcactcgtagtgggaaagcagagatagaataattgagatcgcgcatagtccatgctgaaatgattgctaattggatgtgattgctcagcgagcgatgagacctcgcttcgacttttttcagcggcagtggaatccgaaggatgacgatgctgaccagcttgagaatcaatgagaaggtctgtctatatctttctctcaagaaaacaatatatctttatgaaaaagttttattctctgagatcttcagatggtagtatccgtctaccccgcatttgtagtaataaagcattatatcctgcttatttcacatggtgtccatatgtctatgggcaagccattgggagagagccgagtcggtcttcacgtatgtgaggcagtgttagactatgactactttactcagatcaggagtgttcgcccagtgggagtaaaatttgttgatggcggactagagacgaatcgacagatacagagtgccagcggaagagcgttactatgtgtttgagattaatttcaggcatgtttagactatatcatatctaggctagtagcatgtaactcgaaggtaccgttcgcaagtcagatagccttcgagatacttgaacggttgaggtcctatcaatcatggttcatgaaggatccaactgtgttcgatttaatctttccgcgagacgagattggttggaccaaactagtcgacgtaatctgacaagaaattgcttgcctaatctcaggcatctgacctcatttgttatcctggtggttgcttactctcaagtgtgatcccactggggctgtgttccgatgtcgacgtccacacaaacacgtttataaagggtacccctaaccaggggataatacaacgagtaacaacgggttttcattcaaatccagtctttcctgatatattttccgagtctcccgccctaagaggacttgagagaattggtactacgcccctccgccaaattctctgtttccatgacggactcgtttgcttactgctgacggcgtcaaagacatcacattctctgaacccttccttttcttacagcaagatccagttagggtgaagtgactagtgactggttcacggtagagtgacgcggctctgcttttgggttgggttgaaagtcaatttgttggcttcaagatacccaagttgactgcttctgcaagcatctgctcgctccaactctgcttctttaactttgtctgctagaggagggaaaatcaatccccgccgaaatgtcggccgcttcttcgaacgccgaggctcaggacgcgtccaagtactgggttgctccagcaaggaacttcaggacctctgctcgattgcacttacagcacttcctctttcaaaacactatcggctttctcctggaaccggccgtgggcaaggccgtgacagcctcatcgcagcccttgaagattgctgacctcgcttgtggcaacggcgtctggctaacagagctgcactcccaacttgcgaagaacaacatctctgttcagctagacggctttgacatcaaccccgtgaatttcccaaacccagccttcctaccagcctcagtcagtttccgtcagcttgatatttttgccaagccacttcctgcggaactgctcggcgtctatgatattgttcacattcgagcatttgggagcatcattctcgactcaaacctggcaccgatcttgacagctgccttcgagcttctgaagcccggtggcttcattcagtgggaagagactcgaggcgataggtggatcgttgagtctccttccgcacaggtgtccacgacggcctgcgacagcattgtccagattctcctgggcggcatgcaacagagggggattcaaaacgactggatcgatgcccttgacacacatctaaaccaatttggctttcagaatgctcgactactagtgcaggaaaagaggaagcacgacttcaagggctggactgaagattacctgatggtgtgggaggaactcgccgactatttcccttcaaaagcgcaggcgccagatgtgtcattttcgcgcgaggcgtggattagcctatttgcgaatgccgtcaaagagaccgaggaaggtgttgtggtgcaccagggacgagtcataactgctgtcggtcagaagcctctgtgaatttcggctttgcaagtactagcaatgaatatgcagcggaaagttctgtgcctaagcttaaaatagccagcttaaaatagccagaatgcaagaattcggtgtcgtgagagcattttcaatggatgatgtatgctatatgttggtaagcgtatatagatatgtcgtcatacaattggggctgcgtaacaagcaagtaatacagctgggaaaaaactcctagtcactctcccagatgacatgcagggtcgtcaaactccgcaatacgaagtcgacgccttacatgccggattctcacttgcatagagtgaattattgggaaggagtgcaatgagccgccaaagccaccgtatgttcagaaaatgcagcttgctgtaggaaggttgagcgagaccgtccactagacacgagagtaaacggtacgatctcacattagaactccagatactaaagacaacaggcatcatggcgccctctaacggcaaaagatcgagaatctttcaagatacgccggctaatcatcagtccactgcaataaggggagatgtggggtgtattcccagtacggaatccagcgttttcccagtcaagagcagctatttcatactcttcttcatttatgacacgacctttccaacaaggacattctctctgtagagatctctgttggtaaatgtgaatgcatgcttgcgaagtgctgatgggaggtgacgagcaagaagagaaaactttgcctatttgaatcccccacacaatttccgagcaaagtacaacggctctaccgaattcttcttttatataaaaaacttgtagtagcgttgcattttattgcaagaaaagaaattcctacgcagaacaagtccttggttggtattgccatataacccgggcattggcagagcccctatgaagatgtattgcaattatccaacaattacatttatttgcctcaatcaccaaaagccacaccaacccctgagaaatactggagacatattccattttaagatatagtttatcctgcttacagtacataaggtacagtagtggcgccacgatgttgagctgttcttaaacaaatactagggaatatcccttatttttggtcacaggtagacattccttcgcaacacatttgtctgtgaatattacgaggcgcccaccatagtctgttttttttttttgagagggtgattgttgcccgttcaatctcattgtgatccagaagaggttctggtaatttgcgagcatctcgataataagggagagcggcacagttggaggattgatttctcaatgaagagtactctgactacagctggtgaaaagttaagcatgcggctcgcagttaatgccagagcacaagttcccttctgcctgcacttgggctagccttgatcattatctagccaactggcaccgaaactaacattagggcacgcagaccacagccaactataagacaaggttaatcaagagctacatcagcgggatgctttaaacagcacatccgccacggccggggtggattcaattgcgaagattggccggtaacggaatctatattcggcgacagtggccagtcacctttcccgaacttctggaacctgaagatgatgcttgacatgaaggatcctgatctttagacggcattttatgttatacactacttagcgaatggcaccaagctcggaacaactccattgtgctccagttctcgctcactgttcagagtcggtactgatcggaggtagactgaagtgatcaagaaagtcttgaaatgtagacatatctgggtatatttccatcgaccagaaagctattcatgaagtgacgtaacagcaagcacgaaacatttaaggtccgtgtagccgctcaccatctagcattaggaattatagttgagtgaagatatggcagaccattgaagtcagcacaatttcgttgtctgcagggacttgaaaagtatggatgcgccgacggcagagtttgagccttcagtgttgtgtgcccagccatcacttcgcaaagctcctagctattatcagtggtaaacttgtgtctgggctcctggcagcattccgaggtctaggcccatggaccctgggatagggtataaggatcacgtggtaacatctcaactgacacggccgacatgaaatatgcataatggacgcggaaaaggaattttcaaaccgcttaaatcccaggatactttctttgctttatcagactgactgcggcatgaccatctgtcgcccaaatgaccccaccattgtatgtcgtgagattcaacgaacaattgcaaggatgcgagatgccggtgagatgccggtgagctgcaatatggagtttaaagcagtctactcgtgaatcatcgcatacatcgccacctgaatcaatcgatagcatggaacccaaagcgtgcgtagacaacgcggctatgcccatcaacagcttctagccatgccgggacctgtccttcttcgcctggtcaaaggatatctgcacaaacgccgggctttgcctacggtatcgaactcacaataagctctgcagcggcaacaggaagacgaacgtttgtatcaacgcgatttacttgtctcatttgtcctagattcgcccaatgggttccagataccagcgcttgggccgacagggattctttgcagtaaaatagcgtacagacgtgctactcgttctggaatcaagatgatttggccgacggctgcctgtaaaatgagggacatcgaatccttattcaatgacaagggaattacgttaggatctgggatggccgctggggactatgtgctcttgagctactgactatgaccgcgaagcgttccttcgccctcctccacatgctgtctttcacgtcattatcagtatccctaaatgtcatacgaatcgtgaaaataatattataaaattaaaactattaaaatgctatatgaaataaatactatacaaaaaggtatggataacgctattgaacaaccgaaacatcacttcaacaccatctcttccctaacctccttctacattctctgcaacctcctccaaaaagtccggaattttatatcgaagtcgatgctcagcctctacagcaatccagcaggtgaaggcaattgcatcctcagtgagactacctgagtgaatcccatcgggattcagatgttcttcgtccttgagatcggagcgcttgctgttaacagcatcgacttgcgctacgaggttggtcaaccggtcgtgtccagtcttcgtaccctgcttatcagcttcatcaggaaaattgtagagactcagtttgcctagcaacatctttgacttgttcggaggaccaccggttttgatcgacctgcgagacccaagtatatgtttctcaaaggaggcgatgagggcgtggtcagacatgcgaataagctgataccatgcattattagtacaagaaatcgtcttgagtgtcgtagtcacc

SEQ ID NO: 688 - DNA, 3005 bp, Emericella nidulans
aacaacttttggatttcgaccacagctcacatctgttgcagtgtgcacagtcgtggaaccagccacggttgtcggctgtataacaaccagaattgccaacgctcttgcaggttaactttcacgacgaactcaataattgaccaaactcgacctgcattaaactcagaaacacgacttctatatgtttcagcctcgagcagctcgagtagttcgaacctcgggcggagcagtggctgagcgtgaggccgttgtagccgaagaaaacgggccaagcggcgacggactgtttcaagtcggccctaagtggatggggtgacctctttaatcttctgttatagaagcgccggcaaggctgagagcataatctgcgaccaaagaacccgtgaaaaagggacaacgaattgtcgcagagcatcttcgagaattgccagtcgcagtcgcagctcgcttggcatgtgcttacggacgtactccttatgcagagcagggttgctgctcggaatggttgggaagtgatcagcgatgaccactagacgcaagcgtcttatgaacccgtattctccgtcctgctcgcataattccttggtttttcgtcagaccgaatcagattaaggtgcaacttcttggacggagtaatgtctgagccacggttcgccattcatcgtaactcggataatgcccaggtattgatcgcccctgacccaacacaacgagagactttttcttcaggcagcgtgagtgggatagctagggagactgggtgaacagcattgtctttgttgctccggaactcaacgataattctttaaaaaaataacaggaatagcatgctcgcttcgataaaactctgcgagatgtggccaatgtggacatgatcttgttgccttgaggattgacggggcgaagatggaatcagaccccgtcactggaccctcgtgcggtgtgccccggcctgtttaaatgagcttaccttacagaaaccaggaaccgtaatttacctccgccagatccaagcgacaagcgctgtgattggccactagcaatagtctcattttaagtctcggtaaataaccgtcacagttcctcaatcaacaatctcccaccttgtcatcagaagctctcggatctcctcttcgtctcatctcacgcaactcttgaggccttcccttcctttctcacagttcgcgggactcctgcgactcttcatttcgttcttttgacttctcgcggcctggaagctcgttgtcattcttttatcttcggtcgatttccagctatcgccgaaatatatacatacttccgttctttcccaccaccttcacacattccttgacgcgcttgcgcctttttacaaccctaaacgcgctttacgcctaaattatacgacccagagggcgtccacgatatttaccggcctcatttactctcgatcagtcttcaatcgcacgtcgaacgaatccgcgctaagccgagataaggactaaagcacatgtctgtagattaacgacccttcaccttttgcggacagtgtatcagtagaggacgtagtatcctcagccaacgaaaaccatggttcacgcacaccatcacgaacacaaagtccgccttgaggagcgtgatccgaacccagatggggtcactgtctacgttacggcagagccgaccttcacgggtgagataggtggatattcaacccaaggacaggacgaccgtactagtgaagccaccgagactgagagtgccaccaaagctaccaatactgtcggtgttggtgcgccagtccagcaaacccgatcgactacacaagaggaggcgacaactacgacagccacagcgacagcgtccaaagatgaagagactacaactacgagtaaagggaccacaactacggatgcagctactaccaggactaagaccacaaccgtcgaccctactgaagtgacgaccactgcgactcaaactcaggatgacactgacgcaacgtcgatcacccagactacattgtcgacaatcacaaccagtgccacagactccgacggcagtgccacttctacctacgtcgccggccaatcgacttctactggatctagcgcggccactgttgactcgggctcgaatggtatttcttctggcgcgaaggcaggcattgcgattggagtcattcttggtgttggactgattgccgggttaatcttctttttcatttggaagaagaagaagaagaagaagcagcaacaaggtcagagtcttggagaaagcgatgcatttgcaggcaacgagaaaacatactcggcctacaatgcacctccttccccagctcccgcttcccagtccgtaaccacagccaacgcccctcaattgaatgttcggcctgtcactcagtttgctcccgacttgacccctattcagggtggtgccacgcccgtgtccgcagtcagtgctgctggagcccttggttcagcagctgccctctcgcgcaacctcactggaaactccccgccccaaactccccagtctggtgttagcggccgcgatccctttggcgacccagtcaacccatttggcgcccatgcagaggttcagtcgcgtccttctactgccggtaacaacccaggaggcggcccggctcctgtttcatcggtttctccaatctcatcggtggctatgcctacagctgtgccttctccgactgttgccgccgccgctgtccctctgcctccttccccttctgatcctaattctcccggacctgtgtcacctacgactgcctcaaaagcaggtaatgagtccacaactgctgctgctgctgctgctgctgctgctgcagtggctggggccgctgccgttggggctgccgctcaaggctctgagaatgacactagtcgtcctggatcctctgactcggacgcctcatacatccctgctcctaccgctcctaactccaatgtggtcgaccctgttgtagcccccactgctgctgctgcttcgcgctctgagccatggcc

SEQ ID NO: 689 - DNA, 2385 bp, Emericella nidulans
tatgatatacacatacgatttaggtgacactatagaatactaggatccattatgagatgcgtaagtttgctacattgctcagccttatcttccatgatccgaaacttcagctgttagaagacctaccacaattcgcatgaaaccgtcggcgtacgtccgaacggcatcaatcagttggtgatatatctcggttgacgacgaataagtccctggtacggcagtcgggtgcaatgtctgaaaaaatggaagagataccgctgtgattgttatagaaccaagatgagtccactggtatatcgcactgtagagctgttcagctgcagctatcgtgcaaagaaaccaaggatttcctccaaaatactggtcttcaggatagcgaccaatggcaatagcctgatcctggctacggtctgcgttgatatcatatagatcgcgaaacgcatcaaccactctgtaatgattagccaaagcccgggcagagcatggctggaaagtgacatcgtcacattccgagcgaggactgaatgtgtgaataacccccaacaaggtgctagcgtcctttccggttcttccggtatctaagttgctgcgaataaacctccctgtccaaaacgattgcaacaagcacaagacttgtggtgcctgagactcgcactctgcacacgaagaccctatactccgagcaaacaaacttgcctctgtcagggcacgataagtgactgctagggtaaagaacgagcgtccgtaaagatcttcccacaagtctacccaggtaagaatattacttaattaatcagtcagagcggaactcaccgaatccagactgattccagtattcagtcaagtacgagatatcattgtgcaccacgggccacacggtatttgcagccagctggtgatatccctggctctgccaggcgtcagtcacattggcaccctgaagagcaccgtgcgtaccaatagccaccacccgaactcaatcattgtagttgctcgcaaagcaggtccgtcccgttggggtcgaccccatgagcccgcaaatgccgtctcctcggccgtgaatttgcctcgcccaggcctcgtccatccgccagtcctccgctcggattctccaccccttgtatgcgagcctgagatgatatccagtcttggataataggtaaaagatcagagtcacccgccctgaacatttccaccagtgttttgaatactagactcgaatctcgcgtccatgtgtagaaatcttcgtgaatcaacaattagaaactggtctatatgctcatgaaacctgggtcaacttacagtcagggtccgaccgacttgggcttgcaactagcacgcccgcagcggctccctcggcccatctgcccttgtcgccgatcaagtcaagaagtgcagtgcgagcaatgttggcctcactggggagccaaatatcaaggtcgccagctgccaaggtttgttgaagagggcggggtccgtgtgttacccagagagtcacgactccaaggataaagaactgggtatagagcgagaggaaagccatcctcgcttcagtgaatgatatataaactcgtatattatatcgcttgttctagcaacctgcaattcgatcaaaaacgaggtgaaggatgctcagggacgctgatgttggggaaggaggggtctgagagtgccaggtgattcaacctcaagtgatacgctctgcctcacttctccagcccaagctaactgcaaagaagcgtgatggcgacctgcaccggtaaacctatcgctcgataccgtccatctccacttatatgatgaggaaaacgtcgtttggtcaagcaaatacatatggcctacgttaatactggaaaaaatgttgcggagaacataatcgggtcccttacttatccttcacactgcggccatacatttagcaactctagtcgctcgctcgttccaagattatatacagggctgcacagcgggtgcgaaacatggccggtggacgcgctcccaccagcctggtgcaaaggctggagataacatagggctctgagagcttttcctggctgtcggcgctatttttattaacaacgggaatgctgaaggatgtgccacagagtccagcaaggacagcggctctggaagtcatcgaacatcctcggggtcgcacgacgaaggtcttccacaaacactcttatcgcggcggcgtatacctagaaaggacgggcaacgcgatggttcagccgaggtcaggtcaaccacgagcagggcaatcgagaccagagcaatgtgagcctccattcctcagactcatcggtgaacggaagaatgcacatggtgcaaaagtgctgcgatattcgtcttcgatcggcgggataagctcatgatcgtctgcag

SEQ ID NO: 690 - DNA, 5481 bp, Emericella nidulans
ccgctatagtctcgtggttctaaatgcagtgaccgccacgtgcacagatccagcacgacttctgacgcaaatatagatgatgtctctgcagcagtctccaggctctatactcagactgtactcgcttggaagacggctgaatttgtcttggtgttgcaatatctggtgttgttgatgccatataaacttcgcccttgtggggaaaagttctcggccagtctccgatctcgtatccgtcccgccaagagaccgaagagagaaaaattcaacgaaaatattgagactcacagacaagggttcaagctgtgcgttgccatctgcaggcattgctcatctttctccgagaaataaacagagtcgagatcgggcctcagcaagatcgcaatggcaacaatgcattcaccggtcatgtcagctgaaactcagggtccactagccccgcgggctgtcgacgagaaagctatcgcgataaatgggatcgatgccctaggcgaagaagccaggcccattgaccctgaagttgagcggcgggtgttgaggaagatagacctctttctgatgcccgccatggtgatcggtgcgtggccgttcgtcagttatatgggctaggctggcttttgggctaaccgttctacaaagggtacggcctggtgtactatgacaaggtatgtgattagctacctttcattctcattttcattttcatttttttttttttgcgggaatatcagaatcaatgtcattgacttttgatccaggcgatcctcggcagcgctgctctctttggcatgactacagacctccagctatcggtcacagatacctctgtcagcccgccaactactgatacgtctagactcagctgggcaacttcgatcttctactttggtcaacttgctggctcctatccgatgacatacaccctgcagcattttcagacgaaacatgtcctggggccggttgtcatgctgtgggcgatcatctgcgctgccacggctggtgtgacgacatggcaggggctctatgcccagcggttctttttaggtaagtagcgctcctacggcatagatggagtttggcagaaatgtttatcctgacggtgcaggcttcactgagtccatcatccccaccgggttcatggtgacggtcagtggttactatacgcaaagagagcagtcgtcgcgccagagctggtggttctccgggactggctggttcactatcataggcggtgctttcaactatggctttgcgcagatcgacggtggcgcattaaaaccatggcagtacatatacgtcttcgctggggtgcttacgttcctcttcggcatctggtgctttttcctcccgaacgacccgttgaatgcgtggttcctcacccctgaggaacgacttgtggcagtagagagactccgagccagccagaccggcgtcaagaaccaaacggtcaagaagggacagctcagggaggcgattcttgatatcaagatctggctcgttgccctgaccatggctgctgcgtatggacccctcttcttcgccattcttacacctttctacttcttgtgagcttgtaaaggaacacacactgacaaatgtaggtataccgtcaacggcgccgtctccggattcggtccactcatcgtctccacgttcggctactcttccctcgaaagcatccttttccagtttccgctcggcggcctctcggcgttcggaatcattgggactggctggctatgttctcgataccgcaacatccgtgtcctctcactcgttctctgcagtctccctgtgatcgccggcttcgtcatgatctggaagtccagctggggccacaagccggtgactccggtcgctgggtactcgctcatcgggttcttcgggcctgttgtgggtctcacaatttcgctcggtgctagtaacgttgctggcgagacgaagaagagcttcatggcggcggcagtatttgtggcgtactgtgtagggaacattgttgggccgcagttaatccatagtcagcagaaagctgcgcattaccctgatttatggactggccttataatctggtatgtcttaggttggaatgaaatagctaggtggttgactgctgactcttttagttattgcattactatcctctctgcctcggtgctgtgtgtgctgtggttccgcgaaaacaggcgccgggaggcgcttaacttagatgaaagcgaagctgatcgacttgcttttaaggatcttacagacaaagagaccttgcatttcagatatgtgtactaggtttgtatatgtgttgaagttgggctgttgggtagtaaccctaggtctccaggactgcagcataacaagcgataatacaaaatcgccagacgacaggccatatatcagccgggatatatctggataattaacgtgatcttaatattatcagaggagtaatataggcaactatataaaacttggcaacccacgtggagcctcccagttggtcccaccattgcgtcatacgaccgtaacccatctgtataacatcgttttatattcttcgacaatgattccaccctcttggccgaattccagtccagatccaatgaacatcgccaaggctgacccaggtaaagaagaatgagcctcgcccgcttcaagcacctcccgcgcgccacccagggacctatcaaatgcccctacaagggcgctgccctgctcggcaacgccaactacaacaagggctctgcccattccgagcgtgagcggcgcgaattcaacttgcacggactactgccacccaatatccagacattggacgaacaggtggagcgggcataccagcagtacaaaagccgtcccgatgacctggcgaaaaacaccttcatggcgagcatgaagtcgcaaaaccaggtgctttactaccggctgctgcagactcatctcaaggagatgttcagcgtcatctacacgccgacggaggcggatgcgatccagaactactcacggctgttccggaagcctgaagggtgctatctgagtatccgtgaccatggtgagaaagagatcgatgagtgtttcgctaacttcagcggtggggatgacgtggattatatagttgttagcgacggggagcaggtatgccctaggcaaggcttttgttaacactcagggaaagggtgacggtgctgacagtggcagatcctcgggataggcgatcagggcgtcggggcgatcctgatatctgtcgcgaagctggtcatcaccactgcctgtgctggcatccatccatcaagacagctccctgtagtgttggattgtgggacgaataatgaggagctactcaacgataagctctacttgggtctgcggcaacggcgcgcacaaggggaggaatacgataagtttgtggataaatttgtgaggatggccaggaagaggtttcccaatgcctatatccacttgtatgccactttaacccgccgtggaagataagactgacagatgcagtgaggactttggtctccaaaacgccaaacgtatccttgacagataccgctcacaattaccttgcttcaacgacgatattcagggcaccggttgtgtcacgctggctgccctcatggccggactccatgttagcaatgtcaagctaaaagatgtcagagtcgtgtgctatggctctggatctgcaggcactggcatcgcagatcagattagcgatgccattgccaccgaggcaggtttctctaaaagtgatgccttgaagcagatttggtatgtcgcagttcgctagttctacccgtgtatagcacaacccggttactgacatcttcaggtgcattgataaacaaggcctactgctgaaatctcaaggcgacgcactcacagccagccagaaatatttcgcaaaagaagacaatgaatggcctgagggtcaagatattgatctttattccgtcatcaagcacgtcaagccccatgttctgatcgggacatccaccaaacctgggtcttttacagaggagaccatccgcgagatggcaaaacatgtcgaccgcccaataatcttccccctcagtaacccgacgagattgcatgaggctcagccgcaggatatcaccaagtggacggacgggaaagccctgattgcgactggcagtcctttcccgcctgtagagtacaacggcaccaagacggaaatcggtatgccttctgaatatctcctatcctcattatcagattcatgtacttgaggctaatagtatcagccgaatgcaataactcaaccgccttccccggtattgggctcggagctgtcctctcacgagccagccgcctatctgagaagatggtcgtcgcagcttcaaaggcactagcagcaaaggctccagcgctggaagatccaaacaagccacttcttccagacgttgagaatgtcagagagttgagtttgaatgtcgccaaggcagttattcagacggcagtgaaggaaggattggcccaggaagagggcattccagaggacgagaaggatttggaagactggatacgggctcagatgtgggaggcaacctatcgggatttggagaaggctgattaaagcatgccaggcagaagctcgtggtatattgcgttggtttagtagtaacgacaatcccaactaacgtaatcaagttgtgctgctataataagacatgaataatccaacccaccaataaccttgggtcaacggaatacttaggatatagctactgagcgtattggcactggagggaaaatacgaggcagattcgcaccatcctgccgcggtggacatgtcagtcgaattgctaagtaattctagaatctaagcctgcttgctctgatactccgcctcgccatcccgattatcatgagcagagaccggcataggggtgacggcaccgatctcttcgacttcagcaggcatgattgcgttcaagagcatagcaacactatccgattattgattagcaccttgctttgtcacaagagattggaaggaagacttacaatgccgtgaccgcaaaccccgtctcaagcacgagctcgatcgcattttcaaacccctccaggtctctattctcggtctgagggaatacattcccaaaccaagtgggcaccagcgtcgccccgtatcccagggccattgacgcggtgaggataaaccgatttcgccttgtgaacggcgccttggccacgatcgcctgtccgctaataacgaccgaagcgaagagaaacgtcttcatcccgcccatgacactgttgggtatggcaacaatggctgcagcgaatttagcaaagataccggctactatcaatatcagacagcagcagtatccggcccagcggtttgcgcagcgagtgagggcaatcacgccgttgttctgcgcaaaggtcgtcatgggggtcattgtcgcaagggcagcgactaccgagttgatcccgtctgctaggacggcgccctggatg

SEQ ID NO: 691 - DNA, 1870 bp, Emericella nidulans
gggcctttacgtaatctgccgggacggacgggttatcggactataggcatatcttcgcggtttttcccggatgcaatacactgagcatgctgagacacgacaaaaccagtctatcgaagctcaccctcgtcggcgagcccgccaaaatcccgggcgatttccccaacactgttgctgtatcggtgaaaggccgtctagtttgtgttggaacaacgggaactatggccggtgtatcttgcacgacgtatgacaagcatggtctagggagtttcgacgacctacgcccgttcgagcttggccagagtacgccgccagttgggccagcaaatactgtatctcaggtcctcttctctgccgatgaatctgtcctctatgccacggttaagggggacggaactgcgaacaatacgggccatctctccgttttcccagttctttatggcgattcgcctgagacacctcctaccctgtcaagggaagacacccggagctcgcccaacggcaccggtcttctcttcggctcggccatcatcccctcgtcggacactatccttgtgacggatcctggatttggggctgcggttttgtccgtcaacaggtcgactcacgaagccgggttagtggccaagactataattcccggccaaacagcgacctgctgggcagcgtactcagccgagacaaacagtatcttcgtaacggatgttgctgtcaaccggcttgtcgagctggatgctgtcgatgcgagaattttgcgaattaccagtctatttaaccatgatcctggtctcgtggatctcgtcgtcgtggacaggcttgtttatgcgctgtctcctggaaatggcactacggatgcagctatcacggtctttgatattgaaaagaaccagcaggttcagcactattctctgaaagcgcttggtgtgggaccggctgcgatgggcatggcttatctcgagctatgaaggcctgttgtagtacgagcgtgaatgttgactgttgaattccactcgagatacttcccctggttccttgctattatactctcttgtttatattactcgttctccctgccaacagcttcgtgtgttcatcggtacagtttctaagagtttgtaccttcccgaacaaaggtctacataactcgatattgctgcttctcagggccaacaccaggaagcccgttaaatgagggaaggccaattttctttttagtcacaaacaatgtataaaagctggctctggctttgtaagaagttgtctgaactaccgagattaaaccagcctgtgagagttcttgtcccgaacatctgccgtgtttcctcggtctaattgtctcaagaaatggaccaatctgtgccttttcaaatcacgcgcaaggtcgaacgtcttggaagtctcagatatgccgagcatgcagtaccgatagagcacttcttatttccggataatgcgaacgtatgcggttgtcccatctgccgacgacaaaagctgtctcaactgggagccagaccgaggtgcgaagatctaccttacgacaagagcggcattttccaacagtctggacagtcataagaataggaatgactccgcctgtcacttttttatgttccagttgacatgcctactcttttagtctcaggtacctctacacccattaaccacaaccatgacgaagtggcatatcccagcgctcatctgcattgttcatacaaccctctgtctagcagcaggcaatgggccctatgacgccgtatgtttctcctttctcttctaatatgttcattcctgaagcccagtctatctaacaagacaatcatcttaacgtgcagtcgtattcatcgaccgagcttgcaaacacacgatttca

SEQ ID NO: 692 - DNA, 3021 bp, Emericella nidulans
gaatcagttcgcgactaatcttaactccggaatcccgatcctacgccagaggatgggtggtgccatgctcgcgagccctaccggaacaacaatgtgatcgtccaatctatgcccgcagctaaaggcagcacctgaaagtgaacaagctccatcgtcgaaagttactgaccattaagagcccgcacgtgtgtgttttctttacaactcgactgctttagttctcatgatcctaggatctgcaaccggtgcaccgcctttggataacagccgttccatcagttattggcatgtgccacttgcctagctggtacaatgtatattgggtgtcaacgagcctcctgggcaggttgggcaagaggagcaaacgacgatcttatcagtcatccggcggcataatggcaaccgttctctgggtttgcgtcaatgctgatccgcgtgatgggaaggttgcagtctgctctgtaaattatgcttcaacatgacagcatcatgacccccggctcggctgtccacgactcgatccggactcaccgcgattcgtgagcccgatatctccgactaggcgccgacaatcatgaaaccaggccggcttgtcagattctcaacctgccatcctgaatgatcttggcattggtgcaagatgtaaagttatggcatggaaaataggaaagcgagatcgctgttcacgggatgccgagcctgctcgagcatgtggtatgtctaggtggaacacagttgaaggcgtgtcgtgcatctagatcatccagatcttccatctatgcgctgagggctgtaccacagaaacatcttggcatttcacggctacggctactggaaagtgccacgaactgtgaggtatcttccgacattttggacacggaccgcctccgctgcagtacggggtacattcggggataaagttggaaggccttatttccggtcaggattagaaagcataatcagagaagggcgaaaacattctagaaaacgaagctcacagaaaccagcacaaacttgcgtttagcggccgggtatttaggcgtcgaggctcggaccagaggattgataatgcatcgcttatcccagggaaccttgcataaggtcgattatgcgggctctcgtacactaagccggaatacgaagcccgagccatggatctagcttcttcataaccaggacaatcgccgcataaacaaccgcaatcttggcgctcattggagggctggccggcagtgctgtgcattaaaaatggccagatccgagtgggaaactatggccccagcttggagaagatgagggaggatcggtcatttaaataaataggagtcacccgacagcccaaagcatctcatgctacgctcgcagcttccaagccgatatctgactgaaggaatgtcgtccgcaacgctggcaaccgaggtcgaccgcgccgagaaaggagaaaatgggccgagtgagaacagcgacgagaaggtcgactgggacggccctgacgaccccgccaacccgatgaactggtcgaccagcaaaaagactgcgcagctggttttgatggccgcaaacacctttatcacgtaagtcctggacgggtggttcgcgcgacttgggacgggggtcaaaactaatgaagcgatggacagccctctcgcctcgtccatgttcgcgcctgggataaaaggcgtcatgatggaattccactcgagtgatacaatgctggcctccttcgtcgtttccgtatttgtcctggggtacgtggtcggcccgttcgtcacgtgcgccgctctcagaactatacgcgacgtcccgctctaccacgcctgtaacgtgatgtttctggtgttcaccaatcgcctgcgccgtcgccaaaacgctgccacagttgatcgtctttcgattgtttgctgcgttgccggcgtttgtccgatcacgatcggatcaggcacaattgccgatatgactctgcaggagaagcgcgccggcatcatggccatatgggcactggggcctatcctcggccccgtcgttgggcccgtcgctggagggttcctgtccgaggcggagggctggcgatgggtgttttgggttatcgcaatcacggtacgctcttccgcagtgtggaaattccaagaagaaagaaaaataaaacaactaaggtagtggctgtactgaccctttatatagaccggcgtaatcagcattggtgcgcttatcgcctaccgcgagtcatacgcgcccgtcctgcttgcccgcaaggctgcccgactgcgcaaggagccagggatcccgtccctgcggtccgtcctcgataccggccggaccccgaagcaggtctttgtcgacgccttcacgcgtccgatcaagttcctcttcctgtcgcccattgtcttcctcgtttcgctcttttccaccatctcctatgggtacctgtacctcatgtgcaccaccatcaccagtatcttcgagggccagtacggctgggctccttcaatcgcaggccttgcgtatctggaattcggtatcggtagtatggtcggcctcatcgttaccggtgcaatcgggaacaagatcgcggccgatcatacggccaagggtatattcaaaccggagtcccgtctgccgccgatgatctttgggtcgctggccatcccgatcgggcttttttggtacggctggagcgccgaggctaagacgcactggatcgtgccgattatcggtacgggcgtgttcgctgtgggattgatggttgtgttcatggttgccaacacgtatctcgtcgactcgtacctgctgcatgcggcctcggtcacggccgcgaacaccgcgctgcggtcgctcggcggtgcgctgctgccgctggcggggccagacatgtatgatgccctcggtctgggatgggggaactcgttgttggcgtttattgcattggcgatgtgtgcgtgtccggtgttattctggaagtacggagagatgattcgcacgcatccccggtttcagatccggttgtagtttggtttttccttg

SEQ ID NO: 693 - DNA, 5062 bp, Emericella nidulans
aagagagccaagtctccacatcccaagtccgctggtggtacgtctcgcaagttcctgtcagaaaagttgagccctgcaaaggcgcaggaagggacaaaaaagacgaccttggccgtttcaaccaccggccagccgaacgacctggccacgccgacccagataaaacgtgcatcaaacgcaagtagtctggctcccagtagcgcatcatatccccatcgccgtcactcttaccccaggcaaccccggccattgagcaccggtgcgagccatcgtaactcgctatcgccgtccccgctcactccaagaggctcatatcgacggtcttcagttggtctaaggggccgcaaatcgacgtcctcatctgtatcttccattcgaagtatccatcacggtcattctcgttcgaaagcttcgtccatatcctctaacagcattggttctgcgacgacaccaaccgctcgggttgcaaaatctcctcatacgtcggtcaaagtgttaccaacaaccccaggcgcatctgcgcgttttccaactaatatccggctagttcgaaatccaggccatgggctgcgagacttggatgagcctgatggtgtgcccacttcatcctacaatgaagctgctcctgcgcccttgttatattctccgtcgtcaagccttgttttcgctcggcgaaaacggtctactttcaaggggccaatgcttcatgttgctaatctagtggcatccggtggaatggcatcggaatgtcctaacggggatgtcagaatggacgttcccgctattaaagcagctcgacccacgacgcggaagagccagattatcgaggaagaagaggacccagaggacgaatatgaagaagtggatgcgttcactgggactgaggaagaacccgcctctcctaccggcgtagtcagctcagagctctcagattccgatcatgcccacagccgcggccagcccgtcctggaacctgctcctgatcttgactcaagccctcttcggcctccgcgctcctcttcgctgagaacaacgtcacgagacccggttctcggctctgacgattctgaccaagctgcgttgaatgcctctccaaaatccgtcgtatctgggaagcgcagcttatattctggtgttgacgctgcgaaatagcatctgtcccgtttaaaagacttcgttggcatggttagctagtcgttctgcactttatacccactttgcggctgctttttgcatttatggtgcacaaatgataacatgcctggcttttcatccacagcattgcacggctctgtcactcgtttttaaacctattctgacttttgagtttcggccattagatggccatgattaccatatacccctggcttccttgcactttcccgtcggatttcgaacattttaatccttcatgtactactggtggatagttttcacatttttgccttacctcgtcagctgcgatcttttgctcatatacttcgttgattgacattcatacaagcagtgcctcgaggctggtcctgagcaagcacaagaaatgatacctgtgcaatgcatctgtcgcctttcctgtttatatagatctagaactgagcctctgtttattttattgtatatattacacaggtgcccatgaaagctgttgcttgaattgtggatggcagtaaataattgtacctgatggaacacaattgaacgagatcgaattaggctgcgcaaacggcatgttgagctaccagttttgtcagccatcaacccagcgaccatacattcaagcaacgacgttggctgatataagcttaaagcggcaaggtctggggcgatgtagattgagtttgctgataaaccagttcaaataaaacagctatgaggagtcccagacttcgtttagctgggcgaatgataagtctcattgcatgttaatcacaaacatttgcagcgtattcgactaatccctgggcgtcaagctgccttcctttcccgcccagcatccgcacctcagtcctttatcgtccctcccttttctccctatctgtcttgtcttcacatatatatacttggctttatttttgcactcgacagacgctctgttcttttagggcgccatctaccaatatggcgtttgccacgataaattccgcaccaccgacacataccgcagcgcaaatatcgacccagatccctacgattgaggatgcctttggcgctgagcctgcgcctaagaagcgaatttacgatgcaatcggtccgtgctttttctcagacgcataattacagagcaattaacgctaatgaattgttccctctcaggatcaacctccccaatatatttcactatttgaagacattgctcggtatacctccagtctgcgaacgagaaatgcgaactccgttcagcccatccaagttgttcacgacgaacccgccgcgaaaaaacgcaagcttgaaaatggaatcggtcaggggactgggggcgctcaatcgctggctgatttgaaaacacacaaagctctacagttctacatgcaagacgtatcgtttgccatgccgcaaagaaagaagttgacactggagatcacggcgggaaataaatatcttcgggctaggaatcagacgtcgaaggaggtagagtttggcgtgccgctggacagagttcgtatgttgcttcaactctttgagctctcttgctctgtttcggcctgctgataccatacagaacaggtcttgtgcctccccgttccggagaagactcaacgacagttcaatttttgcattatcccccagtatgccgatgggatcaattcgcctccgaatggcgttcctgtcccggaggcagttatgtggacgatcaacgacgggcctgcgaaagctgcgttttcggggcacgggcaacaaattggaaaccaagatggcgaaacggccgaggacctagtgcgccaagtgttaaatgagaatctgtcacatacacaggttatacgcccatgtgcgcaggaatttgctagcgccatgccagagggccatcggaagggtgagatggcataccatgtcaaggccttccgtggaagtaaagaaggtatgtccctagaagtcgcgaagaggcgttggttaacgtgtctcacgtccaggctacctcttttttctgtccacgggaatcttctttgggtataagaagcctttgcttttctttgcctttgagaatatagactccatttcttacacctctgttctccagcggacgttcaatctgaacattgtggcgcgcgctacaggcagtgacgaaacacaagagtttgaattctccatgatcgaccaggcagactactccggcatcgacacctacatcaaaacgcacggcctgcaagatgccagcctcgcggaagcccgacgcgcaaagcgtacaatatcaacggggcaaagacagaagaaaatggcgaggctgccagtcaagaggcggaagagagtgagctgcagaaggcacaacgcgagctagaagaccaagaagatgaagaagaagaagactacgacccaggaagtgagggcgagacggagggcagcggctccagcagcgaggaaaactcagatgacgaccaggatgacgatgcggatggcaacttggtagcggaagagcttggaagtgaagcggaagacgttcctgaagatgagttgtaactgtaacgagcattgcacgtgtagatgcgtggggcgtctgcagtcagatcttgctgtatacctgattagatgttcttagagtgtacaggctgtccgggccacctagacaccggtggaattttcctattaagcctgctacaagttgaccgttgaccgttgatcgtggcatgtctctggacagtgaacatatccacgtaatcgatagagacccgtcatcgacccgtccaaggcacagaaggacaggaactaaacgcggtgatgggtcactaccccgtacacaccccgttggaaggccgtttcaagcagaggatagacaacagaagcagcctcaattgggcgctatttggcggtgggtcatgcgaggtagacgtgtcatataggataagccctgtggcaactcagcaaggttgtcgaaggataagggtgcagtacgtgtatgtatgcaactaggagcattcagcaggtacgcggtctgtcagttccgtcttggtgcctgactggatctgaagagataaacaatgacataattgatggggagcgagggttctggatgagatcagtctcatttaacaggcatcaaaaaatcaagataaactatggagactgagacacccagtcgtggaccgcaacccaattgcctagatgccagtattattaccactgcaccgtaaccgggccccgttagcggtaatttaaggtatcgaatctagcccagcgaacagggggactccgtagaactagaccagacttggaagaaaacttctcctgtcaaagctcagtagtactctctaagttgtggctgatttcggggggtattattttaattggcagaataattttgatgagcattccagtgagagtcaaaagagtcaatacgatcggcaaggctccctggatagtcactgcagtaacatatctgatcccttgcaaaggtaggacaaggaactctatcagctcaataaaatcttcctactcactagatactcctctggtgcagggactgggagacagcggctatttggccagagagctttattgccaagatcgccgtcgaggaattggagaaaagggaaggaggatctggcttgggccgggcttttcaagcccatcaaccctttgccaaagctgacggcaacagagcttatgaagaggctgattgcttttacgagctcacatatgcaaagcaaatggattaatttacaatagaaacaatagttcgtgatccattatcaacattaatctgtagccatgatagtctccttgggcctggtcggtcgggatcgataccgcaaagttaccgccatctgtcactcggtttctccaggctcgggctctcgctctctcgctcttcgcctctctcccctttgcctctctccctcacggacttcgt

SEQ ID NO: 694 - DNA, 5660 bp, Emericella nidulans
agaagagcttggcgaagttgtaagttatacagcctgatttttatgtagcccagctaaccagccatagccgttgaaaaatgaccggtggagaatccctaaatcaagatatgcctccaactcgacatatatcgcacaggaccctagactacggaaagaatacctagaccctgatttgatcgtggatgaagatatcaaaaagcgtctcatggatgatggcatggacgagctactagcgacacactttgcgcatttattcatccgcgacccaattgtcatcttctcggaggaccttgaagagctggatttgaacaaagccgatcactttgagaatctgcagtcgacaaactggcagcacatgcggttcaagccaccaccaccagagaaggacgacattggctggcgggttgagttccggtccatggaaatccagatgactgattttgaaaacgccgcattctccatcttcattgtgcttgtcactcgggccatcttgagtttcgacctcaatttctacattcctattcaacgcacagcagagaatatggaaacagcacatgcgcggaatgcagtgctagaccgaaagttctatttcaggaaagatcctttctctccgtcagttcgcaggcaccacaattcgtcaggtgacagcaatacctcttcagcaaacaacactccgcctccctctccgccgctcggccctgtcgaatatgaatttgagctgatgactatttctgacatcatcaacggctctgcggatggatcattccccggcttgattccccttgtggagtcgtatctgaacagtgtcaacgtggacgttgagactcgttgttcgttggcgagatacctcgacttgatccggaaacgggcgaacggtactctctggaccggtgcgaagtggattcgcgagtttgtcgcacaacaccctgcctacaaacaggatagcgtagtctcagaggagatatgctacgatctcgtgaaagctgtggaagagatgagtgtcaaggaaggggcagacgggagcgttggatgggaaatgctcaaaggccggacggtctaaacgtatatatttggacatagacatgggtactctacgtatataccctgcccgtgcttcatctaagtacatagtgtgatcataagatgttgataagcccgtatcgggtcaccgtctcacgtccttctcccttctttccttcctttccaacctcacgtcatcgcagcagtcgaacagacccaattcatcatgttatcagagcagtaagattttctcctcctccgtcggccttctgcacgaatccgccagcgcagtaaccttccaccccccgttaagcttatgcaggatgaatagttccacaccgacgtggttcacaacaccattcaccttcgcccgaaaaggcgcccatacagctgccagattcccctcctcattcactttgacttcggcatccaaaattcgctcgttgatatcatggtccagtttggcggtgtactccacaaaggcgccgattgtgcagaagcgaggcattgtgggcgctggaggcctgagagacattcctcctgcgcggacgcagtatttctcgaactccgaggtgttcttggcattcagggaggagatgaagccttttattacggcgattatgcggttgatttcagagtctctcagattgtgggagagggtcgttggtatgggcacgtcgggcgtggttgacagggaggcgagtgaccagcccatttttgtcgaagggggccctagaggaatgctgaacctgaatataactgtaagcctgtgttgtcttgcttttctgaagcaatgctttgaagaggtactgactggtacttttggctgaaatattcttgcatatcaatagctcctggatggtagatacgtcaacaagaggtatgccagggccagactgtgcaggctggcagttgtttccttgtacctgtgaagtgtacacccgtatatactgcagattcccgttaacacgcacgaaaagcacgtactactccggcgttgtctcctcgacccagctccctctctatcccattttctggccgcaaaggttcagagaacatcagcgatagccatacacgtctgtctagaccttgcggtctagatattgctgagtttcaagggtggacaaacaaaaatagaaagaaaagttgttcagcgatgtgctaccactacgcgctatcggcttgtctggagacgtcgtacagttcactcaactcacgacggagatggttcgtacgagcgtcgatgcaagtaatgcattcgtctggggtctgacgagagtcgaagtcagtgacacacgctcgagcactttgggagctacaggatgccaattccgattgcaccgagagtgccgtgtgaccgtgactatcccatatcagcttgagctattgcagagtgattgatttgcttctgactagccttgtgagccccagatctgaactctccatacattgatgcccagtgcgatataaatgactggccttagataataactttgggatatgctatgacaagatggtgttacgttctaggagacgagcatgcgtactgcacactggatactagtattttgaccagcccgcttgtgtcgtgtgaagccggctggctattatagccaaacatcataggctttttgccactgtacgctgtgaatatccatccctgcagagacaaatggggaagagtcaggccggcaaacccgggctgccatattgagggcgagatctcgtatacctatcagcgagtcatcttcgtggaatgcaagacaatcgcgtcaagggtctctggtagtccgatattgagcagacattacatgcaaatccagcgccaccaagcaagaatacatgcggtgacacaaacatcgggatccaggtgcccatacgcctacgcttctagtgtctcctaccgatagacaccattgtaccaacgtcaaaccgcctatctcattatgttgtctgaagttacaaaaggagacagggaaaatcccccgatggcattgaacgcctacaaagttctcgacctgaccactgccgaaggcataagaccattcttgctaggctaccacacaacttgtgagaatacatgcgtacccattgccattgtcccaaagagcttaaccttagtctggcatggctgcagcaagtggcatttgctgagaagtcgcaaacaagcatttactgaaagacctggatgacgaagtcactgaaacttttactaatgaaagtaatgcctacggctcttgcgaattctatggagacgctactataattgtccaacagataatacgtaagagaggcaatctgcgggtgatagctaagtatacctctcagtttcgagggctcgactgaccatatatgtgaaataagatggttcatttatgccagcaatacccgtgcagcaaacaaactgtcctcgatctctacaccttcctggcagtcgtctcagtaactggacgaggagctgatatgaacgtttggattcgtaaaccagaatccccctatcgttccaagtctaccaaagactcgaaaaggaggtcaggcccggtcctagtcaaagagcaaaaaaaaaccataccaatccacacagaaataagacgaggcggtatagtgccattgcctgagtctacacgactgactcaagggttaccgaaggccggagacagcgggacctcatctgagcaccagattaatcagaggagcattacaccatacgatccatatgcaagaattggagcaaacgccggtcttgcctggtatgggccgctcaatgttgttcttcggccgatagttcaagatgactgtctgtcagtcttttgggtagcatggagcaggtgccaggcctggacagtagacggagtgctatatcactgtgtctaatattattgactccacacgggacagttccacgggagcggaatgagattaaattggactctggacgactccgtacttaataatatattgaattccaggccatataccttggttaattacttattacggagtcccattccggcgcttgcaccgaagatcgaaatcacccacccctaacccgatcgactcgagatcgattggaatcttctgctcatcttgagtttattattagcttcgtctgttattcgtgttcaaacttacgagcccactcttatttatctagttgcagtactctccctatagatggctagatggcagtttcttaattagcagatgggggacacggcacacgagtcagtcgatcaactcgctctactccgtccccagcgcccacaacctctgtatccgcctcactggtggccggcagactggcttgtagagtaagttttcgattcgagctcactctgggctggctccttccaaattcctctgttcctggaacaccgaacactttttgttcccgcttggaccactctgtgtgctttgtacatcgccacgtgtgcttaatgttccggaaaaagtgaaaggtgagacaacggcgccttagaagacagatttaggcctcggagcgccttaccttatcttccatccggcatccggattcctcgtcctgccgctatggagccggagttcagggacggagccgttgtgacttgttgacgctgtaggtatggaacccctgtagctactattgaattcttgctggtcagtagcatttcgtcaccgtttccagcctgaggtggacgtgtctcctgcactctctggcccagtatactctgaagagtgatgctgcctgttggaggtcattctgctgaatcggtgggaaggctttatggctaattgctggagttcgcgaacgttgcgttcgatttccacgtgggcattatcagcgatcgggaccccatcgctctcgtatttacgactgcagcggccagtagtttacatggtgcacgaagagtttcagcctttggtgtactttggctgacactttggcggaggcgtataacagactacctgtattgtaaccgtacgatgctccgtacaatgtagcatcatccatgatctctcacataagctggcgtgacttcggtgccaaattctgatttcgtcgttagccttgggaaggcaggtcagttcgcaaaagaccctgcagggatgtgtatgcactaaatcagatacgtacgcgtacatacaacagtccatagccactgctgtataggggtgagtttatcggctgacccattgagacgcgacgcacggtgccccgtaattttcgggatatgaaatccaggagaactaccgtagttcctgcgctccatattcgtggtatgatgaagaatccatcgagcgggaaataccccgtcgcgacgcacacaatctagtttaaacaatggatgacggaggctgagcaactccaagtagtatcttgcttctcctgaaaaaccaaaccctatacccgttctgttagcatctccgacgactctgactcctagagcaggtcagcaacaagggttaacaaatgatttctcactgtagcccatcttatggtacattttcctttcactcttgtcgcgaagccaaggtacggggaatggatggccgagatccgcaatctggccgaatagtcgccgttgaggttgctcgttgagcaggggcggccagcggaccactgcggatgtgcggcgggataggctgatcattgaccgtta

SEQ ID NO: 695 - DNA, 1226 bp, Emericella nidulans
gagagctgataaggggggattgctgggttaaaagagaagaggggttcggtcaggctcgtaattctgattatagtgcgattagcgctatccacagatttggtaagtctaatagctcgtattcgaacatcgcacatcctccaccatgtcaatttcgtccgtaatctgcctgcggaatgtattgccatcgcgagcgggatcggccctacatgcatcaatgctacgcgggatatcattctcaaaagcgcataactccctaatatcgctggaaagcacatttattagggaagggtcttcggctatctgtcttgtcctacgattgtccagatgacatcaagttgtcaattaaaagccagcagggcttgctggtgaatgatgggtataatacgtgatgatcccggtcgtctcgatggtctcttggaatttgcccaagccctaatactctaactttgttttgacaggcacccatacaaattcgatcatttcatcctaatacataagagctctactgtctactgataaatgatttcgcccatcaaaggacccctcggcgacctgctgatcgccatcacaagttcatcccgcttctcctcattccgcacacccaagtgggaccaaatctcctcctctatatcctgtaaggcgttccccgatcttctcccggggaagaactcgtcaggtatcgtcgttatgatctggtagaatctgctctcaaagatgacggtccggtctggcccgccaccgtcgaaaatggctaggatacggtactcgtccggcgctatgcctccttccacgaggtactcgtcatggtgagcggatattgtcgctccctgatctgtctcagaccctgattcaggatatcccaattgccgagcaacgtcttccgcgctgtatagattaggcagatctttgacccagatggcgatgatcatgatgtccgctcggttctgtgtctgcaggatttggcgccagtgcatggcgcgaagccaacttccgaaggagacaaatggagtagcagttccgacgccggcgagatggttgtggaagtcattgaccgtcgcgccaccggagcctctccgcgcccgtgggaggatgtagccatcgtacaaactggcgttgctgcggtgttcggcgcggaagaggacgcatggcctctcttcttccgtaaggggttggaaggcatcttgattctggctgtcaagcagtaagcaggcagggatgttggtgtg

SEQ ID NO: 696 - DNA, 5139 bp, Emericella nidulans
caactactggcggtcccatactatataaaataacgtatacaggtaaatgtggccgccgggattatttctcctcaccatcctctctactctgccgcctatgccccttctcctcgagaagctttaccctcataggattgacagcaccaagaagggcatagcatagcctctgtaactccaacctcgccagcgaaacaaatatatccagactcctcatagacttacatgctggtccacctctagctggtcgacatcctcctaaacttgtaaatacttcaggttcgggccctcgcttcgatgcgaaacatgccacatcatctcgcctagtcataggacctggctgccctagcgagagtctcgatgccgcagcatccacagaggatggatgcttagattgagcaacattaggtgccccgggtttctgatataaaataaggataccagcaccatttatacgggagtgtatgcttaccaagagggtattcctacttgggattcgcgttgtgctactgctgtcgactccgttgctagcttgagtgttcggtacgtacccctgccatatctatcctgtgctatctgggctgttaaattagaaatcaagggtaatacaacccttgcaatcaccagacaaaaccttcaagagaattgatacgagtctcttataaaccaagtttattacctgcgagtataagcgcaaaagcgctgatataccctcttcggcagtgcctacactccaaaatacgggatgtgggaggtatagataatttaaatatgctagacctctaactagcatttcttttcggggtaagcgatgttgtctacccatggccagaaggcagggcaattgtctaccttgtcttgctatagccacgtggaggatgttcgtgtccacgtcatgtctcgtggcgaactggcgataacctcgggtacctaaatggatcgacatagttccagcactgcatcccacaaatcacaaaactcgacggtagacagtgggctatgcgtcttccagcactacttaaaccgcacgaaccccagagcaagcacgacctcacaatccattgcccttacagtagcaaccatgtctagccatccgtcaacgattcgcccacccctcgaccctgagctagccgtcgctcaaaaaagcttccccagaaccccgctacgcgaaagcctttctgcacgccgcaaggccgcaattctaacgtgggagtccataagcggcggcagagaggctttaatctcgcactcagaagtcgacatcccaggccccgcaggaacattacgcacttcagtcttgcgctcgacgaaagccgaacatcaagctcagccagcatcgaagactgtcggaattgtccattttcacggcggcggccacgtcacggccgatcggttcgttgggctcaacacgctcttcgacatcattgagaaactcggtgcggttgtggtatctgctgagtaccggctcgcccccgagcacccgcagccggcgcaggtcgaggattcttacgcggcattacgctgggcccactcccacgcctcggagcttggattcaaccccgataaactggtaacatgcggcggttccgcaggtggaaacctcacagcgggcgtctcgttacttgcacgagaccgtgccgggccgaagcttctcggccagatgcttttctatccttgggttgacgacgccacgacttctcattccatagaacagttcggtgatgttgcgccctggacaaaagacgataacgcgtatggtctcgacctcgcgcttggtaaaaaccgcgaatatgctagcatttattcactgcctgcgcgtgcagccgaaacacaacaaggtctgtcgggtcttccgccgacgtacctagatgtcggcgaggcggatgtctttcgggaccaggatatggagtttgcgggaaacctttggaaggcaggcgttcagacagagctgcatgtttggccaggggcgtggcatgcgtttgatacttttgcgccggaggcgagcgttagtaagagggcattcaaggcgagactggaatggctggagaagttgcttgaggccactgatgcaggcatttcagcgtagatctcagcattgtgataggatagagccgatagagagtatctcgagaatctaattatagctggagtctctgttacggttcgcgaattatttgcaattgcagcaaaatgccccagggtgtttgttgacgagagcccaacgcggagattatcgtctttggtaatcgaacgctcagaatgcaagtaaaagcgaacagagttgtcaaggtgagctaggcaggagatgatgccgagagaaaaattttttggaactatctcactgaacactagaaatgcgtagaccaatagatggaatcccttgacagttttagtaccacaaatgatgagtcgaggatgttgttttgtgttaagacgtacttggaaaggcgaatatgagtttttgagttctgtccaatctacgagttcttcgaggtggccaccggcgtccctcctgatacttgtacatatggcgtaaaggaacgctatggaggcttgataaatgatgagattgcttccgaagagagcctgtattcgaacggtgtaggcttaatcccgcataatcacatttaggtgaatctatttacaagtcacaggtctgagaagcatctgcatgagtgtaaggaaaagtatattgccaaagactatcaactaccttctttcctcaaggcttcagtcctcaatacatacgatgtgcagtactgtccttttacagcaactgaaatggttgtgccttggtcaagggaacagcaagtttacgctccaacgggtcatgaatcaccaccggtcatccaccggtctgagcaaaacattcttgcccgcccagtcatcatgcagagacttaatgatcaatccaccgcggcgtgctgcctcgtacaactgctcacaagcagtgcgtgcctctttccggtccttctccggtggggtctgcagctctaggcgcccgttctcatccggcatatagtacaatcaagcacgaacgcaagacgctcaagcctgggccaaaatactttgtttgagaatgcactgacccactccttccacagatctgactcacagagcagaacatggccgcggaaatggcggttggtcgggtttggcgggaagttggcgtaaagaccggatagggttgatggttccttggagactgcgccgacagatagattgagtgttttcaaagcaacaagctgtgacatggttttgggaaaaagactctctgggaaccatctgaaatcctgtctcagcgaagtcgagcggagggtgagggaggtgacggtcgccatgacatgcgaaggaacgcatcgagcgcatcattttcgatattatccagcgtacgtagatggctccccccacttgtaatgggtttggcttttggctcgcgcggggaattctctgtcagacaggaggcgttattcttctttgccatccactccttgcctagctggctcatattggttagctggatatcggattgacggctcaaatactggatcttggcttcgccacatccggtccatatgtaatagtttatcagatgtcggcccctcgaatcgtaactccatcgtgaagtacaggatcaaatgcttgatatgccctgcaggatatgcggcgatttggtgacctcaccacacacaccggacaacaccaaccgctcgagcggccattgcacaggcatatgtttgtcattgaggtcttcgttgaagccgctgttgatctccagctcgcaggtgctggtgaagtggtcacagagaatggcccattctgtgttagacggtggctcttcttcgattaagagctttgtggtattttctagggatgattctgagttgtgcaagaagtggctcgcagtgctcggtcgcacatttgttgtcgacatgaggtccttgcacagtgactctctgagctgggagttcaagagtctgctcgcaatccatggtgttactggtgatccttggcggggaagtggagtttccggagctggtgctgttctgctgagctgaagtcagctttttgtgtcctggctcagaaaagcgactcgccaccaggatcatgaactgtagactatatcccgatgctgtcggcttctggctacgaatgtgttggcctttaggagtgacttgaccttggtgactcaggtctgagcgtgtcacatgataatgcccctccacaccaacggcatcaagtatggcacaaaagatgtggcttatgcagcattcgccaagatcagtcttgtccatttgggtggagccccttgagaaaattgagatatcaagtgcgataagcaaccctactgacacgtagctgtgtacagcggatgagctaactaagcaaactatggcctatcaaccctgccaggataaactatagacattcattatacaggaagattaacacaattcagactccaaaggcattcagtcagagtgaaacatataatcaatcagatagtagacaaactaggatcgggaagctcataagccctagcccactcctccatcgtctgcacgggcctgactcccagatcctctgcagtcaaaactctcacgccgggctcgacccattcctgtacaggcacaaactgaaagtaatccatcatgagtgcaaactcctcggcccatcttggccacggccacagcgcatcgtagtcatcacgagggatgcggacaagctgtaccattttccccctcgctctcgcccactcctcaacccacttccttgccgtccattgtgcaatgctggcaatcaccattgcgccgttcctgaccttctccgccgggcttttgacgatagcctcgataaaaggtgtcagattcatcacgtctccaataaaaggtataactgtctccggatcataggtggtgaactgtacatatttccccgcggtctcaatccagtagggcctgagtgaggcaatctggaggttatttgcatagaaacagacgagtaagaatgtggtctttgcatgtaggtccggatagtccgcgcggattgtctgctccacttcgaacttgccctcgaagtggtacaccgggtattcctcttttgttttgcccaaggtactccagatgtagtgttccagcgtcg

SEQ ID NO: 697 - DNA, 1492 bp, Emericella nidulans
tgtccttcactagtatctggatttggcgctggagctgaatctgcagcgggatcgggggatacagttatagaggcagggggagcgacaacctcctcttcttccactgtcggacattcgtcatcaatatcttcatcatcatcctcatcctcgaggtcatcatcgtagagttcatcgtcatcgtcatcgtcttcatcgtcaacaagctcatcctcctggagcaagacctctccctttccaaactcgtactccccatagatatcctcatcatcttcgctttcactctccagcacctcctcgagataccgcttcataccctgcttggcctcatatagagaccgcgcaaggagacggtggtggccgagacatcgacggagatctgggtcgcccctggctgcctcagcggagagtttttgcctggagatggttgcgatgcgggagaaggggggttcggccgccgttgtagagttgggacttaagctagtcgctttgccggcggcaaggataggtgggatccgggtgtttggctttgtgggatgggaggtcgccgttgggaggagaaaggccgggcgttccatttttactgagagtaactgtatgattgtgctgttgtaaaagcaaatgtagaagggtaaggtcgtatgatgcagtcgtaaatataaaatatgtccaagaagataaaaagaaaatcaagataagttaagatactagaacagacaatcaatgcccgcttgtttgtctgcctgttttcttagtttctagtcagagaaaatcatcctttatatcctgtttttctcaagtcaagattgagatagcctgatcctcaaactttcgaatcggccgatccaacccgaaacctcaactccagtcagtccactggcatgacgaaagctaagggcacgccatccccagctaggcgcagctcccaactatgactatgtggatcgggcaatactagtgctttcgccacggatcgtccatgtcagagctaaagtataatacttcgattcgaaaggtctagagtgctgtcggcgtttatggtaggctggccccgactggagtggcggatagcggggtgagtctagcctagtgccgtcatgcactgtacacttactggcttccggctaggccgggttctgaagaaatttgctgattcgatggagcagagataaggtgagcttgggttggtgaaccatggatgcagggctcggggatttcccggctcggcggcttcgaatatcattttatggagtacatagggctagaatctgcatggggatatggattatattcggaatatcagattgtacaggacttaggtggagaaaactggcctggtattaggtgaagacaattcatatcaggcaagagagcagggctaggcccgttaaccacagtgaagccatctgtatagccatcccactccctgtctctgcatctcccacttcatccccgtcgccaatgccactcccaccccgtttcacagccgtggcat

SEQ ID NO: 698 - DNA, 2813 bp, Emericella nidulans
ctatttcaataaatgccttgaatcttgaacatggctgctatccgccaagccgactcggacctgggtgttgggttccctcgtccatgccacgttcatcggctacggctaggaagagtcatagcaatcgacaagaccatggcggcggcggttctgggaagaagccaagcaaacaaaagtcaagtgggcatttaaacgcaacatacaacggtactgctggatccgaaactggaccgtcttcgcaggtcgactggccatcgcatcgttctggagaccaatcgatcgcagcagccgcagccaaatctaacggaccggtcgatagcttgaaagcggacaccaacggacgtggttatccgggcggatatgcgaagggaaatgcagacatgtcttacgggcagacgaatggtggcgtgtcgccgaatggtggactcgccgggccggcttcacgtcgtacggataagtcggtcactgggaccaagaggacaacttcgaatgcgtcggtgaatccgttccagctggcatccaccattctccgatcgtgtccaatgtacgacactatcgccatcttgatctttctgcttcagctcccgcctatggttctcactttggttcaattcttgtttgcgtccttgacatttatgcctcccagcggcaccgcttctggatccttcacctccaacttcgatattttccagggacccgccggaaccccctcgctcggtaccatgattgcaatggatggtttctgcctgcttgtatggggcctctttatgtggacgtgggcccagaattttgctctcgatttagcccatgtccaggttgccatcactctgggcggtggaggtgcagggaaaaatggtggtgtcaatgcgctctgcgtcggtattgttctgattctgcatctcatacgcagcaaaggaatacaggattttgtcgtcggccatcttgtttcagcaaaaatcattagccccgatttactgtcgcattattcttacctcatgcccgccgaattcaagcgcaccgaatcgcaatcatccccgagttggatccggagcctgcttgctgtacatattctggcccaggcgggtactgcgatggcgaggcgatcgatgactaaaaataggaccccggccccatcacgatcaggcaaacgcgtggatacagaagcgtctgccggctcacaaacccagatcgactcggcgttcgaatccgcggccagcgtttcttcctatctaggccccgacgggcagattatcactgccgcgcataaggacggcagggatcgtttgatatcggcaaaaaaacgacgaaggcaggcaaatcaagtcaggagccggcaacctttttgggctgcactggcaagcacaaaagtcacggtcatgagggagtatgaacattctagggccttgtcaaaaactgctagaggacttgctacgacggaggacgatcttcaaggcgtttctttggacgatggacttgtttggattacgtatgtggatagctcgacgattaagtttgcagctggggattttgcgtcttcggacgaccattccgcgtcaggtgtctgcgaagcaggccgtgtgagcagcgaggatgcggagccgttttacgtctgcgtcaatggtgcgccatgggcaacggtggtcatcactaaagagcatgatccttcaaaagcgtctaatacaatctattggcgaggcgagatatcaggtcttgcacccaattgcgcgtatacttgctcttttgttaaatgcgatacggatgaggaaatctgcgccatgagtgtcaagacccctgcggccaatgatgcagaacaaggtaagatattcgttctatggtttccgattcgtctcgatgtggtctaatttgtgccttccatagccaattcggtgccggcccctccgcaaccctcatatcgaccatcctccccaacaaccacgctgaagaactcgatcatcaatgctgaggcgaaactgaacgaaaagcgtgctcgactccgaaaggccaaaaatgaccacaagcttgctatttctaagatcaagaaggagctggacaattacaccaatcgtcttcagagcggcacggatgaaaacaggcagaagcaacgctctcttcaattggaaaggaacattcgacaaactgaagaggctaccgccgctctggacaaccagatcgataacttgggtaatgttcctgacgatgagtatcaggagtgggttgaacagaaggcaaagtacgaacgtgaattggagctcctcaaatccgccaaggcagagattgctgccacgcgtaccgccaatgctcgcgagttatcttcattggaatccgagttgaactctaccacgcaacggcgcgaacgtctgcagggtcgccgaaccagagtgaatgagcagtacgaacggatcatctcggccaacgcacagggtctcaatgagcgagagcgccgcgctgcagagcagtttgcccgggaacaagatcagtcgaagttggagcaaagtttcaacgaacaattcgcgagcatcagtcaatcagtgcaggattatcagctgcgcaccagtcaattgtggcaacagtgtaccgccgtcgaacaagccctccagcagcagttgctcatggagcccgctccgctaacacccgaaggcgagctgcccggtactagtacgtttgccgacgcgcccagcgtgcccattgggcacattggcgtcaaatatgccaagccaccgctcgctactaggacagagctttccgccgctcaagtctagtcctctgcagcactatgcttcgccaattggaactgctccgtctcatccgactag

SEQ ID NO: 699 - DNA, 1621 bp, Emericella nidulans
cagctcacagggctctcaacgtctccggaagctaaatgatgactccctgatccgtcacaaatggtcagcttttcattaaatagtcgcagggctgatgcacaggtcaaactcaatttgacagccgtcacccctgaatggccgaaagctgcacagcaaaagaaattccggaatcgacatgaagcgagaggcgccggggcactcctgaatcttgacgggccgagactgagagcttccagaggcttgtgcaggtttccagcttctgcagcgaggattgccttgttcgggcagtgatcagacgccagagggtcaaagtcgcttacaggcctgtggtgccgccccctcaaggacgataatacgagcggcgatcgaggaagtcaagctcgagacaaagttggccgttaggggtggatatgcggcttcatttcccctgcgaacatcgtcattattcctcagaacctgccatgtgggcgcaaagtcaaattaacaagcatcacccctgaaacggtgagcttgctagacaattagtaaagggaaggatctccctgcctcgtctaaagcttttactctgccgggcttggtgccgttattttcggctccttgagctatcagtgctaatttgacggggctccactttgcgtgaacggttgctccacagttcggccgttgacattgttttgcccatcgcaatcactgtcacatttgccctgagctgcatcgagtacaccattagcgctcctgattcttcggataacagctctgcactaactcggttatattactactggatcctcgaccgtgtttcaggaatggtttgcttcttcgaatctcgtatatactggtgtccatggttgcttcattcggcattgatgactttctcatctatggctcttactagcatcagacagctctgccgataacgttatgaggggttggtaagtgggatattttcttgctcgatgtgcaatgttggttgattactctaaccgtgcctcgtatccctcagtctgacgtgccgccaacgccatctcaaatgttagtcctcgacatcctcaactctcatccatatttatccatatttataacgtgagtaggtgataagaccggaactgaatgccttcgctgccagagatcgggacggcagtgcatccctgcgccagcgaagccagaggaggttgccttccgacatggccagaatccgtctatgcggtccgaaggcccgcctcgctatggtgaaagtgacttgtcttttccggaagaccaagtttggatagatgtgccgactcaatgtgtgtccccctcctcaagttgaagcccagtgcttttaatcatgtctaactgatacagtatgctttgaggacgagacggaacagacagcctctgactatcacgttgtctccgcggaagcgtcaccaactgtccctagaggaatgcgcaaggctcgactcagcacttcaacctcgaccataccctcaataccgtctcctactcaggcgtttcttcctccaggtggtgcacgcaggatctctaacccacgaaccttatcgctggactcccttatgccaccggatactccacgcgataatccaaaactggcagattttaatgaagcgtttcttctacg

SEQ ID NO: 700 - DNA, 2424 bp, Emericella nidulans
cacgcgtttgactattgtagactgggtggattgcatttgcagtatatcataagtctgaatagctcattgtgtatctagatgagtctagagatcccgagctgatctggctcctttcgcttgagttgagtgagatttgggcattccaagacagacattgatgtcataactggtttttgaggactgcagaagattacgcagcaacgtcgtcaaacctgatgagtctgtctgtctcgtgcttccttcctgcatacctttccaagaattcggagtccatataccgctgacgtgtatgggattttggtccccaagtgtgaatgggccgtccacatgccgacggttgagtttcagatcctaatgcaactccagtgtaacgaggaccatatcgcgataatagagagggtgctcgccatgccatcctgatccccgagaattcatgacgctctctgagtggcggcattgcagtgactgtccagaattctatatggcttcgagagaaacagctgcgggtctcgggatctctagcaaacgcatctatgttgtctcggccaaaataccccttcctacccagcagctcctaggcaagggctaagcccccttacttgcatagagtcgtacaatcgtagcacgatctcgggatttacttcagggtctgacagcgggaattcccttaaaccgcagatagatacatatgcccctctttgtctcttctgcatacgaaaggatcaagagaagggacatacttggtgatctggtatcccaatctacacttttagccgcgccagaaacggattccaggtgtatttgacggaaccccatactggcataaggagctctcccagccgctcattcagtgatctggcttttgcaccagcaacagtcctgattcctggcgctaatcgggcttttaaatcctgtaaggcgggcacgatacattttgccaaaggtagagaacatacagcctacagcagcagatgcaatcatgcgctttattccctccttaaccacgttggctctcatatcgcgcgcaggaatctttgtctcagcagtcataacagtcggcttgaacgcaagatttctgacgaacacgtcttgggctaatgacctgctaatctacattatcgtcattgcatccttcagtgtcctagcatgtctcgtcccgccataccctaatttcctcttcgacggcttctgggcattggcaagtgcactgtgtcaggctttcgcgctggtcattcaggtgagtactactactcatactcgactgactcggccgacgtgagctcgtccggttttgacgtttcgctaataagatgcctgaatagtttaccgactctccctgctatggcttccgaccggaaagcgaggatgaggtgacttgctcaacgtataaggctggaactgcatttgtgttcttgatggcgtcaggatgggggactagtgcgcttcttgtgggtgtcccctccctagattggatattgaatgtcctcggcctcaggctgacgggaaaatacagggcctcatccgcattataggtgtcgtcttcaacatcggccaaactaacaggcatttgtacgcattgatccgttcagtggactgacgacctgacctttcatgtgctgacagcgagttatcaattcagaccgccagtacaggaaacgccgaacgagagagaagcctttggaaaagacaggcatgaagagaaagtacagtcgcttgaaagcataaaggaaaggggcaagatcaagttcgtcttttcttctttcggatgaaatttgctgatattccagggggttcgggaatgatcatttcgcgcggtactttatctgctatgggattctcggcgctgtcctgcctgccatactgctccccattctgcaagtcattattccctccatctagagagaggtgtgagctaatcctttgttcgaaccagaatcatatacgccgtcccggccttcacaacctacctcctcaacgagagccccctgccttccctgcaagtctctctccttacccctacgaacgacagcatcctgttctccgcctccagtgagatcaaagtccctgacgcgctgaccatgcatcttgactcgatgcatgcagagatcttccggccgcaacccagagggagacccaaggaggacctgataccgcttgcagaggttgacatctccaagctacacttcaagggaaaccagaagatcactatgaagaatcagacgctgaaactcggggacgtgggccagttcgcaagattagttgaggatgccgcgtaccactcgacgttccggactgcgatgcacgcgaagaccaaggtcgggctggcagggctgacgacgagtattgatataacgaaggaagtagagatgcctggtatgtggcagcactacacgaaatttttcactttcctacgcaaacaggcgc

SEQ ID NO: 701 - DNA, 1998 bp, Emericella nidulans
gagcccgcacatcttctatccatcgccgcatgtgctctaaactgagtcactccgagcttgaatctttcgtctcctcatcgtctttggcctccgcccttttgccctcttcatccttctcttcactcgcagcaggcccggcctgctgcagcagcatcttccgaaacatctctgccgcctcgaacgagtacttgcacttcatgcgcacttcccggccataccgatacataaccagtgggaacggcgcacaggccaaggtcagaaacgctgggatcgaagacgcccagtggatgcccaggttatggtacatcttcgcagtgaatagcgggaagactgcgccgataatggatcggaagatcgccgccgcagcgagaacagacgccgcgtagatggtgtacgagtcgatgaggtagttcatgatcgggaggatcacaagcacgcatccaaatccaaacggcgcagagagtatgatgctgaccgaccagtggatactagggtaatttgtccacgcgaacgcaaacatcccgattgggagcgcgattccgccgacgattgctggtggaagacgagcctcagctgccggggggaggcgcgactcagccatggatgctttgaacagtctcgtgtatcgcccgttgttgtcccagatcgcgtagatgagtccgaagataatgcccaccatgatccccaagaaggataggccgccgatgccctcagaccagccgcgctgttcgttatagacaatcggcatggcgctcataaacatgtagactgtcccgtagatgatggccatatagagggacgcaataagcacgattggctccaggaagaggaagatccagggtcggaaaagggcgcgcttgaaaacctccctcggggtttttggcccctggttcttttcgagtacgctcacgtatactttcccatctgcctgagcaagcttctttgcacggcgctgcaggaggacgggcccgtacgtctcgggcacgaagatcacgcctagaattccaacaacgccaatgaagatggtgcagagaccctggacccaacgccaccctgcgccttgcgagacgaatccaccgataatgggcccaaggatcgggccgaggaacggggcgacgcagtagagagtcagggctaggccccgctgggctggcgggaagatatcggcgatggtgccgccggagttgacaagcggcgagcccccaaaggtgccggcgaagaagcgcaggatcagtaatgtagcaatgttctggctacctgctgagcctcccataaacgctaccattgcgatgtgcgtgatgatccagagcatttgtcttccatacagttcagatctgatcatgttagcagcggctgagtttgcctacgtcgactatactggtacacttactgttcgacagaatatagtcagcaattaacaatttaaacttaggattgttgacttaccaatggaccccaaagggcaggtccaattgcgaaccctagcacaaaaagggaaagccccagggtgaagacctcggtgctgatgtcaaagtcttggaataccttggcggcagaaaccgagtatgcagaggaagtaaaagtcacagcaaagacagagaaagtgacgattgtagtagtaaaccattttcgagcttcaccccagctcatagggttgccagggtcgtccttgtggaattccacgacaaacgggctgtcctcggtgcctgagccatcgtacgtgtggcttcgctccgagtcggggacgatcgccttggacgcggcagccatggctaagatattttaagatatatcaaggactgaatataccagccagtatagccacaggtcctaggctttatagcgagttcagctcaggacggatcaggcatacaagcggatcgctccgtggttggttgcctttcccgggcggaattgcttctcattggtcaaattacaaaatctcatccaatgaacagcttttccgtacagggctagacggacctgtctctaattggt

SEQ ID NO: 702 - DNA, 3045 bp, Emericella nidulans
catcatccacattactcccgcggtcaaagttcccttttcttacaaatgccggcctgcagcttctctcttccttactcgcgctgaatccaacttcgcggcctaccgccgccaaatgtctttcacatccatatttccgggaagatcctcggcctaaacctaaggaaatgtttccgacgttcccgtccaaagctggcatggaaagaagacgacgtcgggaaaccccagaagctccaaagcggggacaggaagctccgaagttagatttcgctagtgtattcggtggtcagtctgctggtgattatggggaaagcggggctgggtttaccttgcgcttgggataggcgagtttatatattgtctgatagactctatcgcgcaaaccacgcttaccagtgtgaccctataccaaaccagccgaaactagtagctattatctacaaatattactaacaatgaatgtaatcaggattcgcacttctgcgaaaatgatcgtgtggagtttgatctgagctccactaaagaatttatcacgcgaagtagttccgctgtatcaatgtgtagtcgacagaatactcgtcacttgcgtcgctggaatgggggtgcctgcgatatgcctcggggttgctgttgtcaaccgcatttgtgccctggaaccccgcgttttctcgcgtatccggtttgcgttcaatgctgaacagattcttcaggatgcctatcggaaggttggctagattgcaagctcctaacctgatgtatgtacgtgtagcaagctaatattctaaatcagtatgacgggaagccatatatcattgcccgaggagatgccgactaccttgtccttccctcagagtccgtgactgagcttaatcgtcttcctgcgtcgatcattaactcccgaatgtgccatgcatactcgatgaccgggcatctgaacggtatgaacgtcgtccttaagagcaaccttcacgtgaaaacactcctgaatcggattactccggctctaccggcattcctgggaccggccagtgctcgcatgcaagcaaccatgcaggaaacatttcctagtgtaagcagttggacgacgatcgaaccgctggatctggtcgttggttgcgtgagcagggcgatcacactggcggctgttggagagccttggtgcgatgataccgagctcgtgaatttgacattcgagcatacaaagctagtgttcaccgtgatgtttgcaatgcgcctggtgccggcagcactgcaaccagtgctcgtctggatgctaccccacaagtggcgtctacaaaaatctctccaaaggctggagtcgttcatagttccaatcgtccaagagtgcaaggccgcaaaaccccgacctgcgaccgagaggccttctaccctacttgcgtggatggtagcggaggccacgaacgacgtggaagaagacccgtacgtactcacagagctcctggcggctcttgctgctgggggcacctacagctcggcaaactttatcgtcagcgttatcctcgatttgatagccaatccacaattcttggatgagattcgggaagagatccgccaaaaacacgaggagcttcaaggtcggtgggactttgcagctttcaataatctgcccaagctagactccgcgttcaaagaaacaatacggctcacacccggcagcctcacgacctacagccgcgtaatgctccaggactatacactatcgactggtattactctcaagaagggacaatttatctgcgtttcaagctatgctcgggcaaaggatgacgagatatatcagaacgcaggaagttacgatgcgttacgggcttacaatgagagccagcaatatcacgcggcgcagcctttcaagggtgtgtaccaacaggaatttagatggggggctggccgttgggcttgcgctggacggcatctcgcgtctctgctggccaagttcattgtcgtgaaactattggatgagtatgagtttcagtttgttccagggagccatcgaccacccaactcggtttttcacgaatttgtgtttgtccatcctagcacaaggcttctaaccagacgcagggaagagaatctgggaatctgttgttggtaatgcgcagttgcttgcgaggccagggtatggagggggtggttggaaactgtatgggcaagccctaggataagcacgcctatcacatttgatggctgtagatcgttatcgtagtaccaatagaaatgtacctggctgctttatttccccaacaagacactacgctactgagtagcgccgaggccagccgagcgcaccaggagcctcctccctgtctgtccataggactggcccttgtcctgaaactaccccctaccagctacatcgacctgtaattggcagggtttgggaaacaagcagctgctgccttgaggccgccttaaggccgcctgcgaggatgacgtaaccagtctttagcgtctaactccgcgctgcaattcaatcccctccttctatcaccccactaggccctttgacagttcgttacagattttgtttatatttattccttgtcctcacgttggagtcggaggccccttctatattacccagtcactccacatataaccataaaccgctcgcttgacgccatccttcccgtatcccatttgaacatctagcatttgaattgtaactatgaccaaaccactcaccgtctggctcacgcgtaagtcccagtaaatagatgctgatctggtgaatttgccatgcgagtgagtacttggctgatctaagataataatgaatacagccccaggtccgaacccatggaaggtgagtgcaatgcgctattgcctagaacacaggctaacaatcctcaggtcatcacggtcctgaatgaactaggagtcccatacaatatccactcgttcaagtttgacgacgtgaagaaaccgccgttcatcaacatcaacccgaatggacgagttcccggttagttctctattctaccgcagctgcgtcagttacatgggctaactagagacaccaatcactgc

SEQ ID NO: 703 - DNA, 2893 bp, Emericella nidulans
ggggggccgaccccaaaaagggaagggggggggtttctcccccccccccccccataagacaggaattgtgtgccccggaaactccaaaggggaaaggttttatctctttcaacccaatttgcggtggcaaatggggaccggttcctggcttgggctaagggtgctagcccaggaggaaacgcatcccgggggtcttgggaaccccaacgggggccgggggggaaggaatgtgttcttgttaaccgagaaagggttggtccttccaggggattgggtggttggtggccggaacctctgatcgctgccaggggttttggggcagatccacggcatatctaccaggttggctcgggattgtctcggggccgtctctagcagagccaggcccccccgggatttgtagggtgaacaccgggccggtaccaccaagtcggtatgtaaaaggacgggtgggccggcaaacggagactggtacaggcaaggctgaattcgaggtccggcacaggcacggagagcagttgaaagctgcaggtcatcggcggagtatacgagtgggagaatcgagacaaggatacgccatgaatcaagcaacgaaccgtcgagaggctcagggaaggtttgcgtgcgaaagggcagaccagggtatgaacacagccagacccatggcagaatcgtcttggagctagggtagaagaggagaaggaaggtgagaggagagaagaggagagtaggaaggggagagggcgagatgagatgagatgatgccgaagaaaccaggcctgggaagcgtaaggcggagctgaccagacaaggcaaaaggggagcagcggtattctggtttccgggctgtattattgtcgtcgtttgtaccagagaaggctataaaagggaaataataaagataaattatctctgagggtttttgatactccgacaggtattaccaataataatcgtgaaagggctccagtagtccgtacccattttgattaatttatggcctcgttgctttacctctttcgccagcctgcagcctccgaagatggctgtctcttgcattcaactttccaccctaaaacattttttgaaagaaatatttgcccattggataccgtctggtcgctctgaccgtctcaatcaacaattctggtctctttaatctactggatttttcgggagattgcagaggcaagacgaataatattaggaagggggatgatagtacagccactagtctgagaaacggcgcgtttaatggggtcagtcgactcagtcgtgacctcttaagtcatgctggtagcactaatcgcgtagggcaacctaagaaccttgaagactatccacgggtcccggggtcttagaaatcatgtcagtcatgtcagtcatggttgacccgcatgccaacaatgagctctgtcatcctgaggcctagccctcaggaacgatggaaatttcaaatacagatcatgaatgacctccattttctggtctttctgtcttgagcgtctattgactgccattgtccaaattggctttcatagtatcaagatctgagtgtttgagcgtgatctgtcagtcaggtggtctcttggccaggcccccggccagccccagcccctgtaagagttgtatgtaacgagtaacaactgtaacaacccccaacctgtgccactcaaggctccactgcccggaaacttaagtgtgaaccacaaaatgtcacggcgatcgatgaatggacagtattgtacttcaaagcagccctctgagccagtccaccaacacggtgtttttatcctgagaagactaaatgtgatcgaagccgacctggtttttcccattgattgtatcaaatgccagtgagtaagccggagaatggggaagcaagattggacaccatgtgcctgaagaacttggcagtcgatacggctttcgtatccgaagttacgcccgaggagcctacgaacagccttcaggaaattggataccgtttgttgatggagcccttgtatgcactggagtcacagaagcacagcatctgttctaatttccggtcgttatctttgtgctctgtacgcctagtactctgtggactggtatgttatgaaagttgatgtgcgtggtagttaatgagaatgcgtggtccttaggagcaagtgttttcccaagcaatccccgcgctagacgcacccggtcatgaagctatgacatgctcagccacggcttgacgatattactccatgatgggaacagtggctatgaatatatgtaccaagagtagatgctggattatctatggactcggtacgagctgtcaagacacagattgtgttgttgcaacggccctgagtatgacggagtatatactgtaagtctccagtccgaacaaacgcgaacgaacttacttgggagaaaccaacgcgagaatccaagctggcgaaggactaatgcgaaccatgcagacttcagacagacagccgttcgacaccgagaatgtcgggtataataccgaaatacataaccacaatcgtcgcggatcgctcatcgacagtagatcacccgctggccgattgacattgcaaacatcaccttctacacagcttctaaacacctgaaggctcaagacgtagtagcatccccctcatcaactttgcgagttacagtgcggtatagaaccgagccgtcgggggccaaggataaagcagccagggtcaccgtggcattagcaggttaatggcccgagtccaagagttccaaatgctgtcttagaatatacgatggtatcgatctgacagcgaaacccactctaacaccctgccttttgccaccagtaagccgggtctccgtgctggctccttatttcatttgggtgtccgtgtcggcggaactggttatt

SEQ ID NO: 704 - DNA, 2489 bp, Emericella nidulans
atgtacagagtagatagacagcacatgtttaaagacttcggctcgtgagagctcagcaaacggtgtcagccagatttactcggtcgagaaaggcaagtggccgttcttgcacttactcagaagcctctatcatctgatggagatcgttcttgtcagtaccctgaagaatctgtcatgaaaagcggttgttgttgacccgtcgtcgttcctgggcctacctcgaagaatccagcatttggtgataccccaccttgttgagtctacgattagatacgggctgcgggttgcatgttccgccggcaccacttcgttcacgggaaactactactactggaccccgccgacaactagattccaggtacgaatactccgactattcataaaaacagtaagctatacggagtgtcagctcaccaaaaatccatgaatcccgcgtctggggcacggagtataagaacagtccttaaatacgatgtcccgaatccggagtcatcgccctgtacagcttgatacgtgcccctcactggatcgtatgcttctctcgaagccggccgaggctcaaagccctccaacgtcagcaccgccgttattgtaaccctattgatgttctgttccatactctgaaaatagaatacgttcagcccggtgcatcactagttggtcttctcagctcaacaaaacgcacggagatctggcttcgtctagcggtgggaacaggtattcaggctacagcgtagggtgcatactgcgaccaaaattaccgccgcgacgatccccaacactatgtcgtatcgataaagctccagtaggaattagaatctagacgctcaacaacagctcgactgaagctgacacccccaccgctccgtcggttccaggtcagactccagagcaattgactttgtacccgtatccatcggtatcagagggtcagtattgactccgttaccaggtacggagtacatcagcacacctttttgtttccccttcccctccgccccttcaccataatttatcttcatctggcaagccttttttttctcgccgacctcgcagacaaattattctcaacccccttctctttctatccatccttctctttctctccttcctatactctacatcgccgtcatccggggttacttcccataaacactgttcccctcctacctactcttttcgaccttatctaaataacctcctaatcctcccttcctctcacacacacacatacatacaatgtccgccaagtcgattttcgaggccgatggcaaggccatcctcaactaccacctcactcgcgcccccgtcatcaagccgactcctctccccccttccaacactcacaaccctcctcccaagctcgcctccctctacttccccgacgacctttccgtgaaggacgttctcgaccaggcggaggttacatacccatggctgctgacccccggatccaagttcgtggctaagccagaccaattgatcaagcgacgaggcaagagcggtctgctcgcgctgaacaagacttgggctgaagccagagaatggatcgaggctcgtgctacgaaggaacaacaggttgagaccgttgttggtgttctccgccatttcctcgttgagcccttcgttcctcacccccaggagaccgagtactacatcaacattcactccgtgcgtgaggtaaggaacattcttccgcactttctgaaactacgttcatagtctaacttttcttagggtgactggatcctcttcacccacgagggtggtgtcgatgttggtgacgttgatgctaaagcagagaagcttttgatccccgtcaaccttaagaactacccctccaacgaggaaatcgcttccgcacttctcagcaaagttcccaagggcattcacaacgtcttggttgactttatttctcgtctctacgctgtctacgttgactgccagttcacctaccttgagatcaaccctctcgttgtcatccccaacgccgatgctacttctgccgacgtccacttccttgacttggctgccaagcttgaccagactgctgagttcgagtgcggtaccaagtgggctgttgctcgtagcccggctaaccttggcctggccgctcttcccacatccgacaaggtcaacattgatgccggtcctcccatggagttccccgctcctttcggacgtgaattgagcaaggaggagaagttcatctcagacatggatgccaagactggtgcctctcttaagctcactgtcctgaaccccaacggccgtgtctggactctcgtcgctggtggtggtgcctccgtcgtctacgcggacgccattgcttccgctggtttcgttagcgagctcgccaactacggtgaatactccggtgctcccactgagactcagactttcaactacgcccgcaccattctcgacctgatgctgcgctctcccatccaccccgacggcaaggtcctgttttcgcgagtatatgccgc

SEQ ID NO: 705 - DNA, 7007 bp, Emericella nidulans
atagtggggagagatgaatacacacaagaaaggcaatgaaggaatctattgtcaactatataggtgtcaatcatcacatggcattggatccttagtaggctacattggtgtagttgatgcagtttcctcctgccctttatcctctgagcatattccacaacaccatgacctagaatatatcagtatatgcagggtatttataatctaaggtttcctcaaggttgcaatattttgcaaagttcaattgatgtatgagtatgattgattgttctctgaagctatcgctaacgatatctgatacgaatatatcatgttgagcctcgtgtcacgtgccacgtgatctgtatggcatgatctctggcccctggcctgatccctcgaggagttgtacattgaagaaggaacaactattgtcataaagatagagaatcaatcgtcctatggcatcctatccttagtaggctacgttcgtgtagttgatgcagcttccttctaccctttcccctttgagcattcataacaatatcatttgttattttgcccgacggtcgaccgcctgggtcacgagctatcatttacgccacaggccatcatcctgtgagccaggcattgggatatggcaacacccgtggtgctaatacagtcacggtgaatatttctatctaggacacaggtaagcttgttagctcacccttaaatccagccctgtgtgctctatgaaaactattaaggactgaatcctaatcaatctatttcgcatattcctgggaatggaggtattgatggcaagaatggggaccatattgtttttgctccaccttgttattccacaaaggaagaggtggagttgattgttgagcagacggcgcgtgttgttaaggatgtccttggttgatctctatataccaagttggttttgcgcagctgttcttttgctttcatttataagtctaatggtaacgtatcgatgcttcttacatgataatatggacgacaagtttatctctctcgagagtgaagtgaacccgtcccaaagttctgtttattccacattgctaactcatacccatgtcctagttgactagcaacaaagacacagcagttttattcaactaactaccaatgatcatatccctccaacagccataatttcagccgaccaagcaccccacacgaacttacaccaaaagagtgagctgaggctctgaactcagttgccctcgcaatcaactgcaccaccacagcattggtcctcattagtcttccagatacagttgttcgcctccgccttcacatcgcacggcacctcggtgaagtcgaagggcacacacgcctgcttatcattctggaagaggtcaagggcggctgtgtcgatgggcaagctcgaccccaaccatagtcaaacccacccaggcagtactttccgcaaggccacttggtcatggagaacttgccggcctgtgcaaaattatccgtcttgccgacgtggttcccgttcatggccgagttgagccagcggttcggaagcgccccattccccggggttgccgtggatgtccttgatgtaaatctgatcagccgggttgatggtctcgccggctttgcactcctcgtccttgcagagcttaaagcgtccggatttcaaagacatgctttcgggcgcggtgatgaaccagctgccgccgaagcccagacggtggccattctcgcctgtgaaggtgtagcatttacctgtgattgttaattccttttctttttcccttttttttctgttcacgaaggtatagggtaaggaataaactaggactgggcagtaggtgaggaataatacataccagtctccaaaccagaagagcatttagcaggagcacagattccattttcgtcctccttagtccccttgggacaagcgcattctccgttcttcagcaactttccgttctggcacactggatcatcagctttgcaggtgactccgtcataggtctcgccctccgggcagcatctatacccggttttctttgaaccggcaaggtcatgtgcattagcgcagcaatcaaaggccgtgtcaggagatccgacaagtctctgtccagagagacagcagccagcgaactttttgttgttgctgaggctgagcttcttgttgccgtcttggtcgtcgcagtcaatggaggtcttgaagccgtcctcggtccagctgatcgagttgccgtgaatggaccaagctccttggatttccttgactgggatattggtcgtgtaggtctttgcggtgaccaggggtgcggtggagagaaggatggtggttgcgagggacagggaaagggagatggatttcatcttggttgatatacttggtcgagacgtcgccagataaagatataagttttattgtttgttctgatgatgttggaataacgagaacagaagaagtgcgtactgtcctcttttatatccctcgaaacaaacaacttcatcatcggaacatcccagtctaccccatcgtcacaagtccttctccaatcgaatgacaatgcttctccaggccgccacggtcagcgcggccacctccttcggttccagggaatatccatgatcttcgtaacagaagcaaactgacgtcagtccccaaattccatggctggctgagctgagctgaatgtttgaagcccaagatgtgcttttctctcgtgttggcgcctccctgtggggatcctaggacttcggcatctatgtggaggtagacgcaacccagcaatccgcgtgatgcagcgaatgtcgcactgcccaaaggcagccagggttatcgagctaacatgttcatgtaggaagtcaggatttgtcaagcagctgaagaaaaatgatacatcaggaagttgctcaggcccacagtttgggctttctggctttcattttactgggtctttcccaagggagggaagtgtgcattcggtggcactgatgaagcataatgacctgctaatatagtactgcagaatctcaactgctttgttattattagtgaagataacataccacagtctttctaccgcggactatatggttcgttaaaagcaaaagccagagattaatagtgaaaaggattttattgcgaattgctagtattcctggaagggaagcgctttatcgttctcttatgtatcagtctatatattgcttaatatctagtgagaacgtgaatgccttcctttctgtaatttccatgcccaagccaagaacattgcttttctcgtctatgcatcatacagccaaataccgcactcatctccagccacaacggcgcgtgcattatagctattcctaaaagagttattacttactaacgtagatcagcaagccatgcatgaaattacataagtacttggaactatcctggcgcgaattggacagttattggcaggccgatgtccaagccagcgaaccggcaaacagggagtggtcacataattgaggcaggttcaaggcgcgtcagctcagctgcgcccatgggtggcgtgggtttgtttgtttccttctcgagagagccgatggagaactggctcggtctggcagagtgtctgccgtcataggcttctgtttagggtagtgagctgcggctttcgcatgaccggctctggggtggaggtgacagctagctggcccagaccaggttaaaggtcaagaactatgattgtctgcagagatcaaccatgctagctgctgggggtctggcatgcacactccaatgccgtagagtcaaggggtaatcaatgctacagtttcagtaacacccaactactgtctgcggactctaggctctatacggagtacagtagtatatagctcactgtagattcaatgtcctcctgtcatgccactttcatgtcattatcacttgcccctgtcatccgaccagtgcttatgcatcggaccagtacagtatgttatttgcattcttgactcctctaccgctgacttgtcatgtccatttcctcgcttccaattaatcttccgcagctgagctacagcgcttttcatgatcacatccccttcacctgcgtcatgcctctagaaaacccacaccataatgtgaaagtccctcatggattcctcgaagttatactaaaaagtagatcgtaccttaaatggttcaccgtacaatcattgaagttgattccaacgacaggaccggcccatcgccgactgctccaccagcaccccagcatcggaacactatttgcccaaagcccagcccgaacaggaccgtctcgccatggtgcaccacgtcttctccggaccactgttcctgactccgatctggacgggaaacgtctactcgataacggcaccaggtcaatggacgtcgctgacgccaacccgctcgcataggccatcaccggcatcgatatcatccccatcctgccgtcctgggtgactcatgaagattgatccacaagtagccctcagtataggttccgatgtacgatgaaactcctcctctcctccctagtaatcaaagtcgccaggtccagggcaatccccaaccccctatgatctccatttcaacttctgccttaccaccacgctgcctgccaagctcaatttgggacagaatgttcccattttttgtgcaggaagatccccaactgacatcatccacagcgccccaattcccaacctttgcttaacgagatcttcatcaaattcctggccaccgtgacactcttgcggtgccccattccatcatcagcaggttgctattgtaacccaaaacatggagaatttgggtgaatttgtctcaggatcatagggcgcagagcctgcagttctcgacatcttcaagcagagggacgatgtgacggtcaatcggtacgcgataggcattaaggaaggagccggaagctttgcatactgccgtgcaaggctagcggaactggctacgggggcgaggttgctgctccagaagattgcgctacggagggaacatgcgccagcggaacctaggcaaaggagtcggctaaatcctggaagtgcgcgagatgatacaggacagtccgtatttaaattgccaattacaggcaaggattgtgagatttccagtaactagtattattatatagtagaccagccatcgtcaatggggaggacggctccgttgatccgcgaggcctgatctgagcacaggaatacaatagtagacgctatttcgtctggcatcatgattgcacatccatctgcccggttggcatacacggcggaaagaacaggcttgattgtcgatgtggcctcctggtcaaaccgtgttaacgctattgagtatgccggtcaccacccctgttcatagttaggccccatattcatctgcgcgctaacttgaagaacgagatatcttacctcccgggcacagcacattgccgtatattctcccctttgaatctccaggcaacgttcttcgtcgccccaataaggccgtgcttacctatgctttgttagagctattctcgaatgatattcgccaaggaagggaaacgtactcgccgtatacgccacgcctgctgcggcaccgctcattccagccgggctcgccatgttcaaaataacgccagacttctgattcctcatctcccggataacctcttccatccgtctcaccggtgctgtaaggttcacagccataaaccgatcccagtccgcgtcagtgacggcgtcatataatatcaatctcatggaagcttgttacaagtactggagcatgcttaaaagtttctgcaatccttctcaaggcatatgctatgctatctctatcctctgtcttgttaactgtgtcagtaactatatagtattggttgaacagtctgagacaaagttactaaaattattaaactcagcagtatataccaggttttctctgtattgctgcttgaagaagttataaaactaacccaagactatattatcttgccttgcaaatatagacagcaaggtagttagaatagctgttggagactgcttttacttatccttgtagtcatagtaaaagtatggcaggctgtctggcttgattagctgtgtactgccacagccagttggttataattaatataaggatggtctttccagcacctgctgctgggtgttagtagtaggctatacacagttactattaggcaggacttacaggttgcatgcagctaaagaaacaagttgtctgatgctagccagtcttggaacagctggccattaacaaaccaagtccccatgccagcgtggtgtaacttggtagccatgctatagttcgtggcagcattgaccagggcaagtgtgacgagctacgcccgaagtcttgattcgagcattgcccaaattgcgacgagccggtccactaggaaccaactgctgattgaatctctggtccgggataagccctgtacaggccagttcttgtatgattgttgctaacttccggaattacaaatcaaggttggcaccaatgttggtttgtgatatatataggaagcttgataatcactgtattttagttctctagcaaattcttctagtctaatactacctgttagtatcaacgcctctagttcgtgacaccaagccactgatttagttgcacaaccttctactagtcaaggtattctgtggccaaatcctgtcatgcttcaagcttctcctaacaggcagcctgctatttctgcttatcttctactctagcataccccttgctagctagctctttctctgcaagatctacctcctgctctatatatgccatagatgcctggatctggttaataatattgctgaactgtgtcttgaacagcttccatattaccttctttacagcatagaggctgacagtaattgtactaaactgccatcccaagctctgtttattcttcccctgttgaacgactgctctagcttgggtgcagaacatccaggatagcctggaaaatatttaccatagattcgtcaggactgcagagttgcta

SEQ ID NO: 706 - DNA, 4707 bp, Emericella nidulans
cttcgcaagttttctctgcttgcgctgtttagccgcggaggctttctcgatcttgtgtcgcagccggacgggtgttcgcttcgaagttttgcctggtcatgtaagcggatatcaagaccatcaattccagtatcacatacctagcttgaccattttgacggaagttggacgtgttgttttgaatttgtcgtcccgccaaaactcggtctggaactgttaattttttgaagatttcccgcgctaagataaccggaactgggtttcgccgatcaccgagacgcccgcatcgttcagccagaataacggagggggatgtatgatatcgcttctaacaagtgcattcttatttatttctttcctgtctatccttaagactgctcctaatattgttcgcttctgcttttcgttattttttttcattcgttgttgtaaatcatggctgccacgggctcattctctgcccctccacaagtactcacatttgatggtcttctatccgactttgatggcaccatcgttgattcgacggatggtgagtgatattatgggtcatttgcatggcggcgatgcctgctgaggctgggtctcttacagtacaatactaatagtcacatagctatcgtaaagcactggcataagttagtcactgacacccgaggaacgaaacgcaatgagatccgattacgagctaacaccacctagaatcggtgctgaactcggtgtcgacccgaagacaattttggctacatctcacggccgccgaagtattgatactctacagctgtatgaccccgcaaaagccaactgggaatgtaagtgccaaatatccgacacccacgaaatggctacattactaacgtctctggtgggtaagacgtcagctacatcgagggactcatccccaaagagtacggttctgacgctattgaaatccccggcgcgcggtccatccttgctgccctcgaagagaccggcgcaacctggggcgtctggaagcgtgggattctgactctgtagcagccgttgtctccatcgcggaacgcggtgtaacaggcaacggccaggccagcctgcattcctgtccattccgcagtcgatgtgcggagtggcagaagaaggtattccggtcgctcttgccaagtcttcacagagcaggctgagcaggaagaggatgcgtcacagtaaaaggctggcaaggcagccggtttcactgtcattgctttgaccaccactcacactttggagcagcttcaagcggctggggcggacgtgatagtggaggatttgaggagtattagcgtaaagggtgttgttgacgggcgtgttcagttggaggttcggaatgccttccaatagagcggtgtcgtcaggtcactccagaccagctttctggaagttcgacggccgttgtgtcggtgacgctcttgtctgcctgtatccaccagacgtacgatcatgatagacgctagactgatagactgcgttattatacatacataaaatctgtggttaaggttttctgcgggatatgacgtgtgcaagggagagaatacatacatacgttggggatgagccttacagacgtaaggccctcaagccatttctcctcaccgttctctaggcgggttccttttctcgaagattagaatcagatggaaactctcaatgagtggactcggaccccttcgtcaatatagggatctaacaatataaactcaaatgagagaagacgagagctcccagcttgtaagtacatcactgagtttcgattcccagcactcataaacccatccatatcagtcatgtaagattatcaaggctcattgagagcaagtgttggaggtgtagaacatgcccaccatcgacaatgaagctgctacaccgatatgaaaggtgtgggcaatgtgggcaatgtaggcaagcagaaccgctccccgacccctttctgataggtctcacgaggaactctaggccagaacctaaaacgctagtatatcaacgctaaaaagagttttcggacgataaccgtacaggcggtgctcaccgacaagctagatggcgagagggaatctaaccctcgcaatgaggatgccggaggacagagacgagccagacggccagagttaacgatgagcccgcagtgaaacattcatgttgcatgggctacggctccagcctcctgcatgcatgcagagggaaagagccgatgaaccaccgaaaatgtaaaccgagggcacagactatgattgctgccaaccattcaagagctgcgggtaatgtaaccgtgcgcagctcttcttgaacgcaatgcattccgccacacgagtgttctgaacctgtgcctattttcaaacaaaagggacatataggctgctcggctcatcgatagaaagttgatcagacaggttctggaaatctgacgtatcaaatcctttgcccactcgtccagtcaaaaacgagactgcatcgcttgatggtcccagtcctggatgtaacgactcgttcagcgccatctgcaagggatgctgcaacatatgtaaccgcccaaacaagactagactcccttcccgtctcccccagtccgatttgtttcaagtgacttaaactatatttgtccacgactctgtctccataagtctgaacagagtaaaatgaactcttcgtcatgtcattcagttaaccagaagcaaggaattcaagaaaggaggcgaagaagcaaactcgaggtttcaatgaaagctccttcatgcggcgggaatgctatagtcttgatggcttctgcagtttgcacatattgttatgcacatattgctgacgctttttctcaatgcatactcaagtcgctgttgtgcaagtgttgcggacagagtaggagctttccctaagtccaggctccaagctgcacctccaaagcaatttgaatgactgcagagtaaagcttgattgtctgtgcttgattcgagatagcagagaaatccgcagtaaaaatagctgctgtcaacgtcgtgcaccgtcgtacagtgcataggagacgcagtcatcgaacagccttcgcgacgcctaacagaaaatctcaaagtcgagacaatgcttaccgagtctcgcccttaaaggccacttccgtcattcaaccagtactttcgccacaaatgacaaatcccgaagagcctgtcctggttcggaaacagatgatagctcctgagcttgctcggagctatcatgaccctgcagagcaacccgtcaaaactttaacgccaaaagggtgttgcagggcgtctgaaccgcaccgccacatattgtggcacctcatgagtcggtggcgatatcatggccattttcgcagatctcctgtgtggcgtactggaatcgtgctgatctcgtcgtttccaagctaggcagtaggattacggagcgctgggccgtctgcaccatggtgctcttgattctacctaaaaaccaagtctgcagtggtgactgtattctgtaatcacggttactcggatcctacatcagagcactattaatatgaaaggatgactaaccgcaagagccttccagtagcttatcgattcaccgagaatacagttacattacatcatagcttgtggctgtacggcgttgatgatcccaggggcatgaataacaatggtcaaactagggtcgggaggttcgagaatgatcaccttgacgggatttacagccaacagctgatcacaccgcggccaaggcgtgacattgtgccaaatcgtcaaggagagccttgagagcagctcccggccacaggataccggtagtttccggataaggttccaggtttcgcgctgaacccaggggaacctgagggtttcccgctccgtagatacttcttcgaagctttgcttgttgcattttgatcgacacattcgggaaatattgtccgtccagaatacaacattattgagattctgtttgttccaactggccacaacggtctcttcctagatacgctaagtcaattcgcctccgccgggggagcgtgcgcgatagttgcgggatcatcccagggatttcccgtgaatctagcttagatcttgtattctgctttgttgtctgcatgctgaagcacattctcggctgtgatgggtggtgattcagaaattgattggcctcgaagcacaagaaggtttctgttggagcactgtatacgagttcattggctcacaggccgccaactcctgagtgacagaagtcacagaacttgacaacttgcacaaactcataactcaaactggtcccaaccatacacgtgaagcacggcctgtttggcaaatgtcctctaaggaagtctttccatacatgttgaaataataaaattagcaccgagttactcagaacggaacatgaacggggttcctccgtactttgtatcgtggagacgatgacagggcgatccatgttcggcgtgcggtgattggcagctccatgatcgtctatcaggtcgaacctggactggcatttcccatgttaagaaacgagattcgagaccctagaacacggttgcagcacccgaaatgccggttatgtcctaccggttgtttgagacgagcgttggattgtcaatcggccttgtggcagatggacgatccgaaagaggaactagagcagtatggaaatgggcaatacgcatgcataaatcgttcaaatctttgccaatcgagacccgcagga

SEQ ID NO: 707 - DNA, 6210 bp, Emericella nidulans
cgggggggggggggggccaaacccaggctccaccccccccccacgggggaagagaggtaaaagaaaaaaacaacaattatttaaaaaaaaaccgaaggcatcaatatttaggccccaccaaaagtgtggggaggtccccgggacaaggattgaacgaaattttccggggggtgaccccctttgaacaaagggccaaaaataagggaggcaggaacagagggggtatcaaatggaatagcccaaaaccggggccctatgctgaatattgacctttctttgatagtacatcccgtccaccaacagggcttcacttataaattaggcagccacgaccgcaaaacatcgaacgatctccttccccatagtctcttgtgtaacaagcgaaaccatcaagcgcaaatgacgtccgattcgcactttcaccctccgcacgcaataccacccaggattagctccaaccgaatgtcaggtgcatctactcgagacaaggcagcactaatgggaaacttcgagaaggactggctgtcaaaaggtgacaagcttcagacaaacaccgatttgtctaaaagacacacgcgaaatcagtcaagtctcgacgggacaaaatacaaagatgggaaatggtcccaagagaatgaggaggtgatcatgggtccgtacgactacatgctgcaacacccggggaaggacctgcgacggcagatgatcaacgcttttaacgtatggttgaaggtgccatctgagagcctggccatcatcaccaaagtagtggctatgctccataccgcttcattattgatcgacgacgtcgaagacaactctcttctccggcgaggaattccggtcgcacatagcatctatggcaccgcgcagacgatcaattcggcaaactacgtttacttcctcgccctccaggaggtgcaaaaactgaagagtccggcagctatcgacatatacgtccaggagctgctgaatttacacagagggcaaggcatggatctgttctggcgagacacgctcacttgtccaagcgaagatgaatacttggagatggtgggcaacaagactggaggtttgttccggctagctgtgaaattgatgcaagctgaaagcagcactggaaaggactgtgtggcccttgtgaatgttttgggactggtctttcagatatgcgacgactatctcaatttatccgacacgacgtatacccagaacaaagggctctgtgaagacctcacagagggcaaattttcattccccattatccacagcattcgatcgaacccggggaaccatcagctcatcaatatcctccggcagagaacaaaggatgaagaagtcaaacgctacgcgctccagtatatggaaagcacgggcagtttcaagcatacgcaggatgttgttcggcagctacgtgccagagctctgcagctcattgaagagattgagaacagcgaaaatggcgagcaaccggaggaacacaatgacggtacgatggtccgggcaatcctcgataaaatcacagaatccaccttggctgatacgaatacgactacgagagatatcaacggcaactgtgcgacccgttaatgcttctctttctttgaatcttagctgcataccacatctttttcggcggtgtttgggatttagaaaggttacacatgatctaatgacgaggttacgatgattcgtttcgggtgtctattattctataattatttgcgggagatccataactgttgttctctccagcgctcgaattgggaaggttccaatagcactccgggtataatccattccaaccctctcttatcgtagccaccaactggatgccagtaacatgatggtttccaaaaggctctcgtgattcacataaccaaggataaacgcctacataacaacacagcaagccttctccagcttgcgcagcacccgcggcagtatcgcattgacgacttgctcaatctcatcctggttaccctgctgctgttgctggtgttgatgcggttgttggtagtgctgttgttgatgtccatgtccatgcgacggtttggaaggaagactatccgccgcgccgccagtaagattgacatagattctgccttcattctcctccgtcgcatattgcaggcccagctcgcgacagaccttctccacgcgcggcttgatcttctgaacatggttcgcggaatggtttcccttgccaacaatcctagaagtccctgccagtcagcctaccattcaaaaagccacccatgaaatccatctgcccagtagagtaggctaagacatacacatgcagatgagtctgcccttgacttctcgcggacttaatcctctctcaaggatatcttctgcttcttcaacaaattgtccgtaagatcgattgtatccgcatcaacgcgccccggcgcgttgttctcgcgaaaaataaactctgacgcttgtcggttatactccctccatcttgcggccgtgcgctttgccctgctcgctgagttctttggctgctgcgccgtcgccggacgcgtatgcttcttgggactggtagcatcactatttagcattttgaagaggtttgtggttgttggtgtttaaggtaagttggtgggtttgtggtggacgtacgcgctggaaacaggagttgcgcttcgaggcttcttgtcttgcgaggtcgcgaagacgatcgtattcggattcggcatcattgctttgggagtggttgaaggctttcacgagggtggtcgtaagaatgtgtagaagtgggtggtgcgatgtgttgtttacttaccccgaggacccatgtaagaaagttcgtgctcgtgcatgatgtatataatatatcgcgacggtggtcgcgacggtcttttggatctgtttttgggtatataaaatgtcaattagagaataaagcgcggtcgagaagtgggcggaagtcgcgaaaagatctggggatcttcggccaaacgggtggagccttgggccctgagcgatgagatcgaggttggcttgctgagggcctcagaccctcagcgggcttgggagcacagcccagtgcacttcctattgtaccacgaaccgtggatccagctgaaatgtatatgtacagttgatgaactacatattaccatgaacatcaaacattatgcagtgtaggtttcatatttgaaactcctcattctaaatcggggcggatatctgcgtctgcgggcgcgatgatatatatctcccagctctcggcgtatttagcatcggcagttcgggaaaaaccccagttagtaccaaattacagtaggacaaaatataagcataatacttcgatgactattctatcattcttcatgttcttcacgaagctaggccaacgaagaatttctggtactgtccttggggacacgagtcatgtcttgactacggtcttgacaaggcgagaagcctttatccgtccttcaattctgcctgagtcatggagcgaaaatcggaatcgtacgatgtttttgagtatgcgctaatcttgtgtatctgtcgaaattctcaaaagtactagagacagtgtacggtattgtggaatacactgtggaatccaagtaagtttggctcaggttctcggtacgccataagtacagtcaacaggtaagaatgctgaaccaaagaaaccaagagaatctgcctgctattttgctaaaacttgtgtggctttacctaccacggaatgttcctggctaaaagtcaagacttctccaccaacttagttctagtcgtgttctacgcatagcgctagccgcctcctcagcttaggacctcgtggcaagcccttgtggcttgcccactatggtccatgatacaaattgcaaaaactcagccttttccagataccgaccaaaatttaggatactcggtaacgcactcactcgtcgaattggtgcgctgacgtacgagccctggtcttcacatcttgaattctccccagactcccgcttcttccgaattatgaatgctgagtacgagtctgactcaagaacgttgatctcaaggcaatcatatgcggagcagaggtggagtatggagattgtcaaacagtatcggtcatagacggttgggtatcctagacgtgaatcagggagtcaccgtttccttctccacgagcccacatcctacgtgtacgtagtacaccggtagacacagcccaatgcttatccgacgtatggagtatgttgagtgttggatcttacctcagacagacacgcactactgttcttgaattagcagtgaggtcagatggtgaaacggcgtcagtcccgttaacttctccatcaataagggagtttaccagagcgtttcctgttccaaagcttcttggtttccgtcccttccattactcccaaatcatcttgttcagtccgaagctgatctgcagcaggcggagattaaaccacggtagctcaataagcagtctaccttgacacaatggctatacccagcctctgttctaccaccagacagactctagattgtctttgttgctagttctcgtcttctttcccatgtaatcactgtcgtgtgtctgctcactccgtgtctggtatgataaatccatcttgaaacaggcccggattgacgattccatactcgttgcgtgctaagtcagaaagggattagcccaagattttatcaaaaaggggagggcggttttcgactgttgattggtagaatccgtttgctctccacagcaaccgctgtgcgattgggccaaccatgactctgcagccgggctatcctggacagccccacgccccctgactttcgccgtgcctttcgctctctttcagcaggagacccagaaaacctgggtccctctcgctgctctctttgcgggcgctcactggcacgtcttcttcttccggagcttcatcttctcgttttctgctctcctgctctcctgctctgctgtcctttcatctgatcttctcccttccctttctctctcttgacccgcctccacgaactgagggcagaatttcagcactccatccttcttttctttttttcttttctgacacaatcaatcgctcatcgcattgattgcctgccgctgctcattcagctttgctgctacttatcattggctggtctaaccgctcttcaaactaattttcgcctcctttcggcttaatcatacgtcgcgactctgccgatttcttccccttacttcttgaccttcgtcttgcgcttatccagcccgccacttttcttccatccaattcactgaaggcaggattcattaggtgagttggttcttcgcgcggtgtcgtgttgtttgttcttcgtctacctccccccgttttaccgtcactgtcccgtggttctaccgtattacgtcggtcggtctgtcatggtctccttgtctgaatgcgatagatatgaatcgaggatgttgggtcttcgcagactgttccgttgtgcttctcgattctttgttttctgacagatgccccccttctcatgccacattcacgatagcctcgtcgcaggagtcccgcgtacggagaatttgctgacagtcaacatccgatagacgcttatccagcccacgtccttccttcactctaccggtcatcgcgactttgtcatcactcatatccatccgactttctaaaatccaccaaaaaaaatgggttgtggaatgagtaccgaggataaggagggcaaggcccgcaacgaggagattgagaaccagctcaagcgggacaagatgatgcagagaaatgagattaaaatgctcctgctcggtaagtttctgcctctccattcttcgaaaattctggctcaccgctttcgcaggtgccggagagtctggcaagtctacaattcttaagcagatgaagttgatccacgagggtggctactcccgcgatgagagggagtcttttaaggaaattatctacagcaacaccgtccagtcgatgcgtgtcatcctggaagccatggagtcactggagctgcctctggaagatgctcgtaacgaatatcacgtccagaccgttttcatgcaacccgctcagatcgaaggcgacagcttgccctcagaagttggtaatgccattgctgccctctggcaggatgctggtgttcaggagtgtttcaagcgatctcgtgaataccaactcaacgactccgccaaatagtgagtactgtagtgattcatat

SEQ ID NO: 708 - DNA, 3579 bp, Emericella nidulans
aggaaccccgtcagaagccttcactgggaagttcagcctttgctcatttacctagatgatgtgaagaagtaaagctttcctgacctgctcacccttgcgggaccagtaacatttcctctgcctatctacatttacttctgggacctacagctgtattcagccccactttccgctggtgaaggcgatatacagtgtcgtattaaatgcagcaccaggtccgccttggtaatagagctaacaccagtttccatagaagtccttcagccgcagcatgtagttctgcttatggtggcacatacggcatataagaggagataatccctctctcagctaacatgaggaacattcgccgcccacgtcgaaacgaacgcctcggctgggaaatagtaaagagaccggtagctctcgactatgacacatcttcgagcagacaggtacggtgggcctagaactgtgaggctccacttggaccagcggcctgtccggctcgccaaaacgctctccaaaagcacaagaagggcactgacagtcggcgcaatcgcaactgtaagcgctgagccgcgccagagagttctttccactgcgctgggaaagtgcaggttccaggcgattatgtgcaggcctccgaaaaagaggattgaaaagaatactcatgaggatcatcattctgtctacatgtttcttttggtaccgatcttcgaaaacctggtggatgacgctttgcgggatatagtagtgcctcgattgaaggagcaaaataggtgctgcctcagcgatctgagaaaatacttcgggcgtgacgagagcatcagtgtcattgtagagcggcataccggcgtcctgaggtttcgtctactcagacaggtagattattatcgcacacgacgagaaggccagtgtgctgacctccagtgctgcgaatgggatcccctccaccgagcggacgataagctggacgaggagccagaggacctgcatgagaaaagagccgcacaaggccgctcttgcttcggtccttgatctcgttctcctcggatgtgggagccgggaaatgataccgtagcctcttgcgagtgcgagctgtttggagtctaggacccagagattgccgtgtagcggggcaatatgcttgcgcttgtagtactccttgctccccaggacctcatgggtgtcggttcttgccgtactggccagagctatatgtggttggaagggcttccatggaataacacccgaaccccgaagatatcttgcctggctcttttgaaaccctataaggaactccggcacgggtgtaccgaattgctgtcacagatgggcggcactcgggtcaatgagtttgaaacaggactaattgggaccgggccaagctcgagctcttgtgaacgtgcatttgttttccgtgatcggggctgcacgcttgtttcggagaaacgcaccgctatcccacctatgttagctaacaccgtatgggcgagcgaccagggcacgccgtcttctctcgctagctcttttaagcgggggttatcgacccaggaagcaaacagatttagagtggaaagaccgacgagatactccgaatgcaagcataatgctcatccaagcaagcttgcggatcaggagataaacctgtttccgaaattgctgccgcttggactgtggtttgagatcgggaggcacggtaagatgaagaacataccaagtcgagaggatgatgatgctcgtacagctccagacgatgtccatggtcgaccggatttcagggtctttcacgaacccgctacgaatgcctgtggaaaaggagaaagtaggagagaaagtgatcatttccagctttcttcgcgactggtccagaggcctgggaaatgccttcggactctgggatgatttcaatgtcttctgctgagccgcaccctttagagcttccaccgccagccgctcaccggacctatgctatattgcttcttgcactcagctcttacgtctgtcactactattggctgtggtttaatgtagatgctaggctgtatccctctgaccgaatgatatagggctcggccccctcctctacaggcctgataaaaaagcaatggttgcttgacagggaatagaacaaaacatcacccgaggcatactacagaattgcaaaagaataaagaataaaaacatgtggccatcatttctgaatttttattttaatgattcgtctccacaccctgaaatgttatagtgtatactcttgccttaggctcaggaataagcaaaatgagggcataagacttgcttaaccctcttaggcaaagcgcgcacagacctttgcaaatgatatgatccgcgcacgatggttggtggtcaaatcactatgatcattcctagtctgaaatcggaagcgccagcctacatcaccatgtccgtcccctctccccaccactctctcccaaccatcaatcggaccataccccataatcagcgacaacagttgtgtcagcctctccaattccaaaacaaagcgccgctgcgctgtaaaatcgtttagcatggactgcataagccagaactccgtcatacagcgcgccttgcttgctctatatgagcaccccgttgcctacagcgttatcacagccgtcttcatttctgtattgtgtcgaaagctactttacaaacccagaaactatgcgttgtttccagtctgggcaacaattgaagtcgccatcgcaagttatcttctccgtggagatggcatcggtcgacgcgttttgtgagtctccaaacggtcttctatttctatataataatgacatagctcggtaatccgacgatatggaggctctcttttcggaatcacctccactcaccagatccttgttgacttccccgggttggaccgcttcatggcgcggtccctccacacgctcaacgccgagccggtccagtatacaatcttcacaaggactttcggcggcgtagactcaccggagctcaaaaggaagctcaagaattcatggaaagatcttcttgcgcctattgagcggctttttctcaatgatgcctcagccgcagctgccttagaccgcgcctgcgtcttacagcaagccgcatcatttgttagtttctcctcctctcccgctcagatgaaacgctgggagctctctgccggtatccgagttattccgccagcggaatccggcagtccacacaaggttgaagccaacctccagagcttgacacgggattttggcgcctgcatggcgattcccctgttgtatggccgccatttcctcgatgggaacccaaccttacttgacgatttctggaaatttgacaatgagttgtttccattgttaatgattggtgttcccgagtggactccattgaggatcgtcaaagacggctgcgcggctagggcacggattttacgtgagttggaagccctataccgtcggatcgaccagtcccagtgtggcgagcccgtggagtcaggaatcgacatgtctgacgtgagcggtgctctgtttgagcgaagtcggatctacaaacgcgagggatggtcctttcccgagcgcgcagcaggcgactttg

SEQ ID NO: 709 - DNA, 4433 bp, Emericella nidulans
tctccaccccccagaaaaaaatcccccttccacggggtgtaaaaaaaaacccctgggggggccgcgcaactcttctgggtttgggcaaaccgggggtacccccccagagaaggttaattgggctcttctccccccaagggcacccccctgttttgtccactgacaaggggtcccccgaccgtgtgatagacttgaaaagcagcactccgcttcccaatgcttcaataacggcgcaaacccgtccacacacttaagacgtcaagaacctcctctacataaagccatgtcgctcacggagtccgtggcggcaatggcgactcccattactgttgcgacccatcatggaacaaacaatggaacggccgatgatggacccggacggaaatgggacgatcaactcaagggagacctatatacacagctcgtcatcagcttggcgttaggaataactgcgtttctatctttttgtgtacgtggaatcctttgcgtgaatacaacctcggtgcgcaaaggactaagctaataatgattcgtgaggtagtttttgcggcccaaatggacagagttatacgcggctcgaaggcgacaacgtcgcgccgcactatatttaccagaacttcccgatagctttttcggatggattccagtgctgtggaagataacggaggaacaagttttacagtccgctgggttggatgcctttgttgtatgtggattcgtccaaagcggcggtggtgaatgatactaacgaagccggtgaatcagtttctctccttcttccgcttcgcgattagattcacgtctacagtgttcattttggccttcgtggttcttctgccaatccattacagctacacgaagaagctaggtattccagactgggataaaagcattgatgtcggcgaggacgggaagaagaaattcattgacgacccgccgtatctatggacgtacgtcgtgtttacgtacatctttactggccttgccattttcatgttgttccaagagacgaagaaaatcatccaaacgagacagaaatacctgggcagccagacgagtacgactgatcggacgatacgattatcaggtatcccggctgagatgggatctgaagagaatatcagggaatttattgaaggcttgcacatcggagaggttgaaagtattacgctatgccgtaattggagctctttggaccatctgattgaggagcgacttaaagtgctacggaatttggaaacatcttgggttcagtaccttggctacaagcgagtcaggaaatctggcgacactttgcctttgagacgccagccaatagattccagtattttctctgaggacgacgaaaggatgcgccttttgctggaaaacggacaagatgacgcatttgatcggtctaggaaaagaccaatggtgcgtctatggtatggtccgctgaagctacggtaccggaaggttgatgctattgactactacgaagagagactccggaggcttgatgaggaaattcagagcgctcgtcagaaggaatatccgcctactgagctcgcgtttgtgaccatgaaatcaatagctgcggcgcagatgctcgttcaggctatacttgatcctcatccgatgaagctccttgccagattggccccggccccggcggatgtgatttggaaaaacacctatttaccgcgtgctcggcgcatgtttcagtcatggtctattactgtattaatctgcttcctatctgtgttctggtccgcgttacttgtgcctgttggtacactgcttaaatgggagacactccacaaggtcttgcctcaactggccgacgctttggctcggcaccctctcgtcaaatcacttgtcaccactggtcttcctaccttggccttctctctcttgactgttgctgttccctacttgtataattgtgagtccctgctaatgatctgttcattcgggtcccgtactgaccataccctactacagggctttcgaaccaccagggaatgatgtctcgaggcgacatcgaactttccgttatctcgaagaatttcttcttctcgttcttcaatctattcgtcatattcactgtcatcggcactgcaacgaatttctacggtctctgggagcatcttcgggactccttcaaagatgcaaccactatcgcgacggctctcgccaattcgctagaaaaccttgctccattttacatgaacgtctttgttcttcagggtctaggcttgttcccactcaaactccttgaggtcggaagcgtatttctgtaccctattaattacttgatggccaaaacgcctcgagattatgccgagctctccacacctcctacattcagctacggatattcgattccacaatcgatactgatactggtcatctgtgtgatttacggcgtattcccagcatcttggctgatttgcttctttgggctggtctacttcacaattggtaactttatctacaagtatcagctcctatatgcgatggaccatcgacagcactctacaggacgagcatggcccatgatatgcaaccgtgtcctagtgggtctggtagtgttccaacttgctatggcaggcactcttggtttgcgcaaagcaattaccttggcgctgctcattgtgcccctgatcggagccacagtgtggttcagctacttctattctcagagctatgagccgttgaccaaatttattgctctaaaaagcatttatcgcgacacaccgacatctggtgatatctctccctctacaacttcgacgttctcaccgcctcttgctctcgaccgtgatgcgttcccaatccgactaggagggcaagtgctaggactcaaactgaagagatacgtcaaccccagtctcattttacctctagacagtgcttggctcccaggacgcaatccaatgccagagcttcaagaggacttcgagtactacgaggatcagaaccacgtttcggtgtaacattgtaccaagtgttcagtgatgggcggaggagtgcttataggatgccttgctattattattttgcttatgtataaagatatcccacttctggtttgtccccggcgtttcaatgttattagcatggcatatacatatacatgactattcattgccacgagatgagatttctggctgcttgagatattgcatgactccagggtacgttagtagacataactaaatcttgttaggataatctaatacacaattagttcgaagtacagcatctaggtacgatgcggcgacgccacttaacagttggcacgactagccttgtgttagcaccacaaggtctctttaacaacaattgcattattgggtaactcagaccaggaataattgcggtgtgtgggtggtcaactctcaggctcccttcttctctggcggctttccgccgctcgtcctttcctcctcatcctctcctacaactcacaatacacaagaaattatcataatagccatcaaacccatatggctttgttgttgccaggagtaagtagcttaagaaccagccttattcagaacgtgatactgacaatatcgtcgggctggtgaaagagcaaggacaagcgctacccacaatcctgttgtgcttagctcttagtcggtctgtcctagtgtgattcgtgggttctcctagacgtcaccctgtccgcttgagtcgcctcttatcgccgtggtaccagtcctgacgcaaagccaacctaatcccgaattttgcccttttctccaccgctgctgccgtcggctcgacggctccccgttcacaatccagaaccatggggatcatacattgctggctccaccgcagaggctcgaccccagggtccggtcgccggcgcccttcctatctacgtcagattgctggtgatcgcacctccctcggtcatgggtatggcgctgaataaccagcgaaactggggatgcttccccgtgtgcttgaagagtctgtgactgcccaaacctttgcacctctttaaccgagtaccttatcctagtcctatctttcgtctactcaaagactacgtcagaaaacctttgcggcgtacatctcaagcctgtatattaccgcaggtcacctgccacaatcataattggaacagcccgcacgctttttagccgattttgtcttctggaactttctggcctgagaagaatctcgaccttgttgataacggtaaagccggtatagttctgctcaaacaccggctgatcatgattgtcggtgagccgttctacatgattcagctcttgatctcctgtcttctaaacatataaaacactctcgttttttcgacatattcatagtattgataagtatcctcttctattcttcgtcttctgaaacttgatctgtgatttccgattcttatcttagatcgttttttgtactattgtagttttttgtcatat

SEQ ID NO: 710 - DNA, 2088 bp, Emericella nidulans
ccaagtcgtattctgcaagataatgtgatattattgtggacgctggaatgatacagtcgttgctgaagatgtcgaattacccaatcaggcaccgccgaagctcagtgggttcgcaaatgttccagccttagtactcaggcagtaagaagcctgggcttgaattacaccgccttatactagtctttctgccatgatctaccgcccattcggccgcaggaaaaaagaaaaaagttgaaatttctctcagggaaggacaaaacataactttcgtttcacgtcacattcctttcgcaatgggtaaaggtcgtcgcatgaaaaagcagggccctccggccccgctggatgagtcgaaaattacgatgcttaagaaacgcaagaccggcgacgcacctgcggaatcaaaggcggaagcaggcaagaagcgaagacgcaccgatgttgaggatgatggcgtgaaggacatgcagatcaaggcaaagaagaataaggcaaatggagttgtcaatgggaaagagaaggagaaaaaggctgctactgctgttacggctactgcgaagaataagaaaaagaagcagccggagcccgagccggaacccgagtcagaggatgagtgggaggatgaggacgaagagatgtcgaatattgatgatggtgaggagatgagtcaggacgaatttgatgatctggatggtgtcagcgatggctccatggatagccagggcgagggcgagttcgggtttgggagcgacgacgactcagattccgtggtggattcagacgaggacgatcacccacggcaaactatgttctctgacgacgaggatctttcggatgcggaggaaaagctgaccgcggctaacattgaaggtctatctcgaaagctggacgaacagaggcagatggaagaggaggaggcggagcttgaaatgcaggaatctgcgatgcagaccaacattgccggagaccgtccggatgttttcgagggcatagagggagaaggactggctccaaacctccagctgctccggacaaggatcaccgagacgatccgcatcttgggcgatctaaagaccctaggtcagcctgggaagtcccgcgccgattatacccagctgcttctcaacgacatctgcacatactatggatacacgccgttcctcgccgaaaagatattcaatctgttcacaccaatggaagcatttgccttctttgaggccaacgaaacacctcgtcccgtcgtcatccgtaccaacaccctccgcacgaaccgaagatctctcgcccaagctttaatcaatcgaggtgttgtcctcgagcccgtcggaaagtggtccaaggtcggtctgcaggtcttcgagtccgcagttcccctcggtgccaccccagaataccttgcaggtcactacatcctccaagccgcctcctcattcctccccgtcatggcgctcgcccctcaagagaacgaacgaatcctcgatatggcctccgcccctggtggtaaaaccacctacatctccgctctgatgcgcaatactggctgcgtcatcgctaacgacgcgagcaagccccgtgcaaagggtcttattggtaacatccaccgcctcgggtgcaaaaacaccatcgtcacgaaccttgacgcccgcacagcttttcccaaggccatgggcggttttgaccgtgtccttctcgatgctccctgcacaggtacaggcgttattgctaaagaccctagcgtcaagaccaacaagaacgagcgtgacttcctcgcaattccacacatgcagcgccagctcctcctcgcggcgattgactccgtcaatcacgcttccaaaaccggcggctatattgtctattccacttgcagtgtgacagtcgaggagaacgaggctgttgtccagtacgttctcaagaagcggcctaacgtcaagctcgtcgagactggacttggcgatttcggttcaccaggcttcactcactatatgggcaagcacttcgacgcgaagatgacgatgacgagacgctacttcccgcaccgcgagaacgtcgatgggtttttcgtctgtaagctgaagaagattggtcctacgc

SEQ ID NO: 711 - DNA, 1196 bp, Emericella nidulans
gaattatctccgtacaatctccggctgactaaccgagggtggaaggtgatcgaagatcgacagattcatcatcaacgcctctgcctacctgcttccacgtctctataagatcatgtcgcttgtactcgctcctcagaacacgaagtatcgcagaaatggctgacccaacgcttctcacgataaaagttcaccaccacggcaacacccacccgatcaccctccccaaagacgcaaccctccaagacctcgcgacaatcctcgcctcaaactttcacatccctattgagaatcagaagcttcttatcgcgccaaaaccaggcatgctgaaagcgccctttacatcaacttacctatcagagctcctcccgcttgactctcccaaactgaagattacgctcctcggcaccccagcaaaggagatagaaagcctaaacatccaagctgccgagacgcgccgaagagacgagagacgagccgctgctcaagctgaagctcgggcgcacagtcgcatttcacctccaacccgttcaggcggcattcacaccctctcctccaccagtgccagcaacaactacactttccacacccttaagccacttccctaccttcctaaccccgcccgcagcctccaattcctcacacgcctacgtgacgatccaggcattaggtccgcaatggcaaaacatcgcttctccgtgccgctcttgacagaaatggaccccgctgaacacacaacctccgaatcgcgcacgctcggcctaaaccgcaacaaaggcgaggttattgagctgcgtctccgcacagatgcttacgacgggtaccgcgattatcggacgataagacgtacgctgtgccatgagcttgcgcactgtgtgtttagcgaccatgatcgcgatttctgggacctcactaagcaaatagagggggaggtggagaggggcgattataggagcgggggaaggatggcagggggagacgagttctataatcccagtgattgggaggtggaaagagaaggcggccatgttgtagatgggggtggtgttgtggggagttcgcaggtccttgggggtaacagtcaggttggtgctagtggtgggggcatgagggaggttcttgcgagggcggcggaggaaagggctaggagggcgaaggaggagaagagggatggttcttcctgatggcgtttgtcatga

SEQ ID NO: 712 - DNA, 2613 bp, Emericella nidulans
gcttgccctattacaaggttatccaagagttggaccttcctgtggggcaacaagctttagctcgagctctcgcaaaggagggctatacacaatgcaaggctcttaaagaccgcctcaatttgactctaataactctaatcagcatgtacgtcttgcttcgacccttgagcatgtgcatcgcacagttgggcattggtatagaattatttagtctaatgcgacttgccttacttcaggctaccataaaggaatctacatgacccgaaaaggaggtgaagaattcgaaagctggttatggacctcacctcaaaaattgtggaacgtgtgggaaaccaatccatggctcttctctagtgccctctgtcttctggaaaagtggagtgagtgggcaatttaaatatcgagggatactgcgagcggtttatttgtagtattgatagttgatatgggaatatcatgtgacggctcatcttgagcaccaagtgcatgggatgagattactggctacatgatataagcggcctgtcagctctcgaggtggctattagcattgaatgtggccatgtgacaaatatctataacgaatgattgtattgaaggtctttatctcctatctacgatatgtatagacaatttatagcatttcgagagcttcagcaaagaaaaactcaatatctgaaggtaactcagcccatatggatagctgtaatccgtttatggttgtgtaattgtatcatacgatcaggcgagaaaggtgctggatattgattagtaaggaggagcatttcgccagttgacacggcctattctccaaacccgtagaatctgaccactcaatgtatcgcagcatgagacacagaagaaatttaccgtcaccacgataaatagttaattatcatatggcatccgatcctaagtaggctacgttcgtgtagctgatgcattatccatctgccctttctcatttgagcgtgtatgcgtatccacaacattggctattaaccctgggtgctacgtctagcctaaccagcaggcatagcatcgctagggagcgcgtgatttttcatcgcgtcgcccaattcagcagaacttgaaattgtccgcgacgtgttgatcctcaatcttgagacggtggccggacctgtacaacttgtgtatctatccccgaccgagctatcgaaccacgaacctggaaccgagcaaggcggatgccatcggctcgaagacgagacccatagattgggagatatacatcgagccgagagaatacttaagatctatgccggccgagtaggagcgtacccgggatatttgaagatagaatatagacgattgatcagactgcgacggcgccaggggcgagcaagacggtcgatttagggccagaaatcccgactggaacaaccgaggcaaccgtatttgagacggccgagacttacaagacagtcgagagaatccaaagcgccaaaggcatcaagatagacgatcctagtgggcagctgcatgcaaagttggcagctgaggaccctgatcgacggttgcagggagagccagtatctgggacattaggtatagaagaatcgacatccgggatgtcaggagaattagagattcctgcctaccaggcagtggcaccacggaagattgtcgcattcaaaatcgagaagctggaccggacgaatgtgagcagttggaaagttcaatacaagttgttcctgaggacacaaggttgctggagtgtggtggaacatacgtacaactggcgtggaaatgcaccctgggtcaaaaagctcttagaggacccagcatgggaagcattagatgcaatggccaagttatacatcctccagaatattaaggtggaagataaggcttctgttctgagattggagacatctggagatatgtgggccttcctaatgaagaaatatgagcgacgaacgcaggttgatgttaccaatgcaattcggaaggtaacacgctggcagatggatccaaagatgagcctcgagggggcaatgcaacagctggatcaatataatgcggaattagaggatattagcagcgggaaggtgaagtttgatagtatggccattcttatcatcttcctgaatggattgccatcaaagtatgattctatgaagttttcgcttccggtccatgaggacctaacccgcggagtggtgctctcacggctccaacagcaggacagcatgatgagtaccgccaaagagaattggattgtctctgcaaacctgacgaagacgaatgtcacaacatggaaatcggatgtacgggagttttgtcagatacaaggagtgtgggaggtagtagagcagactctgcggaggcagaataagccagaagagctgcagaaactacttgatcagcctttgtgggcctctcaggatgcaacagccagatattatatcatgaagagcattaaagaagaggatatgactgcagttcgggatatgaagagctcaggagcagtctggaaatacctgatgagtcgatacgaacgaacaacacaatatgacacggtcagactggcacaaaggatcacccaatggaagaagagccctaaggttgatattgaggcatctctccaac

SEQ ID NO: 713 - DNA, 1941 bp, Emericella nidulans
taaagcaataaaatcagagggtctgactgttgagatgctacggccgccggcctgcaacatatagtaggggacagggagggcaccatacgccatatattgtgcctgtttgtgctcgagtgctaacaacgcatttgctaaacatatcaaatacattgcattttgctttgtacttgagttgaagtagcaaacatcttaccctcacgctcgtatttctgaagggccttaatctgtatataggccgaagtaagacaggccgaaagtggcaaattgtagcaagattatacctatcaggtttaaccaaacagaaggactgttcgtaaaggcgtgtcgaggcttataatccacatcaaggcacccatcaagtggctgaccaagtggactattgtctggtgagccagaggtagcactcctctacggtttaagggtaaggtcaggtaaagataaccaggtctgaacctatgagtactcttacacaagacccttctggaggaattgaacttactgtgatcctgagataactgaatgcttagccccctgttacaggggaatatgttggagctgactgttgtccgtgctttagatccaacatcatctaaaaatattttttgaccatttaattccactaaccataccgtgaaggggaacactggcctgtgcttccactttaggtcagaggctgctggctgcataacatacccccattggcccaatttctgccaggatcattactccagccaggtgccgacccagaatctatagtccctgagccacgcatatggtatgacgggggtttaaacttaatataggcatatatggcgtccacgaggtaggtgtctagcaatctattacccacccactaaatataaaagatctttactgttgacgctgcttacaatgggaaaagtgtcgggctccgccagcccaatgcgctgaaaatataaggaaagctgtagccagtgtgcctttgtcaaggtgaaatgtggcaaagaaaagccaacctgtgcccgttgccagaatcgcggccttcgctgcaactacgagctctcccaccgtgccggcgacgcccagcgtccttccaggtgctcttctcagatacaggagttggtacgccgatgcagctcagcgctgtcgctactcccgctacctcctctactgtctctgcccctgaggaccgaggcgaggggaaaggagacaaccctgtacagatcttcagctcactacccagccctctggataagatctctggactcttggtgcagtcaccataattgttcaatcctccagaagtgggaatgccccataatttggacacgaattccttctcctttcccttcttactaggcctacagcctccacctacacctgacgcaatgctaatggacctagttgactcccatgagtcgtggcctgcaatcgacagagtgtataaccaacctgattcaagtctcaaatctttcaccggtaactgatgctgtgatggcctaccaggtagtggcggttgttgttcccgggtaatattgactgtcctggcaagggcacagaacagcagcccttgtcaattgtaggccaatgccctctttgaggatgtcccgattccagcacaagaggagatgaacgtcaaccacccaattatccacgtagcatcctcagtgctcgaatgtccctgtctgcagacaaatcatcagctctgctacctgctagtcttcgccgctatggacatcttggctcgccatgttactgtagctgcctcaaggccggcggaaggcgaagatcggctgtcgcgcgcaagcctagtctttggggagcttcatcgcgtcctctactctatagaatcgttgtctcagcattcccgccgccacctgcctcctcgtcgttcttcttctccccgttcctcgcgcagcagtcctcaacactcccccgcaccactccctccaaacattg

SEQ ID NO: 714 - DNA, 3409 bp, Emericella nidulans
ccccaatgaatgcttttcgcatgataataggacagcaactaattctttcaggaggcttcagtcctcatcagtgagtggtgcacttagtttgtgactgatagattcttccttgtcaatgaacggtctgaaactgaaataccgaaacggtgtctatatgctgcactttttgttattcttcctcttgtggtcagttcttcccatacaccgcccaagctcaattgtggccaggacgaaatcagcgagggacgatctaagcatagcttcatattatgtttagacttggtaagaaagcctttgccgtgtccactggctgaagtcttcagtgacggagttcacttgtagtccatacgatattttatattgcttcatttagggcgcgtgggaccagtctctatccagattgaaaacgacagtcatcactgagcgagccaggttcatgagacgccctctctcgcagaaattgtgtttggtgtaaagggctgtctcgtatccatttgagcatcccagccggttgccaaatcgattgacttgagtggatttatggggtttgctttccgtagccttctgtatggcgctagctgagagtgctggttgcataagccaatattgatctcataatcatgttgcagaggtcagcagtgctgtttactagattggagcgagtgaagctggggcgcgtctacagccatctacttgcgtcaacaataatagttttcagcggaagtacggggtagtcaagatctgaaaaatctagagcatccagtgcgaggtagcgagtgatgtagcgatgcctttcgaaccaaacgagaacctgtgagccttctcgactcgtttggctgcgttggatgtgtttcccaacaaccaggacgtcccaagacactcccgcccttctttactagtcgcgctaaagtaggccacttcatgtctttttacacattgcacggaactcacgagtcattgaagcatatggtctagggaatatatctcagggacgaagcaagacatatgagaatagtgagacggctctatatagctagggataaactgggctggcggtgatataaatatggtgtttggcggctggcttggatttcgggaagcgggaaaacttaccctaacagggaaactgctcgctctacactagaattattcaggctatggctgaaatttatgtgatcgcaatatcgcattggcagcactcgggatccgatcacgttggggctgggcgtagtacagtgtggtcttatctatactcctatgggagaattgagccttaccctagctgtgtccctagtcagccatgcctagccaaccgcccctcccccaccttctcacaccatatgtctcgtcccctccacgatcctccctcacaaccgtgagctctgtgctaggcgccacgggaaactggcttatattgcggttcctgggtgcggccctggccgatgctggctctgggtttcgaggacttgaggaagacaggaagcgaaaagtggtgctggtgagttttctgcggggttgggagttttggagatcggaagcaaaaagattggtatgtacttgtgctctcgaaagtgttctgagcatgttttctaataccaccattagggtgtggatctagcgcgccttacagagaagcgacaatttgcgtttgtcgacggactctctgagctcttctccgccccaaccgcttcggcgtcgtctgcacaatctcaacccttcggagccggcgcgacaccacgaacaacccttcctgttcgaccacacccaggccaagcatcactgcgccaaccgcctcctcaagccgtcggcttcaatggcccgccacaaatcgcaaaggaaactggcccggtgaagcgactacatttctcaggcaatggaatcgcagcactcgatgcgctggaaaaggatgtcacgacggtgatcgaccagctcagggcgccacgtccgggggaagatggagacgaatctgaggtcctcttggttgtcgatcaaccagacctattactcgcagctacaggacctaataagggcatcggtgctacggagatggcggagtggataatgggactacagcaggtactgttaccgaaccattgagcgttgcgtcacgatcgggaatatgaagtgaatctctaaccatggcttctttcgaaacttcaggttgcgactgccacgatcgtgacgatatccgtggattccccgttgatccataatgcctctgctttcgctcaccaggccgcgactccgctagagacggaacatgccgcgtttgctgtcggattggcccaccgatcagagatggtcatgcagcttaggaacttggagacaggcgctgccagggatgtcagtggcgttctcagggtgagcaagggaggcgcgtggggacagagagagaacgccggcgaggagagttgggaggaaagagaggttctgtactttgtacaaagggatggaggggttagtgtttttggacgcggggaatagatgatcaatgctggtcgttgatgtccggaaggttgtaaaaagacacaagctgatcaagccctcaaagactgattgatgagcgtattaaggcaaaggatggattcagaggcagatcacgttggaaaggtaatctcatcgatcctgccacaaagtggaatattcgccagccataaacatagaaaggaaattcattcatgtttgtccctttttgaactttatccatttcaaaggcccacgcgattgtagattttctgtcttccaaataccgtcatttatttgccctttctctctaaaataaaaagtgctctgacggcataagtgaagacccgtcccaactccaactccgcgggagtgcccctgcatatgagaaaccgtacttcagatgcgaggctcctttgccataccagccctctccagccccggggaacgaaaacgcaacatcggaattgatttagtggttctcaggaccacgggcgcccttgggagtgccaacctggaagccgttcttgaagcggcggtggacgtcccgcaggtgagcggtacggccggaaccggtggtcttgcgtcgcttggccttctcgctccagttgtctgttgtccacgcaatatcgtaagccagagttcccgtaatcatataccacctttcgctgattccataaccattcaacaggagaagaaagggatattcgtacacttgcgagtcttagcagcggggtaaccgcagtttgcgcaggtcgacttctggatgtggtaggaccggcggcctgtaatgatgcaaccattaagcgttacgccttctatactgttgattattccgaccgttcctggctattcccgtgtagaaaaccatgcccgtatacagtcggaaaaaacttcgaagagataagttactgaccacaacgccggcacagagtgtgagttttgt

SEQ ID NO: 715 - DNA, 3853 bp, Emericella nidulans
tccagaacttgcagacgcttttctggctgaatctgccgcctcacgtctaggccagcatctttgagttttgcggcggtgactccgtgactgtctttaagttcgcagagaatatgtaccaggagccggatccgctctgcatggcagtccatcgtcagcatgcccatctgccggactggagctcggagaataagaacttaccacgcttgtgaagatgatccggctctttgtgtttcacgccttccggccaccaccttggctttgtcttctctgggtccggctgtgtatcctctgggtccagaaaattggccagtctggaggtgtttgatattttgccgttatacggaaaatgcacctgctttctgggctctaccatcttcacatacgcctttgcaatcacgcggcagttgagctgctgaaaatcttcgaatgctctctcataatatttccgcaggagctgagtatgcccaacgcgaagtgttgttcgtttgagagggggacttggggaaggggggttccatgagtgtgcaataccagaatcgacgcgtcgcaggcgcctgcgtcgctcgccctggatggactgccattcgtagggaattagtcctgtcggtcggtgttgggttggaggataccaggaagaggctggcagtcccatcgctagagacggtaaggcggagtcagcttcctcactttccaacttccttccattcttctatcatctctcttaagaaccttttactcacctggtatattctgcaaattaggctgccactctcgattaacgaactttagaaacctctcttgcacctcgtccgtgaaaatcgccttctcataaccggcaaggcatgacgatgtttccacctggagctctccccgatggtcaatgaacatgacggcgaagcgggaataaggtagtggaaactgcgtcggctggtgacacggaagctcctgcatacaataatgattaatacgagcaattagacttatgcaaacaccgctcagtccatacatttgatcctggctgagcagccatatcaccatacgtgacctggtgctcctcgtcctttgctaccagttcagggtggcccaatggatcaatcctataggtgggacttgtcatggtcaatgagacacaccgactgaatgcacgatcgtctcaaccagtctaaggaaggagtaggagctggaaaggaacaggatagaagacagtgcgctctgcttgtgtgaatatgccgatgcaatctccaaggtgagacgaccaaagtcggttgggagcagcaagatatatcattttttttttgccaacggtggcccagttatgtttggccttggtgaaaaaagtgcgatgaaaaagtacttctcttgaacgctctgttggcagtccctggacttctacttctccgtggctgaaatgacattcagactaatgcatgaaaaacaaataggcacatacaagtacaaaggcccagccactctggagaaagaatgagagatcgtccgataggcgggatcaagactgcatatcctggagtcttgagcgcaaagtcccgcttcatctcctacgcttcagaatctcgacagggatatgggttactgttttatgataattcaagcacttcgtacggggtatatttcgacaagctgaaggtttatcttgcgtgatgattgccatggcagcaaaaagtcgagcaacagggaccatgtttgcagccccgtggtccgtacccaggcatccataccaacggaccaggcttaggctgcggtcagtcaattaccgtaatactactgacatattgagaggatatgtagcttggtctaggcctacacggtgactattgttccaccattgctgtattgatgccgatcaatatcaagtgtcaactgaacagttccttaatgaacctggaagctttatccagctcaatgagaaacaagtactcaactcttgggctcaatgtatcatcctgcagtgggagcgtcgtcacccgatgaaggatcaccccggatacttccaagctcaagccctgggccactcgaggttttatttgtcaacatgggctctggaaatattccccaaacgcctgtcaaactctcaatcctaaccaattatccatgatctgagctgagattattgtgcgccgttccaagactctccctagggacagcagaaggctgatcggacccgctcattgacaacaaaactaaacttgcttcttcgataggtggtcgtacaaggatacagataccaacccgccagtcattagtggagctgctcatccgactccagcaatggatgggttcatgcgaaatctggaaagcgtcatcagctgtgcgttctgaccgctgatcactggcaaccccgtcctcggaccccagactgagagtttgcgggcgagttcttgaagccaaagcttaatgttcgtgagcaggaaccatggacctggagcttaacaggacacactcgttgagcaatcgcaaatgtaccctgagatttataaaactacgccgctatccagagcctcacgctcatacttcctggttactgtataggatctcgatctggacgagtgtgtaacaatggatctcatttcctgaacgaatgattggtctaattactcttcaggaactccaaatggatctgggaagcctttaggtatcgggcgcctgcattgggagtcgctcagggaaagagggcaaaacaacaccgcatatggacaccacgcaacctctcggactttgaatggcgtcgagcacgtcatttttgcagttcggggcagttaaggaagcatattcgaagctgttcaacttgaagaaagacaggagaaaggagagcgaatatcctcgcagtttgcggggaaacggaggccattttgatgttttctttttcttcaattgagctatggcttgccaatcgtcatcccgcagttgtgacaggatttcaacgaatcgttgggttgtggataacccgctgccagggaattgttgcagatgtggcttgtgggctccggggtctgagcaacattgagtgtacctatgaaaatgatctatcgcacaggtacaccagccaacgtcctggccttcctgatacccaagcaacctgccaagagaagcattcagagtttcaagtccctgccttttggagaatactctgcttcttgcccagcgataaaaccatgcaagatgatagcaagtacaaatacagcctcatctatggcagccccacatcactagccctagtgctgataaaagcagacagatcaactggtgctgtgcatcaagctctagctttccattagtcgtcattggaaatccgaactacatgggactcaagagaacaagatcgcatctccagcctttgagaatgaaccacaaactagccatgcgcaagtactacgctcaggtattgtaaggctataagttatagccggctgccatgatgggtacctacgcctggccaacatatttcttcttgtttcttggatactacaattcttacttcttgtggcactgctaatgtaccgagagttcaacgctcaggctacacagaccaccaaagaacacccccagtcctcaaaccccactgattcgcatatccatagctcgcggatcgcattcatactttccggcatctctttctcctctccatgcggccaaataaacttcggcctactccaattcattaggaaaagcaccaaacataaacttttcgccgtggtcccaggagcctgggtcggactcgatacataaaagcgacaggccaagggtggcccactcgaagactctttagttctcactatctgtaactgtcgcctctagaagcaaggcaaaatcagctcttacttccatgggcatggga

SEQ ID NO: 716 - DNA, 1869 bp, Emericella nidulans
tatataagctgtttttgacttgatactggtataactgcgccgtgaacctatatagccacttggagagattttatctcttgaaaaatagagccgtagctatagtctacgtgcactagggtcgttccaaatgacgtcactcgaaactgttacctgcattatcgacctacataaacatttcgggggaattttaggatatccaatttattaaccgctgttccaactacttctcctcggcagaatgtacagcattaacccgacgccaactgcagtctccacaaactagattgtaaatgcggggatagcgctctactgacgaaacctcaggccctagacgcttgactattccggacaatcaccggcggttctgccgatcattcgaggcctcagcctgcaacctgcatgacggataaaacgccattcatgttcacagcgcgccaagatcccgcaggagaaggctgaagctcaagctccggttgaatgtggtatgatggggttgagaaggatggcggttttctggggggggcaggaaagacataaatagaggcatatctgctgagccctcagctcagtcttgtgaatgagttcgaatgaccagatcccatttctgcccaattgagctagaccctgaataaagcaaaatgagacttttccccctagccgctctatctctctccatcccgggcatccttgccctcccccatttgggtcccaaacgtcccaaccgtcccaacaagatagtcgatgacccgaaagtgggctacctagccgtctactggacaaccgaagacgagagcgtttactttgctctcagctcgaacgatgacccgctagggtttgaggcaatcaatggcgggaatccaattgtctctcccactctggggactaaagcgatcagagacacaacgataattcgcggcgagagagaagacgaggggaagtactatatcatcgggacagatctggatatcgataccgtatgtagctccatctcctctaatctttgaaggtcgtcacaagagggtagccgagtaggtactgaccgacgtgtgcagactaactggggcgccgcgtcaagcaatggctcacgggcaatcttcgtctgggagagtaccgatttaataaactggactgatgagcggcttgtgacggtggaagacgagagagcaggaatggcgtgggcgccagacgcgatctgggacgaggagcaggggcagtatttcgtgcactgggcagcgcagctggtgcgttccaaacccccatctggttattgactaagtcaagtctgacaggacgtagtttgctgaagacgaccccaaccacacgggcgacccagccctccccagcagcctgcggtacgcatatacaagcgatttccgcaccttcaccgagccccagacatatatcaacctgggcaacgagacggccatcgatctctccttcttgaaggtcgatgacagcacattggtacggtactatgtcgacggcgccaccacctcaacccatccaggacatcagcacggacggtctcttcggcgagtggacaccccttgacggcacaatcgaggatagcctgagcttcgaggcgccgtatccgttctgggataatgttgaggagggcaaggcatacctcctttgtgaccgcgtgggcagtaacccgggtgtctttgcctgggagtcgagtgacgtgacatctggcaactgggccaaggatgaagagcatgacttgacgtttatgcgccatctgtcgattttggcggttacccaggagcagtataatgcgttatcggcgctgtaggcctgtcgcatagccataaaggaaaaactcgggctccaaggatacacaatggccatcaacctcaccaagctcca

SEQ ID NO: 717 - DNA, 2350 bp, Emericella nidulans
acacataggatgcctaggggttgttatagaggtgaagccaattggtgtggctagacagattacagcatatcgtgttaggccggcgaagtgctgagatcatttcgggctggtaaactggccctcgtcctcatctcaaccgcatacccaatatgattctccagagaaccctccgagcttctcgcaactctttttcctcatccgtccagattctggggtcattgggcaccccacacggctcaaagcttaaatacaccaacttacagtgttcctcatacgtcgcactcttctctctcgcaaaaatagccctggttcctgccttgtactttggataccggagcctacatcgcccagttagaggctgatttggccacctcgcactcaaattgagggcttgggaaggagtttggatttgcttggtgggtaaaaagggggctctgcaagcgccggctgcctcttcgggacaggccagcctcttgtcgaaggggaaaatagagtttgccttgaaaagtggcgtacacctcactagggcctccatgaggaacaaggcagtggaccttgtgttcgtggcatatgggcaggagttgttagatgtgccaatgtgaacatatcaaggtaagcaaggtctccgatttaccaacatagggtgtctcatatagcagaagaggtattcatgcaatcgccctgacagtacattgccgactattaatatcgagtgcttgttcgcaactgacggccccttcaaagatattaagcttcacatgagcaaccatcacgcccgcagcgacagtttctgcctatctcgcgcattaaatcagagcagcttaacagaggcaatagtagtaaatatcaaggaatgcttcggttataagagttactccgatgtttggtaagacatcctgaagagagcaacaagatcaccctcttacaaatactgttttttcgacctttcattcatgatatcgtccaaattactggccctgagaaatgatgtttcacccaggcaatgccacaacgaagacctacacggagtcggcagcagtttgaagacatcagcagcatgtattactacctgccgacgttaccaataagtctattccggctaacgaaccgcgccgctagactgctcaggcttgcaaatctgtctcgtattttgcttcacggcaatggctgctccgctcgtggagaagtggggatgcggcgggctgatgttgtctacaacagctgcgcaatttctgtgcttttcgttatcatgatactgctgcagttttcggagatgggtggcgagacagggtccaggttttgggttgcttcagtgcgtctacttcctatattacaactccctcggcctgggaatgcttgctgtgccgtgactttaatccaaccgagattagttcgctgcctatgcggaccaagacggcggcggttgcggtggcgacgatttggttagtgtatactggcttatgcttaaggcctgttactttaaagacgtatctgatgtttatgcaggatcacaatctttgtcgtatcgaaatcacacccatcggtatccagaatattgggtagaaattcaggattgtgtggaaaatcttcaacaccgcgtttattccggttatatacctcttctttgcagaaatatgtaagtgcaatgctgcgataacctttccctgccattgggacgatatttaatttgacgattatatattaacatcacccattcagcaaaccggactctggaagacctcaatgcatactaccagcctgacccgactctcctcgcaatcagaaatactgatgccatctctgttaagcaacccttaaaatatatccagcatgaagacgaggagatgcgaaagaacgccaaggccggaggtgcaaatattcgggaagaacgattcgcagttggtagaacatgtggagtaagcagatcgacagaaaggcgagacagtgcatttccatgaggtcatacgacttggtacaagggtgctcaataggcgattggccctccttgtgtgctggccttgatagagagtcaaagaaaaaaaaaagaaatctaactcatatgcgtcgatcctacaaaaaacctaacccgacagctatctatgcattcattgctgttgtgaatatcagttaggccacgtaagaggcattacctgcagtatgggtggcaatatattccaccctacggaggactaaacacccaagctcttcgattttagctgtgtttgcgaggttatcagctcgcaggcgtatacgaggctgagtgaaatacaatacttttcctagcccaatatcctcacgttctgtatagtttgatcctaagcttgggtctcacctatagtagtggtttaat

SEQ ID NO: 718 - DNA, 3308 bp, Emericella nidulans
atatcaacaagatgagagcaacatactgctttccaccgccgaacaatctatattcgtctgctatgctggaagcggattttcacgcattgggcccctgtcccggactctgtgcgcatcgcgtaagtatattcctaagcccgtcatatcgcaggacaaactcacggcgaaggcattcctaatcctgcgcaaggggaggactggcgcaatggtcggcgtacgtattcaggctccgggtctgttctaaagctcctggcatagctatggggtatctgatgctagttttagcgagatacaccccaggattgaatcagggaccgagggtagcgataaggatagtcgagttttgggcaaaggcccagaaggcaatagattgcaagtgcaagaaacaaaagacactagcaaattatgtaccctacgcttttctgggatgacgggccgaatggggcaatttccaagcttttatggtcggctgcaagagcattcctcacaggccgttcggaggctgcagtggatgacggtggaggatcggtaggagaggtttctaagggcggttggcgagggcgggaaaagagatggaccgatattaagttaaataaatgcatgtattcacagtgagttcatagcgagattgtcgtattgattttgttagccccaacacatgaagaggtgtaaaatgatgtgcaacggccaaagcccgcattatctacaaaggcggtcgggatgttctgcccccgcgcaagactgatcggcggtttacagatcggcgtcttcaatactaacccacccctctattgtttcgcatgaggcgtttttctacaatcacacaaagtatggtatcatttttcaggctcgggacattggaaaaaatgagcgtatatgattacgcaatcccagtgtccaacccataagggccggtaataagccgttcagacggaacgaatctttagacagacgttgttttcatttatgacaatacctgaagcacagctgtttggcaaatgctttacttgtcagacaacatatcagcgggtagacaccagggataccctaaagatgaaatgaaacagcgacagcgcaagaatccaagaatgatagtgaataaccccaagccataatcacacgcaatgttcgccccgatgccccgtacccaaatcataccatgattttgtgttttcttagtatacacgatcataacacagactctctaaagcatgtcaagatgccggtccctttcccttatctcccgtggagtcatcagccgttggccttcggcggtctccaccatactgatgatgagggttctggttgtgatggtgattatgatggttgtggtgatgatggtggttgttagcggccttctcttgtcgagcctgatcaatagcggagcgttgggcaatgctgtcatcgtggctcttccagacaatgttggtgtctgcggggaaggcgagcaaccgtttaatggtctctctgtatttagttaataggtaaaattggtccgcagtagaatatgcttaacgcacctgatcttgatgtttcgcccaccgtcgatccgggtccaaacggccaaaacatcttcaccacttcgcacactgagaacagcgccgcagatttcgtcactggcctccgcaaactgatcaccaatcatggccaggagaagatcctcccaatatcggtccgccactcccttcttcagtctgacaatccattttccgcccttcttattggcctcgtcttcccataccggccgaatccccttcttaaagatatgatagtcggaaacggtaggaaggagcgaaggccttttgaggtgcgagtataccgaccaaaagctctcaaccgaatggattgaggcgagcggtgcggtggacttctcatagtcggaatatttgggggtaggaggacggtaccagataatccaagtggatcgcaggacgtgctccttgagatggggttcagaagccttcgacttgataccctccgcggatgatgccgtccgatcagtgggattctccctcctttctccaggagtcttcacctccgacgaacctccgggtgttttgggcgccccgaacgaggcgaacgcaccggaaccgaggccaaaggcagatgacgcattcgtagatggagaggacacgcccgcagacaggggagaaagagcgttaaaaggattggaccggccatgggagctgtcggggccaaagcgctttgatgtgcgggaaaggtcaactctggcgccaccctctttgttgtcagtccctgccattgacagagaaagcttcgaggtgctagcagattggcggtgttagcatttgtcgaacttggaggtgagagcaatcaaatgggcaaggaatacataatacatacttgtttcggcgagtccacaggttcgcgttctccatggcgagtaaatggcttgatacggctcaagtgggagctctcatcgggggaaaaaaacgagaaaaacaaaaatccgaaaccgttcaaccgtgcagtcgtcgatatgccaaaaataatatagctaacacaggaccaacgctggcaatgcaaaaagtcacggaatgcaggagaagcgagcgcggaaggcgagcggaggttccgagagcaggatgtagagagggggagtgaggagaagaatcgtggcagaatcgtaatcgtgatggtgaaacagcgggaagtaagaggtcggacagaaagtaggtataaatgctcacaagagaaagatggtgtgaaggaggcttggaaagtaagagggacttttgaggcggaattaatagttgtaacttggaaatatggggagtagaaacttgaccgtgactgcaaagtcgaaggtttaggactttaaagcctgaggccacaaggctacattttctttccaatacttttaaggatgcaaccaatcaatgcccggcccgctttctactttccgcatcatcattgctccgccccgtctggtggccgagtatttctgctgcgcgttgtcttcttttctttttctcttttacataaacccaagaccaccaactcaaatcatcgctgcctgcaaacttgctactctcactgcaccggcgattccgatgagtgtgtcgagaaaaactccaacccgcttctaaaaccatcatcacgagggctccccagctccatgatgcggtgatgacctgtatgacgggacagtcccaaacctcgcatcagtacgaatatcatgttctataccatttatgacacgctagcaagaaaacagaatgcgcgcttcctgcaatgcacacagtagactcccataaatggtgcgttcgactatcatagttcgttgc

SEQ ID NO: 719 - DNA, 1336 bp, Emericella nidulans
acgacatctgggctggtcttttggtgcgttctcaccctctactatctgtttgaaccccaagaacagcttcaatgctaactgatatctgaacagtttatcgccgtcttcctaggctacgttgccgtctctggagtctcgctctaccactactcgaagaacaaatcgttcaacggcgatggaatttacgactcagccaacaccttctccctcgacacaaacactttggtcctatttatcttcgtcctttgtgtcgcgctcgccttctcatggggatattttctgctagcgcggcaattccccaaattcattatttgggccacggggatactgaacatcgttctcgcactcgcgacggggatatactacatcgtgaggaaacagtacgggggaggaatagtattccttgtcttcggcgtattcgcgataattgcgtttatcagctggattccccgtattccgtttacggcgtttatgttgaggacgagcatggatgtctcccggaagtacgggcacatgtttcttgttagtgcgctgggtgggattatctcagttgcttttgcggcttggttctccgcgactttagtcgctatatacgtcacctacgaacccaacagcgatggcaccaatccctcatgcaggaatggctctggcagctgtagcacagcccgtgtgatcggcctcgtcgtgtacgtcactttcgccatgtactggttcagcgaatggctcaagaacaccatccacacgaccatcgcaggagtatacgggtcgtggtacttcttcgccaattccccccgtggcatgcccgcacacgcaacaaggggtgctctcaagcgcgcaacaacctactcgttcggaagtatatctttcggtagcttgattgttgcaatcataaattgcctgcgtcaagcatgctcagttgcccagcgccatgaagcagccgagggcaatctcctgggaagtatcgggttctggatcttaggctgcttcatctcactccttgactggcttgtaaccttctttaaccgctacgcctactgtcatatcgcgctctacgggaagtcgtacattcaatccgcaaaagatacgtggactatgatgaaggatcggggcatcgatgctttggccgctgactgcctcgtcggccctgtgttgacaatgggctccgtatttgtgtcctatgtctgtgcgttgttggcatatctatatctccagtttacgcatcctgcgtataacgatggtggtgactttactgcagtcatcatggctttttcgtttgtgattgggttgcaagtatgccagattatacttacgcctatcagtagtgggattgagacga

SEQ ID NO: 720 - DNA, 3098 bp, Emericella nidulans
  unsure (1)..(3098): unsure at all n locations
catgcccataacgtgcataattttcggtctgggatagatatgcgcttagctattcagccgcataataggcattctctttggcattccggtgagctgtctgaatcaggcatttgccgagaaggtttacgctaatttagtgctacctgataacagctaggcatttcttgggctggcggtgctgttggctgaatgagcggcttccaggcatccctggcgacactcacaggcggccatctggagaagcatctcggcgttaacttgagtatcaaactttttgttcaaaagttctataccattgaataacaggcaaatcttgtcttaactagtgcgtccaaacctcttgaccctgcctcggccaggcatctactagccgctgggccttatggtttagcaaggcgtatgtttacggcttttaggattgtataggctccaggagagatcattctgaaaattaggaataagctaagaatgtatgtttaatattggtttccaggagttgccgcttttgccccagcagttctcaaatgctgatagggagccgggagcgccacagccggggccatggtgatcccgatataatatgggcatttaatcttaaaaagcggtcacaaaagtaccaatcaaacgaatgacaacacagaataggactttttctcgcctgctcatcgccatacagtatcagtagagtcgagctctttggtgtgcccgtagcttaagcaggggctgaacgaccatccgcatcgcatagccatcggccgggaaggctttcacccgcaacctggccaggaagaagacatattggactgcaagcttgccgtgcttcgcaaacgtgtcaaacaagtcatccaggatcctttcgtcaccagaggacagggtctcgccttccttcatgctctggttcaccaaccactccatgttttctagcactcgcctggggacacttccagagcacagcaggctataccatttgtgattgaacctgaagagccgtccaaaccagatgaaacagtctctcacgaccttcagcttgtaccgctggaacttggttgggcgggctgcgtcggtttcgcgctcccgcttgtatctctcatcggataccagaatcgaatggatgatggaggtctcgagattgaacggaagcggctcgtacttttgagctagctctgaagagagatcgagcccagccagtatctggagcagctccgtgggccggtcgtaatcgtaatagtgaaggacctgccacagcgtctggacgtcgaccagatcctgagcccggccgttgcgagccgcccagcgccttaagaactcgcccagttcataatgagacctgaatggctgatcagcctgctccttctgagtcataaggcgtttctgcatttgttccaggaaaaattcccccatgtccacagctccgctcagcgcgtcaagcagctgacagcagaattcgtcctccccccctggcttcagcttcttgtaggaccagtcgtgtccaacctctgcccatgtatggcggaggatcgtcgttacctggatttccagccggaaagactgccacggctcggcttcccggccctccttgagtctcagtgtcgcccggtaatggtcggcgcagtatgtagggtattttggagtgtacccgtgagacgcccttctaatttctatggtctttgttcccgtgattctgtggctcgagtgcacctcaaaattctcggtgatcaatttctcaacgcggtccttgtctgacgggaagtagagcagtacacgaacaccagccaggtcaacaatatccgtggcaacatcatccacgttaccatacctcttatcattctttcgtccgttgactttgattctcagtctggcaatatcctttgcgcgatactcgactttatgcggcacgccggcgtcacccagaacctgcgccagccgcccggcagactcctgcgcgatagacacataaccgcttcgatgcccctcataccacgcctgaaactgttcgataactgtttcttgatcctggatcgagctcgaggtattaccgactgaactcattctgtatgttatagcgaacccagggagtgttcaacgatgataataaaaattcgattgtgagttttttctgagatgaaaaggatggaccagagaaactgatacaaagcagaagcaactgcctttttatacacatggtctatggaacactgcctcgtcatccagctggtcgcatcgggctcgctggccatggctttacgaaacggcaacgatctatcctctttcctccaccgagacattcctggtcgccagtgacttggagcccgaacaatagagccttgaattttcatttgctcttgattaatcttgcggctacgactcttgagacaatggccaaagctgatggaggagcaacgatgcccattgcatcgtcggcaaaactcttgctcggatttccagggcccggtaccgtgctcttcgccactcttcattgcgcaataccaatacttgatttttttcagtgttagcgcaaacccggtatgcatgaaagctggctactggcgatctctggtctctctgtcgttggccaggattccaagtagcaaacgatatgaggagcgatggagcggtgaagatacaaacaaccgatatacctcagcgctgtcgttgggctatgctgtccgatgcccagtattgtttgcgtggtcccgttcaggacctgatggcaggcatgtatcgagtggggtagcacgcaaggctggcccagcgatctgcttacaatgagtcaggctgcgacccagaacaaatgtcgcgcctcatctcacaccaatctgctgctagaccttatctgaaatatcctcttggctacagataccccggagcctgacagttctatcaggaaccggcttcttgcgcgatccgagactgtcgacgaagcattaaatgctgggccgatcccggcgcaggagagagcgatgatagaataatangttggaggacgtctatttgcaggtattttctctccttcttagaatacagtctgtgctgatatggcatgcttgagaatagaacataagctgctatgagccatctgtaatccggcaggcctgaaa

SEQ ID NO: 721 - DNA, 2084 bp, Emericella nidulans
  unsure (1)..(2084): unsure at all n locations
gcttatcgtatgtcgagtacagctgattaacttcttactaggcatctacggccccggatacgcagagagacggcgcgacggatcaaggaggcgtacggtattgacgtccctgtcagcccccctgcggcgtcatgaattcagtttaatcggcgtctcttgtctgtaaaattacctgcactatatcaaacggcacgtcacacacacatacaataaatggtttcaataaatggttcctttgttcatcagcatctttactctctgatccaggcaggcatatcgaccaatcagagcactgctttacaaatcagggattccaggtatagaaatgagatgatctgaaaaatgcccattgttccctcaactctataaggttgctgcagcatctgtaacaggcctccctaagaacataatcaggatgtcagcggacatgactggatacttgctggggctatgaatgttgagccgtcagtccagactatccggactagaacagatcttctcctgaaatctaagtcccgacacgacaataataatagtggaactttgacgaaccaacagtgacagctgacagctaagagttggatatcccttctcctgagggccaagggctagaactatgggcccgtttccgtgctacgtactgtacgttatcccatcttaccccaatcgacaatccacttacgacaaaggcgccctgaattaccatgtcgcagatataggggttcagcctttcaaacctcaaagttcggaacaaagtgatccttccgtcatccgaaggagattgaggacggtgcggaccttaattagtgcatcaagaaggtgtggggtgcagaggcataaaatgcaggacctgcgttgtgcaacttatgaaccagtttactccgtaccggcccctaattctgatacgtccgtttgaagcatgaacgtgaaccagcctcaacggcgacagaatcccgcatacataatatatcgggtggacccaatatttgagaccagagttaaagaccagagaggttgagagcccgccaaaggcttgcgcagtactcgaagcgcaagccgagttcgtgaagtcagaaaagcttcctgaggcccagaataaagactcgaaacttggtatcagtactttttcccctctccaagccccgtaatcaagccaaacatttgcctccagagctgagacgaactgatcgacagaatcttagaagtttctctggtgcgaacgtccggacgaacgagcgaacgaacagcgatgatctgatgaatacacagtacatgacgtagccgcactagcaccggaacccggccctcgggtccagggggaacactacaatgcctccaaagaggcaagatccgctctccttttctgattgcacgagaaagttatgagaattgccaccaaatatcaaaataatcaaacagttattagaccatgcccgggaaaagggatagttctgatagaaggagattgctgtgggctggcgctccaccaacttccattgtgggttgtggctgggtatccctacgggcgatagccacaactttcggcattcggctcgttagctccctataaagggttgcccaagcccacgcttgggtcgtatggggtggctgattgcggtcaatgatcactgatgggagaattcagagcagtatcatttatggagggggttttgtatcttattgaagaccaggccatgaactggttaaacagagtgtgatttagagtcctaggcattcgaaatattcctggttctacgtcctaaaggataccttattttgtatggattctcaaccaaaagcggggtttttttatgccctttgtcttgtgcggtattcttttttactttcccttcttttgggaggattttaccataataagggtttcttgtagatgccctggctccccggaataacaaaagtctttttaatttttttccccgggggacctcctccccagttccttggtgcccacagtggttaccgggaacgggntcccgggtttaagtttgatagagtgaggcctctcctgtcatcctctttactttttctatttttttggcccctggtttaggactattttggta

SEQ ID NO: 722 - DNA, 2494 bp, Emericella nidulans
atcccgggtcccagcacgcttgtccttgaagatcttcgccggagacggtcaacctagtgatcgacacgctgctgaggacaaactcgaagtttggaatgcgaatgtacaacacggggtcctgaatgatgtatcttctcagtagagatagaatactctcttagaataggtagaaagaaaataaaccaaagcctcccgttcacctcggggtattttacgcaatgataatttgaggaatcggcaagttcttggtgtcgtgtcgtacagtgtaacgccgggcataggagcaataaacaaatcagacgcaattctgctacgacctggatcatgtttccaaagcgttttgcgattcaagaactgtccgagagcaaggtgtcatggcaccagagaccgagggctctcgaccctgcctctgtcaggtatgactgctggcttcttgtgtatttcccatatgcacagtatggaaaatggtatacaaaaaatggaggtggatccgttgttccgtgtcaccttagtgaataaaccattataaatgagagatatagcgagggattgcatcaatcctactgctctcgccttaggtggggggttggcagtagcacaaagctctaggaaatcacaacaaggggctgcgtcaagatttcgatgattgcgacgcttgctgggctctaaaatctacctttgcctggattattgatataaagtccaacaatactcggaacgagcgtgcatagaggtcgacgatagctgggaaccatccgaggggggagacgtcaagtaaataaaaaaaaagaaaatgtaatacagagcaagccttctatctcctctctatatagcatactagtacaaagcgaattacatcgagaaaaaaaataaaacgaaacaagcaatgcccttcctaaaggagcccacaaatgtgaaagatgtgtgcataatatataacaaaacgcgtctatgcatcagcaagaatcgactcggcaattctctcggctagaccatctggaagacaacgttagcattaggatcccagcaattgatgcaagtgagaacttacagatgattgaaatagggtgacctgggggaaggaaaggcatgatcgaggcgtccacaatcctgaggccagaaaccccaatgactcttccctgcgtgtcgaccaccgagtcagggttatcccgtgggcccatgcccgccgtgcagcaggcatggtgaacggtgttggatgcttcgcgcagccactcgacgatctcatcgtcggtctgcacgtctgtcccgggatacgattcgcctccaagcgtaatgccagccatcgcgggggacgccattagcgccctcgagcgccgaaatccggcgacggcgacttggatatcgcccgggtgcgcgaaccagcgcgggtcgatgataggatttacctcggtgtcgttcgaagcgatatccactgtgcctctggacaggggcgaaaccactgcggcggcgatggtcaggtagttgaacccatcattcggcgtgaccatgtagttgttttgatccccaaagtagccgtagacaggtaggtactcgagttccggccagtcctctgggaggctggcgagggcgtcttcggtctcagtgctgaagttgcctcgcagttgctctggcactttctcccagcccagaatgtctacgccagtattcgtgagcacgccgcgtggtgggttgctgttgtattgtctttgcgcctcggttatgaactcagggatgctattcgaggagccggtaatggcgtttactctgtatgaggggccagcgagagtgtggtcttgcaggttctgtccgacgcctggtcggtccgccacaagcgggataccataacgctcaagattggccgcagggcctatcccggagaccatcaagagctgaggcgttttgaatgctcccgccgagacgatcacctcgtttctggcggagagcgtatattcctgtccctcagagctgacccgcacgccggtggccacagtatcattgctgaagagaatccgcttcgcatgcgtcgactgatagatgatcagattcaaattccgtccgataaggggatcaaggtatgctgtcttcgatgacgcgcggtgctggttgccaggctggatggtgcttagggtataggcggatccaataagctggccgccgttcaagccacggatggccgcaagaccgatgtcccgaaagccacggacgagccacgaggcaagaccattggcgtagttagggtaagtcacgtctagtcgtcctcttcgccccaggacagcggggtcatacgtcggggttgcattgcggaagcggaggttgttgtttggtggtgtgaacctttgcgacttcatgatgtacgggagcatgttgtcgaaattccagctctcgtcacttacgtcttcggcccatctatctagactgccctttgttgggaggtggtaggtcatcaggtttcgccccgtgctgcctcctaggactttgccgctggcatagtgga

SEQ ID NO: 723 - DNA, 6350 bp, Emericella nidulans
aaggtgcgtggatatctggcttctacatcgatttcatatgctgacgcggttggtttagattgtatgcgaagtgtatcccgacgttcacggactgcacgattgcggaattagaaaagctgggtgacaagtaccgtctggcgttgagggttgcaaaggatccgcgctgggagcgggtcaagtgctcgcacaagggcacctatgccgatgactgtctcgttgatagggtgagttcgcccgtctctgaactctttgggtccgcgatccgctaacgcatgacaggtaacgaaacaccgcatctacctcgtcgcaacaaacgataaagatctttgtcgccgactccgcaagattcccggtgtgccaatcatgaaagttgcccgaggaaagttcacaattgagaagctgccggacgctttggattagcggcatcgccattcggttgcttctcgacatctacagcatatcgccgatgctgtctcccaccctgcatttgccgcagttcaggtcctgcgattatcggatgtgttctcttatgacttcgtattgcaaccgccgatccatcgcacagtccgcccgtgggcaggacgcagttccgaagagacttgacactggtaatgggccaattgaacggaatgtaaattcgttatgggcttgtggtggctgagtatctagcaaggcacacaggagtgaaggctgaccaggctgctccaatctaaagaatggaaaaatatccgtttacatctccaaaatctccactattccagtactagtgtagttccgctccattttttattgtaaactcgtagcatcatatgatttttcttcgaatagcagcccttctagtcttacagtgcttgggctgatgaaagattgctatcgatgattccaattgagtcacctccgagcatcggaggaaccgcttatcagcctcgtcagcggggattcttaatctcccctcatcgcccagtaattcatcgactttgccagaatcaactgtcaaagatcaaaaagaatgtcagaaaaagagacaattgtagtcattgggtaaaaagtccccaccaaacaccatataaccagggactgaccttcccagcgccggtgttatcgggctctctacagccctccaccttcaacaattcatctccccctcacaacaaatcctcattgtcgcccgcgactggcccagcaccacgtccgtcaactatgcctcgccttgggccggcgcccattaccgccccgtccctggctcctcgccgcaagccctccgcgaggagaagcaggcccgccgcacatatgaccatttcaaacacgaagcgaaagtgccaggctccggcgtcgagtggacagaaggcattgagcacctggaatctccgccaccggaataccttaccgagaatgctctcgagaactacacacacctcgacgggtttcggcagttacaaccaagcgaacttccagagggcgtcaagtggggcgtgcgctacaatacattcacgatcaactcgcctgtttactgtgcttacatgctgagaaggtttgtgctgaagggtgggctcgtgaaggagtattcgcttgccaacgtacaggaggcgttctatcttgccgaaaatgtacggaccgtggtgaactgctctgggcttgggtttggagacccaaagtcgtttattatccggggtaaatcatcccacggcttgaatgacggttattcctgcgctaacctggcataccaggccaaacttgcctcgtccgcaactcctgctctgtgacgctcacccgtcagaactctgacggctcctggtccttttgcgttccccgccctctggagggtggtaccatcatcggcggaacgaaacaaccgcacgactgggacccaaacccgtcgctggagacgcgagagactctgctccgcaatgcgagcaaatggttcccgttcacaccagcgagcggcggcaagttcgatgtcatccgtgatattgttggacgtcgtccagcgcgccagggaggaatgcgaatcgaggttgagaaagttggtgatgggaagactatcgtccatggatacggtgctgctggacgaggttatgaaatatcttggggagttgcggaggacgtcgtgaaactgatcagggaggagggcctggtgccagaaagagcatcgctttaggtaaaggattacctttacgcccaaacgatggctcatagtatataagcaccaaacacattttgtactgataagcattttaggctggcacgtgctaatgcaccttatggaaatatatattttgacccagcaatgacgatatcaccccaacgctacttagtttttcactctgccgcccagcgagcgaatagctgaatttgagatttagacttcaaaatggcatggtctcacgcatttctcaccgtttcccagctatcgagaattcccaggtttccgagttacggttccgtagcaattgtgattaagaagaatggtctgatcggctaggttggataaactgtgagaacaattattgcaatatatcgtttagctccttgaagtctgcgtgccaagtagatttgcctttctccgtactcatgctgtggtgcttaagagaatccgtagactagaatatggattatcagaccgagtgtcagagttgataagagatgggaagttggaagacagccttgtcgcaccctcttgacggggccaggagggaccactttttagttggattgacaggggccactgcacgatcggagaaatgatagagatgaagcccaagaaaaaggggggttggccaaatttccacggtttaggcacgaactggctgcttcggatcctgaacgatgatctaaacagcttgagtcactacttgacagacgcaaagagagcaacaggaaaggaggcaaggtgagtgcaaggggcccgagggacagggagaaaggggacgggagattgactcgagccatagtgagaaacggggcccgagtttgagagctcttgatggccactgacattcattgaagctaaatagttctcccaatctccccacaactaactggatactttatcattatcaagatcaagtcccaacaccaagaactcagcatccggcaagtatctgaatactacggggtaattaacatgtccacgtctcttcgcccgtccgtctctggtttgagaaagaccagttacagagagcctaatcctcttgttgcccgccgtcccttctccatatacttcgactgttatagatcacagcaactgagaaaggggcacggccattggcaatttcaggctgacccctgacaccgtggggtctgtaaaatacggtatcataatcatcatctggagtccttgggtttggacactctacgattaactaagtgtattataatggaagttcatctaagaccgttttaaacccaggcggcaatagtcttgcaagctctgctcggaccattcctggtgctactagcttgctctaacgcatgcataacacggtccccagtccccgtagtttgtgatgatgccggggcaacccgtggcgtcatctggcatagcttccataggtaagccggttacattacatacggctattggacggcgtgtcgatcggcatcacgtgactattaaggccggcaacccgtcattctggacgcaatgagcgagagaatcctggaagggaaacgtcgttcgaaacgagattttccccattctgcttcagcttcacgtccttttttctcgtccatttgcgcgcccttcacctccgattccatccttgtttcacccgctttattacgcctttgttaatctaattttgagcaaattttttctattttttttccgcccaccgagcttccgtctatccgatctcgtcgcgtgtcgcccttccgttcagggtgttcccctttgtccattgcgtcaatggtctaaacacctacccgtatgcgatcttcgctctcatctgcctcgccaaccaccaatcatacagaagggtcgcgactggcatcaatattatcaattgtcgtcctgactgacctcctcgggcctttcttcccataacccgtgtcctcaccgtggcccccatccctcagtcttcttcccccagtggccggtcgcgcgggcaatgggggatgccttccctaccagattacactccacttgaatccctcctatttttccaaactctcgccgcccaagactcgcgaccgactgactttgcctcgatctccaacgttctgcgcaataacaagtttgttcgcgaaaatggcgctttcgacgcgcgcagactcactcctgaggcgctggaaggcctttattcaaggttgatgcgcgacgggagcgactcgtccgcctctacacaggaaccgaacggtcataactccgaatccagtcctagtaatccgaagaagcgcaaaattgcgactcctcgctctgatggcttctccgatgcgaagaatccgggctttgtcccttacctggtgacgcacctttacgcgaaatataaggaactggttacaaaggagatcagacttgaggagaaacgatatagggacatcaaagacgagatcgcacggctagagaaggaagtacacgaagctccccgtgagaagcccgcggaaccggcaccagcgccaactcatacgaaacatgagcctgcgccggagccgatggatttggatacaaccgaaacacctgtttctcaaccaaaacctgataaggatgtgaactgcgccccgatcctgccttccaccggcgcggaagcacaacaacttctagcggcatccccccacaaggatcagccgccggcacacgttaccccacaatcaccactgccggaaaccaagtcaccagcgcagcctctcggacaacagccagcagctcagaaaaacctacaaacacaggcgcaaccacaaccccaatcgcagccccaagcaccacctcaagtaacacctccgccgcaacctacatcgcacgctattctacaccctactccaccacagcaaccgcaccatactccacaaccacaggctcctcctatccatccccaacaagttcagtcctcagcacaaaatgtccaacggcagccgcagccaccccacgaaaaaggagcatcgccgcctcagcaatcacttgttaccgccccaagcgtaccagctctgggagagccagcgaatgtgccgccgacgcagcccgtggagccatcgtcgattcccacggctgtgactcctactcctgctcacgaccccgctatcacgccattgccgccctcgcgacaacctcaaccacctcatcctccgcagacaaacaatgtgccggttgcttcccctactccgcaaaagactccctcgactgtggaggctgctggaaagaaggttgtgcctgtacctcctccacgcggacctcctcagggcagccttcaacagtggtctttaaaccaaccacaaaccccgcaacagccatcacagcactctccatcctcaattcctcaacctgcaggtcagctgaagccttcacaaccgccgcacttccaacaaacccagaaggtggcaccacagcctcaacctgtggcagcgccgtcaacccccctaccctctcgagccatctttccgaccccagcgccccctgttcccccatccggatttgcaacgcccattggacgcgctcaaggatatccctcgactgtaccaaggccgtcaaagccacagttatcaattgccacccctggatcgctcacaccatggaaacagacaccgtattctacactacctaattcgccacgctcaccggatcggcctggaccggaagatgtcagtccaatcagcgagagtgctccatcaccatttggatctcgagcggcaacaccagatcaacctgagcctccgcgccgaaagggccctggcggggaaggaaaaaggcaacggatgccaaccatactggaccgaggaggagaacggagaagaacacagcaacggccgggaaaaaacgtgataggagtactgcttcatccagaagtcgggggcgatctatactatcacgtgacgaagaatcgggagcagaggctggcaaaatcaaacgagaagtacctagcactccaagcggagttgatactgttggacccgagcggagctcgactagtcaaaaggctccaggttcagaatcgcgcccgggtagagaccggccgtatcacgggcgtagtgaactgcgggaatagaattcatcctgccgccgtgcgtactgcggaatatactgccactcattcgatcttcaagcttgctgctggctcattggattttacattggacttcatctctccaatatctccgtccaactatctgcggcagtctcttccgttcagtgagctaga

SEQ ID NO: 724 - DNA, 3529 bp, Emericella nidulans
ttaatccaacatgcgcgggggtcatgttctgttgaatgcccatggcaccttgattgttttagatcagcccaatagcaagggagagacgcgacgttagctgagggaggagacgagacggaggtggattgagatagaggcaccaagagccaaaacgggggcaatatagtataataagcctgtaatattttaccagaacagtgtagggacgagactgatttgccggatgctagtagccagtcatcaggcgagaagtctgctgaccaaacatagcccaaatggccctttgaataagctgaactcgtgaactcctggatgataaagaaaaggtaaaggaatttcaaatttatgaaacgtcagcttgagcttgtggatcactgacagaagcgcggaatttatgtcctgcgtctgtagtgcagcactatttcagacagtggtgtatccgagaccttaaaattctagtatggcacgtcaatatggtggctgttgtaagcaaaagacaaagggggaatataggacataccgtcctgcgcactgtcatctctctaagatcttctagccttcaaaatcaccttgtcccttgcatgcaacaacactcttggtcgccatgagcgcctccagttttgatagtattcactgtcgctgccttatcgtagtatatagaattgcccacttttagagccttctcaaccccaaacggtcttgccgtcaatgcaacctctttaatctacctgaagttacgtactaccttgggtaagaagctcggctaccaatatttaccgctgctccattatcaacctctttgacagagaacttggtctaacacgttcacattcttctgtctcacgctgtgctcagatctatcccgagacccagtgtaaaccatgcattgtgataataactggcttctcacactgctagaccgcagtaacgtaaacctggaatgcggcatggaatcaaagtagatgtaatgccttttatgcagcgtcatgatatgcattctgtctgttcctagtatttcttcaaaggcggccttgacgtctatacctgtcataaaggccttatcgccggtgccagtgaggacgatggcaagcacagtggagcctgagagggctggtcaaagaggtggccaattcgattcacatcctacacttgttactatccattgtaaatatctttataaggagtaaatagtaagcggtggacatacgcttccagaaaggtattcatcttctcggagcggttaatccctacatagacaatatattcctgtaggatttacacaataaagtatatgcaggaacagctggaggaaatgctgttgtgtttcagagcaagagctgtagagtggaaaattcaacatactggtagaattagactatcttgtactaacatggtctgtattgagtagctacaagtcacttgacaaagctattacctcagtgaagatgaaagttcttggctatgagaatggcccgtgatttataaagaaagcttattagagttagtagaatgtatatgtttctccaaaacggggatctaatcttcgatctcatcttctccaatttggggattccccatcttcctacgcagaaatccccataattatcaccctatggatggaatacaaccaattagctgcctcggttgtctcaatcctccgtatacccagataaattgtaaggcttgtggtatagctaggtaccttaccttttagtaatgcgcgactcagtttaggtgagctaccaagttaaatactatgtattggtcaggcagtgtatttactcattgcctcggcttctgcatgcttctctagtatttaactaccagcttttcctagcagttcagctcatgcaactgtgccagtcattaccttctgattgttgtcatggaatctgctgacaatctcaaggcccatcgcaggcaaaactactgttaccaccttgattattgaacataatagtgagttcatctcaaactgtataggtcaggtaacttgagtcaagatcattcctagaattcataaagagacaggaagaccgctgttaccaaataacttaatatactaatatgcaatgctcaggagtaataatgacatatttgattacatgaacaaatcagtctacggcttcctgtatggatatcttttgctatgaaactaggacacccataatctaataccaagatccagacttggctccgtaatatacaactacctcattgagaaatgtgactttcatccatcgaccgccgaaatatggagtcgctgtggatgtctatactgagttcttgtcaatggcatacccagcgcttacagagctaggtctatgtgtaaacaaacttggaagatatagcataatattcgaagttggcatttctgagcagggtgaggatgaagtcaaggccgtggcaagctgtgttcatgtctttgtcgagtattcaacagggagaccaccacaagaagataggactacaaagttgaggcaagctcttgaaaagctatatgtagggtataactagattagttatagcaaaccttgcattttccaacttagatcatttcccaaacttttcagctaccaatcaagcaagaagtcacaactctatagaccagatacagtcaaattgattatgcgataactgtgcagaggcttttctggtccaaggccatactatatcaagatgctcagggcccacgggaaaatagttgataaagggaagtctaatatatacgtctctcaactgacgtggtaattggtaggcgggtaaggtagtcatggaaatctcggccagcttcttacaagcctgagtatatttgctagtactggattgcgtgccggttgaacagtgtagaagagctggcatggtaatgactattcaccatatagacctataaaaacgagccagtattacatcagtcataggagccaccactgcaaattgtcacaggctatggcctggatcttggttgtcggccatgccctcaacctggttctaaataaggtttctgaaacatcagtgtacagcttcggaaattgcggcctcgaagcttaggaaaggagatccgtcctcataactttggaaaagggatccgtcggcatacaggtccgggaattcagaaaggttgataaagggaggaggaagatatctgcgcttctatcttttgtttctttctctaagcttgtgatactcgtttatacaggacagccagttaaaaataatactgcctatgcccgttacatttttacttaaaaagcccctttttataagtattaatagctaactgtatatgctcttcctttgagagctcagccatgttattgtgattgaatggtgaactgataaaggggtggtcatgttatttggcagtgaccgcgcagcttggtggtggattacgttaataagttttgcttagtaattattttagtattcctggtagacctgatttttgaatttataatttataataataaataaagtagtagatatcaatattaagaagtttattaagatcaagattattagttgccat

SEQ ID NO: 725 - DNA, 2422 bp, Emericella nidulans
tatcagcatgatggggagcttgtatggtgagatagctgatttagaaacaatatataaccacaccacaatcatgccaagagactcggcaagcgaagatcgcgccaacacacgtaatataattcgaatgcttgaaagttctgggctggaaatgatatcctccgtagactgtagcctaggctaaagttctgtggagatgaacgcttattttctccgactcgcgttaagacgaactaccctgagtagtgtggcgaaagaggaaagtgggctgactcctgtactgccacaattagccttacactagctgcgccactacaagctgctcgtcattggtcgaaccaggcgcgcgttaaccagcactgggtcacgccaatcctgattaggtcatgcccctcatcgtctggggcgatgtcatcgatcggttgcgtcggttcgaactcatcaggaacataaatatacccagttcctttccttcctacaatcctcttcgactttaacaaattcatccactctttgtcacgcaatcatgtcttatcattattcaccaaaccgttgagcccttgatagcttttcatttgctttcaaatactaacaatcgttgtttcagagcaatacccccctccgcagggtcctccacaaggtggatattaccccggacctcagtataacgggcctcctcaacatggttacggtcctcatcctggctcatttcagcctcctcctggccctcctggccctcctggtcctcatggtcctcattcatacagcccacatcctccgccccaacctggatacgctccttctggacctcctgggccttcccctggagggtatcagcctcagcagtatggatataacgcccaaggtcaatatccaccgccgccacactccccccagcccccaccgcaacaccctcagcacttccaaccccctccggggcctccggggcctccggggcctccgcacggatatgggcaaggatttggcgctcctcccatgcctgccccttcgatgccttccctaggttacgctcccggtcaggttgcacctggcgattttcgccgggaagctgacgccctccgcaaagcaatgaagggtttcggtacagacgagaaggcgctcatccaagtccttagcaagctcgatccgctccaggtcgccgctgtccgcgcaacatactcatctcacatccgccgcgacctttatagcgatatcaagtccgaaacaagtagctactttcgacagggtctgctggctatcgtcgatggcccacttatgcacgataccgcgtcagcacgtgaagctgttcaaggtattggtactaaggagtggcttctcacgatgttcttctcggtcgctcaaatgcggaccttaatgcaatcaagctttcctatgagcgcacataccgccgctctctcgaacgcgatgttgaaggcgatctctcctttaagacgaagagcctcttcgcgcacgtcctccgcgccgcacgccatgaagaaaacgcccctattgactaccgcaccatcgaatccgaagcccagaacatacacggcgccacagcggcacgcatggttaacaatgcagacgaagtatgctctatcttcgcacgcagctcgaacaacgaacttcgagcccttagccaagctttctcagcgcgctaccatacttcacttgaagcacatattgagaaggaattctcaggccacatgaaggatgcactgctgcatatgctccggacggcgttggaccctgctatgcgtgatgctgtgaatctggaagaatgcatgaggggcatggggacgaaggatgagagacttgttgtgagggttgtgcgtgttcattgggaccgccaacatttggagaacgtgaagagagcttatcaacataagtataagcaggatcttgtgaaaagggtgagaggtgaaacaagtggagattatcaaaggttattggtggcgatgttggagtgattcattcaacaccctcgtgaactttgtatttgctacagttgccgattcttcttctttctgtgtattattcttactctcgatgttgatccgatgctttaggtcaggcaatttacctggcaactctttctctctgagttatgaccaagataccattactgcactaatgaataaatgtttgacattaccttccttattatctctataccccagaaccagtatcagacagctcgccaccttctagagtttgacagtaggacaacttgaacgttgacctcacatacagtgactagccggagcatgaaataaacaatccgcttaatagaaagatttaggggcgactgcgcacggttgagaccaggtgagggctagtaatgccaaaagaccccaagtcaagcaggccaactggtcaatcaaatgcacattatgtacagctaaaaagccagcaatccagaaag

SEQ ID NO: 726 - DNA, 1949 bp, Emericella nidulans
ttcctcctccgcacatgcccaggtgcccttcctctgaccatgtctctagcccagaccaattacaaagcgtcaccaaaaagatgacgatgacgggaacgatgtttgtcgtatactgcgtaggcaacattgcaggtcctcacctattcagcgctagcgaagcacgccatgagacctcattcctggccatcctcatctgctatgcgctttcggcggcactcgcgctttccctatatgtgtatctgcagcggctcaattcccagaggaaccgtgaagaaggcacagtgcgcgctggaccagttgcggctctccctcaacagccagatagacctacgggcaggtccgcaaccagcaccgaaatatctccactcatccgcacatctcaagggcaggatgattgcgacctgaccgactggaacacatttgggtttcgctaccgtctatagatacaatgatagaccttgccaggttataggagtctcaagagccgagatgagagccgcagaccgggcgatcccggtctgaatccgttaaataaatttatggtgcagaaattagatgcggtcatcagcagaacaaccccataattttgcttattctgtgcgctggttcgtccagattccttgctaggcagctttttcgggttggcccagtcgacgatcactgcataccgttcttgatatcgcattctgctgcagaagaaacgacaaaccacgcggtagcagcattgttgatcgccttcattaaaaaagccatctcttggggataaggggtccacgaaatctaattaacctagaagagtagaagaattagttcactgacttacgtgaggttgattaataatccccccccagacactgcccagtgccaagccgaccctcgttcttcccccgtcttcgtgcgtgcttctccgcaggttcaggcaataattgctatctcgcccttccagaccccctcgcctcccataaccgttttctctcgaatgatgacctgaaccccgtcgctggggtaaccgcgcccatcatgaacccattcaaacccgacgagtcctcttcggcccattccgcgctgcctctagccccaggccacgacgacgtcgctctccccgacgatttcgactcgaacagtccagccagctcgcgcgagcccgggagcgcccagactggcggtgatgcagcaggatttcaggatggaaaccgggacaatgcggccgaccgcggggacgacactccacaaacgcaccaggaacaggctggtgacaagccgccatggagcgaaacgaagaccaaggccggcaaagagcggaagcggctccctttggcatgtatagcgtgtcggcgaaagaagattcgctgctcgggagaaaagcctgcatgcaagcactgctcgcggtcgcggattccttgcgtgtacaaggtgacgactaggaaggctgctccccgcacggactacatggcgatgctagataagaggttgaagcggatggaagaccgggttatcaagacgattcccaaggacgagtttagagatatgggcgcgattggccgggcgaatgtgcgtcccgcgcagccggggcaggctgtcaagaaccagaagaagcggtcggccgatgaagcttttgccgctgaactggagcagtgggcgcgcgggagccgaagcgggccgcaggatacctttcccatgcggcgtgagggcaagcctgatggcccgagtctgatgactgagggggccgagtttctgccgtcgctggagatacaggaacatctggcggaggtgttttttgattgtgtttacggccaatcctacctgcttctgcacaaaccgagctttgtgcgccgtctcaaagctcgcacagtaccacctgtgctcattcttgcggtaaaacaagacacggccaggttcacaacacatccacagattaactctgaacccccgttcctacaggagaaaac

SEQ ID NO: 727 - DNA, 3494 bp, Emericella nidulans
gtgttgggccagccaaaatttgtatgtcgttctcaaaaacaattattaaaatgtcaattcggctatccccctaatgactcagcgtttgtgttcgtctggacctaaatatacataaattccgcttcgcattttagcatcctaaggcaggcctgactctgtcgtaataaaaaactaagcatcttttcgttgccttactggtcctatgggtttctagagaactaccctttgaaatatggcagacggatcattaggtcgtattacatacaaacccaggaacacctctggcattagcgtttccatgaaggattagggtgctgacgcacggtccaagcgaaccaggcaggtttagatcgttagatctggcagcgggtggcatgagatccagacatctgattggaagagattctgagactgttgcccgaaaatatcctcgcatggctggggtcagctaggcgagagtatcgtgacatttcacgtatacatacaactggtcattccagattacagacgctctcgttagcgacgatagagcaaaattggtgagtttatatactgtctcccccaagcgcgtaattatctcttgatggcaagatttggcgggtcagtttcgtcgagactgaatatcaatcaaatagcagcaataaccaaaatctcctagtagctacaatagacattgccatacgggccagacatgtttcttagtactgtaccttttcgctcgtgaatctgggaccttaaagggtgacctttgtcccatcgatgaaattaaacaagctaccgggtctttctctcgttgctctatcagtatgcaagtgttagccatgagtgttatttattatctgatagtgagaacatcacatgcagagtcctcaatagcatcgaaaatatggcgctgagacgagagcttatgtggcctcgtcgactcctattaatggggcactcgcgtcgccgtctcgtttgtttgacgaagctgtcagaccatataggaagtggatctcacagccgataaagagttctgttccggtgatgtggcttatatcaagatccatagtaaagacgacaaaatcctcattatgcgctgtgaacggctccaccgtatctgcctcggccgaagccctagcttgtccccaggattcagatttattccgacttgttgtcttgcgtcgtaaacccaagtttagcttcgacctagcagctgcttaaccagagatatcaaagagtctgttgagccctaagcctactggtgtcccggccgcatcgctgacgaacgccacttagggttgatgtgtggcttagcaaacggtttcaacagcttgatctgatgcaggactaatttccagagcattcaaggcaaaaatctcggcaccaggctagttgaagtcaagacgtagagagaatagggcatattatgacgtcatattaccgcagcgtacggagttataagaacggccttaactgtgcacattagatcccagtaccctaatcatactttgagaatgattttggtcgctgttcaagcgttgccttgctcgcggggccggacagaattgggcctgacgggattctggagccctcgactcatgcatacgccagcagagcacgaattgaagctggtatcggataacagtctcccccgtacttagatctcgaacccaatctgtcaggataaggccggcggcagctctttcatttctgaaagaatctatattgtggaatgagagcttccactccttctgtctcttgtcccacattttttcccggctcgctctacccatgaatggctatagagccagcaaaggaatgttcgtctggttctttctagacggcacgtatttctataggtaccgctaacaaggaaccggtcaagtattatcggaaatatgaagagtcacaatgctgaaccgattgatccagtggcagctatagcatcgcgatatcactctcatctctcgtgagctcccaagtatctcgatgtaccttactatcactactcatcagcatgaattgaccggtgcatggctggtcaagttgccgtgtctttcctaagtgtgattggtctatctaatgctaagccagaccatgaaatggaaattttataataatggttggctcatctgaggccgggccgtacgcaccaacatctgtaatcagcgtgcagaagacggatgatgccgatttcagccaaagttccagccgcaaggccggcccgaatagaactgcgttcgtgcctttttagactgcagtttgtatctcctcttgagttgggcaatgggcaaagaatctgcaggtttgcggatcgtctgggcgaagtgcatcgtctcggtctagggggaataatagcaaaatcgcacgtctcattgggcagactaagattgaattactgctgcttgattccatccagcttaagccagcagctctcttcacgtcgctaatgaaatttgcggcagcctccgttctctgcaagcaccttagcccatatgtggaggtgcgaactcagactggtctatggaaagggaatacaaatcatcaatccatgaaatagacgctctattgtctatagaaaaaacaccaggctctaatctatgtctataggattccgcgtactccccgcttactcaaagatgctctccttataagctttggggtcgatataaggcgtgcccccgcgccttgtgaatccccaccgaatctgactcgccatcgcaatctcaacatcaagatgctgcgcgaaagtccacgccagaccgggatccttctggaaaccacgtcccacaagcgcaacatccaatccctcctcctcaagcagcttgttcgcctgcttaccgttcgtgatcgtgcccaccgtcgcaacaaggagcttatcgccaacggccttcttgatagccacagcgaagggagcctggaaagccggcccggacttgatcttctgcgcggcgtggacaccgccggaagagacgtcgatcaggtcaatagcgccctgggcagcgagggcttcggcgaagcggacggagtcagagagcttccacgattcctcggggagggtctcctcgatccagtccgtcgcggagacacggagaaaaacaggaacgttggggccgacggcgtcacgggtgacctgggcgatttcgagagagagccggatgcggttctcaaaggagccgccgtactcgtcggtgcgcgtgttggaagacggtgataggaaagacgagagaagatacccgtgggcattgtggatctcgatgaagtccgcgccagcggcaatggcccgcttgcacgcatcaaaccagtcgcgcttgaactgctcgatgtcgtccttggtcatggccttgggggtggggaaagtctcgtggaagggcacggtggacgggccgatcacacgatccggccagccaccgaccttctccgtcgcgacgatgcccttgttcatgagccagggggcgatgttcgaagccctgcggccggcgtgggcaatctgcacgccaatcttctgggac

SEQ ID NO: 728 - DNA, 4829 bp, Emericella nidulans
cgggctgcgggtcggccatctactttgcaggtcggcgaaggggggttcccgtcatgcccggtgcccttgccttcccgggcccttacgcctaccgctccccatttaagaaagccgacggctcctatgactgggaagccgagttggattttggctggtctatgatcgaccggcagagcgttggctccattgccgccttcatcatggaacctattctctctactggtggtatcctcgatccgcccaaaggctatttcaagcgcatggtcgaggagtgccgcaagcgcgggatccttgtcataatggacgaagcccaaacgggagtcggccgaacaggccaaatgtttgcttttgagtatgacggaatcgtccctgatatccttgcactgtcaaagacacttggatgcggcctccccctcgcctccgttagcacaaccgccgagattgcaaagggttgcaaggaggccggcttcctctggctctcaacccacatcaacgaccctctgaccgccgccgtaggcaacaaggtccttgaagtcgtggaacgcgataatattgcccggcgggccgcagagcgcggcgcccagctacgcgagggtcttgtcaagctgcagcagaagtactggtgcattggtgacgtccgtggccgcgggcttctccaaggtatcgagatcatttcggaccctgagacgcgggctccaggccctgaactcggccaggctgtttccgatcaggccatgacaaaaggcctgtcttgcaatgtcgttaacttgccaggaatggggggtgtcttccgtttggcgccaccagtcacggttaccgcggaggaaattgaagagggacttgcaattttggatgaggcgtttggggacgtgctcaagacatggtcggcttcggaatctgattccaagttggggggtttattcaagtaatgattttatgttatagtcatcgtggtagatgagggcacttacaaatgatacctgctcggccactgctagcgtcagcttactttccacgtctgttttcccgttctctactcagtctagggtttttcgcaatagccggagatacgatgggccattgcaatgcggcagaaaacgcaataccgtgggtatcagactaggtggtttcaaatacaaattagagagccgagaggcgggcttctcgagtttctggtcaagtgtttgagcagattgtctaggggcaatgattttgcttgccagctaaacaacgagagttggagagtactgaccagggcagttccaagtcctgataatcaaagggacggaatcctcgactctgcagacgacacatatccagatgccttcgggggtgtgcagctcattatctgcccaccggcctggtgtccatctactccggttagaccatgcaagtgatcggccgacaataagacttacgatgagagttctttctttctttctttcttttttttttcttttctattaaaaaaaaatcaccatccaaactcgcatctgctagtcatgcacctttacatcgttcccctcgtcgccggagttttgggcctttggcttctcccatcgtcgaatccctatggccgtctcgtctgtctctgggtttccttctcctacacagctgccttgccgctctctatgtcggtattaaccggttaacagcggaccacactattatattatcacaaacactttgctgattatcggctactggttgggcaactttggtggcccattcttaaaccctgaccccagcagccccaaatgtatactggggggtggaagagatgctctttggcattgcagtgcggggaaattgccgtgtcgcgttgtcgtgttgctatggtggcggggctcaaagatggaggctttatggagagatcaaggttagcgaagaagagagaataggttgggcgtcagacaagggaatgctagaccagactgatttcgaaaatgagtatttccgagtatgtttgcttctgtctctttgtgttaatctaagttagctgacttttcttagtacgtatacaagtatgctatataatgttccaacgttgttcttgcttccctaagtctagagttcagacatcattgcctgagctgcttgaattgtgagggaactaaatttatgtgaatcgtttaaccttttctttatgattttatttgttgctttccgttcagcttatcaaaggttccaactaccttaggtctctagtctgctatctcgtatgctcggagtcggctacatgcgagttagggctgagttgggtaaactccaacattcaagccttaacgaagtcatgcttgccaagtcaaaggaagaagacctcgaccaagcggaatttgatctgtccctctaggaagatgcattttatagtgcttgatgatgaaatgatgaaatcgctgtagtcaaatggacattgatcacactaagtttgactgctgaactctcggctgacctggagttgtggtcggttcttccctacagattgcagagcacttttgtaaataataagttgctcactcgcgtgcgcaagccttgaattagacaagtcaccttgttgaacaaagttatgaaactgaactaccgacaatcgacttcacgacgtggtttttgcagccacttttcctgctgttaaccgcttggcgtacaaagccgagcctcatggcttgggacttgagactcgggaaaggcaaatgaggatccatgtatacaagatgcgatgacaattgagtctcggccaagggaagccgtcgggaccctcggactcctggtggagccgtggcttgaagtatgaggtctagaccagcaacctcaacatgaaacctgctccagaaagtcttggactcttggtgtgagtcttaggacaaagactactactggagtacagctgaatctagcttcggtgccattcgttatggatcatcggatcaggcttccacgtttgccagatacagaaacatgcatgaacttgacatcagctcctatttatggcgagactcttgactctcggaatacctggccaggagaagatttcaggtgaaggcacatgatgagtcggaggtatgcgttgtcgtgcgttgtacagcgtaatctccaaaccacttgccactgttgtctgtctggcccagcggcataattctgagcactgactcgtgcacggggataaataaatcatgaataatcagggtcgagatattaatatctcagtggagcttgaagcacgtgatttactggacatcagcacgaactttcctgctgaataactcgcatcgcgggatctcctagccggtatgaaagagtatcgtcgtacttcgtaaatttcaaatattgacattagtagactgagaaggcaggtcggcacaggctcataccgtgaaccgaatcttccgagcatcccacttcacagggtcaaagggccaaggcagggcaatcagcctgtaacagggtttaattcagggactaagaatggaggaccccggtttgagggacccgcaatggcccaccaccagagaaacaaagcctgaaagggaatcatcttcattccctttgccgttgcgcacactctgattcgcttgtcctagagcactgcctctggatggctgggactgactctcaatcgaacaatgtgagccacttgtcaggccactcaagcggtgcctcccctggcgatccgcctatcgctgcctggcccggtaggtgatctgctgcagcgcatcttgaaactgttagagatgacgaatgctccattcgaagtgcggattggctgtgacttacatttggtaccgtatgtttgtattcgaattactgtctcttcggctgccgggctgcttgagtttcccccgagagcagggagatcgcgaggagacattgtcccttgagccgataatgaaatgggcagatgagatgaagatcgaacaattggtatttgagaatgctggagcacgggtgagaatgggtagatgatggtgatgagagtaattggggcagtcagtagacagtgggggtggtaaaacagggacagtcttcgcgcgctctagtctgtgcagtgcagcccatgcggctgccaagtaggagtgccccagcagtccatgatccctctttctcctctccttgcctcctcttcttcccttctttccctccatcccttccatcgcttgacttcttctttcttgtttatcctacatcaaatcgtcccagtcactcgtttggacttgcctttttaattctcacactcgcttttccgcaccttacctcgatctattcaacgtattacgtttaattcgcccattctccagtagccaactcgcaaattcatcacaatgaagggctccagcatcgcggctgccctcactttgagtgcttctactgttctcgctgcgcctaaactggctgcccgcgacgacgtcactcctatcaccgtcaagggtaacgctttcttcaagggtgatgatcgtttctacatccgtggtgtcgactaccagcccggcggctcctcagacctctctgaccccatcgccgatgcggaaggctgcaagcgtgacattgcgaagttcaaggagcttggcttgaacactatccgtgtttactcggtcgacaactcgaaagatcacgatgagtgtatgaacgccttggctgatgctggcatctaccttgtgctggacgtcaacactcccaaatactctatcaaccgtgcatccccggagatctcgtacaacgacaagtacctccagtacatcttcgcgaccgtcgacaagttcgccaaatataagaacaccttggctttcttctccggaaacgaagtcatcaacgatggcccttcctccatccttaag

SEQ ID NO: 729 - DNA, 3627 bp, Emericella nidulans
ataaaaaactgaaaaggggattaaaagaaaaaaaagtggccccaacaaaagaaatcgctagaggccaaagggttaagcccccaaagactgtcggattatttaaattaccgtgcgccattggaccaaagttggggaaggtcctgtgatccagggtcaagcggccctcctcagagaatttggtagggcagggggaccaagaaagaatgggcttaaccaagcataaaaaagtgcggtgtttgcacaacccaaaaaggggttttgccctggtttccctggtgagcaccagcggaggcaccctcaccgggggttggaccctggaatgggccggtcgaagggtctgcctgtccagtcatggtagtgtcaacggtagctgaagcgccggaagccgtagcggctgcgtcagccgctgggtgctggttttggaaagaatcgaagttctgaaaggacattttgagttggtttcggacgtcggtaaaaatacgattgatagagctggctgcaaattcagtgttagcttagcctactgtgttattcgcgcgttcagaatatgaatagagacctcgcataccttaagttttaaatgagaaacagaaatcccagggaaactttttgacgcgtaaatggccgggtaattcgttgaggtcgtcaaggagcgtgtcgtacgttcgttgagcacttggtgaaagagtacttgactcctggacgcgacaaccgcagttagctaaataagctcagctgtgagtagatttgaggacgagaatcaaggcacaggctggactgaaacaaaatggggccgatgtgatttgaacaacaacaacaacagttagaagtggaaggaatctccagggaaccgatagccggaatggaagcccggccgtgatagcggtcacttctgagtggaaattttaaatgtaaagcgatgataagattgagcaccggaaaaagcgaccgtgctaaacaggaagttctggattcgaaaaataaggtactgtcgggcgaacgaaagtcttcaccaaatcgccggatccgtcaatactttgccatcccttcaactgcgaccgtcttgcgagacagcgaggttgccgccaattcaagttgcccttcagtgacctaatcgcaggtgctaggaaatatgatggaagtttgtagaccagactgactgaggctccaaataatagggccggtagttcgaggtttgaccaggaacagcgggcaaaggccggacgaaggcctggagccgcaggcatatagcaactgacacatcgactgacgttattgttcccgataaaagtttaccggtatcataatagaaatcgaccagctgcatcgtcacgtcccccagaaaggtgtccggagcgcccgggtacagttttgcgtcgagcgcatcaagagaaatgatcgctgatcctcaaggcgacaccagaagcttcccgcaaaaagaacaatgaaccggcaaaagattggagtccaccccggcgaaagggaaaaaaaaaagaaaacaaattgaaaatgacttaccagacaatgcagtatcaaacgggagtaacctcgagaaatgagtatcgcaggacggtcgagggcgaggagatcaatagcgttgctcaggcgcggcacgacaaagttgtatgcgtgagaacagggcgtaagatagcaggctataactctcagaaggcggagaatataagaaatagaggaagagaaaaaaggcagacaaaagacacaaagcagagttacagaactgatccgcaaaccgactccgtgatttccgacaagaacaagaaacaggggagggaagacgaggaaagaaagaggaggggtaggatgaagataattcttcagatgggaggggagagggaaagggagaagaagcgaacgaggaaaggaagactggaacgatagactggagactggagactgactagggcagaccagaaaaagacgggaacgccagcaaaagagacaagaaagactgaggatcggtaaaaagacggacaaacgagatcgcaggcttgcagcaagcccaaattcctcgaaaatattattatacacacgcacaagcacagagcactgcgccctgcctgtgaggagacgaggggcgacgctctggtgggacgaagaattttccttcggatttcaagtctctgtcatcattccttctgtccaggatctgcctgcccaccaggtttacaagccggcgttgcaatgcaatctacaaagtacaaagtatccaagagtactcgttgtactcactttcctcagtccatcaacatcatattggacgtggaaggtgtgcaaacagatggccctacccttgtcgccgagaattgtgactgagatacatgtacggtatggtatatacagacgaaatacgaccgcttgggggagcagccaaccgttgcagaccagatgaccgccgcaacctgcgggtttgcatcctgagaaaatcttaatccattgcacgccgctaatctcaagatacagcatctggggattgagagacctgatatacatgtcgtgcagtgcctggctaagatcggcccaagaatctggatctgaacactctgtgcggatactactagtagtcgctacggagacgctactagaagtaaaccagcctccataacatgatctcacatacaatcgttattggcgacgatctgttcaagcttcatcgcttcaaggcaggcacgcgaggctgtaaaacagcgattctacgtatttgcaggaaggattctgcaaggtaaggattcgacttgaggcacatgccatttttggggtaatggctatgatgttgcaaggactttttcgagctcgaatctcgcactgtgactcgtcgagtgtcatccgcgtcccatgggcccttcgtcatggcgtctccgccaggctctggacggcagtgaacgctcacagataattcgtagatcggtgcccgcttgcagttgcgccagcaccctgttccttggatcgttgaatccacggtccttcaaggcttgagacgcgtttgactaggaagagggctgaaacgcgagagctggaacctgaattcgaacggcaaaaaaaaagactggagagaacgttaaaaaggctgaacagtggaaaacgcgcccccactgtgagccccaaaaccttggtttcgtggagctcattgtgtgtgcccttgattgctcttgtgcgtgcatacaaccgaggccatctgccctttgcacagtataccagtcgccaggtcgataattgtcaaacccaaacgggctttggactgggatattattacccatgatcgtcgcaagtacacattatacgcagtgaggcgagtttccttgctttataaaatccttgcttaaacgtcggtaagcccagcgtatttacgtattgtgtacaataccaatttaccatacctggagcgctcagctaaccaccaagaagcaaagcagcagcggcctaaaactgaggctccagctgctgaggttatgggccaagatccactctcagaaacacaaccaaggcttgattcctgtgcgttagtatgctcttcgttgggccatcacgatactgctgctttttgcgttcgtgacgtgtctgctgaggttgacttcgtatagagacactatcgagacacatcaggaaaag

SEQ ID NO: 730 - DNA, 5624 bp, Emericella nidulans
atggctgataccaacaactaatactgcaatgaacgctcttggtctctcctcctggaaggacgtaaaggaggcactcgctggcttcccatgggtggatgcgatacatgatagaaccggcacagtgctttgcaatacgcagaaatttctcagcttctcaactcaaattgactaattacactgatacaacagatgcagcgacgaaaaggttacatggcacttatttctgcaacgcctttcgcacacatcctggctcggcagtctcgatttccttcacaatgagattccataaatgttcctgccactttttcgcctcctcgcccttcgcccaatcagggactttgtctctattgattatattagcacagtccgacgcattagaggtttggggccacgcactctctaatctcacaattggaagtgtaggcgccatggctttcctttcctagaacggaaccagcgagaagagtccgacttccatcctccgcagttcgtccatatagctcatgctgttcgacaattgcctgcttctgggcaggtgggcaattccgaaccagctcagtcttacagagaccaggacaaatggaattgatgaccaccttcccttgctcaacaggcaaccgagccgccagctcacgaacagctaaggtatccatcagcttggaaagagggtacctgctcgcacagcatatgttagcatcaacaagactcaaggaagttgtgatacaatggacatacgtaaccatcaattgctcactaggcaactcatccatcctgaccagcggatcctctcgaattttctcccacgtctcacgcacatcccatccaacaccggatgtcacaatcgacaagtgcggcagaacaccatacttctctgccgactccttcagcttcggcaacaacagcacggccaagagaaaagtactcaagacattcaccgtgagcgataacccatgcccctcggctctggtttgttccgccgtcgccacagccgcattctcaatcacagcatcaattcggtcaagctctgtaatcgcacgctttgcgaaggtcttgacggaagcatagctgctcagatcaagggcccagacctcggcgacgtcagttgtcgccgtggcttcatcgattttttgctttgcggcctcgccggaaggtatcgtgcgcacggctaggattactctctttgcaccgaggcggacgaagtgctttgccgcttcaaacccaagaccagtgtttgcgccagtcacgatgtaagtctttcctgcggtggattccgtggttgcgaggatggggagatcgcgaggctgggttgagacttcgtgagacattttattggctttgattatgagcgacgtgaaaaatacaacagctttttctggaagagcgaatttgtagtgagttttgcagttttaatggatgctgagcatgagcgtagaagaagcagatagcacggcatcacaaccctctttatacctcgatcccaggttccgccaggcacagatggaagccggcgtttacggacaacttgatgaacaatctccttgaaatgtctaattatccccgaggtaacccaaatatcaacgaaattcagagttgtcgccatgtccttcgttaccgttcgttattacaacgccgggcgctgcccgaaagttgtacatacgagtagttcctagccaatcagagagtggtttcttaaaacgggatagcttattctgcggatccaattatggacccacttttttaaatgacctcacagttgaaatgatgctggccgcctgggccgtcctggaggtaagacaaggatgtaaggtgcttatcgccgaattgaatatgcgtctaagtacttgtactctcatgcctttagtatcatgatgtgcgaggatgagaaaggtactgggctcttttactctttcaaaaaagtagccagttattcccaggtaggacgcttgtaagatactatgtttcccatagctaggcaattcactagctatttactccatatctagggaaagtatgtagtaggcggcataagctgacacagagatcgaggcgatgctatatgtgctgtggaatttggtcggtttctatgatgcgaaggcggtgcaaagagctctgtggtctggtgcaaagagtgcggagaacctgcaggtacgcaaagtcaaatatcacaattagacagtcgataaatcattatgttcggcgtacttattcgacctgatcaaagacctcatatcttccgaggtgtgaatggagtatgtacagtagcagaaatttcctcagtacgagcgactcctccaactccgacgcctgaatgcaattgcggaactgtgttacaatataccgcgtctattcaacgccagcatagagatcaacaacaatgttgatagcggccacaaggatttctgctgcgatgaggacaatcactacaacatattagcagggcagggtgatatcatgggcccgcacgtaccgatccactcaaggtactcaccgtgacggtgagttaattggtctttcaacacagcaagaagatctgctattacatctaatcgttcggtcaaaagactcacgcgctggtccatttccaggtaacttcggacagcttggtatacaggctccagctgtggctctgcccacatcaactcggggctatccaacaccgagccctgaaggtggatattgatacgtagtataaatagttctccgacttgcatattgatctgccgtcttgagaggttgacgcttccagtttgcgcgatctgggccggcaatggcgccgtgtttgagattgtttcggatacaagatcttcaaagagagacgtcttcaccgactgagctagtgcatgtgaaatggcgagcttaatcatatagtttcgggggtcgcgcagagaaatgaaatcgttgtaaattcgggcctggtattcgcgggcataataaaagttgaagttctccacctgggtgtcttccggacttagaattgaggttgcaaatttagatatatccgacaaaaatcgagactcttgcgcaggtgtcatgccccatatgacaacagtgccataatcgaaaagaaacacttccggagcatgaatagtggtgtcgatatccggggcattatcgagcacagaggcttctgtcgcattctgttgatgggagtcgcgatcatgcaagtcgatgagctcctctcgcctattgccgaagtcctcgttgacctccaccgcactgtccgagaaccttcgttccctaggcatcctatcgaccgtatgagtgttttccgaatcgacattattggaatggtttccagctttctgttttgcttcaaactggtagtcaaaccgcgagtagacgcattcatcgaacaatttgggattggcaccgcgtgttttggaccgtgactttaggaacttgaacacgccgtctagacgataagaattggctgtacagtacgccgttacccggggtaatctgtctctatctgcctttcccagcttcgccgcaagacttcgagcagcaggttcctttatccgcgcgatttgtctgtatacgtcggagggagatgtctcctcatcaacaagctcctcctctgttatagggtcgggtagaagtttcaatttttgcgcagtttttgtcgttctctgcggcccgatctttgaggctggatacgaagaagcgaccgagccaggagctccatggctgttgcgacggcgaacgttgctgttcagagcagatagcccagtcggtcttgagttggcgagtgaagaattgccagaagccaaaggtttaaacttcggatctgcagaagctgagtcgtggtatgtactgacggttgtgaggggattgaacgtcacagtacgaggaggccggttccctcgcggtgacgtattggaggatgcagcatggtgatattgagggagcagaggggaagactcagtagccgacgccattctatatgtgattgcatatggttgagcgttcaatcatgccaaacgaatggattaggagttgaatcgagtaattgaggggtcaacaaggagtttggtggatggtaaaagctgagcggatgagagaaggagctccagctttttgcacgtgcggccagcctacaaatcggatgtgaccgttataattgccagagaccttcaaccatttaccactgtgctttggacttaagttatcatcttatgctagagtaaaaatgtacggtatacgcagttggaaaaatcagtcaagagaaacgaagcatgcttaatgctcccggtctttacatacagattgccgttatgatcatcgcatttaccagagcttcaaaacgcccaacaattacgacatgcaaatcccaataatccccaatccgaaagttgaaatacccaatgcaatggaatagtactccgtagccaagtacggtaaagaattacttgcgcacgaaactcctcttgccgctactgaccatcctcatcccattaacatgcccagtactgcgggcctgtttcaaccaggcttctctcgcacctcgactcgcctttgacgctttcggcgcgagtgctgtgttcggctgcttccgcgaactctcactatccaacacacgaatggcgacatcacccattcgcacgtcttttggtgccttctccttcttctccaagaacctgagcttggttggttttttctgcgagaaaacctcgaattcgggtggaggtgtcggcggtcggacgtcaggcacagcgtttagaatgtcgtcggggagaagggcgggaagcgtcgagcgccgagtgtcctgagtgaatgagccttgcagcgttgctgagctctcagatagcatatcttctgcaggggtcccagctcctggcatgacctgagacgtatggacttcttttcgtttagctgaggctttagcttgttgtttgcgcgcttcgtccaattgccgccttttctctcgttttgcttgttcctcgctgacatgcggttagtgatgaatgggcatttgtcaaaaggatcaagaatacgaacattttccgcgcttcatcacgtttcttagcttcaagctttattttgtttagttgagtagagttgtccacagtttctggggcttcatcctcgctactatcctcctcgtcaagctgcttctgctgcgcatcgaccgggacctctgactccgccacgtcaggcaatacaggttcttcgctgtcgaatcgaaagtgtttcttcggcgctgcttcctgcccgatatcttcattcgtctccttcaccatatcctcagttgtttctacactgctcctcttcctgcgtttgttaccttgagtttctgggcttctggcaagcgtggaattatcagatttgcgcttcccactcaactcaggcgatccattcatttcagcatcttctgtcggcgagacggcctgaaatgctgctgatcggcgagtggtaaccattttcgatttcgttgcagggagggtctcgttcggttcagtagtggcagtagtcgagttaccatatgaattttgttcaggaaataagatgccctttgccgcggtgacaatctgtgacaacatagaggggaagtcgaccggttgttgcgcttcagatcggcttccgcggcggatcaaaaagatttatgaaaatacgtcggaaatttg

SEQ ID NO: 731 - DNA, 2834 bp, Emericella nidulans
gtgtggtggaaaggcggttgaggtcgagtaaagcagatctttagctcccgcgaaaccggtacttcgccgcctgaagcttcgtcgattccgaatgctgtttctgccagctgttgcagatgatctatgtagctgaataccacgagagaccggccaaattcttcccagagacgcttgccatcgtccagtaatttcgaaacggcccataagggtaaccaacgtggattggtgttgagcttaaatatgggaggtttgatcgaaggatagccttccggaagctcaatctcaagattaagaggtggtaggtgtgcgaggacatgcacatctttttccgtatccgccatggactggtcatctaacttggctttggagccgaggccgacttcgctggcatcgagggaggttggaggagtaagcaccgaaggaaagccgacttccgggcgctgatagaagcagacgttcagaggcgtcgctggtttcactggtatatctagtgacgcccggtacggagacgaagggtcaatcttgatttctgggaagatggcggcaatggacgagagctcctctgatctctcgtcttctggaagagcatccgaatccatcacggtgggtagacaagagggcgattcaaaaagattggagtcgcaagtgcttgatcgatcttgagacgaaagcggcaaatggcgatgggctgatcagtgatgagcaacgagtgtaatcatattagactccaatatagattacccgactccaaagtcctcgttcgctcgagtccgggatctggcaggatcgagaaaggagagccacttgctataaaaattgtcggaccagaaagtagattttaggctgggaaagtatggagaaaaaggtccaggaattcctgagaatggtatagactacttctagaagtagccttgcggtggcggagaaaatgaggcgaatggcgtgaagaaaagtatagaggtgggtcacgcaatctggatgagaggaggatcaggattcgaaagtcaaggattgattgctaatcgaggtatacgaacagccgaggagggatagtgagaaagaagaggagattgtctggcaggctggaaaagaattgaggacgctaaagcagactgaaataagaaagttggacgtagacgtggagagaaaaagtgcgtcatggttttgatgcgtgataggtgtagaagaagcttcagaagaacgagccgcagcaggattagaggcgaacaatgaagttacagacgaaaaagaggaagacaagaggaagttgaaggaggatgtgatggtggttatgactgtgacttgtgggggtgggattgcagttttgacgggaatcaggcagtctttgatgcccagtcgcgcacagaagaggtccctcagtttagattcttcatcgtgtctctatctgacttgaggatagcttgactaatataaaaatagcatgctattcgtgtcttaacgataataattgcttcttgcaagcccgtcaagcgactggttatcgacgtaagcctgaggccgctaatcatgccgaccccgccccctcatttctgccgccgccctaactgcacagactgcgcgtagtcacccgtagacgagtggctaaagcagcaggagtaccggctcggaaaaaccagctccgactagtcaggcctaacttgtcgcatctgatagtccaagctctccgcagtagaggtgggccgaagtcacctagagctgcgaacttcccagtacggttggatacctgataagggcattgcatttatatcaactaccgcccacccagccagcgaaaaatggaggaagacgagcagcctctagcgtcattatcccttactcacgttcattatgtgagtttcacaaaggcccggggacgtgcccaggcttagacactaatatggaattcgatgacagaaccctgacgatcctctatctctcgtatcggcatggcttgctctcgttcctcaagcattatgcgttgtctacgttactctcgtctgggcttcgcgcgaggtggaggtgggtttgatgtttgccgggcagctcgtctgtgaggctctcaacttcgccctcaagcgaatcatcaaggaggagcggccaaagcgtatgtcgattgaaatgagggttatatgcaagacaatcttagctaatcgcaaccataacagagatgtttggaaagggctacggtatgccatcatcccacgcgcagtttgtcgccttcttcgccgtctatttgaccctattcctcatctttcgacacgctccaaacagcgcaaaccagagcatcttgttccgcatggttgcctctctggggataactcttggtgctagcgcagtggccgttagccgtatatacttgacttatcatactgtccgacaagtccttgccggatgtgctgtaggggcagtttttgccctgttttggttcaccttcaccggactgttgcgcagttatggctggattgactgggctctggagcactcgatagttcggcttctgaggatacgggacttggtggtaagcgaagatcttgcggaggcggggtggcagcggtgggaggcgcagcacaaaatcagacgaagtgagaatggaggtcgtcagtcgtccaaggtagactgacaatgtctacatgtctttagcaggtgtgttaactacatatgatacccaagaccacttgcaataatctatatatatgcattccatgttcctcatatcacagtccaaagatcattttcacaacctctttctcacaaccgacaatgaagaatctcactccagtatcaactactctatataatccatatccatacttgtactgtacttacgaatggcc

SEQ ID NO: 732 - DNA, 5084 bp, Emericella nidulans
ttactgtaagttcactttaaagccactgccaagccctgtcacgtggctgcacgggaggtgcttcagcctctccgaagcaaccagcgtgttcgcctccaaccttcagatccgacgtccatcgttaggcttcacataccatcgcaacgcgtctctgcagtgatcacctgccttacatccaaatctccggtttgctatcattgtttcgagctcaaatccgctttctccgactctcttccgcatcaaaatggcctctgagctttggtacgtaatcatcacacagcttctcctttccgacatgctctgacagctgtgtctgctctcgacgataaatcgaaattgaatcgcttttaattcatcagctaaccttcttttcgtatagtcccgtctatgcggtgagtagttcgtcacctatcccagccaccagcgacccctagtattctcggtttctgtcggcccaatccgaattgttcagtctatggaatggacttgatagctgataatcttcttcagccattctttggctcccttggctgcacttcagccattgttttcacttgctttggagctgcttatggaaccgctaaagcgggtgtcggtgtctgctccatgggtgtcctccgccccgacctgattgttaaaagtacgttagaacccggcgttccagcgaagcataacgctgaatgagcttattagacatcgttcctgtcgtcatggctggtattatcggtatctacgggctggtcgtgtccgtccttatcgcaaacaacctcggccagaaggttcccctctacacagcgcttgtccagctgggagctggtcttgcggtcggtcttgctggtttggctgctgggtgtgtatacatgctaccagattcgcattcatgaagctaaccctccgaattaagtttcgccattggtattgtcggagacgccggtgtccgcggaacggctcaacagccaagactctacgtcggaatgattcttattctcattttcgctgaagttctgggtgagtaacagacctgggtagtgtctcataatgaatcatattaatcttggttctcttctgttgcaggtctttacggtctcatcgttgcccttctcatgaactcccgtgccaccctcgaggccagctgctaggaatttgaagcacgccctatgcctttgacgccgctagcgcacgtcagcaggcctaacggttggtgattttgtatacggagcatttaagcacccgaactcagactcgtgaacgtaccttatatgacattcggttgcgcttaacctggagggtttccctccaagttcagacttgcaacatcttgattggggaatggggaagccgttggatttctacacctggcaattataccaccacgcctagcctgcatacttataggctagatcaaagtggaaagcttatcgtagatacattgcatgatttgcggaaactgtactttatggagttgcttgctatggtcctagaagatctggtctttactcgcattgcttctaagtgttatgtccttcctagctatagtacctgacttatgtatgcggtcaatttcttatccttctccatcccccatcccgtaaattgtaagctgttttagtccatcctggccctgttgggcgttatcagcgcattattctcgaactgcgtcctgctgaagaattacctgatcagtctctcaaccgtggcccctggtttatccgtgagagttaaatgcaccgactacagtcaaattcggatcatgccacgcaaagtaccagttctattactctggatagtcggcgatgttgagatatttagtaagatgaacgcagtcatttagacatgccactcattattaccactttcgacgatgccctgtttcataatctggctgatttgagaggtgatgacgaaaaatattggtatgattcccagctctcctcgagaaaaccagcatccgaaaactcctgaaccatggagatggagtggacatcaaacttaatgatcatttagatgctcagaggggtaatgatgttatatatctaatatctgggctgaaacagcaatccgcctgtggactttgaagacttctatttacgctcctaatgcatgcagtgtttggcggtattctgggattgtcagttgttcttgacgctggagccgacggtgatgctcgcgattatttcagcgacacccttgtcacgacaccataagtcggcggcatgtagtaattctggcaacattgtttgctgcggggtactgatgcacatgtcctaattatggcatgggatgacgttctcgggtatgcagagtataacggatttgttgaaattgtaaggtcagaggtagcaaagggggatgtgtatatcaccacgatttctacatggcgctacttggagctactcaggggagtgtcataagaaccgactgcagagatatggatcagaatttaaggcggacactgatcatctgccctctgggtaccgaggtgtgaagggaacagggaagaacagtaaaagccaatactttgaatcaaagcccaatgatcacagcagcaaaaaagtcaatattgtctatggcgcgcgatgctggaaagatgcaataaatacacgggaggagacgcagagaacggaatggatataaccaatgatttcaaggatacaacgttctattgataggtagaaaaaataaaatgaaaatgaactcgattggagaggttagatataggagtcggatgaacaagtgaagacagagttacaaccagcgaccaaggcacgtaataagcgaaatagcaaatgcaggttgacctgattaggccttgtcgagctttcgcctcagtgttctcgtgcggcgcagcagcttcttgaacttgtgattcttcatcttgcgaatacgtcgtcgtcgtgtactgagcgcctgcatggttccagggttgcgcacgctcaaggtaggtggtctgggagccctgaggaacgtcgatgacggcatcgatcccctcagcgctaggagcctccatggtcctagcttggacgaacggggtggtgtgagcttcataggtcttgctgccgtcggagagagtggactcttgaatggtaaggacagcggagtagctcgacgtttcctggcgttgctcagcctccgccgaggcgacgtaaggagtcggcggtggtggagggttgaatgggcggagacgcttggtcatttcctccacagacatcttcaactcggtcatgtctaggccatcgagctggttgctctccatctcaaacgcgttcattattccgtcgttctcggcgagatggtgcgcggcatgctccatcgagttaactgccgaggatagggtgaatatcacatcgtccgaagagtttttagaaggctgcttggtgaatatcgagtcgaacgcttcgggggtggagggtggaggaactgtcgtggagacggagattggtcggtggatagaaaagaatgatgcgagttgaacatctgataccacgccgtcagaggatttatcataccagatatagctataaagattgctccgcttaccgtgtggctgcaaatgttgcgtcgagggaacactgggaaggttcgaaaaagcattcggctggttggacctggagccgttgcggccactgccactgccatccttgccccggcgtctaggggacttaccctgcttctctccggcggagctgacgtctttcgcgggcgcttgagacgaagcgtcgacctttctggagccgtcgctcggcttagaggatgaggaagagtaacggcgttgacgtacgatgccagcagatgttgtagccaggccctgggtagacgagcgacagataccagccactggcgctaccggtgcccaagccgcgcggcgtaatgaggatgacagcatatttgagctttaaacagtagaagacgatgttgccttggaacaaagatgagctcaatgaggcgaaatccaagttgggccgatcatgcggaaggcggaacggattaggtaagtcccgattaatgcctcaggcgctaatagaaaacactatcgagtacgagtactaggtactaggaagacttcgcggatttccaggtgatatagctaaattacacgatgaggaatagtaaaaagcataagtggtatctcaacgcatcagttaattccaaaacggttctaggtcgcgagaatctggcaatcgtgggctttccaccgcaaatcacctcgacttctcttcgcggcccaatgcagagagccacctttgtaccgagcggagagaagaacagaaggttccctagatatatcttgcaaatgtggtgggtttgcaaaaaaagaaaaaaaaaatgagaggaaagggctctttggaagagagaaatgaagacatatcaaaaacattcgtaaaatgtcagatttctgacagggagatgaacggctcgtatcaatcggcattatataggaagtgaacccgttcgtagaactgaaatgcgagaaattttgaagcaaggcaggcttcaaccgccgaatgaacaagatgcaaatatagtaaaggctacaaagcctcaacttatagagcataagaagcaagaacatatatagttaggcccaacaggccaaagatgtgcaaatcggaggcaaaacgctcagagaatgcaacgcgtaaacgtatatcaatgcaaagggaatctcgtggccgccgaaaacctcgtgaaattcaaagacagtcgttcgatagaaggtcgcttagagtatgagcgtgtggagattcttctggataatcatatcctgtacagagtccatggtagccttcaacaaagttgtatccgtggcgttggtgtagtgaatatagatttctcgctccggaatccggttgatacctcggaagcgatcggcgaagtattttgctgccgcatcaaagtcggtgttcgagtcgctgtagtcgggaaagtgctttgagatgggagatatcgcgagcttgtctttgaagaggtcaatcttgttgagaaataagataatgggctttcgtttgaaccattcgccgttcaccaatgactcgaaaagcatcattgaaacaagcatttggttctggtatgccaattcgttagta

SEQ ID NO: 733 - DNA, 1665 bp, Emericella nidulans
ttgacgagtacatcaattcgcgggacatcttcccagctagccaactccctcgcagcttctcgtacactagccagagagcccaaatcaagatgcagcaagcgcactttgacaaccggctgtgcctgggcaattgcaccggccgtttgctgcagctttgtcgtgctgcgtccagcgaggatgattagggctggcaggccgcgcgcaattgattccacgaacatcgcgccaatgctggctggtgagggcccagttgtgaggaccactttcccctttatatcagcagacagatggtccgcaagctcggaagctgttgtggttgcgtcgtacgatgttgccatatttcttggttgccggctcagcggctctctaaccattctcttgtgtatggtgtgagggaaaatgccgaccttggtacctagtgaagagggactgaaatgaattgtttgattgcgttctcatatggtataccagtcagttccgctatatctactatagcctcgttctgagctgacatcaccactaggccgctattgctgactgtcagcgttagcagcgccttatctccgacttgatatgtttcgtcgaaaaaaaaaaaagaaagaaagaaagaggaaaacctgccaatgcttcaaaattgagtgcgaatcctcaaagcttgacggcagaagaagagctgtcgtggaggagctggaattgcccacttcttctctccacgatgtattccagataacgctgtgtgtcgtctgtggacttaccatctacgttaaagcccttaaagctatgccgtagatgcaccagtataagcacatacgatctaagctgtatactttctggtgcatttatctctccagctcatgttcccagttcgcccgggtccttccgcatgcgggtgttcctccatatcatcctcattccaggtaagtagtgcgcgccattcctaactttgctgtctttcaatccaacctaccaacatttagtacggtagcattactagacttccccagtgacgcttttcaggatttctggcacaataactccggcatctccttggaagaaccaatcctttgacgtaaacgttcccttacccatgtcattagggtccatattaacgacagctaccctcgcccctttggctctcgcctgctcagcatacccggccgcaggccaaaccctcgagcttgttccaatgacaagcatcagatcgatctttccctcattcatccaattgtccacaaggtctagcgtttgtacgggtagggactcgccgaaccagacaacgcctggtcgcagtagaccctctttgcattttgacagcgtgggagagcgtcccgcctaaccggtttagcggaatgcctgcgcggaaaatcaagtccgcttctcttggttctttggtttttggtggtcaaggcgcggtaggaccttaccccttttcccggattgttgttggacccgccgggtcagggtctttgttccagggggggcactgggccgaaggttcccggccttttggtaaccttcctttccgacagtccccccaaagagtttaggggtcccttgcaactttccaaccttcacccctttgtgtggggcccccctttctgggattttcttctttggggagcctatttcacccctccttcaaaatcaatcttcctctcctccttc

SEQ ID NO: 734 - DNA, 3636 bp, Emericella nidulans
gcacaatgcattgtcacttgaccactccacgtcaaaaagtcaactattaccaatccgctactagtacagactcgctgctttgctcaaaagcttgcctctttttttatgatcttaatcttctgcgagagcttaacagtaacggttcgtgattgactttccgccttccgcatgtaaaacgatgaaagtcacgtgaatctacactccggattgcgttagagcttgatctagcttctctttgtatacggaaacagcgcagctctacgcatcacgagtcctaggagtgactgtttgcgctgacccgcttatcgttgctttcagagtgcatatgaattgcagtgattattaaccatcacgcctttcaccgccttgatcctgactcattgtggtgtggatgaagcagcatatatgtctcaggacgagatgtttcacccttgtatcatacccatccatctgtccgttaagtacagtgcggccccgtttagtcgatacaagtcatcccagcaaaaaatatcgcctatccgaggttatcgccaaggtgaagtttttattattatctaagcattactaagccaactatctaaggtgccctgagccctcgctgtaataatttcaccctctaaatctcgctctaaccgctcaagtgatctaagaataggtgctttagatgcatcctgaccctccatataagagatcagtagtcttacagcatcaagagcatcctgaggctttggaagaggtgctggctcagctgtatcatcatctagatcgtccgaatatatatctgtactcccagaagcctcagtaattagctgctcaagtaatacctcagaggacatcccattactagagctagtaggctcttgagactcctctgcagggttaagaaagaaggagatatccatacaatctgatagattcccagattgctgtaccttctcatatagtggttttagatcaggtgcttcaactggaagctgtataggatctggaaccagtgtgctcttatagaagcaggcaaggatagttgagcttaggacatcatgatgccaggaccgtacaagccagcgtatgcagtctagaatcgtcacagattctagtggatcaaggtccctctcatagtgggaaagcatatatcttaaccactgtttccgataatatatcttcaggttctggataataccctgatcgagaggctggtaccggcttgttgaattctttggcagccagcagatgcgtatattaggaggaggtggtgctagctctaggccagaaagatgcgcagggaggttgtccattgtaagaaggattgatcgctggccgatatgttgatagaactccaggagccattcacgcataataatttggttcatccaggcattcttgttccattgccatcgaattccaattgctgaggtattgatattgcgaagagctcgtggcttatgtgcctttccaattacccagattggtaatcgatcggtcccagaggcatcgacacagcatatcatagatatccgagacttatccttcctaattccaggcctattaacggaagataggctctgtgaaggaggcatacgccagaaaagcccagtttcatccatattatagatatcatcctcattatactggccagcaatcgtacgtatagccttcatcccttcctcagcatcttctagtactgagccagcttctccgtggtatgtccgctgcttgatattatagcgttgtttgaatcgatgtagccaaccactactgaaagcaggtgggggctggtcacgatactggggtagagaactccagatttggcgtgctttttcaataagaatttcaccactgatatatgcccctttgcaatcaagtgtatgatgccattcataaaggatagcctcaaggtcttgccactggccaatacctttgcgagttgccgaggaaggattgcattccgagtcaagataatgatattgtgggctgaggatatcagagacagtagactggctcaagcgatggttataatgagcttgaaaccatgctatacaggccttttgtgttggacggcgagactggctatgaacccagtctctcaaagccttccgctggacgtcagaaagccttttcggtggagccatatgattgggtagaataaggtttccactaggatgagcttttcaaatcgacgatatgcttgtcgatatatcggggatcggggttacatagtaaagcgaggtaaatttatatgggatggaattcatcccgagatgagatatcggctaagcgagtatcggcttggcggggccgcactgtatatgggccctaaagtgcacactttatgcgctttctttagtcgttattgtagccaaacgccacgggtgccagctgtagccgtaggactctagagcagactttggatcgcaagagtacttatacagagattaaatggtgatattcagttagttggagactcacctgggcaccctgtcgatcagaccccattggcgcctcagaaatgaggccataaatgtaaacaaaagaatttcaggagatccgcaattcgaacgatcgcgaccctccgcgacggcgaggccatctcaactctcagggttccactctacaaaaagaacgaactccaaggcaagcctcccaaacaattgactcagccttcgaggccccatccaccaacatgtccaccgtgacacccccggcgtcgagcttcaccatcgacaccccgacaatcctttgcatccttttcgccctctccttcatgcctatcgcctacgtccttggaaacaatctgatcccctcctcccaaacgcgcaaccgcatcctcttctactggcacgcctacgatgccctaactcacctcttcatcgagggctctttcctttacgaatgcttcaccagctacgcgactttgcccgctgggttcgctgcgccagaaccggcattcctcggtatcaaggatagagtctacggagctgcacatggatcagcaccatccgcgaggctctggcaggaatatgcgaaggccgataagcgctgggcgacggcagacgctactgtaatttccttggaactcctgacagtcttcctgggcggtcctgcagcgatctatgtctgttatctagtgtggcagtcgagttgcacacagccggccccaaagccgacctcgtctaaatcctcttcaccaaaatcgacgtccaaatcgtctgccgcgaagctggaaagccagggcgcttccaaagcaaaattatggcttgtggccacggctctcgccacggcggagctctacggcgggttcatgacttttgtgccggagtggttaaccggctcgacgcagttggatacgagcaatgcagtttatttgtggttttacctcttctttttcaatacgctctgggtttggattccgctttgggtgctttgggaggcggctaaagaggttaaacgggcgtttgtgcttgctgagggggtggaaggaaagaaggtcaaataatatggttttcgggtcgtatattgaattttgtgggaatggtctgttgatatctactccgagtatatatgctatgtccagatcttagttatattcagttgccgtagatctattgtgtaatgtacttcgcttgcagaaaatcaagc

SEQ ID NO: 735 - DNA, 3964 bp, Emericella nidulans
ccatataaactctctttaagggtcttgatgcccttggcactttggcatgattctatttcttgatactctttacctgtatacatgtcttacaggtctttagctgcttaattacctctttactaggtaagagtcctaatttctttattatctatctaaatctggcctttcctggatgacctagatattaataaagcaactcctaattaatctgctttataagtcttgtatatttattatttttaggcttcccaaaccctttagccaatgcattctggctttttacctatcctaggtaacttgtacagccaatattatatcctcttgctaggatctttcctctcctcttgaagaattagtacttcttctttacatgcttattccagatacctttatcttgcaataattaggttaataggagagtctatatcatcctgggcatgtacaatacattccagatcctagccacttttctactgcttaataggatccttattgttcctctaccagtaattttaatagatttactagctattcccaagctgcctctatatctctgatctagagacttaaataaattaatcttgctgctacaggtacttattgctctactattaataataggattattgctcccctttaatctgtatgctttcttattcttttcaagcaagtatttaaattaattactgatatgctctcttaattcaacttagtaggtattctcagctgctcagtaggctgtttatttatatacttgatatatgctatgtctggtagaacctttgctgctagtacttgaatcactatctatgtctatatctattttattatttactgtacaggctagacttgttaaacccaacccacggaacccgccccaacccgccccgacccgccaagaaatgggttgggttagaccttctaattatccattgggttttggatatttttggctgccccaaagcccggcggagcaacccgctgggttgccaagatatctgaataggtatattactgtatttaaattacattttcttacttagatagtttataatacagtatttaaatacagtattttattaactatgtagatcactgcttattaaagtaatgatatgcataactgggttattttgggttatttaggttgggttagaattatttgctaaacccatgggcggtttactgttcaggtaacccaccccaaaaaccgcgtgggcggatcagctaggcctgaaaacccgccccaacccgtggtttaacaagtctaacatggacattgctgaagtggcattgcacaaagcctatagcctttggtgtgtattgacaacccaacgtacccggaaggcgttccaggaagccagcccggttggacaggtccaacttatgaatggagtatcacaaaatcaacattatccggtgtctcgacgctgtttcccgttcaaacgggattgttgcgacttgcaaagagttctacagagttgttgcgggcgatatctgctccgacatcgcgcgtgaaattgatatcgatctggacacattctacgaatagaatccgctttcaaaacagaccgtgccgggcctctagagatgcctacgtctatgtcagtatctcaaggtgtacccctcctaccacgacagttaccacgagtggagcagtaataacaacaacagcagcatttgaccccgaccccaacacaagcaagcagtatgaaaatcgtggacaataatatctcgtccaggtgggcgatagacgttgaagtcttgcaaatgagggggacgttgtgctggaggaattctaagactggaatccggcggttgaggacacccggaacgcgcggatcattggcgtctcgtaacgtggcgtgaggatccagccgcgcgctgcaggcatgacgttcagctttcaagagccgggaactggcgaatcccatactccaaggccttagcatccttgttaaaagaggattgtttcctcttgctggtggataagattgggttaaaattgccaggagattctcaaggacagcttggcggcggcttgctcctccgcaaggacaagttgcccgacatagctccggtcagagtacgggcacatgtgtatctacgggcatgtgtatcttgaggccgtctttgttcttcttacaggtgtcgatgaacgattggggacattcggtcttctcgtcaatccagagatcatctcgctcgtcaaggatgtggaattcactcaccgtggcgtggatcgaccttgtgtcgtctcagataatttctttaatatcgtggcggaatggcttgctgtgtgtggttgcgcgacgaaaggaacatcgggtgagtttgcagaaaggaaagcacggtctaggcgaaagcggacggcattgcagagggtcctgcatgtcagatgcagggtcttgatgccgctgttggggagggccggctattatttagttaatttctatgggtaattccgcggagcttcgtgccattttacgtatctcttttgtcgaataatgtcaaggataggattcaataagactcatgagacggcgggtctgggcaagtttgggtagattgtatgtaatgaagtgcacatgggcttaatgtatctactcgggccaaatagcctatagagacggatctttgtcgagttaggcatggatctatatataacaatattagcatattttgattaaatcaatattctgtatttactataagtcggacattaggtgcagtaatttatacaattttatctctcggtaaaccaacggtcagcttatgggccgcggaacgccattgaactattaggtccaacccaacccaatctctggcaggttgtagctgcttggacccgatctgagaagttaaaccaaggccaggctggcaggatagaagcaggcggactagcggaaataacttattaccactgattccttcttctttatcctccatccggattacgacttcttgtggcgcacaaacatgttccttttcaaatacattaggcgcggaacttgccctaactacaacaccgtttgatattgcagcaccatgggctatgcactgttgacctaactggccaacgaacttctttacatcttttctagactacttcatgatttctggcgatccgattcctggttctgtgctcgccatgggccttttttacaatgccactattaggtccgacttatgctgctccacgctgccgctactcgacttagctctcacctatgggctagccatgacgctcgttaattagcgcgtgctatcattctctacgaaagctcctgttgaggtctcagcggccagcccgcccccgggacccgcccgggctgggcctgcccgtcagatggggtattgctatccgcagcgccttatgacgcatgctatctggacttaacagagccacaagtaaatacgattccagatacccactacagagggataaaccctgctagatagcagatgatcgaggaagaaatgcatatcaattctaagccaagctcgatctcccaacactcgaggctagcatctaggagatgcaagatatcgctagagcttgattccagctgctaatttccagcaaggccctaacgcggacgccaacatatctgattggcaatcgttcccgtccgtatagaggacagcgtgtacctgagtcgacaagcaatgtagtaggttcagcacttctggggttggcaggatgatcagcaggattgtagcttcaatgcagccagaacgtatgcttggcgcgtctctcaccttcctgggctagagataggttatcaagggggaagcctccacggagtaagatcacagggactttcaccatctgggtgtgtttcggtggttcgagcgcgataaggctcatacggataaacccttatggagggctattctgatagagggctggactcggctgttgttgtggcttgaattgaggtcaaagaagtcagacagttta

SEQ ID NO: 736 - DNA, 4136 bp, Emericella nidulans
gtgataatctcatgacatagtcttgcattgtccatgcccaatcccaatgaacctgttttttagtattgcagttgacgaaaacaagctggcttgtggtaaattgctggttaccaaagtaggcactgcaaggccaaagacaattaggggcaatgttagtaagtaaagtaagtaatagaggtagagcaaagaaggtctcacccgaagttcccgccaacaaaagtcagatccgccagaaagcctccagatccgttctccatatagataccttgctgggtgttgccaggaacatccgagttatacaacatgtagaactcaatgttctccaaggacgttccctgcgctacttgccagtggattgcgcacacataggcagatggatccgtaggccgaatatcaatcttgaagttcttgatgctgcgcaggaagttgttctggttcaaataccattgtccgttgtcgctcacgtaggggtcagaggtaataacacccagtccaacaaagcttgaggctgctaggatagtgggaacattcaatggctgcaggtgtcagtcaatgttcttcgcaattgcttaggttgtgtcttacgtctccgataaactgcgtattatagtactggataatcggtgagctgacgaggtatttgccgccgggaaaccagacgacggcaggatatctcgtactcgagccgcaatctacgccacaccgtcctccatcagagatggctcggttgatggcctcagtgtcgtctgtgactccgtcaccctttgctccgtagtcgcgcacgtttctccagacctatggaaccgcgttagtcctattcagtggtggatagttgagggtgattggttttgcatactttgtacccagcaggggcaaatgggctatttccgttcttctccatgtgtggcatccagtacttggaggagatcgcttctggagaccaggatcacttgttatccccaaatgaagaggccgcattaacagtctcagcataggatagaaagtcgtagagaccatttgaatggacaagggtttgtgccggagtatttgttgctcgcttccctctgttgtacttctcccggatcatcgcggctacctcactctggttcccgctcggggtgttgtcggtcgattcggcaacgatctttgctgccctggctaattcagctgggatagagtatgcagtgttcccacgggtcctggctgaaggagcgtcccgttttcggcggcgcgcattctctgctgcttgagcagtatattctaaaggagcggcagccgaggctggtctctgtcaaacgtaagcattctatcactctcaggagaaatttataatatgaaagggcttcagaggaatgcatacttttgactgtcctgggtcctgtatactgtactggttgaaattgggattttccacccgctctctgttgacgtgcgcaagtactgccagagcgttcttgacgatcgtggcgggttcattagagtctgtcgtatcattgcgggaccgcttgacatgatcgctgcgatgatcgtgataatggcgatggtgcggatggctgtggtcggcctgtgccacgtttaccaacaagagttgaaggatcaacagccagatcggcagggctcgaagccctaattcgcggatcccaagcagcctcatcgtcgacgacgtgaatgtctttgacagtctttgacgcagccagcaggtcgggtctccttgatcttaaagaacttagattgcctaaagttcactaaagtggctgggaacttgatgggcataaatctccctctactctatggcctgggcaattactaagagctacgagtatcgagaaccgagaagctattggaattccccaagccggaaaagcggtagggttccgacagcacatagcccacctgctcaatctaaaacttcgttttgctaatatagctttgcccctggcctcaactctttacagacctttagtctgagctaaggtcggaaaaggagcagacggagcatactaaaaagcggacacttttagcctatggagcttgcatggggttccgatgagctccgggacactattaggtctagttccacggccatacgttctgttttaggccacattcctcttggcatagccctaagtcatgccaagaatgttggctactgacaggccccaatgcgccaaaaaaaaagtctctatagagctgcctaaggatctgagacaagtgccggtagctgctatactgacgatcaggcctatgctggtaccttttggttttcaagttcaataactgcatgataagcgcaggccaacagtcaccagcctaacatcaatttgcctgcatacctagatagcataggctagtacactcctaggttacgaggacagctagggctgacgctaggaaggtgggcgtataagcctagcgctttacatctctgatgtaacgtcttgacagctttcctaaacgtaatcaccgtttacacatttaatttggaatgtttactactagtaatgacgcccctcatgctccgcttgccctctatgtaccaatgagtcttagccgacacgagatcggtaaggtaggaaagcagcaatggcgccatctgctagtttgcacgtctcggagcctcgctacctaggtgtagctgagacatgcaccaatctgttactggaggcgaggaggtatcccagattagtacttttgtcctagcgcaaaggaggaccaccgcagcacggtaaaccaaattaaattgctcactttgtcgaggaagagaagaggctgatagactgggtctcgaaacagccgagggacttaaagagggcgtactggaaatcaagcgaagtgagaaattgaaaagaaagcaaagcacttcatcctcagcttgttaaagtagatgagtctggaaaccatgcgccggctcaggcttccagcactctcgttctgtgtgcttgttattctctgtttgttctctctggcagcccacgctcaggactgcagtgcactcagcccatgtgccaccggttgttgcaacaaatttggctattgcggagtgggcgacgactattgtggtactgattgtgtcgccaattgcgattaccgctctgagtgcgatgcttccagaccttgtgcaacaggttgttgcagcaaatatggaaactgtggcctagggcccgactgtatgtatctcaccatctcgccctcacgcaaggaacaacctaaccgaggtcaaatagtctgtgcggaagatgtatgcgttgccggctgcgatagcagagctgagtgtgatccgggtgactacggagactatgcggatagccctaagtgccctctaaacgtctgttgctccaaattcgggttttgcgggacaacaaaagaattctgcggcaccaagaaagtcactcgtccttcgtgctccaagtcaaatggccttgaacgtgtagtgggctattatgagggttggagcatgaacagaccttgcaatgcattctacccggaacagattcccattggagtctatacacacctaaactatgcttttgcctccattgatccggagacctttgaagtgcttgtccctagcgtttacgaaaaggatctcatgcagcgtctgacgttactgaaaaagtcagatcctgatttgaaggtcttcgtggcggttggcggctggtcgtttaatgaccctggccctactgccacagtgttttcggatattgcaggctcggaagccaaccaaaagaaattcttcagatcattggtcagcttcttgtcaacatacgactttgatggcattgacctggattgggaataccctgttgccgacgatcgaagtggccgtgaagaggactataagaatttcccatcctttatcgccaatcttaaaaaggcgttgaaagcttcgggtggtcgagatggactcagcattacgctaccagcttcgtactggtacctgcagcactttgatattgtcaagctacagaagagcgtggatttcttcaatatcatgtcttatgacctccacggagcttgggatagcaacagcaagtggctggagccccagctgaacgcccacaccaatttgacagaaatcacaaacgccctggacctgttgggagaaatgatatcagccctaataaggtggtcgtgtt

SEQ ID NO: 737 - DNA, 3828 bp, Emericella nidulans
taactggatccctcgaacagaccatctcatccggataactggaaacatccactgaatgcagagcctgtagtgacagaactctttgacgcaggtctaatcacgcctaactggcttcactacgtgcgcagccacggctcggtccctcatctgctctgggagaaccacagactggagatatcggtgggcgagaacatgaccctattaatggatgatttgaaagaccagttcgagagtatcaatatccccgtcttcgttgcgtgcgacggtaataggcgcaaagagctgaatatgatcaagcggagtaagggattcaactggggccctggcgctgtagggtgtgcttactggagaggcgtgcggctgcgagatgtcctgaaacgagcgggcatcaaagcgttgatgaacgagtacagtgaatcgcgtctctgggtgaacttccagggcgccgagacgctgagcgagggcaagtatgagacctgtctcccgctagagtatgtgatggacaagacacacgacgtgctgctggcgtatgagatgaacgacttttctcttcccccggatcatgggtatccgcttcgcctggtggtcccaggttacgttgggggtagatgggtgaaatggctggaaaagatctgggtcacagataaagagaatgacagccactattattatatgggacaatcgagtcgtaccggagtttgtaacggataaggagtcagagctggcggagacggtgtatcgcaatccaagtacagcgtgtatggaacaggtgctgaactctattctggtcagaccgggccctaaagagaagatcgaccttgtcaacgtgaagaagggcaagaagtaccgaattcaaggattcgcatacaacggcggaggcaacgagatacagagggtcgagatcagtctcgatgaaggggtctcttggctatactgcgctcgacgggtaaggtacctccttgcacaaggaagaggaatagctgacagaagtagtaccccgaacatccgctgcgacatgggaagaaattctggacatggctacactggcatcgagatgtgagaattacagatttactgcgcgcgaacagcatcagggtgcgttgctgggatgtgaacaaaaatgcgcaaccggagcacccgacttggaacctcgaagggtaagtcaagaagcatgggatttgatattgtcggcatctaatagaaggcaggatgatgaacaactgtcactacactgtcaagtcagatattgtggaagatgaagaatctggcaggatatccataattttccgacatccgtgcgaacctgctacaggcgaaggaggatggatgaagccgtccgctcaaatccaggcagaagaaattcagagacaagcatcgaccccagggaagcagttcactcgcgaggagattgaaaaacatagcactgaggacgattgctggatcgtcatcaacgggaatgtatacgacgctacgggtgttatgagctggcatcccgggggtaaggcaccaattatggcacacgccggccgggtccatcaagacacgacgaacgagtttgagagtatacacgatgactttgcaaattctaaactcaaaggtgatacggaccgcgaaaagttctaatctggttgactgacgatctgcagagtgcatcctaggaacagtgacgaagaaagcaaaagacttcatgcaacaagaggtcaaagtgaaggctaaagagcgagcaagctcatccaagcaggagggtcagatagctttgaagcgccataagtaagtttcatgcatatgccactataacatgcttctgacaactgtagatggacccaagcgcgattcgtccgcaaaacacccttatctggagacacgaaccgatatacgtttgagctgcttgaaaggaccaagaaactcggtctccaaacgggccagcacattcagatagggttccatttcaaagatcagcttgtcttccgctcctatacacccgttaaaccgatcatggaggaagaagaagacgggaccttcgatctcattgtgaaaacatactatcccgaccccggacagcccggtggcacgatgagtaacatccttgactgtctggcggaaggagaagaggtcgagatcaagggccccgcaggtgaaattgtgtacaagggtaacgggacgttcaagatcgaccacaaggagcgtacttttgagcggatcacgcttgttctgggagggtctggagttacaccggggtaccaggtcattgcaaagatcctgttatctgatggaagggataagaccaagatccgtgttattgatgggaacaggacggagaacgatatactacttcgcaaggagttgcaggatttcgcgaaggagcatccggagcagttccagattgttcatgttctgagtcatgctggagatgactggaagggcgagaggggacacgtcagtgcagaaattctccataagttcgggtttgaacccgacgagaagagtgttgcgttgctgtgtggcccgccagcgatgatacaaaaggcagtactccccgcactggtcgactggggatacgatcaggacagcaatctttttggattctaataacctttaatgaggaaatgagacaatgaagcacatgggtagcatcatacatttatcgtcctacaaggggctgggtatagccacggagttgcttctggctccaaccgcgatcgacatattgctctgaattctctgcttataaactcgagaagactctgtaatcacaccactaccgcaccgggatatgcacatcaacataacggacagacaagtacgcaatttgcagaaaagcaatcgatggggaggtgtacttgattcgctattgttggctgggtttaggtcctacacaatgataggttacaactctgatcagtaacggaaagtgatagcactgacgctgttttcattgttaggcaggtttaatattgcccagataccttcaagcagcatctctctgcctgacccgcgttgttgcttcgaaagggcgagctggttgactcaggtgattcgctagccctcaagttggatttatcaccccccgtctatattcaccctacacccatgttaacccctatttgtgccaataacattgtcttagcaacttcaccaagcaatagttgcttgtttccaatgggcggttcgctgcccaggcaagctgcttcaagtcgcgtgggtgggttagctaaggctaaaaacccgctcccaccaggggtaacaggtctagctgttttccattatgtttcgattgatttctggacctccatagtttgacccgccacgtcactaaaggatatctaggcgtacagaaatcccatgaatgttgtcagtcgcccctttatggtttgtcgtcagaggcctcaaggatcgggtatagaaatggcagtccggggtattctcagtcattgtgccttattcctaagtcgggctaggcagagaataaggaggcatttgagaaagctgaagctataggcgacttatagtttatgctgatggcgagttggtcgatacgcggtttggctctacttcgagatctactatcagacaagatccctattctgccaacgaacgaggactgcccaggtttaactacttgtatgggcggttaacacagaactagtcttgccatatcctcacatggcctggaagctctttgttactagaagatttgtcgaccaactcatgaactgcacatataaagagctcttatcagatgtacatggcaattaatgggggccagtaatttgtattggagtacttgaaatgcaactgcaaagctcaagtgccctaccgtggccaata

SEQ ID NO: 738 - DNA, 5607 bp, Emericella nidulans
gatcattagtcggtggaggagcattagtgagctgtggcagagcatgaccaggaggataaacgccagggccggcaagaccaggcttcggcgaccgcacaccgagcggacgggcgccatcaggcaatcctcgtcctggttcttgacgagggctgggttgctggattgcaccagggcgaggtccctcgcggggatcatagccgtttgcgcccggcgcctgagcctgagtccgaaggtcgttgatgttacggttccaggcgtcaatctgctggggaggagcaggagcctgggcaggtggtcctcctgtgggagcaggagctccccactgaggtgcagggggggcaccaacgccaggagcctggtaagcctggggatggacgtcctgaggctgcggggcgggaccattgctctggccggaacctgacagctggctctggagaagctgcaggcgggccttgatatgaacattggtaggatccaggtcagccgcacgaccgtacgcatcgagcgcatcagcgatctggttgttgcaagactcataaagagttcccagatcgtaccacacctccgagatgtacggattcaggcgaatagcacgcgagtacgcatccaacgcatcacggtattgattgatctggtagtacagcacaccaatcgagcaccagaaagttgggttgcggccgtcgcgatagaccgcctgctgatacgcttcgtacgccttggggtatttggcttgcgacatgtaacagcggcccagaaggtaccaactctgggcatcggagttatctgcgctgactgacttctcaaggtattcgatagctttttgttggctctcgaagctaccgctttgctggtgatacaaccatccaagctgctgcaacacttttgcgtggttgggatcacggtcgagtacgcgcctatacgcttgttgcgcagcttcgaactataatgctgtcagcagatagaacaaccttatttgaaatattgcacctacatctttctgctgctcatgcacgtgaccaatctggaaccaaatgtcttcctcagttaaggggcgcggaggatcattgacgatgtatttaaagcactagactcgtcagtaatagctcgaacgcagcagtagtcgtgcacttacgtccagactctggttaaatttctgctgctgcttgtagattatacccaaccggaagtagatctcgttagccttttcgaagtcgggggccatccgcatgacttgagagaaagcttcttcggcgtggtcgagagagccatatcggtcataaaggataccgattccataccacaggttatgttcctatacgtctgttaggcttgatcgacagtcaaaacattgacgaaactaaccttaggatcccgcaagtggtaaagcgcttgttggtaagatgtgtatgcttcttgcaaattgtccatcataaggtagcagtgacctagaagggcaggttagccgtttcccgcggacatcgctgcttctccaaacatacctagacttccccatgtttctccgctaccgggatccagcttaagaatattctgaaggtattcgatagccttgggaaactgctctcttgttcgaaggatgcaggagatcgcattcatagcaggaacagaccattgattatgccgtaaagcttgttcatacgcgttcatagcgccatccagatcgcccatcagctcagtcaagttgcctataaaacctagtcagtatgcgaaagtttgcgctgggcgcgttataacatagcatcacgtacctatttgcagccagacctgctcattcaatgccgcgattttctgggcagtactgagcggaggcttctgcgccggcgactgcataggcagatggccgttcactgggtgggcggcaggtggccatggtggggagtgacgccgccagtaggcgacggttgggtgtgagccatagcgcaaatgctggattgaaatgaaatcgcaaaacagccggtctcggatgatagcgattaactttgcgacacaatgatgcaaccaatccccgtgtcacctctatgtgtcgcacagccccggtatagatggtcgcgcaagctggtgacccaatgaccttgtggttaagtcgcaacgttcgttccggaacaaatattcccccaacgtcggcctggcagcacgtaaggaggcaggccggttgaagtggtagatggcgtgtccgatcacctagttcttggcaaacaggtgggtaagagtaagaaggatatatagacacaagacaataataaagaagagaatgaagaagaacgaagcctaaagatgatgggccaaaggatgaatgcggaaagggcagaatacagaggttgggagagcgggcgaatagaggccaaatggcaatgaagggggtgctggagaagggtaggaagacaaaagaattgaagtaggaaggcaatgtgagcgaagaggggatatctgagaatactggcaaggcacaaggcaagggtgtccaaaaggaacagagagtagcgccaaaaggaggagagagaagaagaagaagaagagaagaagagcgggagaggatgggaggaaaggtcgaggggctgacgactacttccaaactccaaaagcacaccaaagacacaagaccccacccactacggtcgatgtctgatctctcaggcaccaaatcgagaacagaaaaagcagcttaatgtggacaatagtggacactggtcggcaatccaggaacagtctagctggtggggccgtcatatccgcggttagtgaagcctgactggcgcaattctccggtgcggcggtctgagcagttgtcttcagatatacgaagcgtcttacggggacatgccaccatactactatccaggcaattatggtcaaagttcaataatgtacggggcgctcagtaagattctcgataagcgagtatggagatatgcatccagctggatcctcagatttgtacggcgtacgccgcctcgcgtggacaccccattcctctccattccttttctggaaggacaacttttcagtctggagatggtgctagcctgaactgcggtttgttggcatcagccttgctaaatacatgaatgcatagatccgtctataaggatggagtatgcggccgaatatacgaggcttcaaaattaggggccgaaaattaccagaaagaggtcgaaataaaaaagcattccggggtcgttgttcagatcagtagtgcaggcgctagtacgccaaagatagcagagtgctagcaagtgattcgtgatactttgagcacagttgcaatgccagccgcccaggaatcggatccttcgggacatatgactaataagggcaagataaaaaggacagaagggccctgttgagttagaaagaagaaggtcgatcgcatggagtcaaaacagggcaaaaaaggctgacgactcgaagcgccaacgacggccaccacccagggatgcccagcacgaacccccagttgcgggctgtgactcgccgacagctgctgcatgtggataagacccgcccggcccacctttccccgtgccattttatttaggcaatttattaaaattaaattaaatggttctagcgcaaataataataatcccaagtgggcatgtgggcccttgggctgcgcacatccctgactggtgtaactccggagcatgcccagagcccggggccataagctcagcctgctaaggtcggtaagctcccggcaacctcctacataagtggcctgcttaaggacagggaaaccggcatgaggcgtttctcacggtctcacctcttatccgctcatacatacatgccgtaacgcagccccgcctgaaaaagctagtcgctgcaggtggcatcaaggttcccacacgaccttgcaaaccgaggaatcgaaagttgagcccggcatattcaacgcacttgctgagtcgtgactccaccactccagtctccagtccccacgcctggatggggccggcccttctgcagtcacactcacacctggccgacctggccgactcacaggcgctgttgacggaatgagctaaagggcccacaaaaagcaatttgtcggattgatcaccctgcccctaataataatcatcatcatcatcctcccaaccagtcttagcagtataagcagtaagcattgacagacgggatcatcagactgattccccccttcagcagatgctgcagggaagcgcctgagcaggttcaacgatgtcaatccgacgtccgtcaaacaataatgctgcatatttccggccatgttcagccgacaatcttatgcgttgtctcgcagatgcactatcaccatgataatgttatcattttttgttttttctgtcgtcgctgtagatcgggaccaagtggataattatgtgggtagtctttagatcaggagaaacggctgagagtggcatgcaacgttcaatttctggatctgggagatctgttccgtcatggcggcatcatgaattagagtcattattactctcgtctctgggtatccaggccgatggtcggtgcgccagtggcttagataaccctacgctaggctcgatgcagcgccccctggcctgcgcggacctagcttaggatcttggctgcctcaggcttgcagcccgtccgccacagctttaaggcgacggactttttgaccggtgggcccgttccgaatgctgtgctccaggctgatcttgatacatcgcctcaagtggagtcgtgcgatcgctcagttggtttctgtccagcacccttgctgctgactgcaccaccctttggtgggcattgaagggatacagcacgtagagttaatggtagacaatcgacaatccatagtcaggtgtataataataatgaagggtaattttattttatttttctttttctttttctttttctttttcttgaaataatatacgccaaaaaccccatagtgcagggctgatgtggatgtggcgccctattatgggagcaaactcgtccaccccatcccgcccttatcctcgggcccgaggaacggccgttggtttgatttgagagttgagactcaagttggcgtttgccgcatcactttaagagagaccttgaatgcgccagtgctaatataatatttgtgacggctgtcgctaggttttatctattctaggtgacgggcgcaataagatggacactcgttcatcgttcacagattagtcatcgtacactactcaacttatcaacttcaattcacatatatatcctatccaggtaaattcaatgtgaataagccgtctccctaaatctcagccttccttctaacacgtcgttacgcaggtatccagtgtgagatccagttcaagatcagagatctgggccacaaaactccgccactctttttgagaggcgcacgaaaagtgaagccagttagccacatcatacgctattgctccaattcagatacctagagtagatactccgtatatttaccggcactccgtatgcaccattccctaggtatggctggcactaaaattaatagccgaccccgcattgtcgtatctgagccccgggtcaacgaattgcaaccggccagaaagcagcgcttgtctttagccataaact

SEQ ID NO: 739 - DNA, 3705 bp, Emericella nidulans
taaattgatgtcgcaattcgctggatacgtttgctatgcgctacaggcgcaacagggccagaaccagcagcagcccaaagagaagaaaggtttcataaaggtgacgacggtgaaaatgcttgcgcaggctttggctgaggcagactttctttcccaagcaggcaggatggaaatactgcggaaaatgttcagttcggctcgtcacgttgacatccgcagggaaatcgttaatgcgctcttgaatcttgtcggcagctgcgagaatcctgagccatacaaggtctttgcatcgatcgttgcctcagtcgcaggcccaaatgagcgcgctgccaccaccgaagtcgaatgggagatggcggaaaaccctgaacgagggggcccgctaccctatgtcgcaccactcactgagcgtccggtttttgaactcggcgttttccgctgccttttggagtatcccggagaagttacggccagaatacgtagagaatgtactgctgcctctgttgcaggaatcctcacgtcagcacacgagatggatagctgcgatggccgctagactgggactctcgctttcggacctaaacatcacggaggacgatattggacctttcattccagatctcacaaataagattctttggcgatgggcagagtatctcccagagtcatttctacaacagttccaccgtccctgggcgttgagctacctccactacgaatccttcgctcgcattgacagcgcgctcgcagtaacggccgaagcgcctctcaaggatagtaacgttcgagatcactgggaaaatttctttgcatccttgtgcggtcgtcctgccctctacagcctagagaagctcctttccccattcgtcaacggggtctcaaaagcaccgaatgggttgaacactgcgctgattcttgaagagtttgagttctgcgccgagcttgttattcgaaatccagtcaagtacaaccggttttttaagaagtacattctgcacccggaatatacactagaaccattccgagctctcagggagagccgccttaaatccgtttctgacgttaaggattctgcggataaggcgcggatctaccacgatctgacagacgctatggctcgactcatcagtgtttgtgagaccgttcgcagggaaggctggtcagcagcggcctatccagtgacactcccctcccagttcgaataccatgtcctactactcccttctcctatctacaacccatctgcctcagaaactcactctgcagcggagatattcacatctgcactcgttgacctgatcatcaagtactccgccgatccgaccttgctgctgaagctcgactcgttccagtcggtcctgcgggagattccttccgcagacctgaaggcttgcatgctacgtcttggatgcgtatggcgcgagctcgagaaacatgatcccatcgttatatgtatccgggtaaagctggcgctctcattactggatatcatgcgctccgacaagggcttcttcaagcgggacgtggatatactggggatgatagaggagtggaagaagagtgacgttgagtttgtacggcagatcggctgggaagttgaactattatgaacctgcttatttccaagcatatttcaagtgtcagatgccggactagtctaaatagcttgctatttgctgtacagtttgaaagaccgctgcacattgaattaaatgtctgctgcgaagtacagccctaatcgcggctgccaacctgctaacaatgggcctttcgcacttttatattgaaaataggttctagtcctccttggcaatttgttatagtcttttgagacagatgctaacgactgaagtgttctcagagtctcaaaggtatatatgcgataccacagtcgtaaggacaaggtgatttggcgaattatccactggcagaggtccatgtctgcgttgagggcacatatttctgtacccctagttatgactctgctgccagcagatagaacctcccagacattcctcagagaccccgttcactggaggacccaatcaaaagagaagattatcagttattatagcgagacgccacaggtcatggaaattgacctccatcacacattaagtagaacagtggcaacgaataataaacccggtgcggcagatacagaacgaagatgacagtacgactaacagtcaggtggcgagaccggtagcggccacgcagaaagtagtatggtagtgcgaggagccaggcaggcaaaggctgtgcaggcaagagaatgttggctgcagtgatacttgagtctcgatgaagataactagccccagctcggtgatagtggagaggattatcattttttttgactctatcaagtgtatatacgcaaatccagtgtcatggcacggtatcattgccaccaccgcagtctagggagacgaacttcaatccgtccaacatctgtgtctagtcagcattgtctatgctttcgagacgacgacgagagtaacacacgcatgatatgacgatatgaaagtaaccctgcttcagccaggggctgctccgattgatgccccatatgctatagtggctcagacgtcggaaggcagtcagggcgtcttgtagagtcttccgctggaatccagactgacgtatgagtgcggcggcggcaacactgaatgacggctctattaatggctagccaacgtctaatggaggtaattctattagtctttggattataaacatgcattcacagcgaccgttccttgcgttcccagtcacagcctaccggcagctacgagtcttcttcgccatactccctttccacggatttctctctattctcaacctcatctgttctccgaccccagaaataactcttcatggtataaagcacactgatacaaagtcctaaaccacccagcccaatcgcaaaatacagtgctgagcggtaccctttcaaccgctcttcgggtgagtcaccatgcacaatctggctctcgatcgtaccggcgaatccaaggctgagagaaatactgtagttgacaatcgttgtgaccaggctcgccgcaagaccctggtgctcgcgcgcaacggcgttgctgagcatcaacgtggcagcggggaaggacatgtccatgccccaggggatgataataagggaaacaaacgtaagagcccagtacgtttggtgcaccggtgcaatggtgatgaggatcgttccgagggtaaatgcggttaacgacatgcacataatcaatggtgggcgaatgcgggacatgagaaaccccgtcgcaaaggaggcgagaagccctgaaataccaggcgggatgaactgtgctgaggcaaggaggggcgttgcgccgcgggagtcgaggaggaagcgccaggagtagtaaatccaggtaccgaaacagccccagcctgttgcgacgcagccgagtacgaaggaaacgtctgtggagaaggcgtggaaagggattagtgggtgctttgcgtacttgaattcgacaacaaagaaggcagctatgaagagggcgcccaggatgagcaggatgatcacgtagggctcggcccatgagacggcaggcgcttggttccatgcgatgttgacgagaactagaccggtgatgccggtgaacgcgccgggaatgtcgagcgcaacgaaaaggttatctgtcgggtttgaagtggtggatccgccttgat

SEQ ID NO: 740 - DNA, 2103 bp, Emericella nidulans
  unsure (1)..(2103): unsure at all n locations
atctgtggctgttggctgatcttgagagtggcgaggaatttgtgaccgaggctggcactatgaatctttttgtagtctgggtgagttcttccacggggaagaaagaactggtgacgccgccactggatgggacgatcctgcctggggtgactcgaatgtcaatcttggagctcgcgagggagaggcttgaaggggacaggtctggtattgaggtggtagagaggaggatcaccatgcgagagttggcggctgcctcgaaggagggccgcctgttggaggtgtttggtgcagggacggcggtggtggtgtcgccggtgaggtcgattcgttggggagaccagtgtatttcctgcggtctacgagatggagaagaagctggcccgatgagtctgcagatgaaaacgtggcttgaggaggtgcagtatggcctggttgagcatccttggaggtgagtttcttccattacaacgcagtgagaggcaatgaaagagagaaataattaacgatttctagttatcgtgtataatcagtcataacagcaatagatatgacaaatgctcttatatatgagacttgtatttgcatggactgttgtggttcctctaccttgtaggaactacacatatatatgttaatagaagtgaatccaccgactctctagtctcacctcttattaaaaacaataacatctaaaccaaatgacaagaaaggagaataaaagatagtagggtcaaaaaaaagaaaaaaagaaaaaaaggaaacctaatgtaaccccctcgccgccaacccagtcaaatgcctcctcgtatccctcctccccaagcccccatcgcccccatccccatcgccctcgcctgtccaatccccaccactataccttttactttctctcctctctgcactatgatcccgactccgactccttgtcctcgggacggctcttggaataattcctccgaacagctgattgaccacattccaatgctcgcggattgcgctgactgtctctggttcctccttctcactaatgagtcccctgcgtccacgcagctcttcttcggcgcgctctttctcgaccctttcacgtctccgagcttcggcttccgcacgctcttgacgctcgtattcttcccagccgcgcgaggacttgtacagctcgcggaagactgatggacgcgacagcagggtccgcggtgggtcgctctcgagccaggatgccgttatccataacgagcacgcggtcgtaatcaatgatcgtgtccagccggtgcgtcacagtgagcacagtgtgttgggcgaagcagctgcggatgagctcctgcatcatttcgtcggtttcggggtcgactctatttttcgttaggatttcatcgagggactaatgaaaggacggaaggaaggaaaggatatacgcacccgctcgtcgcctcatcgaaaacaataatattcccatgccgcagcatggcctttgccatgcagagcaactgcttctgaccatgcgagaacagttcagggctggctatcgtctccagcccatccttgctctcgaggatctcccacagacccacgcgcttcagggtgttgatgaccgcctcgtcggggcagtaggcgaatggatcgacgttctcgcggattgtgcttccttcaagtaggagggggtcttgcgtgttacccgtgataggggttcggcttgattgtcacctgcaaaagacgaaaganagttctttacatatattgtcccttataaattttattcttattatatatcacgtcacatatcttttttttcctaacccttcatttcttcttaattctttctttaatttaggttgtttttgtatattttgcctttctttggatctttatcctgtattttcacgtgttttctatgttttccaatataagtatcgttaatccttgactgtacacctatcaatttttgtaatttgtgtttattgttgttttctttctnnttttgtggttnaaattnttttttnnnnacatttnnttttattaattttagggcgggcgctcctccgnntncagattatnntnttatggtatcagttttttatcttcattatctttattttttttatttat

SEQ ID NO: 741 - DNA, 6713 bp, Emericella nidulans
  unsure (1)..(6713): unsure at all n locations
aaggcatcgatggcgctgatctggggcgaccggaatggagtcgagatatcgatctcaagtttcagatggttcaatttctccttctcgacttggctgagcagagatgcgatcccttcccttcctttcgcagtgtggaagttccatgagagacagaggtggtcgcgccagaaactgccctgctcgaggaagagggccgctatgtctgaaatcttggaggtcgatagggcggtattgagcctggaaaggatcgatgttgcgagagcgtgtgcgtttatggattcttggggggtcttgcaggttgcagggaatgttcccactgggatgttgaacgagcccggttcgatcttggcggctgacattgtgactgcagctaccagtggctttgttgctgggtttgaggcgacttgctggtctggaggactaggagagacgatggcgggtgcttgcggagagggggtgaggagcttgggggtgtctggcgatatttatagttcgctaccccgcttccatcgccaggttgggtgtcatttgagtttcctacataatactgaataaagggtatgtactgcagtgtcagcaagtgatccatgatacatcatattgtagctatgtagctggctcggctggggctagatccacggcggccacaaatgcctgcctaagttacgtttgcagttgatatttgccttgggagtactaatgctctgcaggtttatcaggagtttgcttagcactgcaaggagcaagaatgcccaactgatgcggaatgtccctttaggtactgatactaaggtatgctccccccagctgcatctcccatggcgtctcccacctgctggcgccagatcatgccatactttctttagcctacgacagaccaacatgattttataagccgaatcttgcatgtaccacttactgttcaccaatttcttcaaatcgtcccaatttcctgctctgctccgcaataactgggtgttagatcggtaaagcaatcccacaatctccccctttcccaactgacaatgaataggcaataatgtcctcagggtcccagtgcatcttgtgtacatgtataatttaggtcagattcttatctctagtagggaagcatagtgattaaagccgtagtgcaagaattacgatagctacgccatatgaaatatatattcctgagccgggatagcgggacacgtcacccagcaaatgattacatctctcacaatggatatacccatacccggccgattggcttggatttgagtttctattgttcaaaaaccaaagtatctgcaagtcaatgaattatgccagacattttgaaaatgttatgaaggcaaatagataaactttatttcaataagcagcatcattggtctagtggtagaattcatcgttgccatcgatgaggcccgtgttcgattcacggatgatgcattttttatttatctatttttttacggagttccctctgtattacggagttccctctgtaattccagtatttctactgacttaggttacatatattttaactctccggatacggctaagagtatgagtatgagcgtgtgagctgtacattgatcggggtatctagcatgtaaagaatctctatataaaaccaactctcgacctccagagaaaagaatcaccttctcacaccggcaaaccgactcttccaccctcttctcccaagcccgagcgtttctagcgtctccgccttgcctccccaaagcttcgccctcccatcactgctctttctctgcgtcggcgggatccagaaatgcgtcaccgccgccccaataaccatacacgcactaaacacgatcaacatatacccatggcggaccgtctgctcattgccgggccccgtgccgaatttataatacgccgagagcagctgaatcaatatcgagccgagctttcccgcgcccgcgctgatcccgtggcacgttgcgcggtatcgtgttgggaagatctcagcagggatcatgtaagttgtcgtgttgggcccgaaattgaacaagatctgcccgataatgtagagcgtcaccgcgacggggccctccttgtgcacggtgatgaacatggttccaagcgcgataaagtgggctgctagcgctagaaagccgtatttctgcagcgagacgcgttcgagtttgtggatagtcagcagcatcaggaccccgccgacgaaactgccaatattgaggatgatcaggcagtggatgctcgtgtcgcggaacatgtcgtatatatcagttgcgccggtgtcgtctgtcatccagggcggggcgggaccggagagtttgagactgtcccaggtcttcgcgagaaactggggcgaggagagacctataccgtagaagccaaaatcgaggagcagccaggagagcgacgtggcgagcagggtgcgccagttgccctcatgccagaagtattgcgttatgtcgaccttggtgaggcgccagtggctgttgagcgttgccggggtgaggaacgtgccttcagggaggctatcgtggtactgggaaggggtccggtctgtgaagtcgtcaatggacatggagcgaatcgttagggctccagcaccggtgccggatgtgtcgggaccggcagctgtactcgtgcccttgcccgtgcccatcgttgtggctgttgcggggagcgcaggagcagcaagtatgatttcattccatggggcaatgaggttgatatcgttgaattggttcgccgtggcagtagtcatactagtgagagcagtcgacgccgaaccgggataccgatatccctcctcaacggcaatctctggcgacccgaggctcgacagaggcgccgggtcgctgaacagtgtcgtggcatcgaactcggcctgcaccggatcgtcttcgatttccagcagaaagcgcggactctcggggataaagaagcgaaagaatgtcgcgatgacgccgggcacgacgccgattccgaccacccatcgccacatgatatcaactgcgcgtgtgacatcgtcatgtccctgcttcttgctcaggacggcgacgatcagtgagacgatattgccagcgatctgaccgagcggctgcatgaagaagacggaggcgatcatgcgcgcgcgatggcgggtgggtgcgaacctggttggcagccgttgttaataactgtctcctaaccaccatagcttcgagatttggaataggcgttgaacatactcagacgtaattacggcactcaacgggtaatctgcaccgacgccgatccccacgatgatcctccaccagatcagccacgcaaagacgctcatgctcccgtgtgtcccctccgaggacatcgcgacgcccagcgtcgacgcaatcagcagcgccagttcaacgccgtacatcttcttccgcccgttgcggtccgccagatagccgaacaggacttggccgaggagggtgccgctcagcgtggcgatgttgatgcacgtcagtcggaaggaagaggtgtcttcacgccaatagacgtaggaaatcattggaagggcgatattgcttgcgaataactatcaccgcgtcagaaatcgggtcgatagaatcgccggtggatgaatggaacgagcgtacggtatacccatcgaggaagaagccgacgccggcgacgaggacaacaatccactggaaggactggcggtcgatggtttcgtagatttgacgggtgcgaacatggcgatccttgaatcggaacctattgtcagtatcttctccccttgctaacaaccatagatttatagtgcattaggtcgtacctgctcatgctcgaaatccctcgcgcgatcagtcttatacagtctcgcgcggaatttgctcatggtgatggataaggggctttaagaccccttgtgatgttccagcgattagatggaccttggttaagcaacgagaagaaggcttgtcaggcgaagcaccaccatttgacgcatgccacggcggctggtgaatgaacaggccaaggataagaataagtgtgaaatacagacaccaaaacaccgttcgagaagatttctggaagccgtcagtcaaccatgagaccaagactgccctggtatttgcctcccggtattctgcctgagacctagtcagcccacgctgagcccagcctagaacggtagtgcgccgcacatatacacaggaaccgcgcccgccgaacgttcaccgagtcatggcgcgagctcgagctcgtgcccattctgccctgcgtggcgggacatccagtcccatgcacgctgtggagaccaaaccagttgagttcggagaacgtgaacatactatcgagtgggggtacctgtccctcaatcaagatctataatcaaaggctactactaaggtgatgaagcccgtgatcctctgacaagcatgattggagccgtcccaatgcaggctaaagtagctcccgggatgggactcttggtagtggagaccaaacaagccctaggaaccaattctcgcccccacgtgcccaggccgagccctgagagacgttggccgttcgacctcgtcacctcgtgagtgtctgacatgtcaacagggggcttctttattggtggcggcagaactggcacattggctgtgtcagataatgttgattgttcttcgtaatgcgacgtaatggcgcgggaggacaatcactgtcgctgcattctatgctaccgggtgggcttgtgatcgtcataggtgtcttgtctgcttgctttgctaaatcccatgaaatttctgcaaggtgtaggtttacgtggtttgaccgcagatcttgaagaaaaagaaaatgccatgttccagcatgtcattatgagttagaaaataagtgtatacacagtaaactcggtaggagtgataataagccggccaccaaccaaaccaaaagtggctatcaaaccgaaacaaggaaacgccctggtatctcaatgcaatctaacaagtcggaaacatgcaagccctgcgaaatcggaacacgagatcataaacggaggtcaaaaacggagcagacaagccagcccactcatcgattattggctgcgagaaattcacagaacgcttttttatctgttcggccattgcgcatgtcagcctctctggggcagaggagagctagaggaggaaaagacggtgaagacttaccgtcgctatccagaaacgagatctgcagcgtcctcatctgtgccagatggtcaaagtttggctggagctggagcaccaccggtcgccgtgagtttttgcctggcatgacgctctctatacagctcactaggtgccatcgactgtagtcagcgcgcagtccataatgaatgtgattcactgtaaatctgtagggcaggtggaacctacgtgggatggaaacgtatcgcttcctctctttcctctgcgaattggcaaagaagagcatcaccagttttcccgtatggtcctgccttaggatccgcagattctgcgatatacactcctcgccacgacctttggatttcgcctcggcgatacctgcgataaagacgattcgcgaggcgagaatgagttcttgaaactgtagacagtccagccaggattcgaatgtgtaggagagttgggttgcaaagacggtcgcgccggtttggacggtctgctcgtccaggaaggagatgcggagtgaggacggggtgtagggctctgaggaggtgatcggatgttcgaggtggggtacgggaagacgggttgtattaactggtaacgcattagttggttggattcccgagacgctgatattggtgttgaaaatgaagaaggaagaaagggtgaaggggagggtgatctcgtacagctatgtagaaaggcagtctgctgcccaactgcgccgcctagttcgaggcatttcaaagcgccggcgaaatccttccggatattgatgaatgtataccggagcttgaagagtctgctgctcctgacgaaggacctaacagtcgcatagtcagccatcttatcccgccacattgctctcgggttgaggtggacatacaccgtcaccgcggggttgagcggtaatcgtgcgacctcgtcattgagggagccctctcgcggccgggatgcgagcgacacagacgctgaggtcgatggcgaaggaaacaaagacgggcttagagagggcgagaagggcggttcagagacgaagcagagggagccggagacggacgagcgggacgaggtcgcggtcgagggggtggaagaaacggtcgcagtgctttcgcgtctggcagaggctggaaacggccggtcttggagatgttcgtgagaatatgggatcatggttgggaagagaccgaggagagctcgacaagggtgctggtggtttaaactgatcttgaagaggcaggtggatggaagtcgaatagaagcgacagaatgacgatctgcggatcacggcttggatcggcagcaagactgacatgtcatgggaaccagaagagaaatgctggacagagacaaggagtggcaccgagtgcctaagtagcctcatcaccttgggacctggagcctgagcctggacctggatgtaagcgcagtagctggcatgagtcgctagcagctgctgggaatncgccatcgaaaacaggaacgcatggtgtgaaagggcttgatcgganacagcttaagcngttcaggtatgatatggttcccgtaattcaccgtgatacttggcag

SEQ ID NO: 742 - DNA, 6017 bp, Emericella nidulans
ggctctcgattgtatccactgattgtgaaaatgaaggaggggaatggaatgaagacgcgcgcacactaagccgcttatcaaggagggacttgtgcatctctttcccaggcttgacgaggaggtatttttcttcgggggcctggttccgagtgacgttttctgtcatgggttggtgttggtttagttttggatttgggatgggagtgtatgatattgaatcttgagtttgtggagtctgccagatgatttcttgttgatgttgctgttgctgctcttgtgattgcgggacttctggtttctgtgcagatatagtcgtctgtgacggaacagcgttccctgctcctgccattgaaacattcctcctgctcgaagtcgtcggtctcgaaaatgaaatccgcccttttgattgttctgctgctgcttctggaccgccaactgctgttctgggcaaagagttattggcaacgaccgcatactcaacatccgaatcgagcgagaacagcacaaccgtgttgactttagtattcagcttcattcgaaacgtcgcgaagttgcgcgggtctaagtagaaagtatagcttgctgttacgacgacattttttatattgagtcccatgttcatatttgtaatggggctcggtcccatggtgttgaagattgtgtggctgtagctgcagctgactcgagagagagcctggtcgcgcgcggagattgggcatttcgacttcacggccagggatttggattcacggagtgtgactgagggtatgcacactgacctgtgggaaagatggcactgctttgcgcaggtgtcgctgcaaaagcgcgtgatattgcatacttatatggtacttgttagctcttgcgctaggctagggttaggtggagaattgacatactgctgcaaaacatcctggttagagcaccacaacgctgacaaggccccggctctttaagcccccactccctcctctcagcttccagggtctcccgacgccggtttagctcacagatacgtttctccgcgtacgcgatccttttccgtgattgatgcccatcttgtgtccgcttcgccatatgcacaagctgtctgtatgccagcatcgctttgtccacggagtccaaatgttctcgagagacgcaaagcgcactcagtgcgtcgaatgtctccgctgcttcgggacccttaaccgccaaaaagtcctcgacgagcgtttcgaagagagctgctgcgtcacggttgagcccagcgtccatgtatgaacggccgagacggtgaatgacgcgcaggcagtcaacatcgcgggagcgcttgtagctgtcgataatatcttggatgtccggtggaaagtcgaagttatctgaactttggatgtagcgcaggacggcgtcgcgagtgatttgggcggagaggccaaagacagcgcggcagtgggggattgtgcggctgcatataatgcgtgattcattctctagaccgagcttttggtatagtgaagagagcttgttcattgcgtttagggttgtggcgttctggatgccgaaaaccgtgtcgagggccgggaccgttctcaagcagtaaaagtgcggactcaagatcgccgagcagaactttaagagatgctaagcgctgcatgctgcatagggtctctggggcgttgtgtcccagggtcctgagtcggcctgcaaaggaccgctcgtacagcgctgcggcctcggtggcgtatccgtctttctcgcagagactgccgaggtcgtgcaggacggaaaagttcttgggatggtcgcgaccgagcacacgcttgtagagacccaacgattccaggtagcacgcttctgcttcggcggggatgtcaagggcctgatatgctttgcccatggagtgcaggatagatgcccgcgtttgcttctctatgtcgaggcctggcgtgtcggctagaagcttcatcgtgtcgtggagctctatgattgctccctgcgcgttgccctgtttgagcagggcttctcctctcagtcgtgttgttagagcgcgagaccagacggctgttgatgatagctcattcttgatctgcaggaatagtttggcaacctcatccacttggaggattctttgccggcccgagacgtcatgcacaatcgctccgccggagatgtactgcatgtggacgaatacgttctgcgttccccgtagcagggcaatatagtctgtgtcctggacagtggatgagctgttattctgactctcatctgtcgaaagcgtgctgtctctagcagtggcagtggctctgctatctctggaatacttagttacaaaagaaaatcgtatggtattggcgcgcttcatcagtttcctgcctctgtttgttgactgtgagcgcgataaacctggacggtcagcttaatgacaacaagccggttaacaactcatacttaacggcactttgcgtccgaagagcttctgaaagaacgactgccgcttagacgaacgaggtatttcataatcaacatttctgctgtcgataagcgcaccatcggaattatcgaggtcactggcctcgtgtctgttctcgtcctcgcacagggctggtttctcgggttctatcatagcgccgtcgccgagccctaattgtttagaaggcgtccgacaagaaatgtatcaacgtaccacttgaacaaaatgtcgcgtctgagaggcccatctccccagctgggagcgactggtaaacaccgtttggtgcatgcactggatacattagcggtacacctccactgaagcttagctactcacccctttccaaatcaaataaaccggcaaaacttatagctagtagctcttcttcatcgctctgagaaagctctggcaaaatcagtcggggtcattttcccttgagagctcatcatacttctaaaagaccaagaatcgcgcaattttctagctttttttgctaacgactgctcgccattgatgtcagacatggagaatttcgagggcatcgagctcttctggacaacactggggctcctgctatggttcgcgcttgctatgtctttttgtatgtcgcggtggcttatgtcgtcgcgggggtcgttcaagacgggttcgtatctgcttctgttagggttatgtttaggaactgaaatttgggtatgcacacaagatgttgcatttcgagccacagtacgtgcaatccacgaaacatatggtgtctgctattggttagatgggtccgaaagaaaggacggtaatgcccacttggttgtctgtctaccatctcgtcggccggagaaaaaagtctctcgcaataactgcagtagaaccggatcgggcgagcatcgagcggaatcagccgtttctccatgcggaacccttttgtgattaaactagcaggccgttagctcgaccattccagtccacgacctggagaagtaggtaataccggtcgcgcatcatcacatatacagcaaccgctgatccagtgcagtatctcgtcaggtagtgttgcttcagctcgttcctagccgggttagcctttctctccacacaatctcatccgacatcagaatgcgaaaggatgcgtactcagacgaaaacaccgcatcgcaatctggacacttaacctccatcgcacccagcgacgtcccgtcgtcatcacgaaatggagggaatagccgtaggacttcctggaagttctcgactgctggggacaactcttgattctctgagccaagtcatacgtcagtgcatctgtcctccatgttctcttctcaagtatacgatgtaggcaataccgctagtagtggaccggccggctagtgataaaagaacgtctgatgcgcgcaggatccgtctcttcccctcaaacggactcgaccgcgttgtgttgaggaggatctcgttctcaatttctcctttggtgtcattcccgaggcggttactgtacatttcttgtcaacccaatttcgaactgtgaacgagtcgttgcaggactcaccgatccccggacaacgagaccgcgtagtccctgtggctgagactgcgtcgataactgtagtcgcagtctacctccatctccattcaaagcgccgcgacggccagtacaattgcaaaagcaaagagaatatgatgtgatacactgttaaaccaaaaataaaatgcagaattcccaacacccagtctcagctcagctcgaaactcagcaaacgactgtggatgtgaatgtcaggtgaggcatcatttcagaacctcccgggagcgcagtgcatatgtagtgttaatgcagctgcgatgcgggtcagcttgacaaagctgttttcgcctctacttcagcttcagctctcaaacggccgggagtgcctccatactttgttgtttcaagggcagcttcggcccgcccaattggtgtcctgcgcatccctgtgcatccctggaataggctgggctgaagcgaggagggcgtttgggttgaatggtgtgttagtggtacgatgaagatgagtatattcttgctgagcagtcgattcctcacttgggtacagctggagagaggtccagacgctggacactccacccctcaactgtcgacgtccatgtcaacccacttcaagggatggtcagtcaagtcaaatgcaatcgtatccgatacaagcaccccttgcatagcgtccaatccagatcaatgatcgcccgcaaacgcagcagcaatcgccagcgaccgcagacttgcaggggttgaggcggtcgaatcattgattgatagatcacacgcactgatcaccactcatcggggttctcaactgggctgcgagttcacgcaacagtaaactcaaaaactggtttatctgaatccttgcgttgccttacggcggcggatgcagtgtgccagtaatgcgaacggccagagtctggagaaggcggtaggttggagttggaactggaagacgcgaagaagcaagcgaaggatctatggaccccagattatccgtaccttgtcgatcatcaccttctgaccgactcgatcagtttacgacgcaaacgcaaggccgttgaattcattaagagggcattacaccatgagctcctagatgggattgcagcgcagaatgtaacaaagccagtccaggttgactgggttatgaatcgattaatagcggagaattcgcacctatctactgtatcatctcatcaagagtcaggatttggctgtaaggacagtcgatttattgtctgaatgagtccatggtccacgtcactatagaaaccagattgacctggccccgaccgacatttgagagctcgcgcctagagataccacttagtgcctaggtggcagacgaatatccactgtatgtactccgtatatttctcatagatgctatatgaaatgacaaactgatatatacacattacacttttagggtatcgaatcaaactctttgacgccgaccgaacgctgaggctggaaacataataaacgctgaagcgctcaacccgacgaacaagaaagaaggaagaaagagagaaagaaagaaatagacatggcgcgtatctctttgcatcatgaacgagagaaaaggaagtgccagtgggttgggggtaggcaggtaggtaagctaagcccacctccatcccgaacccatcgcctcctggctatgcatcaccgagaaaaggatactatttcttggctcagtcgattgtccagatccgatcagcccgggcgagggataaccatttgtactccggcccatatccagattctgcctctgatactcctggagaagcagagacaccgccgcattggggttaatcccctcgccggtatctgtgatcttgagcgcccatttggcgtcttcctcggcgaacccgagctcgcaaaccatcatctcgatggcttggtcggctgggtcgcgaatttgcggtgcttggacaggaggccttggtgggcaggcgttggtgtaagggatttgaatgttgtgcgtgttgattgggggatccgtttagtgagggttaaatgcggccg

SEQ ID NO: 743 - DNA, 5632 bp, Emericella nidulans
acccccacctcctcctggtgctggtgcgcctactccaccacctcctcatggtgctggtgcacctcctccacctcctggtggagcagcaccaccactacctcaacctagtggaggtaggaacgacttgatggctgctattcgagcgtctggcggtggaggtttgcgaaaggttaaagattctgagaagaaagatcgaagtgcagccatggtgcctggagcagctagtgaatcggcagctgctactcctagcactggtggtggtcctcaaggaggtttggcaggtgcattacaggacgccctagcgaaaagaaaacagaaagtcagtggaagtggtaagttctgagtctcgaatctattggatttcaatcaatgacctattatcagatgatgagaaggatgatgacgatgattggtagcgacatgcagctgggcgccttttcattacctggtccttttctgcataggtctttcagttcgatacctacttcctctagtcttctgttgtagtctatctcatattgtacgcggattaattgcggaggcggtatgcgaatctccaaaattgcggcgttcagtgtcttgttcttcaaaccagtcagccgcagctcacgaggctacaaagcgaagcttacagggaatttcactttcatagaggtctaaaactgctttgtcattgctgtactattttaaacattatatatgtccttgcttcatagcgattaaagaggacgtactgtgtatagatgcggaacatagttgatccggctttatctgtactggaaaacctgaagagcggaaaggtaagccatcgtgaactcgaacaaccgcggacgggaaatttggatgtaagattgcgagaagaattctgtgcaatctcccgccgagatcttgccagaacaaaccagaaatgctctcaccgtcgcctctgaagccttcagttccctctgcgtcactactccggttcctgcgtgctcaatccgagtcggtcctcttttcgactaaccagccgtcggcatgccgccgtatttctaccagactgcctcactcgtccaatccgttgccattggagggacattctagtcgaacgcgcttagagctcagtccgtgtcgagttcgcctattctccgaagttgaacctttgcgatgtcgcatgtcacgatgcgacactcttttatcccagcgtctttcgcgatccccgcaatcccggaacttctcatcaaccagaagccgaccaattctgcgcagattctgggattttcgacggaagaagcaggctgctgaaccccgccggggaccttcgttgctcgacgatacagaaaatttgagccttgcgcgagcgctagcggccaaagcctccaacgagctgcgccttcgatgcaccgagtttgatattaatggaaatgtcactttaatgaatggagagttcaaaaaaagcgaacttattgcgaaggttaggattaaggactgaatggggtgacgaaaagctaagactgtcacagtatggccttcttccgcgtgatcttcgaaaaatcgattcctcaacgctgcctcatattttcgtgcggcccagtactatcctgatcaaccttctccatctccgcgttttaatcaaagctgatcgtgtcctggtttttgacgcatatggctcgacggactcatatatgcaatctttgtttgtatatgacttggagggcaagctacggcagaagcaggctcagagcacgggtgcgggatccctgccatatgagtttcgagccctcgaagctgtcttgatcagtgtgaccactggcctagaggaagaattcaacggtgttagggagccggtcgtgcgtgttctgcgcgctttggaggaagatattgaccgggataagctccgacacttgcttatctactccaagaagctgggcacatttgaacaaaaggcacggctggtccgagatgcgattgacgatctactagaagcggacgacgacctggcttctatgtacctgactgagagagcaaacggtttccagcgcgaagagcacgatcaccaggaagttgagatgctccttgaatcgtaccacaaagtctgcgacgagatcgttcaagctagcggcaacctagtgaccagcatccgcaacacagaagaagtgtaagccgttttccacaatacattcccgtccctactaacactccttagcgttaaagctatcctcgacgcaaaccgcaactctctcatgcttcttgatctcaagtttagcattggcactctcggcctcgcaacggggactctgttctccgccctctatggcatgaacctgaagaacttcatcgaagagtccgacctcggcttcggcgccgtctccgtcacttgcttcgccatctctgctctcgtgtgcgtctacggcctcgcaaagctacgtaagctccaacgtgtccgcatgtggggggaagccggcgtcggcggaacccccatcatccctctccactcttctcgcgctagcgccgttccaggccaccgcgccaattggcgtgccgactccatcgagcctgtttggggcagtctgccgggtgagggaagggcggagcgtatgaagcgcctgaaggatagctctgctgcggcggcggcccgctcggccgcgagtaatgcggcgagcacgagggctgcaagtctgaggcgtgcgatcaggtttccgtcggattcagcggtgaaggggaaggagaatcagaaggatgcggctgctgctgttggcgctgatgctgatactggggttcagactcagagcgggggttctactgctgcgtgattgcgttacctccactcatgccgtcctatatctctctatccattaccgcttaccgccacgtatcatgtaatctaatgcctgactgataccatgtatagagtttgctcacgtttgttttccggatgcattcgaagctggtggagttcgggtggcttctcaatcgaagtattcttataatctagataaaaaagaatagaagataactcacaatataggtctttatacctggattttcagttgtgtgcatacgtgcatccgccaggtctcgaccagtccaagctctaccaagcactagccctagccttatcgacttacgacctcctgtagacaaggttcatgcgattcatgcaaatataagtcagatcatgagctgccgtttcgctccccataaaaaccctcaaaaaacctcttaaacgccagagcaccatcctccccaaataacatcttcccattaccttccgtctcttcagccttttccctcgtgcgagagaacatttctaattcaaaggtctgtagtaacgggtcgagcgtagcgagaaaagatgcagactggccgttactgtctcgaaaagcacggattatagctttggaaagcagaagtgagtcccacatagcgaggtttacgccctcacctgcccaagggggcatcaagtgcgcagcgtcgccgatgaccgttatgcctacggcgggattcgtatcgtgtgaaaaggcgctgtctatggggagggtgtagagaggcttgataggaagtttattgatatccgtgttcatgttggactcttcgtcgcaagaggcggagactagttctttaattgacttcccgaatgagccgagaagttgatcatctgtgagaagacgctccttggcgccctgcagatcaagcttgttaagtccggatgtcgaggcgaagtgctcgtctggtatagagagaaatgtgtatatacgtgctgaatctgcagccccgcgttgcgccatcacgccatgacgcagtccaagggctgagaaactcccgtctccaaccagagatgataagtgtgggtactttgagcggatgttgtaaattgtccctgtgatgctctgcatgccggtatagaatggttttacgtctgtcagagctcggcgcacgcgagaccaggccccatccgcgccaatgagaaggtcgaatggttgcttcccatgggggccgaaatcgagttccttggttgacgctgaaacggagaggagcttatgcccgtatctgatagagtccggcggcaggtgttcggtcaacatattggtgagcgcatgccgtgagatctctggccgctggctcagttcaccaccgtcggcgtagatgatattgccgtctttatcggccactcgttgcgcctgggaacattcgcccgtaagtgtgaggaatgtttcatacaggccgcatgctctgagtgcggcgaggccggactcttcgtggagatcgagcatgcctgatggtttggcgaggtctgcctttgacggtttttggcgcacgtcgtagattgtgaagggaatgtggttcttgtacaggagacggccgagagttaggcctgcagggcgccgccgacgatggcgattctggggggcttgaaggacatggcgggtatctagtgatgaaattgatgatattacagtcagattcatggctagggtatatcttcttatatgggagtcagccggaatgttaagagtccgtgtatagagcgctcggtaatttctataggccgacaatcattagtctgaatgaagtcggaaagcttattgccgaaagagcctcaggcagatgtggtccagcagacggccgtgccttctaggccccccttgataaactagttgtgaatcgctggtcacctgaccatcgcatgtgattgaacgtgttgttctgtgtcgctttcaaacagacaactgtgctgccagaatgcaagaattcttgttgacaatcgaattcaatcaactgcctgccttacagtggtcttacccacagtatgcggtaagaacagtcgtcgctaccctaaatatggattagaagagctcgctcagaattctcttgaaaagagtcgatgagacctgaaatatgtctggatcatattgagacgctggcctatgtatggtgctgtagatgacacctgccagtcctttgcggttttaaaggttggggtctaaggttctaagaattattctgctaacaataggaacagtagaagagagtgcgaatgcccaagataataaagagtgacactgattgatgggctaaccaagttactcaaagaatgaggcaaagatcagactaagtacatggagcgagcgttcctaaacggaataaaacacttaacactaccgcccaacatcctccagaccttgggcgcagcacaatagatttcataagtgcgtcaacatacctaccgcacacgtactgggaaacccgatccagtcttatgaggagtatagaggatgactgatggctatttgtgcggcaacccaagtctgccagagggccctagacgcagacttcagacaacgcggtgtccggtttttctaagccatattctatatagaaatcccatcggtcaccgatacaaatgcaccccactacaggaggtggcgagacaaccctgttccgttcccacatccagaataccagcccagacatctatatttcgagctggacctctgcctcaacctagttcccatccggtgccatttcttcgacaccagcactcagcaagcgtgacgcagtgtgtagatgcgcaacatgactcatagtctgatcagcatagctgcggagatagcctggtattgggatgaccatatatcaaccggcaatcgtacaa

SEQ ID NO: 744 - DNA, 3294 bp, Emericella nidulans
acctatataatctcttttctcagcactgttcaggatttagctcagctggacatggacaatgtctaccacattatatcagaactcgtcaggtctcagacattctctgtcagcagatacctccaatggcttatggctaaaggtgttgcaagaaagtcgagtggtaccagtggagaggtatatcccccgtaaaccaatttgaagcttaggaaccactgacttatgatttaggtcctggctgctgacgctcgtctccttactcaacttccaatgagtcgttcaccagagcacgtccgtaatctccgcttaacgcttctagctcgggctggggtatcggtggacgaagaaagttctaccatcaaatgtctaaaatcctcgataagccagcgcctgccgaacatcttcgaggttgaggctagcaacagcaaacacataaatttctcaaagcatgatttgacgtgggctgtcaagtcggaggtcagcatgtggatacgccaaggggtggtaaaacatttaaaggatacgactaggtaagcaatggtgagcttgtatcgctgtcaatactaatcgattcagaaaaataattgcacgccctctctctgttgattcaaggatatcagccttgacgccggaagagttttactgcgttcgagaaatattagagcgttttggagactgctctatccttgctgatgtgctcaagcaagctatcgaatgcgatgacaatataatactagcatcggtctctgatactgttaactaccactttgacgccttatctatgattggcgccacatcggatttgttcagaggactggttgggtcttatgcgcgcctcaaacgttccggcaatctcagcttagatttcgtcttctcgttgattgagcttggactgcgacttcccgatgagtctggtactgtttatcttcttcgccaggacctcgctcggattgaaagcaagtccgcactagcagctccatctccactctcggatcatatcccaacaacgttcaacgaagtcgatgcgtcttttcaggaaaggctggagcagcttttgtcttgcggcaatggcttagatgagtctacaatgggcgcgattattagctcgcttaccaaaattctgactgatggaggcggagcagctaaagtgtcggcaaaagatgcctgcaggtatctggcttacctgcgcccgttcaatcccaaatatctcgacggcatgctagtaagatatgtttacggactcttgaagtcttcgtcccggcccacaatgtctcaagtcctttctcctcttattggtgtcggatgtgtcacgatccatagcttcgtgctcttggtcaacaagctatcggcttccgcgcaaacgacaggggcgattgccaacccagacagtttgcggctcgacattcttgagctcctcctccctcaggaggaaagcagtgcggacatggtacgtttgatgaaaccctggcgaactttctgattactgatcctcggtttataggtcacctatcgctttcgccttgcgcagcaagagtttctcgtcaagtaccccgaggagactttgaacataatcagtgacgcgattccgttatttgatgccgattttcatgacgcgaatttgggatcaaggcgccccgatcttccggcatgcacagtagtattgctacggacactgttggcgcaaaactccagtcttgttctaaagtactgtatgcagaagcttgacgggcactcatccttcacaactgttttaggaaaagcagttgacattttgctgggtctagaccccgaagacggtttgtttccacggggtattaactgtaatgtacagtcgactgacggtcacatagaaatggagcccagctcacaggctgagagggtcattctcatgaacaacgacttttcgctcccatattgccagttaaaactgaaacttttgttcaacgcgaaggcgggtaacgaggttaagaaccacattgtcgatgtgatgttcaaggcagcggtgacagactctcgttccaaaagatcccattgggttggtctagttagcctcatggatcaagaagcagctcgacaggtatattaaataagtcataaatgtccccagttctgagcgctgaccttgctagattcgcgaacgagcagaaggctgctttttctccgtcgcaatgttcgacgaatccatggatgatacgtcattgccttctggcgcttccagtctaagttcgattgaaagcgcaaaactataccttaacatcattgagaagctggcgtatagcattcctcaagccggtgtccaatccataccccctcttctggtggagaggctggatcttctgcttcagaaacttatcataatgcagataaactcgaacagcgttgccgcttcaagctcgggctcaaccatcgtgtccaagatcaacttcgagcgagccctcgcgttttggttctccgcactcctcaggctaattgtgcttcatcgtgctgctttcaacgtgccgccagcttcgggctctaaggttgatagcttgcgggaacaaacacgcttgcttgtatcgatcttgtgcatttcattagcacgactgccagaaaacatccttcgcctcttcccagctgccgactattttccccacaccatacaatctcataattttcgaccgtgtcctgggattttgttgcaaactcacgccttggatgtcgccgcgtctttgattgactcgtttccagatgaagcacgccaccagtgtgtgcgctttctcagagagagatgccctccgttcctcaaattccagaatgaccgccgatttctatatcttctaggtcctatgaccgacaccactattcccagctcccaactctctgcctctatatcttctcctgctgctggcggctctactccgactccaatcccatcaggaactctttctggaggacactcaagccaggcaacgcaacaaatggctgcgctcaccggccctttctccgggctatccgagaacacgaaacttgtcgcggaccgtcttcgcattcagaacggcggccgtatcaatgggccatatccagtacggccatgggagcttcttacaagatgcagctccgattctcggggtgaatgataccgctgtgagccttaaactttttgacgccaggcgtgtcagggcttagtatacatacgtcctccccatcacctacatatttccattttttccttgtgaaaaaactgtatgttgcagaggtgctgcgttctccctggtttatattcacttcctttttccctcaagataccagagagtctta

SEQ ID NO: 745 - DNA, 7195 bp, Emericella nidulans
cgtcggcagtagaagcaatggcgccgcgaccgcttgaagaagaagggcgatgaagtcgaacgtgatgaaggtgatcgtgtatgttctgggcttgaagaaggagatacgctcgccgtacgcgacgacgatccgcgagagcgtgaggtagatcgccgccgtcaggaacgcgggggcgatcgtgagcgagaccaagtattgtaagaacgcgtcgtcgttaaacgggttatcgtgaagcgagactcggccgccgtacccaaccacttctcctgccaggcctagcaccatcgcaaccataaacgtgtatgtcttgtatcggatgccgaggaagagttggacgacgaaggccaagccgaacagcgccatgaacaggatctgcgcccacagcttggggatatattcgaaggaggccatggaaagcgggcatgtgtcgagggtgcagagggacgggtcctcgaggagggtctggtttgttggcaatgtttccatcatggcggtccccaatgaagaaacctctgaaataagaaacgattgaactgggcacggaaaagctgtctgcaaatctgaagaaataaagaatgagggtgaagctagagcagtcgccgtctatacactgctgtaaaaatgatgtagttattgtattgttcttgatgttaatgttgttgatgttgatgatgatgatgatagcttgagatatcgagacctttaatacttggtcttctcactaccagatccccaagattcagccacgacctggcagtgcccattctgtcagattcaaaatagatcaaaatagaggtacctaacctgaaggatcaggcaggcatcttcatttcacagcgctaggagattaagctcatattgtgaaagccgtgattggtcatctcgtaaactttagtttcaaccctaatctcaaaatggccagcctggatccagtccccacttgccgacgtgacacagtcagccagggctcaaggatcagggctgtgctgcgctgtgctgtgctctggattactggtccagctgttctgctgattgtagtgcttactcctgcggtgtcgcaatttacctgtcttatctatttttgttgcacaccttcactcaccctatgagatgaggtcagtaggcagtgatcaggggccgtcggcagcgtcagcctcgtaaattgtcgagctgcaaggcagctatacatcaatccccatcacattgaatctcagaccggagtataagttcctatcgacggactcctagaatatagtcctttcagtattggagtttctgctgtacaatcattacgtaggtcctgtaaatctagaggcttggcgccatgcttgcactcatgcttggcgcccatgacatgctaaggctgcgatgaaaattcagcaccgtattgggccaatgagaaaaggatccgaggaaggctgtgcaagatgtatcttgtataacacttcccggtctgcaggggtattggaccctacgagctcaccaatcggcaatttgaccgactgtggtctaaattgaccatcagagttttgcgtccttggagaccctgcttacaccgctaggtaattgagatcagcctctatgttaaccacttgccgtacatttcatctgagccccagcgatgacatcgatgcggtactgatggagattcttccttctccgcgttcttgaactgctgcggccatagctccatctcataactgccaaaaatgggcaatttcctaccctgtcagacctggcgcccttgcctgaattcaggattccctctaaccgaaaccggtattcatatcgacagctgcacatcggttcgtgtacatactatttgctgggttccatcatgttattagtaatcgcagctgaactcacaacttctgtgtaggtataaattgactattttcgtgcgattcggagtcctaataacattagtaattcctacaatatctgcactcagttcatcagttggatgacttggtcaaatatagtcattgactggtaaaacaagaccagaatgttgatctttgattgtaaaaagagactttgacaaacgtgcaagttacccgttacgggtcaagccaaacccgtatgggtcgggtttgagtacacgatcagaacccgcagagtcgattacgggtccaccttcaacccgtaaaagatttgattaatacgcgggcaataggtacaaacatgctacataagcctaatcctcagataaatcgcattttgatgcagagaagatagcctgataggagattttaaatctaaaattgtttctggaagttaactcgtggattacccaaaactgcgcgggttagcgggtttgtacgggcccgaccctggacccgaccgcggttaggttctgtcgaccgtatgtgacagctagccatatatggaacttccctgtttaagatatcggaattgtaagttccgactcgccgatgcttatgcagagacttctgcctttccccgttcaaaagtaatgtctcttctaactgccgtattggctaggttgcttatcatttcttatttatctaaaccgacctatagagctagattggaagaaggggaccttcattctttatattatttgacggctattcctggtaattacgtctagtttgacgctccattggttctgaccttgcacccccgtaacgggtattgtcatggtttatgtaggcgtaacggacactcggatccacccaagcttgaagactgtaatgcaagctgaatgcaagccgaatgcaaactgacgcaaactgaagaaactaatcagaatctatatcatatctttcatattcttcatcaggagccatcaggagaaagccctactcccacttggccccttctggacaagcagttccagaatgtcggcatgtccattgggcacagcaagcacgaacggcggccatgatcttgcccttttgccaatgttcggctgcaatttcgctggacaggtgtgttttagtattgataatcttctgcatcatgctgtctccaattaggcggagagcgtgaaagttcttgacgtcgcgcaaattttaagctgaccagagccagatgacgccactccacaaggtggcatagctcggcctcttttatattgcgaatctctatttaaagcagggtgcaaatatcaaagcacaatgaactcatcagttgtcgcttacggagccgtatgggcagcacctgtgcagcccctgggcagcaaccttctcacaccaacttcaagcagaccgtcctaattcctctccttctattcgctgttaaaggaagtcattgttgaggatagaaaccgatactgaaatttactagtgacttgattcctttgatgtgaccatcgtgagcccatcattattgctccatctggtactatcccaagcgatttcatatcaacctggactgcgataaagcttttcggaaacctttctagccaagaagatatgcgggggcggtaaaatagctttttcacgctgctcgtcgggagttggagtatacaactgtagagtgcggggtcacgagatcacgtcactcaaaatcctcctctcctcggcaaacctctctctttgcaaccatctcactaaatatggctgatacattctcctccattcccattatcgactggcgccgtcttcaagacccaagtacaaaagcagcggccttggacgatctgcgcgaggccatatttgtagtaggattcttgtacctcacaaaccatgggttggaagtaggtggcatctcaatgcaggctgcactgtctaaccaagatagaaccttatttcaaaagcacacgccaagcttcctgagctgtttgatctcccggcggatgtcaaggccaaatgcgacatgatcaactccccgtcattcgtcggctacacgcgtctgggtgcggaaactaccgcggcaaagactgattggagagaggtacgtactctgaaccctaactttccaaatgaagggctaatcgcagcagcaatacgatttcgggaccccgggaatgaagacgtggaccgaggacaaggacatctggtggcggttggaggggaacagccaggtacgatcggctgagaaaaccacagatcgagacgtattttgacagtccatccaacgtcagtatccggacgttccaggtgtcaaagagctcgtcgaagagtacattgcgagatcggcagaactatcacagcagttcatgagatacgtttccgaatgtctctcgctcccacccgacactttcgctgcgttcaagggcaatatggacaggctgaagtttattaagtatcccaggtcgccgccaaactctcaaggcgtcggcccccacaaagactcgtccgggctattcaccttcctgtcgcaggatgatacgggtggattgcaagttctgaataagaatggcgagtggatcgacgcgccaccgatcgaagggagtcttgttgtcaatattcaacaaggccttgaagctattacaggaggcatctgtgccgctacgacacaccgagttatcgtatgttctttgtctgcgcttggtctcttccggggcacactactgatatcgcgccaggctccgacgacgaaaacacggtatagtatcccattctttctaggagtccgaatggatcttacaacggagcaactccgggaaagtgcagcgcacattgtcgcccgcatcccagtctcggacgacaggaagaagcgcgccgtcgatgttcccagcgagtttctttcgcctttgtactcatgtgtgagtattatttctatcggatctcgatagcgctgacttgttggtatagtttggcgaagcatatctgcgaaatagaatcctcagtcacccggatgtcggacagaagtggtaccctcacttgtacgaaaagtacaccaagcaggtactctcttagatgaccaatgagtaaacaccttagtctagaagcaagcataagacacatcccctggtgtatagacaatgagatcgaacgagcgcaatagtgttaatatgtgggatatatataatcattgtgcggctgtaatctataccaagtcctgaagtattttctattcatatttcctcactagcgaactggggaacaagaacatctaaaatagcatctttaaagaaccgctgaagggtatacgagaggtactttagcagaaatccccagcttattctagcatgcttactacaattctggtggggctacttgcacgcggagaccgagaccgcatccacaaaactcatattgcatcttacccacccaggccgtatagataaagcgccacgttagtgggagctatcggccagtcagctttatgcgctatataacttcctgcggctcctggtcgaggcaatcttgttgcaaggatgatgggtggatggtgggcgagtgggtggatgaaatcgtggggcatagtggatgctgagtcagcaagctacaccacgtgatggctaccccagttccgaatctggagaacttttagtccaggttccgccggatcctcgtgctcggtgttctcccacaatcatgactgatcaggcaggaggcgtcaattacatgcgctcgccgttgccgacgcgagtgagcagtgcttgcgagagatgtcgtcgccacaaaaccagagtacgcaccattggctcactcccgaaatacttctgacctggtctccagtgcgatccattccggccttgctccctctgcgtgagagcccaagcgcattgcaggccgctttcaatcactcgtcctcgcagtaccacccggatgtgagcgtcttcgcttctatcatattttctgaagctaacgcacaccagctccaagtctgccccgaggagacaatctgcaagttctttagcagtgtccgctaactatgaccatgcaaccccagcacaacacactgagcgtggcagagatgagcattacgcagatggtcgtgacccgtctgggcggattgagtatggagaagcagagtcaacaatggggattgctcagaaaattgtgggtttagatcggcagctgattgatgagcatgcgacatccgccatccccggctaccaagcgagcaccaacgtccccaatcgccgtacgctagctatcggccagaggattccaatctcatcaatattgggtcaggcgttgcctgcgacagaaaccatttatttgttacttgaggactactttgatgcggttcattggttctcccttgtaatttacgagccgacctttcgcagaaacctcaactccatcgctgatgggcttgcctgttcgtcacaaaagtcatttctgttactgcttgcagtagtgttgggtatgggtgcgtggtaccgatcccagaaggagcccagggaattgacggacaacgacaactggcgccgattgagcactgaacttatgaagctggtcgagtcacaccttatcgagttgatggatcagccctctgtaaccgcagcgcaggtcctgatactgttcggttcatattgcgtctatcacggccgaccgaatctgtcattttccatacttggcgcaacgatccgaatctcgcaagctgtagggttgcaccgggaaccatcgcgcggtacatttgaggacaacgaagaaagaaaccgagtttggtggacgatatacacatgggatcgattcgcatcgatcacgtacggccgcccgttagggattaatgatagagactgcaacataagcagcccagcggatacctgggaaaatccgtattttgtggcacccctggcagaacaaggccataccatctgctattctgcctaccagcgagaactgaaccgtctttatctgatggcttcttcagctctagaggttattttcggttcgcggacttcgggttcatccaaggacctagccggagatgcataccatgcgctggttaaagaagcaacccagaaactacatagatggcggaacgagctgcctgacaacctagtcctaaatctcgaagaggatttccatcctgacggcacgccgtcagctagagcgcatgcgctacaatctttgtcgcttcagttgacttacgacaacattctcatcgttctccaccggcctctgctagcccgacaagtcgaccacctttcgacagatcattcaacgcccggtggaagaggtggagttgaccaagataacggccgttttaataatatctcgcaatcccaaaaaggctcgccgtttaagctctgtaccaggctcctgta

SEQ ID NO: 746 - DNA, 2659 bp, Emericella nidulans
  unsure (1)..(2659): unsure at all n locations
agaagaataaatagtgaaaaaaatgaaggaaaaagagaaaagtaataaaatataaggtatgaaaataagagatagagaaaggttggagaaacaagaatgaaagaaagttgataggaaagaataaaatggggtgttagagaagagataagaggtaagataatatagtaaagatagtgtaaaaatatagaaaagagataaatgaatggaaagagagagaagatgaagatgtataaaaaggaaagtaaatgatagaaggagaggagaaataggagtaaaatgagatgaaataaaaaagaatagatgaataatgaatgaaggagaaaaaggagaattagagaatataatggtaaaagtaaggataaatagatctagagaagaaaaaatagtagcatagtaaataaaggagaaaaaatataggagtagagaggataaagtatataaagaaggggaattaaagaacatgatgaatgaaaagagagaagggtgatataatgtaaaagaagatatagataaagaagaaggagataaatgataggagaaggatgaaatagagatttaaaagaagaagagaatgaaaaagagaaaatggaaataaataatatagggaaataagagtaaaagaagataataatagataggaaatagaggtaaatgtaagcaaaaagatagaaagatagatagaagaaaaaaaaaaagagatggatggagaagattaaagtgaaataaggagatgaaacaggaataatagagggagagaagataaatgaaaataagagagaaattggaaaagaaggagagaatgaaggaaaaagaagcaccgacctcctcctcctccgaatccgcctccgtttccgccattgccgccttcacctcctccgtatccgccgtgaccaccgtggctgccctttccaccgagccctaggccaagaccgaagccaaagccgccgcccttgcccttgccctcatcctcgccctttccatgtccatagcctttcccgtggccgaggccaaatccaaagcccttaccaccacctttgccccctccatggacgccagctccaaagccgaagccgaagccgaatcccttgcctttgcccttgtcatccttcttgtcgtccttcttgtcatcatacttgtcgtcgtacttgtcatcccccttgccgtagccatagccgtgatcgtgatcgtccttcttgtcgtccggcttgtagccgccgtgcttgtcatcgtccttcttgggctcccccctcgcacgaaggaaaccgccgttcttgtcatccttcttgtcgtcatgtttatggtcgacgatgtagccgggcttgccctcgggacccttcccgtggtgagggtcatagtcaggcttgcccttgggattctttgagtcaaacccgttagacgacccaacaccgaatccaaagccgccggaattcccattatcgtctttcttatcgtcgtccttcttgtcatcgtcctttttgtcgtctttcttgtcatcatcccagtcgtcattgtcccagtggtcgtcgtcccaatcatcatcgtccttcttgtcatcatccccctttaccccccttttatcatccttcttatcatcttcctttcccttcttccctaatccaaagccgccctttacaccgccctcgatgccaaatttgtgcttgacaaccggcagcttgcccagatggcgggcatcaacactgagatcacgagctgccgagacgttagatcttctgtcattccactactaatgtgtgcacatactctctaggcttctcacctccctctcaaccggggccgtgagggccagggttgagagcgcaagaacgagcgctggggttatggtaactttcatttcggcaatgccgcaatgcgaacagaatcaaacgaacgagtgtctcggttagagatatgccgctccaggcaaggggcttccgttcgaaagagtggtgttgttgttggagagctggatctggcgcggaattgagagatgctttatagttctcgcatcgccctttggcctccaggaagatgcacgatggagggccgatactttctccattgtgacccagattacgcaattctctactccggacacatcttgaaaaccctgccgtggcaattttgaccccagcaaagcaatcatacttgttcatgcaccccagattgtttttactccccgggagcaacatccaccaaaagtcccatgtattgttttgaacaattttgttcccaacaggaaccccctccccttttgagccgaccagacccccttttcaagcaaggttggcatttcccagccttctttggccaattgaaagccccccccccttgcgttgcatttgggccggtttaaaattcatgcttccgccggcccaccactttatatttttgcccccccggctttattttttccctcctgccagttttaacccttccgccggcccgcttcaactcctctctcggaggatttccccatattattcggccctctcaatgaatttccatttttttgcttaattcgcccctttccctttttttcatccatataaaggtccttccgtttcttcccggagtctggtttttctttttttaattccacccattgttggaatactttaanatgagggtanaaaagggcgaaacccctcccccccctttt

SEQ ID NO: 747 - DNA, 5172 bp, Emericella nidulans
taatgtatccttgggctcgatctgcttggtaaagagatgtgcagtttaaaccccttttcattctgtttgctgtcgtgggtatctgtctcgcccgatgtgtgggggtgtttcccctggcgaaagccatcaactggtttatacggtatagggcacgtccacggggagtggaagtggctgatgagttgccgatcgcttaccaagcaatgcttttctgggccggacttcgtggtgctgccggtgtcgcactcacagcggacctgaagggtgcgaatggaccggccttacgcgccactgtccttgccgtcgtggtcatcactgccattatctttggaggcaccacggtgcgcatgctatatatccttggcattcggacaggcgttgttgaagaactcgagtctgatgatgagtttgatatcgaagtctctaatggaggcacttactataagcgttccgataccggattgggatacacaccccgtcgtgcagacaatattccgctcgacggagtgtcgcggagggatctcgaccggaacaacagttattcgagtggcaacagccgccgccctagtcctccctcatcatcgcgcccgagtagaggacattctcgaatgtactcagatgcattcggcccaaaagacactcaaacaccgcgcgaccgttcaacaaccgctactctgctcggcaaccgccctggaagtcgcagcgacagcgaggacggtagtgagaatgagtatggcttgaagtcctctggaaagcgccgagcattggatcacgatcaccccgacgcctttgaactcgacattgacgatatacattccgatgacgacctgcctccggctgccccaacgcgaatgcgccgatcaccgtctcaacctccgcagcagtcatcgtcatcccaagctccacaagacagtgtgtctccgtcgcggcgcgaagcggggaggagtgcacgagaggcgatccgagatttattctctggcggaccctccggggatcacgtcgcttggttccgccagctggacgaagattatatcaagccccgtctcctcctggaccagtcgaaccacaagggccctggcgctgtctagatataggccttatgtatacttatgaatttctccttgtttctgcttgtcaccgacattgctttacttcttcgagctaatggtagttatatctgtattctcgatggttttacctgcgcattcagaccggttctagtctgaaagccgtaggtgataggtactgtaactgtacgaatagagtagaaagactgaagataacgctgctttcagagtggggaagaatatatggcgataagcaggcttcttgttcaagcaatctagacgtcttcatatctgcctatctttattgcccgacttacctaactcccctccccccccacccttcctggccagacaaagctctcgaccttcagactagccgacgctatcgcgtcttatcattgtgctgcaggtcgagaatgctactccttccgaggcccgataagaacgatatgtcgggtgtcgaatgtcgatccttgtcccttgctgtgcacctggctcgggcaaaggtcaagctgttgacatgcgtcatgcaccatgggatctttagtttcatttaagctcttcacccctcactcggcacttgtgtctcctgacaatctgggctgagtctgattctggtgtcctgggaactctatacaatatggtcaacctcgagaagaccgcgatggccgctcaagcgaacgatgagcccgctgccgagcgagctgatacccagttgctaggtattgtatccctctccctttgctttatagcaaaggaggcgtcagctaataagtggaatttgaagcaaccttgggttacaagcaggaacttcgacggcattattcgaccgtccaggtcttcgcaatagcgttcagtatcatgggcctgttgccgtctattgcctcaactttatcgttttctatacctgctggtccggtggggatggtttgggtatgctaccgctcacacttacatacaaatgttagctgacttgaatagggtgagatttctcagcgaattagtgcaccggtcattgtgattgatttgaggttcaggatggcttgctgctagcgtgtttatcttcattgttggacttgctatggtatgagccttttctctatccactcaggtgtcaggatattaatgtttaatgcaggctgatctagcatccgcgatgccaaccgcaggtggcttctacttctgtcacgcattatttcaacggcgaaaaatgtaataggcctctgagctttgttgttggatatagcaataccatcgggcttattgggggtgtctgttatattgactgtgagtggtcactgatgtagattctcaagctgccgactaacggtatagacggattcgctactatactgctcgttatcatatccatcgcgcgggatggcaactggtttgcctcccgaccaatcgtctacgggacatacgtgggttgtgtggtggttcacggcctcagtgttacattcttcgcgaggatcatgccaaagattcagtccgcatgcattgtgactaatgttggcctcgtcgttgccaccgttctcgcactgcccattggtaaagcagtaaatggcggaacgatcaactcaggttcatatgtctttgggcagttggaaaactatacaacttggccaagcggatgggcgtttgtgcttgcctggctctcacctatctggacaattggggcttttgactcctgtgttcatatgagtgaggaggccacgaatgctgcacgtgcggttccattaggtatactatggtctagtggactatgtggtatcttagggtttctttccctagccgtaattgcggcagttataaatacagacctagaggctgtgatgggcactgcatttggccagccgatggctcaagtaggtaatgcatacgctaattgatccttgtcacactgaaccatctctacagatctactacgactgcttggggaaagctggtgccctcggctttatggccgtagtagcagcggtccagttcttcatggggctgagcttggtatctccctccccgtcccaatcacttcctcaatttgatcccagcaaaaatagaccgctaaccgcatatttgtaggttgttgccgcctcccgccaaagctgggccttctctcgtgacggcgccctccctttctcctccttcttccgccatgtcagcaaacgcattcgttaccagcctgtccgcatggtatggggcgtcgtcgcggcagccataaccatcggccttctctgcctcatcaatgcggccgccagcaatgccctcttctctctcgcagtcgccggcaatgatctggcttggctgatgcccatattgtgccggctagtttggggcgaggacaggttccacccgggtgtgttctatactgggagactcagcaagccaattgcggtcacggcggtggtttacttgtcttttgcaattcttctttgcatgtttccgacactgggcccgaaccctaatcgtacgtatccctgactagctccctgctctgtagcaagtgtgagctaactgatcgttcagcggacgatatgaactataccgtcgtcattaatggggctctttggggcggcgcgctgctgtattacatgctgtatgcgcgcaagacgtataagggtccccaaacgacagtgcacggctcatcgtcgccatcctctgcagcttccacgaacctcgagcgcaaggagttagaatcggaggagaaagtgtgtacataactctgaagcagatcggatgtcatccggcgtgccggtgagaggtttttgtcagttgcgttgcgttggattctggctgtgagtattattgtcgcgcaaagaataagtaattttagttgtgcctcattcgagttcagaatgagctcttacgattactcttatctactcagagtataatagcgaggtactggtggtggcgatagtcgcgacggtctaaagtgggctaagcaagtaccaaacggcaatggcaccatgtcagcggtccgcatgcgattacttcagagctgatcaacccatcttctaggaatctcctggcattgctttaccgtccgagtccttctccttggaggtgaactctgatctctgttgtagtatgtacttaatagagtgttgtagcagatcccaagtgggggttgctgtcagacatggtcccacccagcggagttcccccgcagtcctttgatactccgcaacgagtcttgcgtaaagcactttcagcagtatttggtgctacagcccctgtacatgagccatgtcacgccaccagtcagaggaccctgggagaccatgctataaaggagagatatcgccactccagacctgataactagatttggtgtcgaggcacagaatggcctgatccagactggtaggcttactctgcgtgtgccagccaatgctccaaaccaggccggttctacgatgccgaatctactctaatatcactcagatcagtgggtctggcccgggctgtcgagctcccaaggatgacatcgtcgacccaatgtctggccccaatggccatggaagccgaaattggccaccaatcgcctgccgtacgctctcggcgcgtgctttagctgcccggcaaaagcaggaatttcggacgatgtcctcgtcggcttgtgtggattcgtttcgttggtggacccatcccctgtatagtgttgcgttgtgttgcactgttatagccagtgtctagaggcagtgctgctacacccctcattctcttgtggtataaatggcaagagagctctcacgaagcttgtgaattagcttgtctctgtacatcctctcagttaatagtttattacctcttctatcaatctcattttacacactctcatcccaaggatgtctgtccccgaagtgcaatgggcccaagtggtcgagaaggcaggcactccttcggtttacaaacaggttcccgttccaaaacctggaccagacgagattttggtcaagatgccatattcgggcgtctgccatacagatcttcacgccatgaagggcgactggcctcttccttcaaagatgccactgataggcggccatgagggcgctggtgtcgtcgttgcttagggagaattagtcaagacgaagatttc

SEQ ID NO: 748 - DNA, 6375 bp, Emericella nidulans
gaggataagataaaagggagataggtgaagatgtgggattcacttttgagatggagaacgatatgaggagaaatacaccgggatacagagtggctcatgttataactttagactctcagggtctatgggagagattcttttaggagaggagttgggaaaatatgatgaggaaaaaaggaaaagatttattggacgcccgcataatcgcagtaacgggatataaattaagggtagatagaccgggttctccaatgggagagagccacgtgaccatgggtgacaacacgtggggccccgggcggaaaagcccaccaccagaaagagggatgcttttgaaaatccagggttcatattctggcgagccaagagtcctctacttggcgaatggaggttcgagccacgacctcagggcagccgcggcccttaggtgagcatttgctagaaagccaatttccaatcttctagataaaaagtgtgtggtaattaccagaacatagagcaccttcagagattattggctaatgatgcattgtccgagattggctagttcgcagatggttggctgctacatggatcgcaatccagcagtatagttgccctctttgcacacaggccatgacagacacccagcgacagcactcaaaggaactatgcttcatctgcctgagataccttatagtctcaacgctcttgtttgcccttttcctccaaatcctctcgtaactttcgtgatttcgcggcactgatggtgaaccgcgaatatctacgccttttccctggtttcaactccttttatactcatatggcacctggaaacggtttggtgattgcgagtatcacgagctaggctttcaaggtgcttataagaggtcatagcctggaagctgtcattgccgcgttacgggcatggaaacattacatgagaggacgatcgtcgcaaatgggacacgaggaagcaatgaaaacagcaaaggatgcaatacctagcttcctaaacacagtcgaatcgcatcagcttcctgtcattccaggcgctttcaattcttcccctaagtttatcgccatgttccaggccgaggcgcttgtcgcaatccctgtagccttgcttgcggtcaagcaagcaatcgacaggattgatctagtctacagggtattcaacagaaactcacgattgccaacatggcaaatatccagggttgcgagcgggacggctttggagcacatgtatatcgctttgttgagtacgagatgcgccagaatgcgaacgtaagagcaaagagccgtgatcaaaggtgccattatttctacgtatagagatgcgacacagattgataccctgtcttcgaggctatgggccgagcttgccctctcggtcctgagtttgggggttatcgtcacgagcttgatgctatcagtatgcgaatgaaggcagacaggacactcattcaaaatatgccttttttttggacatacagcgcaattccacctcctcattccgacgtatgagccctatgttatagagcaacctgtattattccacgaaagcctgcttccgcttatcatcaccggccagcgacatcgctctgtggaccctgtcttgttcaatcttcgtagcaagccgaaggacttacatctgcaatgcatcggagtgttagaaactaggacgaatgtcattatcgaagtcggaatccttggcttcattggctgctgcgtaggcggtatggcgatcggctgtgctggtgctgtatttcctccttgtactctttgaccattaatagagtggagatttgagattaagcagagctagtcagcccctgccatgcccctgtagccaccgactacaacgacgtagtgcttggttgtatactcaagatgaatagctcaaacaaaataatccgaatatttgctgacagtatattaaggacaagggtcgttgttgagaccgtgcaatgaagaaaatggtagcaggaatgaagggatagtagagaaaagggagatgaggctgaggcagtttgcgtacctggttagggtatggttggcctagacgaggtgctagctgcggggtaataaacatgtcaactctacaaaattaactcaccagtattaatatccatgagcttatactgtctcgtaatgaacccttaacgaaagtggtatacagtctaggctgtgccagacgggggcttaatatattcgctaatcttgacacggagcacgctgccacctctttgcaactaatgcgcccagtgttagtaacgattcttttaggaaaaggctgtaaggagggcgaggagttatcggacaactatttctaggtaatgacttccatcaatcagaatccaggtgaccactgaaacttgattgactggcgaaaaatgtacgatcagaccatcctctaccggtcattacggagcgagtgtatgcccaaaagagggaaatcaggtgttgtcttctatttttactgattcagccgcacggatagtacaaccggcacaatgccgaggatataacccttgagatataacctagggcaagcggattccgttcattgcgggtagtatgtcgccggactgtggcaaggttgcagagcgaataatagatcgaaggaaatggcttggtgttggttgttttagtcaccagacaatggggcaagaccctgatctacgagtcaggcgccgacatggtgccaagctaacccacgaggtaggcccacagggacacataattacaggggtagtaggaaatcttctgctaaaatcaataggagcatatgtggctcggggaaccgtacagaagcccaatgggaggtttgatggggctctgtaatttggcctgcctctctattggggccagctaattacggggcgcccaggggtaaggtcttggacgtgctaaggctgtatctgggttaaaccatgtcgaaattactccgtgcctgcaggatactaaagttccattggaccaaaatccgtctttacgcaggaggggtgaggtgaacggatattggggttacttgtattggcaaaactagcctgtgcactcctttgttaaagcagcactgaaccctggcttttgcaagcagtgctggtcaccgtcttctgcaagatacgggggaaagtccccgtctagactgcagtgtgcttatgttgtcggcgaggccctaggtgctccctattctgacaagcactccagaagaagggcagcagtagtgctagttctcgtgtaaagaagctgcgatcaacatactgtacttcgctgctggtttgatccgacacaggctttcagtctggaataaaccgccccgcctctgcggctcggcccatttgtaactcccatacgtaattgaaggagcctcatgggagaatagtcaggtagcgaggtagaaggcggggaacccttcatgggcttctgccagctgtggacagatcaatttctctgtgcactcgtcattattacgggcgactaaagtttttttcactgacgtaaagttctgcccgatgcagcgcaataaacaacaggcgggctgtgcattgccaccctgggctataaagtgcccggacctagattaacccctgtctgcagcatgtagggcgtcaaatacctagactggtcccctgaccagtgcactgaggtcgttgctcgactactacacatatgcttggcgcattaaatgcccaacttgtcctactaatcactatgtccagactctagaaacctgcaggatgtcaatgtcacctcgctaagaaaaacctgaacataatggccacgactggagtggtagtcaccgtccaggtatcacgagagtacggttgggactatgtaagtatcccagttcaacgtgttcagcctattatgtatccgatagtcagtgattatattgaacaaaaaactaccggtctagttcagtaaccgaggattgggctgtatttcccctctctggccggctgaaccgcagggctccgcatgaggcagttcagtaaatgagccatcttgctcaacctatccttacccttggactaaatagtttgggtctgatcaggaaagccacaggcttaggacaaatatcaccgttagagaaccccatgatgtggattatcacaaaccataaaagatgcacaatagacgagatcaccgcaagaaagcgcctatccatatttgccctgcttcacgcctccaaatccatttgaaaccccttttacgctttggctccactatccatggtttgatcattgtaacgagctggtataattgatggttgggtattgtgctgatggacttgaaccttattttgatgcagcacaacgttgcatcactggaatgaagtcagtaccataatacacactataatgttggctcggagtatatctatatctagcatagcttgggtttgaatagcacacatcctgttcattggatgatattgtctagtgctatctcagattcaagtcaatggaatggaccactgagaacgaaacaatatccaacagtgttcatgggcgagtcgtacccgtgatatatgtaattgagaacagatgactacgactgaaggcgtaagaacagagaagataaatagggcacagagccacggaacttgatgcaaatccaacttgctcacgagctacaacaatggctctacttgaaagactttgtggtattcttgttcctattctacttttgaatgttctgaatgtacgtggacatgtcatatacgggagaggcgctccctccctcccggtcaacgccgcttctatatcagaccaggtcccatctgcccttgtccgccgtcaatccgtgggagacgtagagctgcgcattcttcccttgggagcatcaattacctggggtttgaagtcggagactcacaatggttaccgcaaatatcttcgggaccagctccgttttgacggctgggaagttaatatggttgggagtaaacacgacccagattcaacgatgaaggacaacgtacgttcaccacttgctataattcagtaattgctgctagcggtgcacatgtcttttctgtcttttgaagaggatccctgctgatagcatgttgcggaacacaggacgtcgaagcgcactccggcgatacaattgacatggttaccgccgcagtgcatggatcgctggcgtacaagcctaatgttgttctgatcaacgcaggtacaaacgattgtcgcctaggcattgagatacctgaggccggagcccgcatgcgctctctgatagagacactggtccaagcagaggacatgagccgtactttgattgtcctttccaccctgcttcctactgaaaacgcccaggctaaggctaatgtcccgagcgtaaatgcgcagtaccggacgctcgtgaaaaccatgcgtgaggagggtgtctccattgttctcgcggagatgaacagggcagacggctggattgctttccccaacgacttcgccgacgatactcatccgaacgaagctggatacaagaaaatggcgtctatatggcattcagcgatcaaggatgctgcgaacaagaacctcattgttgcaccggcagcgtttggaagcccagggggaagcgatgggcagtgcgagagggagtacggaactggtgtttatgccggtggattgacgcaacgtggcagtggagaagaggatgggatctactatcacgacagcgaggcaatgggtgaggtctttactgtgcttggcggagaagatgactttgacacgttcttcttcgcacgaatattcagtcgtgaccgcgacgatatgctcagatggactaaggccgacggcagcgtcaagtacctccttaatcgaaatattgacgggcagagcacaaagttcgtcgatgagcacatctctatgaccgttgaagataactgtaacccagctggtgttaatttcatcgatgttaatggttagctttgccccgttctttggcttgcctcgtcttctcctttcaagctgttacagcactgacatcactagctgatggtttggacgattttgtttgtattgcaaaagacggaacggcctacgcaagcatcaacaccggtgaagaccctcctaggtttgtgtacaaagggctatggaaatcgcgcgagggctatggtcaggccaatgtaaggctgggagatgttgacggtgatggtagggccgactattgcgtggttgctggtaatggggatattacctgttggcggaatggatgggttggtcagtggtcttctacacatcttcgataaatggctcatcaggctaatatttatgatagacgatatgccgaagtattggcagccgcttggtaaacggttcaccggtaaaggaataggggatcttcgaggcgttcggctcgaggacatcaatggcgatgtaagat

SEQ ID NO: 749 - DNA, 3988 bp, Emericella nidulans
catatctccaagcaaggtgatatcgtctactgctcgcaaacaagggaacaggctgcagcatcgaggaggtgaagcgactcttccagtttggttttccgcaccccaagagctagtgctttcaaaagaaatatcgacgagctgatcatggggataagactcgcattggaagacaccgcaggttagcaagagcaactacatgtgagaggattgtgcaagcaccatctattacttcttcgatgaactcatactcattcctactcatattgagttgtcgtgcatgagagacgaacgtcgtgtcaattattcctcgcgagggcgtgtccgacagcacgcgcgcaacgattccctggacaccgagagagttggcgaaaactcttaagtattggtattcaatgcgcagaatatcattgtagcgagagcctgtcataaattagcctacattcgcccaaacacctaggaaccccactctgaatgtcgtggatatcgtctttccatgctgcaagctgggccttccactgctctagtgatgcgaaattcatatgctggctgccagcactcttagccgcggtgaagaatgtttctcgtagattccgggtcaatcccgttaaattcacccacgaaatcataaatctcgcccaatcagggtcgacggtcttaaggctttcgagcggctccttgccataatccggcataatggacgtgcagccaatcctggaagcgagcaggtttgtagtcacaaacaacagcgacggaaggcgctggcgtctaagctccagatcctgaagataattctcgacatcaggacctgcgattgtgccctgtcgttttaacatagttatatggtctctagggttgaacacgccaagctcgtgtgcgagcgccagtgctgagctcacgagcatccaagacatccggtctgaccgtcttgtgggctcgacgacgtcctccttccaacggtcttgcatgggacattcctgtgcagtcgaaggcggatctcgcaaggtaaacgttgtcagcatccaatccgaatcccacccgtccgcttccaaggggaagtgtagagccaggggataccactccgagaggagcaagagggcctcaatagtcgatatatgtctagttttggcttttgacagtttctcttgcccgagcattatccgcaagatgagatgttggcaatgctgccataacctgttgtggatgtaaaatcccctggagctcccagaggggccgggtagggtatgatatcgggcggatatcattaggattgtgcagcatagaaccggttcttgagtgataagccagtagtgtgtatggtggtctgcgaagaagtctgtcagaatgggagacgttaccggtgccaggttacgaaagaacctgccagactgttagaccagggccttcttcggggcggccaactgaccagtccgtatacgacagcgcctcctccgccgtgaaccagcccatcttgacaaaccggcatccctcccagactctgagcacattatcctcggacccgatatcaaagggggtgttcgaatcatcaagagctgtagcttggccattgccaacacgcgcactcgagcccgcatgcgccgcggcgtcaaacagaatatccatggcatcgttcccactcgcaacctgtttctgcaacaccgtcgctgagatacactcgccgtcttccaaccccgcagaagccgatgctgaagctgaatttgacggtgatggctcgtggacgtcatcaatcgccgtcatacccgtagccgtagctgcacctttaagacgttccatcccacgaggttcgtattctgaagaagcatggcgggcacctcgagttccctttttcccagggtgcttctttctcgaccaaggctgcttcgatgaaaaccggcactccagatccatcttccgacaccgcttacacggctgatgaagctcgggttcgggctcacatttgacttttctccgtcgacaaggaatacatgctttgtaggctcgctggaaagtgtattgtgtcgatgccctgcttcgtggaggtcgttgcatcctgtctttcttgccctgagtctgtagcgataatggcactccgatttagagcagttgttaggattccggagacgaacgccgatatactccgccagatagacatgagactgcaggtgggaagttggggaaagctgcagtggagcgggaggggggctcttggagcaattcaaacagagcttcttataggctgctgcagacagaaattggcggcgcttttcctgcccaagtcaaggctcttctttccccaggttcttcccggttactggtctgactaggtacagactccttcccctactattcgacttctagaatcattctatattgtcacgatatttgcagctgaaacaattacaggaatggaatttatacgagatctttactagtaatccaagcccaagtctatttacatttttctggccataacaactagtacttgtactgtgttactacacttggccagtcacccacccagaatcatccattgcagtcatcccactccaagtcctaacgaacagagtctcaagatcctgcgcccaaattgagggtgatagggggaaatatgatcaggaaaagctgaaaggaagatctttaattttcagcgaacgctccatcagtagcttactacaagtgtttgtatcccgaggccgaaaagctccatttctcgagcctaacgtcattcttgattactatggtaaaagctcattgtgtctgggcttcacaatcaatgaacgacggcattcagaggacccagaagcctgaatctcaagaaatcaggacccaggcttaggtgggagatgtaccagctagaccaaataccgaaaacggggattcgcatcaccctctgctgtcacatcaatgcggacatcgtcagtaaccggcccataaagcctgtctcgtatcttgttctcatagctcaacttcagatacagcccccctgccattagcgcaatgcaacccgtcaaagcgcacccgatagcacagccgcggatatagattggactgtggaatggtcagctagattaaataactaattaaccgcggcagggctacttacccttcggaatcaggaaagacagtgctactgacgaaactcgaacactgtccaaacacggccagtaaagccatgccggcgcctttcttcgaatcgccaccttggttgttgagcaaccaggtgatattgatgcatagtgcaggaaagacgccgcatgttgccagccagacgccgaggtaccgtggccagaccttgttctcatcttggaccgccgcaaggatcaagtagccgatcatcccgattgtcgaaaagaacactataacaagccctctccgtccatatctgtcggaaagtaatgcggctaccacgcaaaacaagaacgagacaaagtaagggggtgccgagagaccctgggcgttgatggacgtataccccatgtgctggatgattgttgggaggaagttcgagaggcctgcaaacgagaagttgcagcagaagtggattagggtatgtacatagttcttgtagtcggtcaatccggcgaagacctggtgtctgtcgagtttgtttttggctgtgcgatcgaccgtatgcaggcgtccgcggccgtggtttgctctgattcggagaggaacttcgcggtgccgggggagtcggggaggaagaagaagacgactatagcgaatagcacagtgggagcgccctctgtttggattagtcccctgcacggtatgactccgaagcagtgacaagtgatagctggacttaccaatgatgaagagaaaccgccatgattcaagggtcgagtgtctgatatgcgtaacgccgtaggcgagtgagctggcaaagcaattggcgataggagacatgcctagtagaatcgagacacgaaacccgagctctcgtcgttgatagaataacgacaagaagtagggggccagcgcgaaagcg

SEQ ID NO: 750 - DNA, 2670 bp, Emericella nidulans
gcgcgtggtcaatttgataaaatcaagcgcgggaagggcgtgggaacacagacggactacaacgctaattccgctttcatcgatacaaccgaatacttcatgaataaaattatccagaagcaggagatcgttccgccctggatcgagaagcagcaggaacttgcgagagagatagatcggttccgacagcgtttgagagttgagtggagacggcatgcagcgagagtgatagccagccaaggagggtcgttggagacgcagatgcgtaaggcggaggcatacgcggctgcagaggcgcggcataccgctcgactcgagctagagaaagccttcaatgatactaagtcttcaaacaacaataccagtaccaagaataatgttccaacttcccctccagcctcagatccttcctcaacggaaactctccacctaccacccctgcgcgactcgcaatacatttccaacgaacgctcattccttgaactttcggttaaaacaatcaacgcactagcccgctcctacaacctgcaagccccaccggtagcgcaaaagccttatctcaatctcgagcgtgaactggagtcgtgctatgcggatgtggcgccgagtttagcagatgagatcaaacgccgtgctacggagaaagtacggcaaccttcatataccggggcaaagacggctagtgtacttagtcatctggctacgtctcagacggccagggtgtatgatgaggatgaatcgaaggggtatggtttcaagcagttctggcaggatctgttttcgaagaaatgaggcgggttagcaatgtacagtattatcagaattgaggtttgaagattctggttcacgttatattatgattatagaactcgatatgcaagcctgtattgacagacttgagcgaattgtaaatagtaagcacataattagaaccacagaacaaaaaaacacaatgtgccccactccgatactcagataaccagccgctatcgcaatctagttattctcctcctcatcctgattggaggtctggagactacccagaaggaagctcgactcattctcagggagctcatccttgtctccgagatcgaggtcattactatcagcaaagccaataaagcttgtcccggaggtcggaatagggccggagtcggacctagcttgcctatcattgctctcgaagttctggagactgccaaggagaaaactcgagtcaaactcaggacgctcctccgagtcaccgagatcaagttcgctgctgccagcgaagcccatgaaactcgaccccgaaggcaaacccgagtcggagtccgagtcggagttatcccattcgtcgtttgcgttgttgaggtgctggaggctgccggcgatgaaactagattccagctcggggagctcttcatcatcgccaagatcgagctcgttgctgccggccaatcctatgaaacttgagccggagggggagccggtctggaggtcgtaatcattagtactgctttgctatgctttgctatgtgtactgtgacttttgtagtgatcggcttatatttagcgggatcataaggaggtcatacagaagctgcggttggatgttagctacggacaccggcgagatctatctaagacgtacatgaaatttgggggagttcagggaccgtagaggtgctggcggacgtaaggtcgccgattgagggcgtggtggccgtgggcagagcttgggcgaggcctgtaagggccgcgataaagccggcggaatagatggagaaaggcattatggacaatgatcagtctaaagagacagaggatgccaatgtttcgacagaggtcaaaaggagagacgttagttagggggaaatggggaacctgtgggtgacagccatcctttatatggggtcgaggggtgatattctggaggatccagttccaagatgaattactccggattactttgttgatcggcaatggaatcgacgtgatgaatcaatgacgaggttatatctcaaccaagatcttcttattggatgaatttggtgaatgttcctggagaaaaggcaataatataaggggctagtttccttcgtgcctggttttagtacggacaaggtaacccaccctccgatcactaggctgatctcattattcagaagtctcaatgtcagaacgcgaactcgcatcgaaaatccataaactctcgagtgctcgtttaggctatatccaatttgcatggccatatcaagtacgatagagaaagggttcgagttcatcgcaccttccgtctagttgagatgtctatcaccgtcgaaatcaaaggtcagggtgttgtctccagctgtgcgatagccacaaattatctctatctcgcagtttattctcacattacaccgaatgggggcgtttgaccatgggcaaaaagctctctgttgttcaaggcgttaagtcagagaactacacaaccccagggaatgccgttaatgagatctgggttggagacaccgagctcatctcccgtctcccatttggctccagcgacatggatcaagccagctggccgacgaacggagtgccaaagatcccctggcataacttcatcatccctatgaaacgagacctcgagaccttgggcgcctacaactccaacctgcctcttgacttcagcggcattgctcg

SEQ ID NO: 751 - DNA, 2523 bp, Emericella nidulans
ggtagcaagatgtaaggcgctccgaactcaccgccaaagctgatacttacattcgttagcgtctccaaatcgcacgatcaatttgcgcagattgccgttgacgcagtgctttccgttgctgatctcgaacgtaaagatgtggattttgaattgatcaaggtagacggaaaggtcggtggggctcttgaagactcactccttgtcaagggtgtcatcgtggacaaggatttctctcacccgcagatgccagatgaggttacagacgctaagctggccattctgacctgcccattcgaaccccccaagccgaagacaaagcacaagctggatatcacatctgtggaggagtttaagcgcctgcaagaatacgaaaaagagaagtttacagagatgatccagcatctgaaagactccggggccaacctggtgatttgccaatggggtttcgatgacgaggcgaaccatcttcttctgcagaacaagctacctgctgttcgctgggtgggtgggcctgaaattgagctgatcgccattgcaacaaacggtcgaattgtgcctcgctttgaggatctcagcgcagacaaacttggtacagccggtcgtgtgcgcgagatgacctttggtactacgcgagagaagatgcttgttatcgaagagtgcgccaacagccgtgctgtgacggtatttgtgcgaggaagcaataagatggtaagatcgcccatctatactagaccgtgcattactgatttattactagattatcgatgaggcaaagcgatcactgcacgatgctatttgtgttgttcgtaacctagtcagggataaccgcgtcgtatatggtggaggtgcagcggaaattgcctgctcaatcgctgtggaggatgctgctgtcaaggttcgtggcgttccagtttcctatagtcatttactgacattgccctcagagccctggaatcgagcagtatgccatgcgcgcgtttgcagatgcgcttgatgcagtgccgttggcccttgctgagaactccggtttgagcccgattgaaacactcgcggccatcaagtcgcgccaggtcaaggagaacaactcccggctgggtgttgactgcatgctgactggaaacaatggtaaatactcttgatgaagacagtagaattgatattgattaggctacagatatgagagaacactttgtcattgatccgctcatcggaaagcgacagcagttgttgcttgcaactcagctctgccgcatggttctgaaggtgagttagatacctatgtttattgtacacatgcagctaacttgcgacagattaacaatgtcatcatctctggtgacgaccagcaggagtactaaacttcttgtatacgatactatcatctcgatgacctaaaatgcaacccgctttaaccctctaatccaacatctagatcgtgctatgacagaaggcgcaggtacatagattagttgatgaaatgagaaatttgaatagtcgtgtctttctcggcttgggttttacacatgtccttagcaattcttcccagcgccgaatgaactgtcataccttcgcagcccatccggtctctcccccgactcttctcagtttgagatgagagattatcgacgctttgagaagcccccggcattctccacgagactggaactcaacatccggtcatacgacacgcttccgagttgaactctcaactcttgtgaacggtcgcgcggaagaatggaatatagactatttcgaaggattcctacccttctcaggtcaaatgatgctgtagacttttcaactgtcgtagcagactaggtaccgcaaccgaggcatcatgggcagtcagattttcaggcacggcaagttaggttaggctagtaccagcccacccaggggaacgcctgaatctgaggaacaacacgacagctcaacatgaaacggtaaaagtcaggacgatgggaacaactcggagcgaaaaaggggctccgacactgcggacgaactgtctcccttctggtttcggatgaacctgtactaggacagtgctggacacggtctcttcatttccgctcgccgctcatcgaggcctttcatggaggatcttccgcacgaacggagatttatccaggcttgttggcttgtcactcgtcaagactcaatcgctcgaaaggacaagagagggcgaaaaagagtgtgacggggcgggccgttctgacgactgaatgagctcagaagacgaatacttcgttcaatcctgatcctgattctggccttaactttggggggcctgagtcaggggatcgcaggttcagtaccgccatcggatcattgatcgcagaaagtctatgtagtgagcggtaattcccatgggatgcacaaagtttagagcccggcgtccggctcgtgggcgtggcttcagtatccgtgacagtgtaagagagtgttggtaggtacatagtatagtatggcatcgaccggcacgtgctgtcaaggcgctaaagtggcggtatcttcctgatc

SEQ ID NO: 752 - DNA, 2466 bp, Emericella nidulans
cgtattggattggatccttgaaagttgtagttctcactacatagcgtgcacgtgattgtctcctgtaaccatcgagccgccagctctaaagcctgcaaccggatcgagatttccgcatcctctagacaattcattatgacgtcctgatgcatcgaaatcagatgagggtgggatactacaatcctgctaaatgcgagcagtgctacgtacttgactggtatccgttagcacagcatagggataataatagggaacactcacggttgggatcgaaatctgtaacaaccatgcctcggagctttgacacgcaaagatctgcaatctcatgcgagtcttcaagcgccccttctccctctaaaatgccaccttgaatgattccattaatgcattcgtagagcaatgacatggcggtggtcgtctggactatattgataagcggccggatgagtttccgcacaagccgaggctccagaggagtcaatgttgcaaactagggaagttagcattaccaaatgccaagtgtccataaaacaaactcacaagttttatgattatgattgacattcaattgttacccccttccaccaaaagctcaaagaaccttggctcaagtgggaggaaatcatgaggcctccgccatccaagctcgcatacgacattgagtacagctgtagtgacactgctgtcttccgtttcatccatcaaacggtccttcagcctaggccatgctagccttaaagcctcgggataaaccaaggccaggcggtacaagcatactactgccttctttcgaattgaaggactggagtgggaaatcctagataagacgtcgggaagcaacgacatggcaagagatggggttatgatatttgggagggtgttcaacggaagggagattatttgtaggtttgagcaaaccatatcctgcgagcatatttgttagtagcacaggtataattggaagccatatgctgacctttttgagtaggttggtagcaagcatcagcacttctgtctcgggcctgaagctctgtaaagccccaagataaccaactcttttctggagaaacttggatgatgacatgacctctagaacattgaatgatgcccaggacatatcataaccgaacatttccaaatatgctagcttcaaaagggccgtggcctttttgtctgggatatgtttagctaagagaagacgtgtacatagacaccgtaagaaataggctcacccatatcctgagatcgaatctctgctctacattcccggaggctgttttgaatatagtcttcctcagaacccttgtgattcctcagaccttttatcaggtcgtacaacgacttctcgaacctaatcagagtcgggaataagattcaaccagtgctaaccgaaagcaagttacttacattttgggcgagattgctggtcagactacttcgagcaggtagtcgcttgaccactgtaacttgcatcaaaaagcgagggtaatgtcattgggtccgagatcctatagaggttcgtcagaagccatcagctctagttaacttgattgatgaatactcacacttgaccaaaagctagcgaagaacgccaggaaaccagtattatgtacatgtagtcttcggtcagttgagatcagtgcggagtacaatcggaaagtacgtcagattgcggaggtgaaagtcacgggacaataagacagtaattaacttatttctttcatccatacttgtttgatcagtttctttctatctgctgtatctccatagtcgatatcgagaacaacaccgccagcaatgtcaatggctgattttcaatttactggcagtcacaggtccagtctcaaagcagccctccatcgtgcacagcaagcccctgccattctcggccaacggcctccgatcctgcatcaggaatccccgagcgatttcgattctctggagaagctcttctttgcatgcatacaatctgcagacgacaaatctgctttagcgtgtcttgaacgtctagtgcatcgtttcggtctttccaacgagagagtctcagcgctacggagtctctacgatgaggcggtcgcacaagaccaaccaagcctagagcggtgtctcaaaacttacgacgatattctgtctcaaaaccccgtcaacctggtttgtctgtattcgccagttgtagataaagtacttaccatggtgaatagccgatactaaagcgtcgaatcgctctccttcgctcgctatctcggtacgcagatgccatatctagcctagtaaagctccttgaggccacgcccacagatgctgaagcttggtgtgagcttgcagaactgtaccaatcgcaaggattgagcccacaggcaatatttagtcttgaggaggctttgttaattgtaccccatgcgtggaatgtgtgtctcgtaaccacattgcgtctgaaatagttgttgatacttttaggttcacgct

SEQ ID NO: 753 - DNA, 1126 bp, Emericella nidulans
cgtgtaccatttttcatccgcggaccagggatcaaatccggagggaaggtaactcaggttaccactcacatcgactttgctcccaccatctttgagttgctcgggttgccgcctcgcagtgactttgacggcactccgatgcgtatcatgaaagatagcgccgccattccccatgagcacgtcatagtggagtattggggccaggcagttcttgaaggtgactacgcaaacatatgtacgattttcagccgaatcacaattgcgcatacaagtagctgatgatggtcacagccccgacgaacacagaccgcatgccaaacacgacatataaatccgtccgcctcctgagcgagaagtacaatctcttctatgctgtctggtgcactggtgaccacgagctttttgatctaaatgtacatcgtcttcccattttcgtcaagctgcgaaagaagcgaataactgacggttaatacagacggacccctaccaaatgcacaacatctacaataccgcctctcgatctttcaagaacaggctagacgccctcctcctcgtcctgaagtcctgcgccggaagcacatgcatcaagccctgggccgaacttcaccctgacggatcggttcagagcctttctgacgctttggattcgcaatatgatgggttctatgcccagcttcctaaggttgagtatgaggcttgcgtagacgggtatctcattgctgcagaggggttgcagtgggaagatgtcagtgctagcgctctacggaactatgtccgacggaattacgccttcgatgatgtgcagaagtaccggaaactctagacaaccacgccagaacttgaagacttatacatacccacgcggacatgattattggcattagatatagaattgataatgctatcgaggtctaccctgaaacaatcagttaaggcgcaccgggttagtccaaaggtgtatctgatccatctcaccaatctcagcgcagggccgcgcagattctaagaaaataggaaacacgtattatagaggacaagaagcataagcataagcataagcagaaaggggataatggaagcctgaagcctagtaccctgattcgcctctcttactttgcctagagta

SEQ ID NO: 754 - DNA, 2538 bp, Emericella nidulans
  unsure (1)..(2538): unsure at all n locations
gaaaaaacaacatcaaggatcacatgaaataaattttacgacaataagtacctatccagttaaaatagcagtgagtgaaaaccaacatatcttgtgcaatctcacgagatacatcaacttcctagacttgtaattgtgagtaaaactaatcacaagcacttccagaaagatctattactccataagcagactgtgaaatttctagtagatgcggcaggcagttaaaaatcccacagagaatgtgttctattgggtgcgttccctgcatcggagacatagtcggagacttcccatctattttagtgcggcctgaaccctcttccacacccagttttcatcatcatcatcgtcatcatcatcactaccgtctccctagaataacatctgcctcgtctcctcactctcacttaaccccatattaggcactatggcctcagcaagaatctacgacgtcctcatcattggcgccggaccagcaggtctctcgacggccctcgggcttgcccgtcagacgtattccgcgattgtctttaactccaatcaatatcgtaacgcctttgctgatcggatgcacaacatcctgacctgggaccacaaaccccccagcgattttcgtgccgctgcccgagacaacatcgagtctcgatatagcaccatccatttcatgaacgcaacaatcacatcggccgcggcgaaagaagacgggacgtttgaggtggtggatgagcaggagaataaataccagggaaggaagctcgcccttgccacgggcgtcaccgacgtcttgccggatatcaaggggttcagcgagttgtgggggaagaacatattccactgtctattctgccatggatttgaagagcgcggtgccgagtctgctggggttctgggaggcggcttcatcaccgagcctgccatgatacttcatatggcacggatggtatcgcctcttgccaaaaaggtcactgtctactgtgacggaaatgaagagcttgctgcgcacgtgcagaaagagttcaagggcaagccattggagatcgaatcgagaaagatcactgctttagagaagcaaggcgagagcgtcactgtgcggttcgacagcggtcagagtcagcaggagggctttctggtgagcaccatcatagttaccactcacctgacatgataaaggcgtactaacgatggatcctgctaggtttctgcccctcgcgtccggatcaacggcccgtttcacgaacagctgggcctgaatgtcgacccgatgggatttatcaagacaaacgcgccattcaacgagacaaatgtgccaggctgtttcgctgttggcgattgcggatcgctgatgaagtcggtgcctcaagcactcgcgacaggctcctttgcggcagcaggtttagttgcgcagctcggtgccgaaggcgagctgtgattgccatcgcgttcaaagggggaattgtagatcaaacgtcctgggattccatagctatagttaattttactcgtaaataaccattaattgagtatacttgcgtaccttcttagtaccttctcagtacctttccgtatgagcatattcgctgcgattcagtccagatatcgcttagtgggcttgttcgtttgctgctgtaatccattccgatatagaaaccatatagccagctgaagttgttgagtttagactcgatcctgcctcgaacagtagttaagggtagttatacgcaaaaatccattagcaaagcatgtcgtagtattttaggtgactatcgtgctgtttaatggaatataggaccctaaagtggtgagatgttgcttattagataactacgctacatcggtatttataccttgttacctgagatataggattatttgcctcctaaatgatttgttacaaggacaaactggtactaagcatctggcttctgtccggtagcaagaaagtacacaaagcgacctaccctctagtttgatatcaagaatgtctctgtgagaggatgatcccggatacggctattgttttctatcgggcttccagtcgtagactgttgcatcctgtctgccaagtctaatggcaaagtatgggttaataatacgagtaaaaaaaaagaagaataaaaacgtagttccgactactatcccatgcaggctgtctattattaggaataccagatataccgagtacaggccaaagaccccaggctcagggaataatttgacaattcaaaagggaacgctggcaacctagcctatcaagagaagtctagtcctaaagagttcccctactgaccttccaagccagggtgcggaagagtgagtcaagttcctagagttcaacatcgctcttgcgcaccgatgtggctagattgtagctcaccacgccgcccttttctgtatggagatntctgacgagcgtgcagagcgatcccgagccacctaggattttcattgatgcgcggcgcctgcaaaccgcgtcactttgtcagtagcaggatccctacgctagactgatcgcagcgctcgctacgtatggatggctac

SEQ ID NO: 755 - DNA, 8864 bp, Emericella nidulans
  unsure (1)..(8864): unsure at all n locations
acggggagatcgggtcggatttgaggtttccaagagacgaaaagcagcgggaatccacggcccgctgattggtcaaccgggccagaagagaaattgtgcacattatattacataatgcggactatacctccgagcctcttattcttatgtcttcctagggaccaaacgtattgcgaagcaaaacagcccctccgtgtgacggcaaccaacctacatactgcatacagatgatcttgatttgcaccattgacacctcaaccctcgagtcttaagagatcgagctggcagccctctccacctggctatcctttatcccttgcagacattgccgattcctcttgattcatcacagaacacagaacacattgcccagaatcgtagtagccaacgaacttaacatcaatggcctcaccaaaccagatatccaatgtttcacaatccggaatcacgactgacgcagtcaccggcgaacgctacataccctcttcagtccgagcagacggctcgaagcgtaaggagatcaaggtccgacccggataccgcccacctgaggatgtggaattgtacagaaaccgcgctgcagctgcttggaagaaccgcgggaaagctggtgttcctggagcagagggcttgacgcagacggggagcgacccgtcaaaatcagtttcgggtagcggcaccgcggccagcaacaagaacgcgaaaaggcgggaggcgaagaaaaaagcaaaggctggagctaccctggacggcaccggatccaccacaaatgggaaagatatttctcagattgataattggcgtgccggttcggcaaaacagcagcaacaggatgcgcctgcggatcctgtcaatccggaggtagagcgggagaagaaggctcggaacctaaggaagaagcttaagcaagcgcgggagttaagcgacaagaagaacaagggagaggttttactgccggagcagctggagaaggtgatcaaaattcaggagctgatccgccagctcgatgcgcttggttttgatgccgccggggaagacaaggaaagcgaattccagaaggagaagcaagagaagtaggtttgctaagggctgaaggtcggcgtttcatttggcacttgcgaatcgaagagaacgacttcatactcgccctaaaggcacttatgatgcggcggcctctttattgcagcgcgctctgaagcttcctcgccacgcttcatatcaataaccatgcatatggccgattataacaattgcttggcaattactacataatcgcctccctgtagtccactttacgcaagtgactcgtctgtgtcaagattatgggtcagtactcgaatcacgacgtccgacaatcctcaagagttcgtgctgttcacgtcgcagtgtttcgctcacaagaatgatctatggctcaaatgagcgaaggaccgagtgagaatagagctatcaaacacgacagaacggggtatctttgaacttcatattttacaggtgtttaaattaaaccatcttctactgccgaatctttccctaaatgccaacagtaacccctcgtgtaaccggccttgggtccatccggactagcattgatgccttcaggcctgctctaccagagcctgcattactctaattgggattcttttctatcccacatttcctgaacaattcctcagatgacgccgttatccagcgaggttggtagtgggtaattataccaccaccaccaagtgaatccgtcagggatggaaaagggaacggtgctcctgagtattccagctcagggccatatttcgcagctagataagcctgacgaatgctgtccaccacgccggtaccatgcattgaataccacgccccagccagagtgacacggtttttgagctcagacttaatagacgttgaaatgtcttgcatacgttcaagatgcccaacggtgggctgaggaatagcatcgcgctgcaatcgggtgtgggctactttgggagaatccaggatgcccagatgccttttcagtaaggcttgagacatcgagaccgcagtatcgtggtccggatagtctgattctttccacccgtcccaataatggccccccatcatgactgtgagctttgtgccggtggctgtgtcttgacctacactagattctgaagcaaatatcacacccagtgctcgctcaggattctgcgcaaaaggtatcgacctgggaatcaggtagccgaaacctcgacagggatcagatcaggatttgagtaatacaaattcacaaccatagtagttgttgcgtagttgtgtctctgtagggcatttattgttcctgtgggctgcttctcgggctccagtgaacactgaagttgtcttgcgaggtcgcaaggcgggttggtagcaatgagacggttgtgaacacgactctgaccatcttctacttttacctgttagatagacaggtcagtttttccgcataaatgctcgcttcgagatactcgaactttgaaatcaacatacagtgaggttggagctctcatgatcttggagaatgcttgtgacatttgcatgcgtgaggacttcaacttttggtgatcgtttcaactctgcaaccagagcgtctgccagctgaccgacgccgttcttgaaagtcaatgtactgctgtcctttgccaggcttctgaggtagtctaagtgagacgctttctttgcttcacttatgaggagcatggaaatgaaatcgtccgaaatccagtactgtttccctttcatctccgttatacccttggctacactaccagacaactcatgcgcccgaagcgggcccaggagcgtttccgcactcagcttgtcaatattccctgcatatatgccttgaaatacactggaagccaaattgtcagctattttggtagaccaccgtcgtgatacaaactccatggcggattcgtctgaaggcaagttcaatggacgcttaacgaagggctccttcaaaaggctaggaagcacactctcgaagactggttcttgtagtagacttttcaacgtcgttatgagctgagataaaagactggcccctttctgcggccccggcatacgaacgaggcgatcggggtaatagatataacggttctggctcacggcggatgacgttttcgtgataagcatttcgtcttctagccccagctcggtcgactaccaaaatttccagttgttagctctcaaactccaattaagcaagtaaatacccaagggcgccagctataccaagtccaaaagtggaaatgcagtaatggtgctagctcgcagtgtacgctgtccatattcgaagacaatatgctctccgtccacgttaattttctcggattgaatccagccgcccacgcgagggcctttctcatagacggtaaccttggagcattttgggtccctggataatcggtatgcggctgtgaggccagtgattccaccgcctatgatgccaacagtgtgtccctccgaaatggcatgcaagaagcgccgttgaccattgcaaggaaaagccaatggtctttctaaacgctttagtgcagaactagcggcgcatgatccacgcatttcagcgaaaatgagtagtagcgaaagtcattgagaaatgaagaacatctggtaggggtagacgtcaggcaacttacgactccgtcggggtgcttggatgtgccccggtaagattaccgtatttatacttcatcgttactacaagtaccatgcatcgacgccgcaagggcccggtttaagtcgcaataagaggcatacccagtgggaaaaaaaaaatttgtcactaaaaggagcaaactgtgtgctttgacataatcttgtatccaggttctatttacaggcatatcttctctgtcacccagtcccagggatatcagtagcattaatgaaacaattgacgcctatcccaccatttaaagatcgtcctcaaaaagcaaaagcagatagtacacgttgccagaccatgcagaaaggtagtttgtgaggtatcagagacggctatggccggtgcatagcccgaaaaaaatcatctagactatgttacaatctcttgtgaagagggttccgccccagtctctggcttgatgagctcctcgggggcatcctcgtcgttgacaaacttccgctcgctaatgcgtgcctttgctttagcggagtctgcggtccagactttgtcggcaaatgcacctctctggccttcggcgtgcttgtaaggacaagtagggttaagacagggattgaatttgcaggcagtctggagatgcgtgaacttgcagtcgggggtggaacagtcagcaccattgcggcacagcggcatcgaaggatgcttgaaatgacagtgaggattcgtgcagttagggaagaacctgcaaagttcttctgcttgatgggctgatttcacagctggcgaggggtgcctcccagtgcacttgcggtttttgcacgccgcaccataagagcacacgtccgaaacatcaacaggagtaccctcgggggcagcgggagactgatgcgcgaaggggcagtccttcctcgtgcagcgaaggttgaaatggcaaatgttatctgtgttgttttcatcctggccattttgcacggcaccgtcggaagtcatgtccatatcggtgtcgttatttttcgagtctgcacgttgcgctcgatttccaaaggccccatgttgacggggccctcttgggcgttcaactcggtccgacaaggagcgttgtgggccagactgctgaaacgccgggtttattgccggtgagacaaaaccgggcatgagttgtgccatcatcctcgcttgttcttcaaggagggacatcagatgcatctgatcgttcgggttcatgttcatcaggttgcccgcagcacctgccatctggttgttccccatacccatgccaccgcgcccaccaaacagccttccattaccgttctggttaaagcgcccgcccctgtttccgccgcgtgaatgagagtttattcggccgccaccagtctggtcgcgaatacgatgcaatccagaatccccgcgatctaggtttcggttgatctggttgagcattctaccccgacctgcctggccgccttgacggccgttgcgcattgactttggtcccgtaggtctgtgtcccggcgacattagtatgatttcaagtctttttcatcaatgaatacctacattccanggcggaaattccggcgtcactcatgttcgtatcagatgactggggtcctttttcatggccttgcacctgagacgttgtggtctcttggtcgtcaaatgacggaatcgcttgggcgttgtcattcgatgtctgtgcactctggccattgatttgctggttgaaagcgtcgacttgctcaaagagccatcttgaaaaatccactgcttgtgtatcgccttcgcctagcccgaggagatcgtttgagagttcgctggcaatctgttcctgagtcttgccattgacgagcattaaaataacgtactcagtcagcgcggaatcgctactatcagaactccagcccatctccaccagttttggttgaatagcattgctcaaagcctccgctagaggagtgcccaccgcaacggtagccatcgtggttgcgccggcgcaagaaccggggggagcggaatagggaagaggaaaagaaatttgaagtcctttatcttacgtcgtcccttgatcaaatctggatgagaatattcgtcaactgatataaaaaagcctgatcgacaaattagggaggtgtggaagactgtcaaggcttgttgatactcgtcacaaagcccaagacgagttcgagatgatgaaaggtgcccagaacaacttctccagccatttatcacgtgactctatatgagtggcgtacaaacaagccttataagtaaggcatcaatttcagcagtgtcctcattttaatacttgacgtcagcgccaatgaaatcgtagcttatttgaggtccggacaaacaaacctatatgttgatatctacgcaactctacaatatccgctcacaaagcaccgaagattaagagtacagcttggatatagagagagctaggccaggaatcacagcaacaaagacaacaactgaggcacaccaaggtatctttaggtaggcagaaccaactaaaccaaggactgaacatagatgctcacagggaacggcgtgtacagagcgagtttacgcgagcttaccatttttggcttagttgactatcattgaaagcagctgagtcagcatcgcgtcatgcaacctaagttaatttgggcaggaagggcgtgacggagtccttggaagttcttaattcgaattactatgatctttaacccagcgatcccagttaaggtatgctttactctattccgttttcatattgatattgctattattgttagtcttttgaggttcggctatggtcattcctacagccgcaactcgataagccgacgctagcattagctcccctgcgtcacgcgaacaccatccgctggttgagcttcagctttccttagttcccatccaatatcctcatccttctcctcactcttccaaggtcctcgaaaatatcaataaacctcattcttgttgcgcatttgcagtgattattattagtgtactgtggcagtcgaccggataatgagaccagcggcagtctccctggggttgatcggcggcatctccgcccttggaattcccctccccgagactctggaacagctaccactgagtgatgcgcagaagcctcttgtgagctctgaagggctgcaggctcagattcatgtgagcaaccttctcgatagggccaaagtcctgtatagcctggcagaacgcggaatagatgaatacaatcatccgactcgtgtgattggcagcaagggtacgtccgactgccagaactgtacaacctgcaagaactcatattggacgtctaggccattgggggacgttggattatatttactctacaattatggaactaggcgactatttacgacgttacaaaccaatcctttcctgctgtttctggcaatgtttttgaatctcgcctcgtccttggccacgaggtgccagtatcagcccgtctattgggcttaacccctcccaccaagaacagagagccagtatacggctcgctaatccttgtgtcgaacgaaggatgcgacaaggccgactatccttctgagctcgctggggcaattgccttgatccaacgcggtacctgtcctttcggtaccaaatcagaactagctggcaaagcaggcgcagttgccgcggtagtatacaataacgagcatggtgaagttagcggaacgttgggaaccccatcaccttaccacgttgctactttcggcatatctgatactgacgccgcaccctacgtccagcaattgaaggagggaaagaaggtcgattcgattgcttacatcgatgcaacagttgacactatttatacaaccaacattattgcgcagacgaggcgaggggaccctgaaaactgtgtaatgctcggaggtcacagtgacagcgtcgcggaaggacctggtatcaatgacgacggctctggcactctgacccttctggaagttgcgactcaacttagcaaatacgacgtaaacaactgtgtacgcttcgcttggtgggcggctgaggaggagggtctgttgggctccgactattatgtatctgttctcagcgaagaggagaacctgaagattcgtctcttcatggattatgacatgctggcttcgcccaatttcgcctatcaagtctacaatgctacgaatgaggttaaccctgttggatccgaagagctacgtgatctttacaccgagttctacacttctcatgggctcaacttcacatacattccgttcgatgggaggagtgattacgatggtttcattcgaaacggcattccaggcggcggtatcgctactggtgcggaaggtgtgaagaccgacgaggagcaggagatgtttgggggaattgcaggcaactggtatgatccatgctatcatcagttgtgcgatgacctcggaaacgtcaacgcaactgcttgggaggtcaatagcaaggtatattttgaaattctcggtgctggtacaaagctcacagttgactcttctcgcagctggtcgcccacactgttgccacctacgcagtgtcgtttgaaggattcccaaagcggacaactaccaatgttaagtccgtcgacctcgagaagcgcaagtatcacggccctaagctactcatgtaatataagcatgccgactgtcaaacagctggatgctgagataagtgatcatgacctttatttttctcttgaatatactctcatttcctgttcaaataacctgttccaagagagaaataacgctagtcactagttgttgtgctcttgcttcctctgggtacagcacctggtgatagttttagaaccatgcagaggatattgggagtatcctcgtgccaggcaaaccaagccatggtcttaacgaaaattcggctttctttcttgatcccgaccagatcacatacctcagctgtccgtggctgagtaggacccaacttcgtgtggtacagtgcccaccaaatttccaatatgccaatattctctcctagtcataggggtttctgggcccaaattgccacgtcaaacccatacctgggacgtcccgatgtccaatatgcctcacaatcagaatcacccccgagattgcactagcgaccctcgtgttgccagtggccgtttccacgataattgtgaaccgcacactcaacccatctaaccgtgtattttcctgaatggatcatgccgtaaacaaactag

SEQ ID NO: 756 - DNA, 1840 bp, Emericella nidulans
aaccaacttctgcccatcaaagagattgctagggcttgagattagcgggggaagcaagcacggaccaatcggctctatttctggaagccaggaatccccagattcgaccgacagctagcttaacaaggcttagccctagctacttttcccgggctggcgtcttcatgattcgatagggccaaatttgtggcggaaggaattctcatcgtgccaccaaccgctaatgagaaaaggatgaaagctgctacggcaaattttcgcgaatcatgttccttgaacgagttcatggggaagggtacaggatttcacctgccgaggccgatattgagcaagcaatgagcctccggtcctttcgtcctttctcgtttcggtcatcggcccgtgtcgcctgggtacatggctagaggacacaaaaatccactcgttcatgacggccgtcaggtattgtgagatcaggtagccatgtccgagctctggtaccaaaggcccgctgctggatgggacgaagccctgccggtgggaaatgggcgtctcggggcgatggtctatggtaggacagatacagaactgctccagctcaacgaggactcggtgtggtacggcggtccgcagaaccgtcttccagaggatgccctaaagtgcctaccacgtcttagggagttgattcgagaaggcgctcacaaggaggcagaacggttggctcgtcgcgcgttcttcgcttccccaaatagccagcgacactatgaacctcttggaacgctgtttttggagtttggacacccatgtgaagaggtcacgggctaccggcggtccttggacttgaatgagggcattactcacgtgcattatgagcacaacggtgttcagtatcatcggcaggtgatcgctagctacccggataatgtacttgctatgcgggtacaagcatcgcgatgcagtgagttcttggtccgactcagtcgacttagtgagttggagtacgaaacaaatgagtttctggacgatctcgtggtcgatgggcaatcgatcaagatgcatgtcactcctggtggcaaggacagcaaccgggcatgctgcatggtagcaatccgctgtgggagtgacgaccaggaaccgatcaaagtggactgtgtgggaaagaacctcatcatcaacgcgcgggacgctctgattgtcatagtagctcagtcaacataccgctgcgatgacgctgacctcgaccgcgccacggttgccgacctagaagcggtcctggccagctcggtggaagacatatgggctcgacatattacggactatcaatccttgtatggccggttggagctgaacctgggaccagatgcaacagatataccgacggaccagcgtatcttgcatgtgcgaggcccagaacttgtggccatatatcttcgctacagtcgctacttactgatatcgtgcagtcgtcctggcaggaaaggtagttctgatcgcgtgttgcctgcgactttgcagggcatatggaatgcatcgtttcatcctccgtggggatgccgctatacgatcaacataaacctgcagatgaactattggcctgccaatgtgggcaatttattggaatgtgaagagcccctgttcgcactgctcgagcgccttgccgtcactggtactgagactgcacgcaagatgtacggctgtcgtgggtggacagtgcaccataatacggacttgtgggcggacactgcgcctgttgatcgctggatgccagctactttgtggccactcgggggtgcctggctgtgtactcatgtctgggagcggtttctctttaacggcaacaaggcattcctgaaacgcatgt

SEQ ID NO: 757 - DNA, 1520 bp, Emericella nidulans
ggtcaatcggggtgcgctcatccgatctaaataatcctcgctgtgatcgcggactgaagtgcggcaagtctttcacatcctgatgcatcaggaattggtggatatctgccacgattcctcattctggtcaagtcagcacccgttgcaccgcattttgttagtaaaggggctcaagctcacctcagcatcaacccaatcatacgtcttccactgctcctcctgcatctttttcagaaggtccaggttccccggcatcatgacttctctgtcctctgcgcctttgaccttcacgtcgacggctctagcctccggctcagctcgatcttcctcgccttcttttcgacttttcccggcgcgcgctttgggcatctcgtccatcgcgtcgagatggtggagctgcgggtgtaattgaacgacggcgctaactggagagagatgtagtttatctgtaggcgaacagtccatcagttccagcgcaggaattcgaaaggaagacgagaacataccgcccctaaaagcagcaagcatgtaaactggatcaccatcttctggagtcttgattctccctcccaacgtctgcacctttaatagcggtgtctgatctcctgccgccctacgcatggcatcctcacttttcacacctccattttccgccttaacctttcctgcaacaccaggcgcgcctccctcacgcgccccggcaacactaaacccgcccgccataccatatgcacctccctcacgagcactcttacttttcttcagcgcatcaccatatttcagtccctttgccagatcatagtttactcttgtgttaatcggcacgtcaacctcgacaaggcccgtcttcggcttcaggcgcagctcagtcggcttttgcccgttgttgtcatcataggcatgcccggtgggccggtcgagatattgcagaacataccggctaatgtcagaatttgtgaggtagacgtcgtaggaggcgatgataggatcggagtctgaggggtcggtggtgcgcgggttggagggggttcgggattttcgaggagaggtggtcattttggtagaggtgccagagggagatggagagtccagggtactctagtgttattttggggattgaagaagctataaggattttgtttccattatttgaattgcaatgctgcgagcgagcgactatgattatgcaggtcaacgtccgttcttttttcctcttggaatcatccaaaataacggcagaaagatttgagctgcacaccgcttaccgaacatagaccggtcttgcctccgcctggcaaaagctgtgcacaattgcctatgcacaattgctgagtatatacttcttatgcaagctgtatgttgcatttactccagccctttcaagacctggcgcggtactaaagactatgttaagtacgacagcatttgaagggtgacttaaagatgccatgttgatttcacggaaataccaagttaaaaagcctccatacaatgggcctatttctggccagaacactttt

SEQ ID NO: 758 - DNA, 3666 bp, Emericella nidulans
ctatcagtcgtcactcgagtcttgtttctggagccgaacataccagcaattgcatcggacatggcgggatggtacatttacaggatacttagggtcatcatctgcgtcagactgagctgccatacccgcttccacaacgggaccgtgtttctatagtgctccatgtcgatcccggggacgagttcgcccgcagccggggaagcaggacggtcatcctggttggggcccttgggggcagcagttttggagtcggtcatggtggatcgtatgttggatatccaggacctcgagatcaaagccggggaaggcgctggttatatacccgcaatggcagctactatacacccttaccctcgggttatctctgtatctctgccacgatccctccggtatctgggtgggtctccccacgtcccatcgtgtctccaacgtctccaactgtgccatggggttcgcctccgatcccggtggaaggtccaggcgaaacggtccaagccgcctgcgttttagccggagatctgggctgtgagccaagcttcccatcgagctgaggccggccaagcggtgggaaggtccacgcgaatgttagtccctagtagtctcgtagtagacgccatcgctccacaaaatccccgcgacgccgttcattaagagccaatcggattgatccattttatcggctttctatctggcatgatcaggctgtcttataaatattcatcgctctacagtatagctatctgtcgtgaatatagagttacaacttatcagtggagcattacttgacagtattctacagccaaggttgactccctccagtccctctcgcaacccctttccctgtcaattcttccatctttatccctttactcaagccgacaactgcattgcaaccatgacgccccgagccaacaccaaaatcattgtcgtgggaggcggcggcacaatgggctcgtcgacagccctacacctcctgcgcgccggctacacgccgtccaacattacagtgctcgacacgtgccctatcccctccgcacagtctgcaggctacgacctgaacaaaatcatgagcatcaggctgcgcaacaagcctgatttacagctctttcttgaggcgctggacatgtggaaaaatgatcctctcttcaagccgtttttccacaatgttggaatggtgcgtcaccaatcactgacatcatagagagacgagaaacaatgctgatacgtgaagatacagatcgacgtctcttcaacagaggaaggcatcgagggtcttcggaagaaataccagtctcttctcgacgcaggcattgggctcgagaagacgaatttcatgctggaaagtgaagacgagatcctggctaaagcgccgcatttcacgcaggagcagattaaagtactttccacctttcagtatccgctgctcaggtcctcgaagtatgctaactaatacgtatagggctggaaaggcctgttctgtggcgacggcggctggctcgctgcagccaaagccatcaatgccattgggcagttcctcaaggaacagggcgtcaagtttggattcggcgggtaagcctttctatccaagactctgctctcaatactaacaacagagtagcgccggcacgttcaaaaagccactctgggccgatgcccacgagaagacgtgcatcggcgtcgagactgtagacggcacaaagtactacgccgacaaggtcgttctagcagctggtgcctggagttcgacgttggtcgatctggaggagcagtgcgtttcaaaggtatgcatgcctgcgcttccaagcgttgttcaagtctaaagtggtgctgtctctaactgtgatcatgaaaggcctgggtctttgcccacatccaactgacgcccgctgaagcagccgcgtataagaacactcctgttatatacgacggtgactatgggtttttctttgagccgaatgagtacgcacctcccctcttctcattcttccagagaatagcctactaacatataacagaaacggcatcataaaagtctgtgacgaattccctggcttcacgcatttcaaaatgcaccagccgtacggctcgccggcgcccaaacccatctctgtgcctcgttcccatgcgaagcaccccacagatacatacccgcacgcgtcggaggtcacgatcaaaaaggctatcaaccggttcctgccgaggttcaatgacaaggaactgtttaacagggccatgtgctggtgcaccgataccgcggatgcaaatctgcttgtttgtgagcatccacgctggaaggggttttatcttgcaacaggggacagtgggcattcgttcaagttgctgccgaatattggaaagcatgttgtcgagttattggaggagaggctggaaagtgtgtttaaggatgcttggaggtggaggcctggcagtggggatgcattaaaaagtagacgggctgcgcctgcgaaggacctggcggatatgccggggtggaggaatgaggcaaagatgtagatgcatattaaagaaattccatatcataacaataatcctaatctaaaacattaaagcgacttgatatatagcgtctaatcatcttatcagagtaaagagcgtgcaaccataatcgccgattcaaccgaaacacccactgagaccacaactaacagccgtggtactcagtatgcaaaagtgaaacttttatgccttggtagcaagcgcctcctcatcgtccgcaaaggcatatcttgagtaccgccggatggcagcgcccttgacgtagaatacgtacggaatcgcacagcaggccagggccaggaaggcaagcaaagagctggcccattgatcgcccaaccggtcgtacatctgctccgtgaaaagaacagtcgaggcaccccagagcgaacggatgaaggtcttggctgccagggcggaggcggcttggtgctggtatgtatccactgcaggaatgaacattagtaaatgcgacggcagatggttgtgatgaggttgttacataccaagatagttgttagctgagttatacaggaaaataaacccgaatccaacagggaatccgccaatcattggaccgaaccagtgaatattggggtacgaagtccaagcgaagatgaacaggccgatgggaataaaccaacaggagatcatcattgggatgagacgagattccgcgggtggcttgccgccgtattttgagtaaagagataggtagtggttgttcacaaatggggcacaggcggcgctcaacagaacgccgatagcaagcgggatgaacatgagacccgtagtcccggcgctccagcccttgccaccttcataaactataggataggcgacgaagaacatgtacagcagaccgtagaggacggacatgtacagcgagataaagaggacgatgggctcgagaaagagcagttggaaagggcgcaagaggaagacacggagtctctcaccaatcggccgtgcgtccagctcagtctcagtaacatattttggatcgttctctgatttgcggagctttttcgcgcgtctcgctaggatggctggcgctgaggtctcagggacagtaaaggtgataagcacccaggcgacaaaggagagaatcagagttaaccagtatagccaccggcagcccgaggcgtcggc

SEQ ID NO: 759 - DNA, 2512 bp, Emericella nidulans
ccctctttcttggaagtgatagtggtgagaagtctataccatagattgatagctggatctttaatattgatgaccgtgttattagcattaaaggagcaatacagtagtcgtagcccgttaactagtcaaacaggcaaggaatacgagactggttctggaagtcccaccgatcggactgtggagtgacttaagcaaagcctacgtctttagtctggttgccgtttagtctattttccgcttaagggtctcctaccttcagaggtactggtttcgttctcatcactcactacatcccattcatctctttcttggtcgccctttgttgcccctggcattggccgatcggacccttgggcactcgcagcctcagcattctcttaaggtatctatcgctgaatgaggcctgtctctccttgctagctgttttcatgaccggttcaagcaccttcgagttgctccttccggagccacattcttattgaaatccagcctttctctgtcctcgtgaggctctttgaggcccgtcatcgcatcgttggccgatcatgtccgagccgagacagtcgagcgagaataatgactccaggcagcctgcatcgacgccacttcgccgagaacgagcacccacgataacaatcgatacgtcggcggtcgtctcctcggaacctcctccccagatcgaagctccttcgcaatcttcgcagtcacgctctgcgtacaatgctgatcatacagacaccagcgcgctcctgaacagtagcactgtttctccttcagatacccgctcagctcattcagtacgctcgtatgcttcgtcagagggcagggaacacgatagcaggccaacgtcgccatcgcctcgcaccaataccttttctcccggcgcgaaaatgggcgactcaaactacctctccgtaccgggcaccagatctcgcggcaactcactcgagtctgaagactcgagccataccattggagccgaatcacggtcaattggaagccatgggtcgcctgcgagctcggccaaggtgacgatcgaaaactacgaggaagctcttctgccggacccgggtcgcgaggcagaattcgaggttgagaacaatcgttttgccttctcgccaggccagctgaacaaattgctgaatcccaagagccttagcgcgttctacgccctcggcggtcttgctggtctcgccaagggcctgcggaccgatccgcgcagcgggttgagcttggatgagaccgagttggacggctcggtgagtttcgaggatgcaacagccccgagcaacaaccagcctctgccaaagcctgccgctgaagcgccgcccgcagagccgtcccgcgctgataccacaccacataagcaagatgagaatgcctattctgatcgtaagcgcgtatttggagcaaacaaacttcctgagaagaagaccaagagcatcctcgaacttgcctggctcgcatacaatgataaagtgctcatcctgttgacggtggccgccattatttcgcttgcgctaggaatctaccaatcagtcacagcagttcccggtgagccgcgggttcaatgggttgagggtgtcgccatcatcgtcgcaatcttgattgtcgtcgtcgtcggtgcagcaaatgactggcagaaggaacgccaattcgtgaagctaaataagaagaaagaagatcgtcttgtcaaggtgatacgttctgggaagatgatcgagatttctatccacgatatccttgtaggcgacgtgatgcatctagaacctggtgacctggttccggtagatggaatctatatcggaggccacaatgtcaaatgcgatgagtcgtctgcaactggtgaatcagatgtgctgcgcaaaacgcccgcacaggatgtttacggcgctatcgaacgacacgagaaccttgccaaaatggatccgtttatcgtctctggtgccaaagtgtccgaaggcgtgggcacattcttggttacggctgttggtgtgcactcaacttacggcaagacaatgatgtcccttcaagacgagggccaaactacaccgctgcagacaaaactgaatgtactcgcggaatacattgctaaactaggcttggctgccggtctactgctgtttgttgttctgttcatcaaattccttgcccagttgaagagccttggcaacgcggatgagaaaggtcaggctttccttcagattttcattgtggctgttactgtcattgtcgtcgcggttccagagggcttgcccttggctgtcacgcttgcgcttgcgttcgctacgactcgtatgctgaaggacaacaatctggttcgtctgttacgtgcttgtgaaaccatgggaaatgcgacaacaatctgttccgataaaacaggcacactaactgaaaataaaatgactgctgtcgccgcaaccctgggaactggcactagattcggcagggagatcacaggcagcatcacctacaaatagaaacggggatcggccagctgattcgaaaacga

SEQ ID NO: 760 - DNA, 6849 bp, Emericella nidulans
gacattacctttcgccatcagcccaagcgtcgctcttaacctggtaatctcgttggctgagtctgttttcttaagctctccagggacctctcggctgcgcagagatctcccatctcaattaacgcatgcacagtccgtatcccaagatcagacagcctctgtttccagatctcacgttccgctggatcgatgtctgggcgcaggatctccctccgggcttcaagcccaagctcgtacaaacccccgattcccctgcgcggatctccgaacccgatactctgcagcctaatagctaggacgcgaagcggccatggcgcaatatgtcgggcatagctcagctggtgatcacgggcatcggtcgctgctagtttgggctctacatagtagaaggtcgaacttaaatcttctagcgctttcgattcttgagctgcgatgttcgtattaccggagagctctagacatgcgagccgtgtgtaaaacaatgcaaatatcaccttgatatctgttggggatatcagtgacgacgttaggatcgtgccggccaggtacgctgctaagaggaaatggccttccgctaggagcctttcaagagtgctgagtgatgaagccagggtttcatcagatgtaggtgatatgaagtctgaccgcaaagcatgaggtatgtcaacttgagagagggaatgataattgtcgtatcgaagaagaaacgaaaggtctttccccatttccgatggcagttccggggctaatggatccaatgagctgaatgagtcaccagagtacattccatagtccgttgcattctgatgcaaaggggtagagatctcgctcaagctctcaacgttcagggggctataggtcgttagcagccattgctcgttgtacattgtggattacgcctcttactcgtctggctgatctaagggtcctttagttgagctacgcggtcttgatgctgaacagctggttaactccatgagttaggcagcaataaagctgttcggcccttacagcgtgagacattgcggccgtgcttgtggccgtccatggcacccggtgcgaaatttgtgcagtttagcgtgtcttatctcttgctatgcagtatcaagaagagaaagtaaccaaaggcgagtatcaaaagaattaaatacgatcctcgacgcaatgccgagaaatggggttatatttagtcttcaacggcgatccggagacgcgattttgcccgcaggcggtgaggtgatcggcaagaatggcaagctggccccattttgttgttgcatcgcctttctttgaaacatctacaagccacacttgacctctcttttgtccccatctcctcaacttcaccgctggctctaatcttcctgatcaaataacttgtccgctaaactggcgataccgctatacatacacttgaatcaccatgtcggccctagctgaggaattccgttccagaaactttagtatgacactcccatcatcttgctggcagcaaacagacaaagctaacagctcaaccttcaggtatctacggtcaatggtttgtgcccttatccccagcgaaatatctccctcacaaaatatcgcacgccgtcgaacccttgaatgaatgatggctgcctggaatctctaccgatttgcttggcattgtttgcgcttgatcgacgctggccggataagcgcccgctctggcatccgcagggtttccgcgcccgcgatgtcttgatctgttatgctagtgctactgtaaagtagaggctaacgaactgctgttaggacgggtgtgctgtgcatcatcctgtgtctcgccgtcgggatcgccaatattttctctttcaatgcagtgctcattgttttcagtatcctctgcatgtaagccaaagcccactcttgcatgccatgtgttgagactcatccgttcagtatctccggctgcatcctcgtcttcactgaagtgcccttcctcttgagaatctgtcccacctctgcgaagtttgacacctttatccgacgtttcacgaccaattggatgcgtgctgcgatgtaccttgtcatgagcattgttcagtggctcagtctgctgtcgagagcgtccagtctgctcgccgccgccgttttcctactcattgcttctctgttctacgcgctggctggcctcaagagccaggagtttgtcggtagcaagactctgggtggacaaggcattgtgcagatgattgtttaagacgagcattatcgatcccgctggacatcgaatttctcacaagagtccgcttgttggactcttgtcgtttggtttcgaccgatggggaagagaggcaatgaaggagtgctgagttttacctgtgtccagcgcactacgattacgaattgatgctgctgttatcttgccgttattcaagcccgtgtactagtatctcatggtggttggaggaagccaaaacttgtctgagactcgtgtcggctttttggagcacgcacaccggattctcactctgtatggccacattttcatctttttatcccgttgttctacaagactttgtcctcgatcctgtatacttgttattggctggttagtgctattacttgttatatgtataccctaatacaagcatcctggtgatgactatctgtaacctagtttactcgaataggacagcccttgcttcattactccatccctccgtgaccgcatgcttgccacactagcatatgggcgtcacgactatcagcggccaagatctataatatatccgtgctcgtgactcatcgatgaggtatgtcactatagcgatggcattgtatcatgctgaagatcgttaattaaggcactgcatatagggcccaaggtactataatgggccgaactctagatctcttatcatgaggagagcagagacaacgatgttattagcctctataccagattttactaactatggctaactgttgatcttgcttgggtttgatctttcgtatactccgcagaccttgacgtcattgggatttgaaagcttcggtggggtcgatggcgagacgggtacctgtacccttatggggtagatatttcgaggagatgctgtattacttttgctactacttggactcatataccgcgcatgtaactctttgcgatcctaggctttaagaaattcttagctgtatgctctgcgtcaggagagtctgtaggatagcagcctagcgtggtccccctgagattctcgtccttttccctgtaatgcagctcaaactagtcgattgtagcccgagcctgacctgcaaagagtagatagggactcggcaagcggtaccctatgtatataatttctattttttatggtatacccggcgagactacgcacgtaacttggtcccttataatgatattaatctgattgtgacctaaacacaagatggaggaaaaggacagtgataacgggacctgctaatgataaagcctttaaactagagatatcttacgatagctcagtcttcagctcgcagacaaagcaggacaattgcggaggctaggcaatccattagcatacccaatctggggaagagcgacctcccgaacggactcagaagctctagccgagagactatgattttcccaaatcgttagaatatagtaatactgctacaatcagtggactataactggcgtgtaccttagccgaggatttagaagaatactctacgtcatcgcatataaacccctcattgctcagcggctaccccgcattatcacaagatggcttctacattctctgaaataccaaagagctcagggggggccgcagatataactattgcaggggaaattggtaccgcaccttataagcccgacctcaagcaaggaagtgtgaggagacgacgtatgcaagacgacaaatgcaattagaagcttcgagagttagacactggcctgcatgtccacggacgacgagtcaatgctcatcccgtggcctcgtgcagctaggctgcgatatcagaatgcggaattggtttagccttggtgctctgtgccagtatcaaggcagcgacgtttaatactgcgtagcggcttgagagatgctagtggacgactagattgcggtcgtcacgcgtttgacttcggataatcttgaggtaggaaaatacttatcttattaggcatatctccagaaatgaatcagtagataaacaatagtaaaacagcctatgaaatgccgcagcatacaatcaaccagaaaccgacgggttcaagctggctgagtcacagccacctggttctaccctcgtaatgcctgaaataaacgaacccaccagtattcaaaagcggctaggaacgggatccccagacttctaacttttctagggctaaggagaaccgtaacgtgtatgtatgccccactaagccccatcaaagtgtgcaaaaaatcactacttttacctgacttcgtttgcaaaaatcgtcttttgagatcaaacagtgtcttttgagatatggtgtggcagtgccggcagtttgctcatggttcgtaggcaaaacttttggcgtatagagccattatttcgactttacggagatacatggtagtgttctcaaattgcggtttgagccatggaccacttacggccgttgtgttaagttcaatggaccgtagaggagatggctggtattccgccactgtatacctcatcctctgttggtgtgaagaccacgacccatgtctgtggttgcggcgcagcagctgaagaccagctcatacaatcaatattctgggagctcatcttaagataccgagctggcagagcttgagtgtccaatcactgggtctgccaatggtgtgcttgaggagatatagagcacttacttccagcacgtactttgctctggggttcctacgccgttggtatctgctgcctccagtatccgcaagggcatgagcaagatcgacgcattatcgccagtaagctctggccaacagatgggaatcgctgagacaagcaagctctggatgcggtgaaggacgttcagagctccaagtattagtctaccccatactgggttgaaagctgatggtgatccgctgttggtgatccgctgacggtggaaaatgtggctcaacccatgctttgcacaccgcctcgcttgatgtggccgtacaatactaggcgtacgggttacaacagccagtcagagccggcttgataatccagaccccgctaatggcacacgttttttatagtgcagccagcggtcctggctgcagagttttacagatgatgagcaaatattccattattgtcggctatgctcgtatagcgtggccagcaacagggtatggtgggacacagaacatataatgatgtatacgctgtataaggctgccaatgatagtaagggcccgctggccttcgcatgctaccccactcagcaggacctggattgatccaggcctgtgatttaggccatgtgcatgaggcagaattttcaacctgtaagttgaatacagctgcagttgaagatagtgctggttctagttatttgtcggtggttgactacacggtgtcgcccagagtataccatataccagaccaattttgatacgcacatcccataaccgggctgggtctagccccgctcgaacggagatctcaaggggccccttggcgaagaaacccctgtgaactgataagccaaaaacactggcatggaactcgagcaaagccccctggattaataaaggtgattgtttttgtcatgtagattcaagctgatgatctcggcgctcagaacatagttcgtcgtaactatatcagccctctgagtaagagtgggatgccttatcaaggtacggaggtaccttggatggagatgagacgttaatgcatgctaggttcagaaaatgcctcactgaggccgaatcgcgaaagagaaaataggaaaaacaaaatacaaaaaaccaaaattatctggcggccacacttcaccagccacgggctttatatattgatgcaaagagtgctttctgtttctcacgagttggtatgttcctaggatgagccggcagctcctatataataataccagcttcttgctcgagtctcaagtctggcaaggttgatgttctgttgggtttattatactctgcgtagatcgattgtttgcagtataccctgtaaaaaccaggaaactcaaaaattgtgtatggaaccgatgtaattgcaacgaacgaatccgttggctcacagccccggggacggtcaccatacggtttccagaccttgaagaaggccttgaaatggcgtcagagcacgtcacgcgctggcagagtgggccgtggcagaaagaaagtggttaggcggcgttttatggccaccggcgttcgtacacgcggtaattctgggtttgcagcttcaaggtcatacatcatctgctgctcctgctgctattcctgcttctactctctccatttgtttcaattctccagatttcctatactcccattctcagaacactcccttcaaacctcacatcactcttgctgagctcacactgctctaccgatatatctccttgtaccttcgcccctttcggctatatctgtgaacactacctcatcggtgagtacatattcctccagaagcccgcaacacctatctcaaacacgactccaatattggaggattgttgtcaatgttccagctgccgcgcggcgggcctgggcatgctattggcttcttttatcttatcaagagctgagcctcgataatgcctcgtttacacttagtaagcttgtttcccctctccctggttctcccggggaattcactgtcaagtccgcttaaaattatcgg

SEQ ID NO: 761 - DNA, 1304 bp, Emericella nidulans
ccagcgcgtcgagattactctcacggactgtcggcgtgtcaatgattgggttgatggccgattcctccaagtacgcagtagcggtataccaagcatcgaaagtacggctaaggtatttcagaacgtgcggcgggatcttgaaacgggggcttgcgcgaacgacaccttcaagcaaagcctggacgacattcggtcgcttatctacctgtcgctggtggtactcgcgggtaacgagactgaccatccccttctccaggtcactgcgatcttcccgggatagggtcgaccagaaaattgggaacagcgcagtccatagcttgtacgtcgtattaggatcagtatgctggagttgggtaagtggttcaataagatcacgagccttgacttcagcaatttcaccaagaaacctcttgcggtcggcaatgaatgcttcgagctgattatcaaccataacttctgcccgacgcgggtccttctcggcgttaccgaataggaatgatagaggatacatggtgaagtcgtcggggtggagacgagccggggctgtcatatccacacagcccagaatcaagtgtgacgcctgcgcgagccagaaagagtccgagagagtgtcccaattctggcaagttaagacgtaactcaagcgggagctcgccaagcgggtcagacttcgatcaaagatggtcatgaagcgattgcgcatctccacgtccttagctcttgtgccaatcaagaatgcatgctcaagtctgaccgtcaactcagtcctggtgattttcgagtcctcgtaaatccgaatgacaaggtcaagaaacttatggagcatctccggactctgacggtgctcgaagagcagcatcttatggagcacagcggtcttctctttcaatgtaggccatgattcagtggacttgaaaatccaagtctcaaccatatcaaggaccttcgtgcaaaggctttcgttctgcgaacgctcgacaagctgggcaagaacactcaaaaatggccgacgctgttcacccaggtgagacatgcgtgcagaaaccaactcaatcgacttaaagataaaaaatatgccgatttcgtactcctgcggatccggtgcgccctctggcttagctccattctggccattattggtggctgcgccaagaacatgctctttggccagtttctgagagaatactttcatgacttgggggatatgagcaaccatttcggctggtctgctaatgaaaacgtgaccaaagaatattcaaactggagatataatgaagccgcaaagtccagtccgatcgcagaga

SEQ ID NO: 762 - DNA, 1212 bp, Emericella nidulans
cctgataaccccaatggccgtccctcgttgccagctaccggtcctgtcgcgggcccttcgtttggcgctccgcagccacagcctcggcgcacgaggccgaaagcgaaaccaaagacctcaacttcaagcctccctgcccctcctctagatgatgtgcacgctgcatttgtcgagttccgcgcgaaagaggaagacaaggtaagcgcgcttggcttggtggattccagtgaaatctggagcgaatgaatccgatcctgacgatgaacagtgtctctccgtgcagtgtatttattgccaacaggttcgcgcaaagaataccagccgacagcgccaacatctgctagaatgcccgacctacttgagtgtcatgaaagattcgatccctgcgaacaacttgctccacacattccccgaaggcgaagtcgctcggtctttgcagcttcctgtaccgacacttgagttggatttccgtctcagcctcaaggtaaaccccaaggtcggagtcggccctagtatctggggtttgcgcgattgggtcacgtttgttggtggccagtgggcgggacgatggggtaagggagtagtcgtggtaagttgccggctctttttcagagggtcttgctaatagcagtagccgggtggacaagactcccaggtgactgttagggattctacaagccttcgagcgaacttccttctgcaaactgccgatgatcctcctgcattcattgtcgtcaagaccaatgggtggttgacaggcgcgaaagatgtgctggataagctcaatgaccctcaacttgcggatgggattaatgccaactcatataaataccgcgttaacctctccatggaaactggagatgaccgttataccttccttaacaacttgatgtgggttgccagtggctgccgcagaggccaagaaagtcagtcaccattcaattattcccgacgggcgaatctgaatatgctaaccagctcgttacagttattcttgatgcattccgcgtcaactaactactgctgccaccgccacgattgtatctgtttccgacctctctgattttctttccgtttcgagcgagcactggattgattgtttatggggcaaaaccaagtcttcggcctgttttatatcttgactaacctacagtcatctgttatttgctttagtgatcaaggtataaaattgtttgagtactatgacagaat

SEQ ID NO: 763 - DNA, 1840 bp, Emericella nidulans
tttttgtgcatatccaagaccggcgcgaggagaaatccggtcgtttttggccgtttggcgagcgctaatgcagccgatgggcgaacactgacgtaactatcagccagggaattgatcgaatcttgtgctcctgtatatgagtcaatccagggaatcctatcatggtcttgaagcgcagagtccacggacatctcccgcgtccgcggcgtaagattgtcgtctgccacactctccaaaagtaaatgctcctggaccgctagcgaagcactagttgtattttcagcagttggtagacaaggtgagacagatttcacttctgttgaaccattaatatggctgcttgatctcttgactcgggaccaggccccaaaatgaccacctggacctggacgggaagatgacggaagcttgaattgcctttccgacaactcagagctggagtttgaatagtgctttcccactgcttgtgagcatacggaagcctcttcttcaaaggcctggcgctgtgtcctcccgccccgcgggcgcagtttatgctctttcaggaactcgttgatcatcagtccgataatatccagtatacgttgaagtgatttgtccgactctggtagttcctcatcactgcctatagttccaaccgaacctatttgaatatagaacatgggccatttgttcacagccggagaccggggtcgctcctcaatcccagatccatggcttgagggcacattcccggtcgtcccaaaatctgaatgggaaaatagccggtttgcctcgctgtacagtatgttcgcctgactttgcgaaaacacaggctcagctcccaaggagatgaactggaccttcttggaagggctcggaacaagtgacagtgcagcgtgaatcgtcagttggggaacggctgcagaaacataatgccatttctgcattcttgcagcgtcgaccaaaccagcctgggaaaggattgagctgagtcgcgttagatccaaatcgccagcaagaggatcatggcgagggcggatagtgaactttcgttccttatccgtctccgagacggacagcttctgaagcctatcattagagatcatgagggcgacgagaagttgcttcagatcatcccactggtggtcaagctgatctggcttttgcaatgccagggcgcggctcttcacgcgaaccggcatatttccaaaaaggtcgttggcagtgacccgcgttccatggtcgctaaacttcaacctatgatgcctcggggctggaaagagtcgcgcaatcgggtgtgcgtggtggaacatgacagtatttgtgcttgcatggcggtaatggtgtgaagtgatggtcaacaatgagagcgccgatagagaagccaggaagcagccttttctgccgtaggaactcgacgtaccgaacctagatgtatctaacgccgtgagcagcagctaaagtcaatcaccggccaatggagacgtacgatgagccttccctagcccgccaccgggttcaaactccgctggtgcgattccctccccatcgtcttcaaccacgcatccaccccgtcggtagtcaacagttacaaagatgcactgtgcgtttgcgtccagcgcatttttgacaagctccaagacgacgccattcaaatgcgtgatcaacgttgaggacctgatcttggcggccacatcttgagggagtggctgaattgggtggtcgtttatcatgatgtccaaaacatatttacaatggctgggcgccacgtagcacaggtttggtttcaagtcaactgggcaaagcaagggtactgagctaagctaagatcgccgcacagaaggtccagaaggtccag

SEQ ID NO: 764 - DNA, 2905 bp, Emericella nidulans
aatatatgaaagatgtatatagtatggaagaagaagttaatggatagaaagaagaaatgtaagaaggttgagaatgggaaaaatgagaaaaaagtgaaaaagaaaaggacagtatagacggataaaagaaagaaggagggaaggaatagaaaaggaaaagaagcgattgtagagagatggagaagaaagatgaaagaaaacttgagaaaaagtaggaaagggcaaaatggaggagaaaggggaggggggtaagtcataataaccatgatattggaagcgggcaccttagtaaaatggatagaggcagagggcggaagaatcaagtaaatcttatgggcgcagatcaaaagcagatcatggtcagcatcacaccgtgcacgagctctgggaatctctagcctcggtcggtctggccgtatggttgctggagatccaggtatacatagcatgcgtggtaccagccgtgatggctttgggctgtattctggagaccacccctctctcatcgcgttgtgcagcggcgcagagggagtgggtaggccatgttcaggaacggctcactgtcactgcggcaatgctgggtgatgtgaaggcagtaaagatgcttaggctcgagcgggtcttgttccgaattgtgtctgattatcgccagtctgagtttagcatctctagggagttctgcatgatgatgacgggtgttgttatgctgtgtatgtggtgatgaatgcagaccactgcattggctgtactgactttatcttgttagcagccataccccaggatctcacgccgtacatggtgtttctaatatacatgaccattgcactgaccaagggcaatatgaagcttctcacaatgaaggcggttaacatgttgtcgtttatctcgatcttgacttcgccgctgatgggattcatctagttggtgccctggatcagtcagttaattggctgctttgaccggattcaagaatactgctcttataagagaacaagccaggcttattcactacacccttctgatcacattgaaccgactaaactctccctcactgccaagtcatcagccgaccatgatgctctggtgacgttccacaatgcttcgatatcatggcaagcagccggcgaccctgtactcgacaatttaaccctctatgttttcatcggcaagatcaccatggtcattggccccattggaagtgggaagtcgaccctgcttaaatatgggccagactcatatcagggctggcttaaaccactgccatccagacagagcagcctactacccgcagacactgtggataatgaatgcatccatctaggacaacatcatcggcgtgacgtaagcagatgaaaaagggtacaacgcgactattgccggctgcactcttggtaagatctagaggtgcttaacgggcacaatcagtacatggctgaaagtgacggattgctcttagcggaggtcaaaatcagcgagtggtacgtatatggaaaatggagttctcagaatggtgttacggttcttgctccatcgcgcttggacaagttgttcacgatcgcttcatgtcgtcctcgacgaccctttcagtggccttgatttccggcagtattcgagtgattagcgagcgcttgctcggtgcgaatgggcagttccggagaaccaatgctatcgtgattctgtctacttacaattgtcagtactgcgattattttctttttcctttttctttattttggctattcgactgacaccagtctaggtcacctgcatccgtttgcggataagaccattctgctcgaaaacggccgcaaaggtatctagtgcacagactcagagtttatatccagatacccacactatgccccggccagctgggttgacaataagggcttatctgataataacgggcttcaggacactcatactggtaggagtaaagcaaaggacgacaccaccagaagtgccagggaaaacgccgatgtaaaacaggatctgtcaaggcgcgacggaagctggggaatttacagctactatttccgcaagattggggtcctccaggcctttttgtcgcttgctttcttgcttacgggatacttacccagttttctgatatgttctaatgatttgtcagtagtcgactgggctaatgttttgcagtgatctgtttacaatggtgggctgatgccaacaagcacgttgccaacccgcacctcggaaaatatctcgacatctacactttagtttttatagttcccgtgctcttcatggcggctaggatatggtaggtctgttactggccaaacctgttctagcgccaagaatgcaggctacttcttgtcaacatcgtgggcaacagctctgtttgtctccattcagacctgctggaactgctctaaagtatataccatcctgcctcacgcgcacagtgaatgcaagctaaccctcgacagcgcttactttgcgtacttccagctgacagacacgaggctccattcggaagagattcagtcaacacatggagctcatcgcgtttcacactaccagtcttttccttgaactttattgaaaggtcatttcttcttccctactcagcgacctggtgaccacatgctaacatgtcccagccctgagcatctgcgtcatgaggttactcatactctgtattatcagcgaatacatcactatcacactccccttcacgctctggtattctgggccctgcagcgaagctatctgtgcacctcgcaccaagtgcagcacctcggcattgaagcaaaagctttgctgtactcttaattccaggaggcagcatataggctgacagtcctgcagattctgcagggcagccttctttccataggcaatgcattgctagacttgacgccactacttgcctggtctatgc

SEQ ID NO: 765 - DNA, 1826 bp, Emericella nidulans
gggttaaacgtgggctgtataagtagtcgaggatgggccaggccagaaaatgcagcgtagtccaggtcctgtccctgagaaagagtggtccccgtcgacccctcctcctcaggcagctggacctggacaaacgtggggagcagcactactaagtggcacagctcgaggacctcagacagccgatacgcgcaagaatgtcaacgggaaaagagcggctagtagtgcagcggttgtgccactcgagagcattgtagagctccgccggtggggctgatacaacttttttcgcttccgagcggcgagcggcgagcccgtgcctgaggctagtgcgtggctgatgcttctctcctacggagcatccgtacaccattctacactctgctcatcgccatctctctacgagtgaagatgaatatctgcgagtttggattctgctcgatctcctcgtcgagttgaataccacctaggtgccttctcctgaaggtcactgatgatcatcccactgatttccacactggtcgcggccatactgaaaaactcgagcacgcaggatctcgtatacgccgtaatcttcatcctgttccggcctcgctacaaacaacaaccttcccgatcagagcttcatttctccttctgtccgtcttcaccgactcttcattagctcagtgcttgcaatcactatgtttaataagggctagtgcactagccacagctacttactgctttgattgtcgatgctatataaatcagccataccagcatctgcagtgtagttttcgtgatcgcacaagattgaaactcggctggtcgaacgccttcctgcagtcattcgatgaaagatactccgtgactacattccggatcctagctatccgtatatcggcggttatgatggcatcgtccggtgcatactaaaagccgcgggtacgtctcgaatatcggcttctcaggatatccagtcacaacgcatgacgccactccgacggaaacgggtcaaatccactggttgactgcagctgtgattgtgaatactgtgtagttgtcttctctgaccgaaccgtcatgtcagcatatgtccaacgcacggcacggcttgcgaatacactgagcaatcggaatttactcggcagacatggtcgaagcatttcgcaaggcatttcctggacaagagcacgctaagccaattggactgagccgtcgcgcgctgcaatacgtagttagacgcatcggctctccgctctataatgatgcgtgcatgtccgtccggcgagtagaaactcgattaaatcaggtagagccagtagagtcagtaatgtcaggtagcgtcaggtagacgcccgacgccgaccgtgacagtggtcaatgccgagaagctctcactgccccattgagccatatcttgtacggcttcgcgtagtctcgctttggagacacgggatcgagggtgcccactgtgttcttattgaggatgaggtcggtagtggcagcctgacaaggataagctgcgacatcggctgttccctcccgtttccgggacggcgggagacagctggctgccggtgcaggatctcgattctagaagcctttgctgttggatcgccctggtcccagtagtcccccagtctcaatgctgagactttatcaatcttatcttgtgggtcgctttcaaccttgatctcgtacaccccaaaattggcggtttccgacgaaaagcctgcgccaacttgactcattgtctcttgaaaatggctcacagccatcttattttctctgttatattacgagttacctcacgcgctgtggtcttaagatcaaccaacctcgct

SEQ ID NO: 766 - DNA, 2014 bp, Emericella nidulans
  unsure (1)..(2014): unsure at all n locations
gaaggttgtttgatattgaattgggagtggcttggcaggatagagcaagagatatcgatgcggaagggaaagaagcgagaataggtataccacagtgtggttggtatattaggaagggtgcgggcagagttgaatgcggaatgtagatcctgaattttctctaggtggaggtgccttgcttgattagaagaagcgcgcatctacgtactaggtacgtgtcggcagggatgaagcgaagtccctgacagcgacggttgtgtagctttatcccttacatttctataatgttcaggcttgggtttctgacagcatcttgcgggcggcataccgcataaggtcctccagccgtctaggtcagatttctgtttatttactttaaaccattaactaagggaattggacataggatttatgaaagtcaggctgctatgagttctatccaaaaggcacagtaataatgctaagtgaagcatgttacacgcatatcataggcaagggactaagctagttttaccctcgtaggcgccgtaagctccaagttggtttcaatgacctgcttctggttgtgccgcccagccccggcagtcgttgtctgaccaagcaaaataacactctcaatcttaacagggacatcgtggataaattgccccttgatgtagagaacaccactgcggtactcgaactcaatgttggcagtgtcagtctgctcgagcgagtctccatcgtctaaatacaggcttccagaagctgtcccatcgatgccagaagcaatgataagctggaagccctttttgcggagctcggtggttgtcatcgcaccagaggagcggatggggacgatattgccgccacggatgtgaatggggatatgggtgatgttgatattggacagaatgatattcgcgccctgaccctggattacggcgccggtgtaccaatcgtagaagatatccttgggaaaatatgcattgacggatgtcgagtttttctcggtgacgggggagataagaatggcgtcgccgtagaaaaactgcaggtcgattgcgaaggtatttttgtcctctgggtacaggtagaataagggctgcaggaagggctcaccggttttgctctggcggtggaaggcagtgtaaacgtagtcgaggagctggtaccggatgttgatggccttggtcgcggattcagttaccgattcccagtagtagtactcctgggggatgttgccaatctcgttatggttacggtagaaggtgtagaaggctccaagtgatgcccagcgcgcacagagctcttctgtggtgtttgaaccgaagccgcagacatcagctcctaccatgggaatctggaacatcgaggcgaaggccaggacctgggcgatcgaggcgcggtacaacttccaagtgctgagattgtcaccgagcctatatagcgttagtgctaggtcgagtccatagtaaagatgtctcgaaccaatgcccaacatgtgctccggcacctgcgtacgtgctgcgagtgatgattaagggtctgacgtcgggacggcgttgctgcattgctatgcgagaggccgagctcatcactaaacaacaagtcagacaaactaacaattgcatagtaagctgacttactggttccatagagattatgggtgtcgtattcaacgtaacctcctgcgtggccaatgttggtttgaatagtgttctggctaagagctccagccgcattcttaattgagtaaggggggctgaggaggttgcggccaggcagcccaagcttatcaccatgtgctcttttcgagagtctcttcgaagagcctggctggaaagtcatccggaatccanngcacngacgagggttactgggccggacagctggtggtgcgggtggaagatcgtctcaatagagtatctttccngggtcgtgcanggaaagtgcacatatttgcgggctcgtcatgtcatccacagccgtcatgtcgatccggttcaggacgaagaactattgactcccgtcc

SEQ ID NO: 767 - DNA, 3968 bp, Emericella nidulans
atagtaagtaagtcatgaaagctcactaagagaagaatggcggtcttgaatgataggaaacaataaggtaacataagagacggaggttgattgaagtatactttaagcagttagaggagaatataggcagatgtagtagacaagttttttagtataagaaagaggttaatagagatcaataatgcaggagaatgaaggagtatgaagattggttaaggagaatataagtgttatagacaggatagatggaagtagagggtaatgtagataccgggcgactatggcgatatataatataatgagtgtgagcaatatgtaggtgtgacatggcaggttctcagtgatagagtagtagttagtaaaaaattgaacggtaatacaagaaggacgagtaatatataaaacagaacagagttgatcacgaagggtaatatgtgggtagtcaaagactagtcagttatgaattgacagtgaagctactaagagtcatttcgacgtgtataaggacaataaaccgatttggcaatgatgtatgtaagaccttgctagttagttccgagtaaaatacggttatgctcgtgtaaggatgatcttacgatatgatgatgtgcagacactcccctctacggcctccgtgtcaatcccgatgggagtcaaggcgagagcatgatcgtacgggcgggaatttttgataacctgagcctgttcaatcaggtgaagcccaaggcggagctgtatgttgatggacgggtgagctggctgtgtccgattgagggggcggagcagtttgttgggatggtgcctttgccttagtaagctgtttgttcctcttacggcgtagatcagggttgaggttgagactgaggttgagaatgagattgggattgagattgggattgctaggctgaataaaggccaataaagtaatcgatacaaaaatcattctccgaagtaacaggtgatacgagtatgtctgctgcgttgcaatatacattttggattggagagaaaggcgtatatttgtttagattcgggactgactcaacaccaaccgttcaagcaagccacttcgaaaagctatagactttactcaagctaatttctctgtagtttaaggaggtttcccggacttatacggcagccacacggccacaggtaccagaggtcctccgcgatttcttttttgtgtttttgtttctggtcttgtccatcatactaggcatttcgccaggaccagcgatcccggccacagagcccatgcctttgaaagagaacaattcgttgttttgcgtttggctagaagaataaaagtgagtagcactatccagcctggtatgtttgagccgaacttctcgcaccaaaggtgagactgctctctggcggttgtcggcatcggtagtatcttaggagtttagggcttaccgtaatggtcgaatatttttgttaaagtgatagaccacgattatgagccatgaatgatgctcttcagactcaacatcgaatatgaagggttcagcaaccgttgtgagttgtggcagcagctgtactaagctctcaatggagaccatggggatagactgggacgttgcgctcctagagcagcaggcttctcacgtacagccttctaattcttccattccaacagtgcagtgactccctcgacaatttgatggctccgggctccggctcctctattttctgtatggagaaactgttccgaagggctctcgcttggtttttggttctcagctttggagtctcaagtcaaggtagcaaccgttccattgtagtatttaaattcagtgggctttgtgagtgcgtgagggttggacttttgcgagcttcgcggaacgcatagtctcctaaggaaaagcagatagacaaaacgaccggtaaggatccaacgaaaggaatagtatcagagacatgggctattcgcgcttgatgcacctttctagtcccacattcgagagattgatagtaactccctgcgtctccgaatggtaggatctctatcggcgatataaatatatcttcatcaagtcactctcaaatcgcagattccgaagttgatactctcagtatacaggctgggcccacaatcatactgaacagagaaacacgcaatacgtatatttctgaggcaatgcgccatcatgtatcccattttctcacgatgctgtcctgaccgttctgttcaggcactcatggaatttaggtgtctttgtatgtgtggcgggtaaggcgaggacacttgtatagatgactacaaactgccattaggattaaaaatcaatctagcacgttctcagtgctgagcgcttgtactcctcctgatccctgataaatgatctaccagaaggtgagactaccggccttaactgcacagctgtcttgcggtatatcgaagcttctagttcggtaacggattgaactcactgacactggctgtcaatgctagaagagattcattccacgtgttattacaagcgcgtatacagaccggtcagaaatctgctgcgtggaggtggaggaaatgacagccctgtcttagttggtcatatggtctcgaatagggctgctttctggtgccctacctcgacgtcgctagcaccggcctcttctgcccaaactcatcaacaagatattgagatgtactctactacgctaatagcacctgataccttctgctgattttattgaaaaagagacgtattaacggccatagatttgatccatgatattccgcgaacggttcatagcaacaaattacccatatttatcgtacccgctctgcaaatgctatctcttcactcccagaattcgaaatccttgtggtttatataccgatatcatgtaccggtataaaaagactaagttgggcggtgcaatcgtcgactagatgataatgattaggatcccccttggaggcttggtaggctcagatgagttggaaatatgctatttttgtttcccgttcaaactagttctagataaaaatccttagagaggtggatttcgaaatggatcgtttggtctgtattcatggtgtctaaaaatcagggtatacacagtcagaccgcaactctgaaagggatatggaatgctcaatgagcacagtaaattgaatatccagatccaccattgagagcctcagataatgtagtcaggcatgctgcaatagggcaattttctacaattctgctccagggctacagtaaggactgtccctcggcagctgccagttcctgcacaaaggacaacctctattggcggacaggctagctgccaagagacctgctccaactttagattgcccgtgctccgttcacagagtcttacaatcagttgaaggttgcattcggcctcctccgcttcgctgtgttggccaatcgccatccccacgtgtatctcgtatctgggccaagaccttgccaagccaagttcacggtggctggcatgtcgccctccgtcctgtcatcaatacaaaattaaacacatttatatataaatatataaatgtactacatggcacatcctccccaactaggccgggctgcaggtcctctcgctaaaaatgaagtcctcgctgtcgctggccgcccttgcggcagctggcaccgtccttgccgacgactacctctacagcaaacgtctggccaagcgctttgtcgacgatgagggccactacaacgtgtgtaagtaatgccatgtttgctaatgttgcctctttgaaggcactgtgatggcgctatggccgtgtctttcccgtagtacgccgagctgaccagcatagcgtttttccacgtcaacgatgtccacgcgcacctggaccagttcgcctcctcgggcacaagctgcgacgatccagaaaaaggctgctacggtggctatgcgcgcatcaagaccaaggtcaccgagctgcgcgacagtaccccgataacctgtggctgaacgcgggcgacgag

SEQ ID NO: 768 - DNA, 1015 bp, Emericella nidulans
agttgaatgtatcgtgctgctgttcccagttaggaaaggacccagtgccgcgttaaccgtggtgtaagatcggaaggctttgcgcgatttgattggccacaaccggaagacggcggcagagcagcagcaacggtggtgcaggctgcagagctcagctggttccaaggactgggggcgagttgattttcctgtgcggaaggggggggacttcaaaggctcagatggtgtgattcaatccttaaggtacgaatcgaaaatacctgtccgtgaactgtggacgactggtagaatcctgcgagtcacgtttcacgaaggtgctgcaccctttccttcccctttttcttatttaatagaaaaaccagaacaaaaagggctcttcgtgatgcacaagctggaagtactgtccgtccaagtagatagacgtatgataattcgataattctggtcccgttcctctgggactgtctctttctccttcagttcttcgcttccaaaaatacccttaaatttggcctctcactctcagccttgactcctttttctctgctcgtacgactcactcgtagccactcttatttttgatgtttccttagaaagtggaaagaaatggtcccggtcacaagaaccgctccgagctgcagttaaacaacataattttgtgctttacggggattgttgatgagttaggggagggataggggagggggagtggtgacgatgggatggctggaagagactgggacggaggaaccttgccagcagaacaggacaaaaaagcacgtgatggtttgtcctgtttgtcgcctctcagaaaatggcttagcctcccaattatgtcagcagctttttcccgcggccctcagagtgaggccaggtggagtgtagatgtactccgtagattagtcctatctagatctttcgattccctcggctggagtcctcatttactatctgatctcttgcgcttcaagctcgtggctgcgatcacgttgcggtgttttactctcccttggtt

SEQ ID NO: 769 - DNA, 2737 bp, Emericella nidulans
aatgggcagtggacgcgcgagacggatccctgtatgctgctcgaagggggagaagatgatgagtatgagccattgaacggttgtacgatggatggcgtgggctaaatgagagttccctatagtcaggcgcagattgaagcgtcctctgcgatgcactatgactcgtattgggaccttgagtatcgacggccacccgccattagttcttcattctgaaaagagagtaatcccaatgtgggactacttagctgtttcctaaaagatacgatgtatcttactggccgataatactttctcttttgtctgccattaatatggtcttcgcacccgcctctcgaaaaggacctcgaccacgaagatcgactgccatccgcggaggccgccaggatttttcaactgaatagagccgtatgcggcgctgtggaaaaatttgtagatcaagctgatgctcctgaaccgtgtgaagattagaccttggcgcaacccgcaagttgggatctgaccttgaacccgccacgggttttgttattgtcgagggtgagtgagaaacttgaggtcctgtctcgtgtagacagataagaaaggctctctcacttcttttctattatatcttcagattcaatcggtgtcttgccttcactgcttctttttctctcccatttatacaccgcgcacgtgccttttaacatggtaactcgtcactgttattgatttggaggtactttcgttacctctgacaggttcgattcattttctttctcagcttcacctgaatacacgcgttccaattgctattgcaagcatttcagagtgcacgacgttgcacaagtgacgattcattgggtctatccatatgtacataattgcggcaggccaatatcagatccaagtacagaactggcggagcgctacgataacagggccaccagaggtatcctgttagactagccttgctccttaagccagttgcccgctgtttctcctgaaagtggcgcgagtatatgctgctgtacaactaccacctgcgtcgcgtgccaatttcttgcctcatcttactactaaagaccaggtatatgctgatattagcttgtaactatcctgttatatattaatatgaattcagattgacatcaacaatgtgtcggaaatatcatcttgagtaacctactaccgcctcgtaggccaagtcaagcctgcatgattctgcgcaattcacttaatagttcagtgttgtgtcaaccttccccccaaacatgccatcattgtttcgcgagacccggtacgttaaagcgttgggagcgctaacctagggacgtctacatcaagacccatacccccaatgtgaatagtatatgacccgggcgcccaatactggattgcgatggtcgtgtgtacctcttgaacgattgagtctgggaaggaggtatagatctcgtttccccactgcccatcccacgtattgattcggattgtccgatcatagcggttgaatgcgacgtgcagagaaatatggccatgctcatcccagaggctcaaactgttgtggtcccgtgggtcgtcgcggaatccagaccagacagccccaagcttgatgttgagcgtatcacccgatgccataaaacggttgtactcagccacgccctggctgtagtaagcggctgcctggacaccagattgctctaccagtgtcttggtgcgcgcgttatatctggagcgcaggttagttatttcaagaatcatgccttcaccttatattcaggaaagattctctcatacgtcttttacttacctggcgctgtgactatgagggctctccatagcggagagggatacatggcggcgtacgagagcctcatcatgaggatattcgggcaattcgtggttggaggccatggttgaatgtctggagattgcgactgcttgatcaatgataaatctgcggttgatcaatgatgaactctaggtaatagatgggcttcttatatgtgttttcaggctaactcactcagctgtaacctgtttgtgtttgtggctggctgggtctgacgtggctagggcgaaactacagtcaaacacaaacataaacagagcaatgacagtgcaagtctaccttggcgttagcgcaagagattcatcaatacgaaaaatcctaaaggttgggtggaccaacatgtttgagtatagtttgcttacttctttgatgtagccgggagaagtacacgaataaagcctgaatggaaccagaaaacaaagaaatatccattctcaggaatcactattcacttggacattagtaattgctctgttgcttctttttggtagggggaaattattcagagactagtcgcctatccaaatcttcagttaatccggacgctcagctgccactgccaaagctaattacgaggggcgggatagttagcttggtactgtggcagctgaaatatccctgattattggagagtttgcatgacagctgttatagcacattactataagtacatcctgcacattcagcaagccacactgaaagtcctgttctggcttccactgtaacgggcgtaggcagtattattttcaactggctgtcctgtataaacgagtatcacaagcttagagaaagaaaaagaaacaagagataaaagcgcagatatctccgctcctccctttatcacccttttctgatcatacgtcaggacttctgagttcctggacctgtatacgccggacttcatgc

SEQ ID NO: 770 - DNA, 3212 bp, Emericella nidulans
tgactcttcgatcatatcctggagcacgcgaaattctccgaaggggatgggtcaccgaaaagttcacaccctttgacccggtttctaaacgtatcgtgtcagtggtcagctgtgatggaatcaggtacacttgtacaaaaggcgcaccaaaggcagttctccaaatctccgaatgctccaaagaaacagctgatctatacaaagcaaaggcacaagagttcgctcatcgagggttccgatctttgggcgttgctgttcagcgtgaaggggaaccttggacgctcttaggcatgcttcccatgtttgatccgccgcgagaagatacagcgcacacgatccgcgagtcacagaacctgggaatcagcgtgaagatgctcacaggcgatgccttggcaattgctaaagagacgtgcaaaatgctcgccttgggtacgaaggtatacaactcggataagttgatccacggcggtctcagtggagccatggctggtgatttggttgagaaagcggatggctttgcagaggtgttcccagagcacaaatatcaggtggtccagatgcttcaagaacgcggccatcttactgcaatgactggcgatggagtcaacgacgcaccgtccttaaagaaggcagattgcggtattgctgttgaaggagcatctgaggcggcccaatcagcagcggacatcgtctttttagagcctggcttgtcaacgatcattgactctattaagatggcacggcagattttccagcggatgaaggcatatatccagtaccgcattgctctttgcctgcatttggaaatctacctggtgacatcaatgatcatcatcaatgaaagtattcgtgtcgaactcgttgtcttcctagccctcttcgccgatctggcaactgttgcagtggcctatgataacgcctcgttcgaactacggccagtggaatggcaacttccgaagatatggttcatctccgttcttctcggcgttctgctcgccctagggacatgggttatccgcggcacaatgttccttccatccggcggtattgttcaaaactggggctccatccaagagattctgttcctcgaggttgcgctcacagagaattggctcatctttgtcacccgcggcatggacacatggccatccatccatttagtcactgctatcctcggcgttgatgtcctagcaacaatattctgcttgtttggatggtttagcaatgaaaccatgcccacgaacccaaaaacctctttcgtggagaccaggaacggttggacagatatcgttaccgtggtccgagtctggggctactcgctgggtgttgagatcgtgatcgcactggtatacttcatgctgaaccgattcaagtggctggatgatctaggccgatcgaagcgtgacaaaggagacctgaagattgaaaatcttttgggtcatctagctcggttgacggttgagtacgagcagcctggaaagccgaagggacggttcttcttggctacgagtaaggaggaagaagaagttgaatagggaattgatccgtttgctatattcctttgttggtttggtgactgggtggtgatgggtgagcgatctggctcagtcatctgcgcatgatatgttagttaccataatgcgtcttgatagttaatggattagtcaacgtaatacatccgagaagctgtgagtattacagatattaaattgatattatctcattttaagcattaagttcggcgacacgaagtcatggccatcgccgtaaaaaccagctactcatgtataaacaggtagcagaggtaaattaagcattaaccttctcccacagtgtctccaattcattacccatcgccctctcagcttccttgtggagtgcccttgttgacagggaacgctttgatatggcagcagccatctcctctcgagccagttcaactgcatcaatgtatgttagccctccatcttcagtaaacacagataggggaaaataaataccatgtccaaagacagctgcacgcttcccactaaacatagcatgcggcacattcgtgctcccatcggaattcgcatcgccgacagcaaaaacacccgcacgactagtcctcatgccggggttgatactcgtatcgatttttccatccttcatcaccagcccaagatcatagggaagactcgaccgctgcgccgtctcaaagttcgtcaggaatgcgttccgcacaacgggctcgccctctgtgaaatgcacacggaagatatcgaattgctggccaacgtcattccggttctcaccaccgtcttgcatgcgctcgaaggaggtgattgttctgttatcgatcgagacattgtacgcggccatctgtgcctgccagtcggggtagtcttcctccagagccgagacatactcatccgtgtacgagccattcacaaacgcaataatatcgctattcagtgtcgagatctcaagtacgctggacacgatatgcgggagagttccgaggatcccaaaaggctggtcgcggtgctcgtatccgtcacaccagggacaccagaagatgccctttccgaaaccctcgatcagaccgggagtcgagggcaggatatcgacgacgcccgtagcgagcacgactttgcgagccgtgtactcggcgcctgtgctgtccgttgcgcggaagaaagtcgtcaggttcgtgttgtttacagggacgattgaggtgatttcgttgtcgatgaaggaggctgtgctgtaattggaaatctgcgagcgggcagcggcacgaaagactgcgggtggtgtccctgcatggaagttagtaccttcgtctctatctcatgagtcgtcagtaaatgggacggggcataccgtcgtttccaatgacatcgtgcatctcccgcgtgggatcattgcggtagtgacccgagtcaaagacgactgccttccgtcgaacacgagcgaggccgctcagcacgctgagacctgccggaccaccgccgacaacaatgacatcgtagtctgtctctgggattacggcggagagagtcgtgcccgctagggatagggcgagagggaggaggcgtgagaggagcattttgaactgaaccactacaggtaccctgcactatagcgcgattggactggctgaaggctggctgctcgctgcttcattacagataacgaaggagggggatatttatgtattcggaaggtat

SEQ ID NO: 771 - DNA, 4617 bp, Emericella nidulans
taaaaaacctttttttttggttgtgtgtaaaaacaatttttaaaaaagcccttggggggttaaaaaagcacacaagtcccccaatgagaaaaaaatgcgagcttcatatttccttatttctgacaagaggccaggttcaaaaacaaagaacccttttttggagggggggcctttccatatgatacccagcaatttacccacattcaaacattcggtaaatttggtgtcaataaggaataaagtccccttatatccgccgagtttcaaatggggccagaaagttccgtggcgaagggccaaaaagccatcttcaacccctaaggcattgcccttcaagtatggtcacggaaacaataatcaccctcacacctacaaggaggaccggcatcaggtcggtcccggaatattcaaatccgcggtcagcaggtaaattctgcccataccccgcaaggttcattaccggtacaggacaattcttctcgaagtctgttgccagttcaatccttatgttcgtaatatttgccctaattgataagggaaacatgggcgccggtccttttatgcctcttggcatgttcttcactatttttggaattggtgcttgctttggttgggagacagggtacgctataaatcttgctcgagattttgggccccggttggtctcgtacatgcttggatacggaactgaggtgtggaaggcaggaaactattatttttgggtaagccttcagactaatacttcaagtttcagcgttctaacaatccgtctctccaaaggtaccagttgtggcccccttcttcgggtgtacgttcggcggctggctgtacgacatgtttctctacgtcggatcagatagccctgtgaatatgccgtacttagggctccgtcgcttggtcagaccggacgctgagaaacaccatgaagcccatagccgtgcctgaacaaagtaaatgttgagctacctttattagagaagatatcatttacgacagtcagaaaccgtcatccctacacgtacaagagtcatatgcggtatgcatactttttcagcattggttcatgatattttacatcctatcatcaagcaggtctggacattatcgtcttttttgagcatgtatttcagattgcgagcggatctacatgtggtgatgttatgaaggcgagttaaagaaagtgtggattatttctcgtttgtatttaggtcatcgcattagtcttttgttcgtcgcttcttcatccaatctcgattttagcaaagggttcccaccatttaaactagataaaacccactgtcaagtcccgaagtctccatgagcctaaacaatcaaaaggttgcgttgcagcaacgattagtggatcacgacctctgtccgagtggaggcttcatcctagataacggtgggacgacaatcaacacatacatgagtctgaacggctaaaagcctggttgaaagaaacggctaagtaatcaggtgctgggggggtgcgggatacagctaatgttattatccgtaagcagcatagtgctctgaaatggatgggactgtctttcaatgcctactgattgatgccggattcagattaagatttttcatgttaagaagttcgtaatgatgacaattccatatcaataatcctagccatactgagaggtggatttgttaggatctccgctaaggagagcatgaccgcagaattaggtagaccagatgagcgagctagaggcatcagcccccagtgcctgacatcaatcaactccaagtgtctcaactgattatgtacagatctatagatggttgcaaacggacaaggatatagtacaaggagaagtagggagctggtgaattgacggaagatggaaattttacctcgagggatcctgccgtttccacttcgaagactggccatccaatcctggaaatagatgtaggaagaggagggagaaacggacgggaaaattcatcctttaagccagcgccgtaaccgtaagagaattcgtttattcgtgaatgttcgtcgcgtatctctagagagtcgtgggtgaatgcgcctgccagcttggaagtcgattcagtagtttgttgaatgatctttctcaggcagatactagcaggctacctagaagcgcacaagaggcacccaaaacccaagagattttgaagatgcggttcgcggcacttatggtgaggccattgcgatcctgtcctgacgtggctgacactcttctaaattcgtcggtagtggcgtcggatagctctgctgggtctgtttcaggaaacacccaacgaggagattcgtccgtaggttcaaggtcggagggggagtataaacccgaccagaagtgatacgaggcagacatagacgggcgcatatactgggttgtgaagaggcatcgctttagcatgaaatttgacgagggtataaaacggaattgtgggcaatgctcactcatagaggaccggctgggtggctgaggttttccgctgccagcaaaatgccaatctcctggcaagtttgtggacggagatgagtccgaatcgtcgtcgctacttggccgggggacccaaggatagatactgggcgtggagaaacttgtggtttcgcgatgcgttccctcaaagggaatcggcccgctgtcggcagtcgcggttattgagggcaccgtcccgatatcagtcattgactgagccgcactattgccattgatcttgccaccatctgatattattgactgccatgacccgctgttgtcactgtatgtataagagttgccggtcgaatagtcggtcaccttaatggacttcaggtacatcgtgaagggtccagcggtataatcagtttctccccccgcccattctacaagtatattagcaaattccgttatatatattgccctaacagggacgcagagagagataaactcacggatcgtgccctcattattgttggggtcaccaccggcccagactccaactttcaccatcataggtgtttgaggatattggttgctctctgcagagtcgggagtaagtacacgaacagtgttgccgtcaatctgccatacgacatgggatgaagtccagtcaatggtatacgtatgaaaggaatcgtgatttcctgaattggcatgggtagctgcacggttataggtggcggtgttgccctttccaaagtaatttgtttggacatattcattattgcccccaagccactcccagtcgatttcgtccagatcatctgattgcaagacggcactactgacgatgccgactccaggtgcggccttaatcacaaattcgacgtgtccgaacatgatgtaccagtccgactgtatcagcggagcatcgccttgttttgccacggtgaaactcgctccgtcgctgccataagacggcgacatgacttcggtaaagtcatcagatgcgccctgggtgaagtcgtaattggcggagccgcccagtgcaggatctgcgggacaaccttcaaaatattagcattttaggccccattaacgggcagaggtctcactttgttccagcggattgcagtcggtatatgtttgggccgcggccacagccagccacgaaagaagaccaaccgtcgagcctttaagccggaatttcatggtgaaggacgtctgaaatagatgaacgcaagagtcaaacgaatcaaccaggatatgtacaatttgtcagtcaagaataaaaagcgagagttgcgacggtaagaaaacacaaggatatggaggtttgtcgagatttgacggttgttgttgttgctgggatgtcgtggtcctcaatgcagcagcttcggcgtccggtctatcaaggaaggtgcaggtcgaacgaccagagacatccaaatgtgaaagggcagtcatcatttctagtgacgaaacccatagcatgctatttaaagagatcggcctaaatcatagtgaagcggctgatgtcaagcccaaaatgtcttgtcagcaggcagtcgggtattagattcgtccagccaccagattctcgttctgggccaggcctcagtgagctcagctagattcaggcgatatattgactttccccgattgggagtcttgggcttctccacaaaagtcacgggaccggtggctggtgatcaagacaacagcttatggttggtcagatcactgcgcctttttgaccgccacggacccttgatgatctgtttctcttggatatgacgtggctgtttcatggtgcattcctcgcctcgcgtgttgatgccatgcgcaatgcaagggcatggtttcgggcgggaaacctcaacacaaagaatgatgcactatatacttgctggatatcctctccctagccgctatcctgggtaatacaagcagcgtcgcaccaactgctttattgcaggctaagccgggaatgatgggaaggaaagacctaaaatcacggtgactatacttcacgttgttcaccaattaaagtgccgtaggtctgctgcactgccaagcaaaggacagacctggggtttccaagcgcgctccacgtccaataaccggcaacctcataactctcataaccctcttagagaaagcatccaagttgaggcctgcagagaccattataaat

SEQ ID NO: 772 - DNA, 2951 bp, Emericella nidulans
aacatgcatatctgtttgccagccgctgcaccgctctgtaaagtagacggggtccctcatgtgcgaggcaattatttttaaaggtggtggaccggttacactgttctgggtggccctctcatggacaaccactggtttgcggaagatcgactcctccccaagctcctcaagatctggtttaagcggctcgactagagtcgagtggaaggcatgcgaggtttccagcgactttaccttgattgatgacaacctgttgtccttggacagtacctcgcggacaaccctcattgcttttgtcgtgccagctagggtaaatagacgagggccgttgaaacaggcaatgttaacggccggctcattgggactggcctcatgggcgttatgcagtaatctctgcacaagttcgagctcgccgtcaacggccatcatagagcccctgtctggcccccatttctcctcgatgatgcgcgcgcggccggcaatcatcctcaaggtgtcttggagagacagcgtgcctgacacgcacatggctgtgagctcgccaaaactgtggcccaccagtgcagcaacatgtatgccgctgtcgatccaggtctttgcacacgagtactgcagcgcgaactgcatgagctgcaactcgacaatactgcttctgggagttctgtcaaaaattgcaggaagtatacctcccagaccgagagccagactcgtttcgtggcagtgggtcagatgacttttgagcagtttgaagctgtcaaatgcctcacgatccaggccaacaaagctggacctttggcccccgaaacatagaatgaccggccgcgatgaatctggtcgaggaccagatgtcagtgtatttcctccagaagcaaagtcggccagctttgcctccagctcgtctacggaggcacagctaaagatcagtgcttgcccgagattgcggttggactggcgtgccaattggaaagacaggttagcgaccgtgaagcgaggatcgtctgcctttcgggaccgcagcatctggacgagcttggcggcgtatgaccgcaaggactgaacgtccgtaccggagagccagaatggacgtctgccagcacttgctcccttaggtatagcgctttggttgagatggggaacacctgcctgtgtgacgacgagcgacgcattggaaccagaagcgccgtaattgttcaaaagagccgcgcggaagcctggattccatggtctgaggctggtcgggatctcgatgttgtcggaaggtaaggcctcgagcttagggttaatcttgctaaagcccggttggggcgggattatgccgttttggaccatcaacaacactttaataagagcggcgatgcccgaagcacattcaagatggccgataaggcctttgacagagcccagagacagaggataggctcgtcctggcccacccagcaccgtgcggatactgtcatactctgcgcggtccccgacttgcgtcccggtgccatgggcctccacaacagagatttgcttaggatcaactcgcgccttgcgaatgacgccattgaaaacattggctagggatcgaacgcttggagccgtgattgctgaacagttctcattttgattaacagaggtcgccctaataacgcccacaatctggtcaccatcctcgacagcgctggatagcctcttcaggaatacagcaccagcgccttctccacggcagtaaccatctgcagctgcatcaaatggcttacactggcccgtcggactgaggaaagacgcgccatccagattttggtaccattcggggctagtaatgacgttgacacccccggcaagagaggcatcgcactcgccgctcaagattgccttgcacgcaaggtggatcgctagagcagacgaagagcaagctgtgtcgacagtgactcccggcccactccatccaaaaaagtgactgatcttgcctgccgcaaaggactttagatttcctgtagccgtatacgctgttggcgggtgacaggcaacgttattctcgtagtcagtcaccccaattcccacgtagcagccgacatgcttgctacgccccggccgattgaagtagccagactgctgcaccgcctgataggctacctgaagcatgattcgatgttgcgggtctgtcgatatcatttcccgggggcttttctggaagaatttgtggtcgaaggtgtcgtactcacgaatgaagttgccaaaccactttcgctgcgtatcattctcgcgccatgcttcgtagtcgaagtccacgcgctctggtggcacctcggtgcactgagactttgctgcgcacacggtatcccaaaactcgtccaggtcactgccgcctggaaagttgcaggccattccgacgacggcaatagactcgtcttggccgctgtcctggagcgtatacagcggcgcgggccagtggcccgaaccgacgtctaagtcgagaacatgcgccagccttggccccagcttgcggaggaaccattgaggtataaagcgctggcttccaaaggtaatgacaatgcctggatggctgttggtagactcgtggagtttcgtatagagtttatgccagtctgcctggtcagtcaacatggctcgagcagccgcaccatgaaggcttctgtccaaaggaaactcctcgccgtcaggggctcgcgttctaaatacgagtgtggaagcaccagggaactggaaggatggatcggagtcgaacaggcgcatcagagagactgcctggtcctcgcggctcccgcagtggaatggaccacgtaaagcggtttttgtgtatatgaagcccgcatttgtcaattccctctgaattgcatttgcatcattcttaagcatggtgagtgtcgcaagacgagcctctgaaattacggagacataggcctggtgaaatgggattaattctgcacaaggtataggaatat

SEQ ID NO: 773 - DNA, 4481 bp, Emericella nidulans
aagctcttcagcacatttgtccctactgtttccttcgaccgatcccttcctttcctatgtctcctacgaatctccacggatcttactatgcttggacaccacacctcgtcgagttacatttctatgatacctcaccgcaagaatttggcttctcgaaaacttatccttcagccctatcgtcttttaatctgccgccccgttttcctgtacaatgcgagggaacccaactcaatcagccaatcacagtacatactcatgaatgggtcgtctacgagaccctaatcattgtgcgcagcagttctggacctaatattggcctatcttacggggaccgcggatcctcgtgacgtttggaatgccgaacactgtacatatatgaaaacacccactgcagttgctgatctggttggaagagcagaaacataaacacattagtttcctttgttagagaatggaataattccaaataatcctcctgttctcttgtatggtgtagacatgactatacgaagcgtgaatagggatttttggtgtacaacagatattgtaagccttaaggcatcaaatttctccgcttccgctctccaccgtgtgcgtcgcatatcgttttctcacaacacactataggaacaccagcctgattctttgaatctcgttattcgccatggaaatcgacgacattctcgcatccgtcgaccacaccgacatctccagcccggagtctacagccctcgaccaccaactcctcacccgtttctgggtcgccgagcgcagcgtcccagagcttctgccctggcccgcgcgattgatggagcgcatgatggaacgcgtacggcagcaggtactgaaaccgatctctaccccttacatctctgcatatcgggtcaatcgctaaagattctgcagatcgaaacgatcgaagacctcgccgccgcttcctcagaaccaacaagcagcacagtaaatccaaacgcaacgctcaccctctccattctgcaaaccgacctctcccgcagtcaatatctcctccgctcattactgcgcaatcgcctctcgaaactcacaaagcacagcatgcattacctacttctctcttctcacaatccaccaaatcccccaccagcctcgggaagctccgaagcaaagtaccaaacgcctgaagactcagtacccctcccggacccagacaacctcccaagatcgtcaccactcagtccctccgaaacaacgttcctctatacacaccagcaactgctcgcgaaacatttcgggtcgagctttctgaatagttttccgccgcagcttcgacggttggatgataatgcgggcgggacgagtatggtgcaggggccggatacgcgggaggctgtttttgtaaggtgtttggcagatgaggtgctgcttcttgcgccgccaggccccggcgagggtgatgatggggaggaggtgtatgggggtacgatgaggatgggagacgtttgggttgttaggtgggaggctgttaaggaggcttgggagaggggagatgtggaggttttgtgatcttgctttatttgtcgaggtttcatagatgggcattgctttgcatatttggcgttgatagacatttcctctttcagaagatacctcggtgatttatggaatacatttacattggacatatcatggtcgaggtttcgcatgtttttggtgtgtttaaactaaaataacggaatcatgatccaaatcttatcgatcatcagcgccgaaacccataagtaatgccatcgtgtgataaaaatgaaggtgggactcgaccgatgcacaagtccttagatgtgagaagagacattgatagtctatggcccagagacttccttactaaaccctaccgcatgcgcctcgcccagaaaacaaaaactgaagtaaaaacaacagaagatgagatgaagaagttcacgcaacataaccgtatgtcggggggtcctcggaaacacgctcgaggtactcgcgatcaattagactttcgattcgccgcttgaccatgttaacgtcgggtacgaaacgggcagataactggctaagcacttcgctaataaggtttgaatggattaatgttttgcgttgtctatacaaagttatgtcagcaccggacgtcaaaagagcagaagcaacatacttcatgatgcgcacaatagcggcctcaatactgccgccgcgctcgttgttcatcttctcctctgtctcctttctctggtcctggctctcgaccttgttggctccgccgctgaccacaccgattcgtactttcatgaatggactttggaaatcattgttgaaatagaacttatccgtcggtttgacgtccctactcatcgggaccttcttgaggactcgagtcttgggtgcaacggcaagtgactgtaagtttcgaatgagatcgttatctggaatccgtgtgcgcgcctggatctcctcgaatgtgagggactcgcctatgggaatgtcattgaaaagtaaaagaataaacatagcgtaagtggacacgttgagttcgtgacgctgcactttgccatttgaccgatgaaaagttgctttaatgtcagctgtacccatacttggctgccacgaaagtttgcggccgctatgtttgtccagatagaacttctcaaagctctgcttgacagtctcaacctccttagggatgatgcacggaagctcaacctgaccatcccttgagctcgacattatttccattggccacatagtgctggtaaggacattgatgtccagctcgaatcgctttttatcggggtcaccctgttcccgtacaaactgtttatagcttgcagtcagatcctccgatatggtcatgtctctaaacatggcctctaatcgctgggtgaattgattgccgacttccatcttcattttggagatcatctgtctctctgcgtccatgctcatcgaacgcttcatgagtagtcgtcgagaaaggtgttttttgtagtaggcctcaaagcggtctttgtctttgatataacgcagcagggtgattccgttctctagaagagcatcaacctcgttgtccgttttacccttaacgcccttcttgaggttctcgtcaaaaaagagcgaaagaaactctgagctgcggggggtggaattgaggaagctcgaaaaacttgccgtaatcgcgctttgtagcacctggtcagacccaaaggcatctttccagataccatcaaacttcttcttgagggcaagaatgtcatccacccatttgatggcagatgatgtgacttgattcacgggcttctctttttccttctcttttttctgacctgcgtctgtcccagttgacttaggctgtgcaggtgcctgtgctaaagcaaatgaagcattgttgatttcgttacccatttcgactatacgcttctgtacagcggcagtcagatgggtctttttaggatccacccgtgcgctgagagcataaatcttgcttagattgtctatcctgtcgtggtccagcatgactcgaaccccggtcccctcaaaattgacaacttcggccaaattattgcggatcaactcgttatccactatctccttgatttttgattcgctaaggagagagatcgtatactgacagcgttccttttcttccgctatgcgagcagagacaacagcgcagaacgtagcagcgtcgaccgtttctagcagtcgcttgccctcggcgcgatagaacgctgcgcttgcctctaagtagtccggttcaaaagacgtcaaataaagcttagaagactcctcttccgcctccgtttcgtacaggccctccagcatcttaatgcagctgtggattaaagctcggtctatcatgtgccctgatctttccaactggatcatgaataacaccgtagacttgagcacatcagcgacgacggcattattactcgacgacacaggtgaccgcaaaacgtgatcgcgaaataatgccatggcggcggcgtatatggaaactttcctaagcgcaacgactcgatcctatgcgtcgattcctgcgttagggggatccaatcagcacacaccaattgacttaccatgtacattaaaacgtccgtaatcatcttcatacagatctgatggtcctcccacacctcacttagggccgaaaggaatctctccccggtctcccgcctctccgtagcctccgtaaattggtcttgcatatccacggcctctttggcgagcaacagcctaggcgtgattgcggcaacgactcgcttttgaacttcaccacatagccattctttctcaagttcctttgtccgctcgtacaagtcttcggcacgctgaatttttacgatgctataggcgttccgatatagttgctcgaacgacaactctgaggcgtctttcgtatgtatatatctttagagacgtcgataaatccttccaatttttctcgaattcgtctccgcttacgggaattccctagcgcg

SEQ ID NO: 774 - DNA, 1540 bp, Emericella nidulans
agatcatgattggcggtgcgctaatttagctcccctcatgatttggaatcatttgcttttcatgatttacttgaaacggcgatgatcggcaccattctttcaatttctctctactctatagtactctgtactcagagtctactctcactacactttccgccggtactatatgctattaatgacgagatgatgtatatctcatgctggcagctctgttgtatcactattatggcccctatctacagaccccaggtcgccctgcagcgaatgaggcagccacccgaccttgattcctaggcttcagccttcggcatacgacatctcttcaatcctggacagagcccgagtcatagaatggtgaccgggggctcgtgctactcaatagtcgatgcattcatagtcactcggcgcggccgcgcaaggaatatcgctttcctacctgctctctctatagtatacggctatacgctccttctgcagggaccggacacgaaactccggctggatatgacacctcgcatcgtggctgatcgccccccttttcagctctcgcagccttcttttcttttcttttcttttcttttcttttgatcttctccaggttcatcactgtggcggacacgcggtcggaggtcgcctcgtcctccacaggccagactatcgatcagaaacccagaaacctggttccaactcctcacgcgaccgcttagctcacgccgtacctcgacaatcgtgagaggcgactgcgtactgagaattcatgttactctgtacgggcggcgactcggggacatcgggaacctccccagcttcttcggctcggaggttgtactagtctatcatctgtctctccccggcggtttgtcaagttgcacattgattccatacctgctggctaaagacagacggatgctgaacgggtgctaaaaggatgttgaaagtatgctgaaagtgtcctgaaaggttccatgctggcactccgcctacctcgtatgctctaggctcgatccgatcgcgtttgtctgataggctgatctggcctctactgagccccttgatcagctcaggatatctatttatttttttcccgcctcaaattctttccagaaactatcgacggctaccattgtcgctccttgatttggctgattcgtttcaccgtagagccagcgttaagcgggcgttgatacaaaacaccgcgtagacgatacgatgacttgcgacaagctagcagcacagaacaggcggtggtctgtggaataactgcggatattgcgaggtggaattgggtggtgggtacgcctcctgtcaaactgtcatcgcgtccggtacctgatttgggggtccaattacgcggctttccagctgacggcgacgcaaccgggacggcagtgcctgggtagtgcccgccatgagctagagttagacgccgttgggccgccgccaagccagccagacagcgtgccgtccgaaagggggagaaagtgtgaaagaatcaatgacattcaaaaatctccttgaaattatgtacaagatacgg

SEQ ID NO: 775 - DNA, 2662 bp, Emericella nidulans
taagagttaccatccaagtaattgacattctgtgaccctcttttttttcagcgatagtgaccgttgcaggttagggcgggactttttagccctaagccgagctgtctcagaaccgaaagtgtctgtcagccctcagtttcgcgaacagcaggagcggggttcagggctagttaacaccccggctggcatcctcgagttaactcggctatggtaatttttgagccgcttgccaaatttcaggtcctccatacagactgggcttgcaataggcctctcaaacgtttgcggccagaagcggtgcccaacagctctaggcatatttaaggagatacagaaagtggaaattaaatctctcaatagttgaagaaatggttttcgacttatcaggtattcagagtaagtacaataaatgctgcagcatttaatgccgttaacgtatcgtgtcatacagaagctatgacggaataaagccaagagactcaacacatgggtatcataatcaaaacaaaaagagaacagagaccgcaaaggcaggtccaactggccgaagtcgattatggtcaagtgaaaaatgccgcaaggtccgtgattaaatggtttaagttatgaattagaagttccaaatggaagacgtgagttgttgggatatgggcctaccaagcttcctcgacgtcgaggagccactttcgaaccccctctcttagagtgttatccaccccaatcatcacacgtttgcgctctctatccgccagattaggctctccatcatcctcacggcaatgctcggcggtcacgctgcggactacttcttccagtgctcccaggactagccggcgacactcggtccgcggggcttcaagagagggaacttcgtcgcgggtggccgtatactcagcgggtctgtcgttctctttccgagatcgcgatggagatgacgcccgagtaggtgctaaagaggacgggccgctctgagctagcacacgttcgagagcgtcgaccagggtcccgtccagatccataaccggttcctctacaaagcgctcctccacttcaccggcattgtacccatcgaagcgtggtctcggagagggcgttgccgaggccatggaagaagagaagtagccgctaagctgtgaagtagacattgagcagcctggtacttggcgaggagtgcccggagtagacatcccagatgacgacatcggtgatctcacagagccgccgccaattgctcggcgcttaagacgcagccgcttgacgctaaaggtccgcacatctgcaatcagagttgtggcaacatctacccacttctctgatccatcagtatccgctgctaccgcgttgcttggagtgggctcggactgcatggctcgcctgatctctgactctaggctcgagtaaggtcgcaccccttgaagaacaaagtcatcatggaagtttttcaaccatccagcgacgttgagagtcggcccatcgacatctttcgtctgataatggaatcctgaaccactgctatgagtagatccaagagcatcaaggcttgttatcgacgtgcgagtctttttcggggaagccatggtcgattcacccgacgaagacagagagacaaacccaggcaatgggagctcaacatctactattccatcctcttcccggacggctagtttgagcgaagtttctctagggttgtcagttgtggaagaagataggtccggcgcatcttcttcgaatttacgttgggcgtttggaggttgcggaatagaaatagtcgcgctagtagcgatctggtgagtttcttcgttggaagcctcttcaaccatttgttggagcgtcgtagggttccgtttcgggacattaaggaccgaggtggaacgtcgacggtgctcaagtggctggccagcagtaccgtaatcagtcgacgactcctgacgagagctccagagaccgctaaagagactaccccaacgacctccagtagtaggaacgctactattggcactgttcgttgagctttcgcttctttgcaggctcttcaacagagtctcagacgccaagctgtccaccccttccccgcaagtctggtcagatggttcccgtccctgagaagcaaaatgagggacgggaactgcgccaccagggtttgctgttgatatcgtcgctgtgctggtgttcttgttgcgcgcatccttcggatgcattgggatcccgattgttctgactgagcgagcgtctgagcctctgcgatatatgctaaaatcatgctcggcgtcatccgttgatcgatgagcggtttcgttagatgaagcactaacagaacgattatgatctctatcggcgagattcaagcgctgtgcacgtgaacgccgctctatggctcggcgaagaggctcctgccgcaggacaggcacgctgggcggactttgagagacagcacgagttgaagcggaggtaccgggtcggagtggagaaggcagtggttcgaaacgctgttttggtgggagaaatgccgaaagaagaaagatgagtctccgagcagtcatcttgtcaggggaaacgattaccgtccgatacggaagggcaggctccgcaacatgttgtgctttttgctgtagatagtgccgccgccggtaccagtcggggggtaaggcattcagacattccg

SEQ ID NO: 776 - DNA, 2203 bp, Emericella nidulans
  unsure (1)..(2203): unsure at all n locations
tcaaaccactacacctgtgaaacccagtctcctttccccactgtcaagcaagcaggtctttcccgcctgttgtaaccatatgccttctcagaacttccgttttctatggtgggcgctggctgaaccgggattcgaatgtaccatagcataggcttgtttttttacttttttttaaataggttgcagtactgtaggtacagtgtgcgattggcttactacatggatttccgggatttaatttgtggctctcaagaaatactcgtatagcatttgtaagacagatatgcttaaaagtctggcttatactatagtctagctaatattatagctacatgcccatcccagactcgggcatctgaataactacctcatctcgcccatcgcgccactgtgcacccaatttgcgaacccgccgctcgctagccagaaacaggaggaggtatatatgggtcgcgatctcgccccaggcgtagacttttaaagatacggactgggcgacaatgggttctgcggatgttgtatcttccccactcgcatcacgatcccaatcccgctcccgttcttcgaggatacaccagacaccccatccagctcgaccctctttgccgatgaagtcagacaggaaagtccagaatctggtgaagaggggcttgtcccagcatagcaccttgctactggttcttgcggccgtctggttctggttctcaaactcagattcggctctcggcactatagtcaggcggagataccagtatccgcgttcgaggatgtcgaggtcccgagtttgtaggacagggttgtatgtccggggggacttgaggcggttgctcaacatctctagggttggggtgatgtgggttgtgaagggggatgaggagattgggggtgggggtggtctgatttctaggggaagggagggaaggatgggagaatagccttttctgcggccatttggcggagatgatgcttctgcttctgtttctgggtccggttctgggcctggttctagcccagcgacttgctccgccgaaggtggctggatgccgttttcatcaacctgtttttcgtgtccttcttccggggtagcgagggtgttggtggtgctggttgggctggcatgttccacattgatattacgaccccctgccggaatatcgcgcagtccctgaacgttttcatgcggggaattctcgactggtggcggtgagtccactcgagggcgttttgaaggaatacaagaagagaggctggtattttctgcgacaggaagcagagtcagactctcacactgagtgcctgattgttgaagttccggctgcgagtccgggatgacgctgacgggcgtctccagcgaggttcgatcaccctgggacccattcagttgggcagcttgatctagaagcgacgggtcgttgattgttcttggatctgcttcctctggaattggcgatgtgagggtgatagtctcacgagagtggctctggaaattcagaatagcctcgacctgggcgcggtagcgggcatcgtcgacagcgctacttggcgccgagatgtggacgaggatttctgatctgtccatgcgcttgcattttagtggctggtcatattatataccttgtataagtgtcgaatcaagcgttgatgaggaaaagaacgactggggtatgggacctcgacaatgaccaatactgaaggactcgggcggggtgtgattttgtgccttatcgcctgaggccaaaagcgctggcaacagttcaacgatccatcgagttcatcatcccgacaaacgcatgaatttacaaccaactcattcaacgcttaccgggcccatatcaatagttcgcctcactaccattggcagggtctgaatcgtcacatcatgattatctcgcgtgcagggctcggctcctcccggcgcaattgggaaacgcgatgatagtccacgctttggctcaactatcataacgaaaatcggttcataatctcgcagtgatttggaattgttttcctgccggttgcggcgatcttccgctaatgcgtcggcccttgatctactctcaagcctcccatgtcacgaactcgccaccgcatggcttgattggtgccctggctacngaaccaggaacgtgatgccgaaatatacccttttcacgatactcggacccatcgcatcaatagtcagaacgacagacctgcaagttac

SEQ ID NO: 777 - DNA, 2232 bp, Emericella nidulans
accgaagctatacatccctccaccttcggcaaaggcaggacccggatggctttttttttctggcatattcaatacaacaaatccaatggagtaccgactaacatctatatctagtctcccgaatacttggcactcaaagcacgccttctcgccgccgccgaagcagatgcttacactcggatgctctcaccaccgaccgcattatacacagacccgttatttgacacgacgaactcaagattagccgccttacatgacgcccataaggacccctcagccgaagacccgacttacagagacccgctcacaccgtccctcgtcctaaatatcttcctctctgttataatcacagggttcagcgtctactgggctctgacatccttcgcgatgccggagatattagtttcaaggatttcgtcgacgtggtctccggggcagggcagtggcggttctagagcatcggaaccagttcgtgttttactttcactctttgcggcgctgggggtcggtgtcgcggaggtattgatttatgcgatttatctggggaagatcgaggtggcgagagataaagaggggcggcgaaaagagaagaaggtggttatagggagtgaggaggtggggggcaggggtagagatcaacagagtactgaaaagacagaaatcaaactcaatggtgaggacaaggaagtcatctgggggagaggaccgaatggaggtctgcggaggcgagtacgtgagaaatgggaagaaacgacaagagacgaagaccaggaatgattcgggatttggcgggtgatagtaagtacaattccagcccattgactggacataacaagtcaactttctagtccgttctgtccctggacgaacagaacacattcaagtgtatacgatacctaagcaaatgaagaatatgtcctgtcgaacaggaatgttaaaacattacccaacatagaacgatgggatggaatgagtcgaaacccgaatatgatggtattgtctctattgaacaaaaagaaagctaaacaaaactctacactcgcttgtgtattggatgctcgtgatgataaagctgcggtcattagtatgtatagaaggtatgcatatccggatgggtatcatggttcttcttcctgtcgttcgtcgtcaattatatatgggttggatcgacttgctgccgcaatggcacgatacagcgagacgaggcgcatatggagtgtgcattcgcaacgagacgcgtgcgggtgcggtgagggccagtcatgaagagaagtgtaggatgcataaggtgggtatgtgaaaggtatatatgcaaacggggaaggtgcaaaagcaagggaatgaaggtgatcaaacccttttctccaggagcagtgacccggaaggcgccttgacagtgaatccgtcatccctgttgaagatcttctcaccgcgcagccacgtttcccggaccatcccgcgcatcgtccgtccctggtacggcgagcatttgttacggaagagcatggtactcggctcaacttcccactccgctgtgtcgtcaaagacacaaaagtccgcgtcgtatccggggacaaggtcgcccttggatttatgcagcccaacctgggccgcggtgttggcgcagcaaagatggacgatatcctggagagcttgtttggttgttgtgtcgtctggtgaggaagtcaggcccttgcggcgggagagttcggtccagaggatgggcaggcccaggccgacggaggagatgccgccccaagcggagaggaagctgccttcgttaacgacaggtgttgtgttggcatgctttgacgagccatggctgcagttgcccgggatatgggaggggagaagcttgaggtctggtgtgcaaggggaatggtcggagccaatggtcttgatgacgccatcctcggcgtggcggtcaagttcggcccagagagcgtcttggttggacttggaacggatgggcgggcagcatttgtgccgggtgtcgccatcacgaatctcctcggctgcaagggagaggtaatggtagcaggttccggctgtaatgggaacaccctcggcacgggccttgcgcaggagtgggatggcctccatggcagatagatgtcggatgtgcaaggggagcttaggagataggtgggacaacgtccccatctcctgtgctgcacacgcctcgtgatcgtagggacggaaggccaggcacccttccagaactctgcccgg

SEQ ID NO: 778 - DNA, 592 bp, Emericella nidulans
aaatatttagagttaatagtatacttacttccgctaatattatttgataacagcaagaccttccagggtcttgggcttgaagtttggggggagccatccaaggctgcgaaaatgttccagtctagctcgagtctcctcgcagagaatgggattagtccaaaattggtgtcaccgggttgagcagggggaaccagaggaggcgtcattgaggcagtcagaaatagtgtagagaagtaagctggagtcgagaaaagactggcctttagaatcaaaccaagattgttaaggcgggtgaggggggagggtgaacagaggaacaaagaagcagggaaaaggtagcattttatagagtacttgaccaggctggtcagatctagggcagctagatttggccacgaaggagcccattttcagggcgatttggtcgtgatttgagatggactgaagctcgctgcggtcgagcactcattcaagttcaatcagaggtgggaactagaatacttggcgggtgcagaatagtggtgtgagcacacatgacaatgttaaaacggtcgctcgctgttgagagttacgggtggaatgcggccgttta

SEQ ID NO: 779 - DNA, 1538 bp, Emericella nidulans
tcctgtacgatgaagaccgtgtcagactcgccaccttcatcctggccagtgcattcgacgccgcggccaaaggtctgcagctctccgtcgtagatctcgcctgcagcgatctcgtatggctcagagaaagttacactgccggtggaagaggggatcgggaaggtgaatctctttgatagcttggggttagcggccgcgaggcacgggcctgcgaggaggggcagggtgagcgtgagcgtgggaagcagtttggaaaggacgggcatggtggacaaaaagtgaaatagagacgtttgtggtagatccgagtgaagtgctcgagacgctctgatctgggaactgagaactgagctggttgcgaggcggaaagaaggcctttatacttctctcatggccatctatctacaggatgaagtatatcgtatggaccccaacatggcgaccttggcgtttcaactctgcggcgatcaccattacatgtcaaacaatatcccaccactcgaatggataccgacctcgtcgccatgggcaaacagaactccgtgccaacagagttaccagcagcggaaccctgccgatcagttcctgatcccgaagccctaaatatggcggctccttggccactatattatgtcttcaggctgtgtcgatcagtcgggccttgtctacttgattcgcggactttccgttcttcttcgagtccactcgtttgaagcgatctcgtcccatgttagtgcactgccaccccattcaagccctccaagacttttaggcgttgcagtcttattgtcccatatctacatgatgtaagcccacccaggtggctggtgcgattcgcaaatgcagcaagcgtacgcaccgcgctgggagttttttatgaaacttgagtttctggtatatttccgacggggtgaggtctcagggttgtatgcttgatacccagacctcctggtatatccccagatatgctgtccatgcgaacaaaactatctagtaggtgaaagcggactgcgactcgataccgtcaaaagccgggcgtaagtacattaatcatcatgcagctctatagacatagcagcgtaataacccttaactattccggcatcgatgctaagtaacgctaccactactactgcttatcactgtccggctctctcccagccgcactccccagcccatgcatcagctgacacaagccctgtaccagcggcgacacggccgtcatacggcgtctgggcactcgcatcacctcttaggagtctctgagcgacgtccatcactttccccggatcagaaacaagagccggcccgtcacttagactgaatccccggagagcagggcacccgcgcgccagagagatgaatctatggacgtcggccgtttcttcgccgtctaggaagactaacagctcagagccggacgcgaggtcgagctgccgaggcccaatttcggactcagcacactagatacagtattagtgctggcggtagaggtaatggttccggcagaggttgcagaggtggtagagatctttgag

SEQ ID NO: 780 - DNA, 1032 bp, Emericella nidulans
tataaaacctcggcctgtgtactcctgatcataggacttactcacggttattaccgtctttttcgtcgccagaatcaagactgccggccatgaaaacagcctttgctggccagatccaacctctctctccaacctcgcccacaacggcctcaccggctcgtcgtccatcctttcgaaggggaagatatacttcacaaactctctgagctgactgatgttccagctcatctcccacatctttctgtcctcctgctcaatcacgatttccccttgcttaatctcgctcggcggcgcatctagcgggcacccacaggctctttcggtaaagaatgccaatccagcccaggaagtattccatttataccgcgtcacatttgcccattctgtctccgagaatgggatataatccagcccgcaagcgatgcgctccgcaacacacttccactgcgccagatgctcgtggccatggccttggatcacacctgcgtagtgatggtcgataatctcgtcgaggagtggctgacaggtgagagcgtactctggctctgcaaagtgtgcgcggccgtagaaccagattgcgagcgttccgccggttttaaggagggtgtggaagctctggagggccgggagggtgtcgaggaggggaaaggtcagagcgcaggcgaccaggtcggcagaacctgctttgcccgggtcttttaacaagaggtcttctgctctggaggacacataggagaagctcgactggggaataccgcttcgcgaaaggaaccgcttcgcatactcgaggtgactggcgttgttgtcgctcacaacgacatgcgagaaccttgcagccagctttgcagcaacatggcctggtccagcaccaacatcgtgagctactgacagactcttgaaagagcctctgtttcgcgagtgcgttgcgtggtggttgtaaatgaggtcgtagaaggaatctgtgtatttgggccgcgtggagagatagcgggtccagtaattgctgtggtcttgctgagtgagtcccagatg

SEQ ID NO: 781 - DNA, 4662 bp, Emericella nidulans
gaaactgctatacaaaggcgaaagcgagctcgtacgcatagatggatatttcatgataatggtctgtctgtacaagaggggacagagctcgaggaagctcataatgcgtcttttcaggcaatacctggtccatgcgggccaccagcagaaggtgcacaaacaccaaaggcacgggcattacctacatgtagtacctgccatagaattgggcatagaagaaatgcttgtccaaataaataataattaatataaaggcgttgtggttgattaaaaggtcaaaatatgggaaatctgtatgcaggtgcgcagctcgcttacatgcgcagctcgcttaccaaccacgttatggcttgttctgagaggagcttcaaagggtatatgctagatcttttgattatatcgtttctttgttttcaagggtctcgcgtaatctgaagcactgaggattgctatttataataatcgaaatccgccatagaaaatgcacaacgctttactagcccctctcatgcaatagtgcatcaccggagcaggttcatcattcttaaccatggcagctagctgattgaggtcagatgttcgtggtaagtaaagtatcacatattgcgtgaaaagagaaaactccgtgtacagtttattcaatgagtatggttccatcgtgctaagatcgaatacagattctgatcgatatccgggacctatagtgaaccggcgagattagcattcagagtgaggattgctagcaggagaacgcaggaacagacatacctccccaaggcggactagcaaataggacgctatagggcgccaaatcctttaattgtgatttgagtatatcgaaacagtctccttgaaaccaggtaattttgtctgcgaccccatagacctctgcattatgttgcgcgcaccgcagtgtcgcggggtctttctcgatagcgtaaactcgtttccagtgcccggaccgagcaaaggcaatagtatttcctcctgcgcccgcaaaaacgtcgaccagaatcttccgctctgggggagaagcgtgtgctacctgctctgcgatctttctgtagcatggttcgcattagcgcttctgcgctttctggtgtagaattcggatgactcgggtaaaaatcacatacgtagccactggctctggagtaacaccaaaccaggcatcgtcagtcaaccaaatgccgtcgtcccatttggaaaagagatcatagcgttgggaccagtagctggagagcggcgttagctgattcctgccgaagccagtggggcggtattcgtacttctgaatgtcccaaggcacctggccacggttctcataatgatggacctcaggaggaggttcttcgtcaccggacatggtggctctagcgtgaccaagacatgggtgaagtaagagtgaaagattagaaagctccgtctcttctggtccgaaaatggtcgacctccgatagttatccataatctactgattaacgtgggtttgttttgtttgcatccccacgtttgaggacagcttcatacggaagtggtcacccgtcatacttattgcggctgtttgacaactaaacagatttcacaatgttcggggctctgaaccgatttattggtcggctagactctgataccggttcccaccagtcgcggtcggatagcgcctttggattccaggtcctacgcaataaggaccccgagctaccactggagccttggtttgatttcattgttggaataaatgggcgtttgatcgtgcgttatctcccatccacatgatgcttatgaagagtgatatgctaaaaagctgcaggatgatccagatccagatctcttcgcgactgaagtgcgcaattgtgcaggatcccgagttacctttgcagtatggagcgcaaaagtatatagtctgctactgtctccctagagcgtatcgctaaccagtcactgtgctgtctccgtctcgcagggccaaagaacgcacactatctcaattgccgttcccccatcaaatccaacactcggcctagccctgcaattagctcccctatcctctacacagaacatctggcatgtcctgaatatcccgtcgcccctgagccctgcatatagagccggtcttctccctcactccgattacattatcggcacacctagcggcacattaagaggcgaatcggcattaggagaattagtcgaagaccacctgaaccgtactctagtgctgtgggtctataacagcgaattcgacgtggtgcgaactgttgatctggtgcctacacgaggctggggtggcgaaggtgccctgggggctgagttgggttttggagcgttacatcgactgcctgtggggttgggcgaggaagtcgaggggccaggggaggtggtgtttgaaacgcgcgctgatggagtgtcgacgcctattcctgagccaacggcttcgtctatgcctacgcaagctggaattcctgggcaatcgccgcagttccttgttccggcgaatataacctcgcctccgcctttggcacccgcggcttcggctccccaagtgtcgcaccatgggagaaaggcacgagggaatgccagagcttcacctcaaagagcgtttgatgattattttgcagagggcgaacagaaaagcaaggaacaggatcatgtaccgtcacggagaggaacaccgctcccgccgccgcccaaggctgggcaattgcaggagcaaaaggaatccggatagaagagatttgtttacgacttgcagcatgtgttctcggcgttttatgataaatccataatacaaacgaaactgaactgtctagaacctgttcgtcggaaacctcttacagatacatatgcgctataggacacaggcccaccgctatcagaacgtagttgagcgaataaaaaatacgagaggtttggagcagagtcagtttaatgtcccttgctcacaacctcttccagcttcttccgagcatccccaatcttctcctccatctgcgcacgtgccatggcgctgtgagcaacaccagcggtccatatatgctccgcccgctctcggaagtacaggtggttatctgcaatgacagggacgcgcttctcgtactcccagatcaagtcggagacattccgcatggtcacgggaaggagagaccaagctgcaatggtaccaaacgccaatggggtagtgccgcgaagaaagcggccgcggttacgggcaacgatggagccggccatagcagcaaccacaacgtagataccgccgggtaggatcttttccccagactccggggagggtgccagcgaggcgatggtgttggtgaaggcgttctcgatgtggagggcgcgggagagaatgtcgttgaagcagatctcggcagcacgggactgctggtagaggaagagacgaccctggcggatttgggcagttaggaggtcggttggcgtaggggacgagggcgattttgtgctggtgttggcgagagctgtagtgactgtcgtaggttcgggagtagacgcgggaatgggttcggtagtggctggggcaggagggattggggattcggcgggataatcatcgtagataggttttctctgctgtagttagagggggatcagattgagcgtatctttagcccttgagcactgggccagagcaagcaacggacatacctcctcggcatgagcttgccggggatagaaagccacggctccggccagcagagacacagagagtcgctgataaagcaattggttagcaagaacaacaacaagaacaataatgagtgggaaatacctggtacatggccatgttgcgggcaattgatgggggtctaggaggaggtgaggatgagatgatggaatgaagtccagagaaaagtgccaagtttttttcggccgcagtcggttgttcgcccttgtccatccttgatacttcgtcaccctccatcttggggccatttcttttctctctttccatctctaatgtactatattagatatctaccagactaatatgctgcggccgtggatctgtcgcacttgtcgactacaaaaacacctgcaccgtcgctccatcaccaccacgtccgccctccgaacagcgcccgcgtctgcttctgcgccagttatccctgcccaatcctcgccgtccaagagctccgacgacgatacccttcgccgagtcttcgactcgcagtccttttggcgcgatttctccgagtcgtcatccttctcccccgaccggaagccgaccggtcttgttcagaatcagtacctcacaagtcctgacgggttccgggcctttgcccaggtatcgctacagaaatgtcaggcgatcgtatctcgagtcctctccgcgtcgacggtggatgaatatcggggcctggtacgtcagttggaccgcctgagcgacctgctgtgtcgcgtcattgatctgtccgactttatccgtgcctttcacccggatccgcccgttcaagaggcggcaggccaggcatatgccttaatgttcgagtacatgaacgtgctcaacaccacaactggtcttcatgatcagctacgggccgcgctgaatcagccggaggtcacggcgcattggtcttccgaggagaccattgtcgcccgtatcctgctccaggattttaccaattcggcgatccatatgcc

SEQ ID NO: 782 - DNA, 3254 bp, Emericella nidulans
cggacgattactctcactcacaaccaaggaaacttgggctgtggactgcaacaaaatttgtctcgttctttagaaagagatactattgcccaagctgggaagcgtaaaagctccagcgtacataaataatcaaaataatacaattattcaagtatcaaatctcgagattcattcgctttctatcagtatatacagccgtacgtatattgcagccctagtagcgtagccacggctctatccgcaaaccgatttcttattccctggatcccaactcttctgagacattcagtggggttgggcatctgagatcagtgaggtgagacggatcggggacagaattaccaaatcgtcaacggagccagatggagccgtcttgggccttaaggctgagatctagttggtcctaatgcagactcatgactctatcccatcacatgcatacggaatacttaggccagaatggttgtcctagtccactgtgccagcggtataggtcgatctcttaatctccagtcagtagcgcgcccatagtcctcaaatgcgacttgggtgcgtacacttactcaacagaaagcccttaattttgtcaaccagcccatgaaaatgtgggctgaagatgccattcatctcgcttaaacggcggcatttggatatatggggctgggccgctggactcaggatcaggactaatatcagaagtgtttcaattgcgcgggatctctactttatgagactttctaaataaagtcccgacagggcgtattatctacatacttgctatacatgctgaacttggagcaatgagagaagtgggggcgggacagacgctctatcctaaggtcccgacctgacgggaatgcatcttgcccaatgcggtaccctcttcttgagcgctccgcggcgggccttttcggagcctgcgggagaacggagaggggccagcgttaggcataggattttgcagattcgaatacgagggttggaggggtgatatttggccctgggggtttgccccaaccgtgccctgcccgtacggagcctcgtacttcatagctggcaggcccggattagcggcacagctactctgcaggagacgtcaagctagactgtcaagggacatttatactgaacaagggacataagtacataactagttcttatctggcgcctacataggattcgatcccgccgtccatcaatgaagctgtcaatcaaatgacaacgggaattgggcaactaagggcatctcggagtaacggcggacattcaaagccttacttctgactcttcgagattccagaccaaagccggatgcggacggtggagttatatcagccaatcatgtggcgtgtattgagcgccttgtttatggattgcccggtggagatcacggtccatggataattccttctggaggcgaaatccacccaaatttgaagtctcgacgtcaacctgaccttggaagactgccccgttagtttcctgggctcagggtcggttgggagttccacgcatccagggtcccggattcggtgctgttgatggggattgtcgtactacctgcctgaacaatccgttgggttgagatcaggtatatcctctaagcactcaattgggattgatggcgaccggcaaaggccaggcctacctagttttatgctgagaccagggcttagaaggcaagttcagtgccagctagttcaaacgagtcggtatgtctggccgccggcggctgcctagaccttttagaccaacgatcagcggcgacaatgctgtttaaaagaaaatattattattgccgatgcgagaacaggctggatggatgggaggctgccgatatgcaacgaggttggaccggccagatcgagatgggccgccctgctggtggtttgccgtggcgctgacgatcgcccgtttctgggcctttctcactcgcagttgtcatgtttacttttcccacgtctttgcttttgcccaagcccattcattccctttattgacccaagcctctcgatgacgccggcgacttcggattggggtaaattctccgtttgtaagcctggagctggatttcacgggtagctgcaagatggacctgtcgcgtaggacaaagagtcagaaagacgaggtacggcaagcgctggctgcgtcaatagcggactcaagaaatattgttggaggacctcatatcaggaatgctttgtatgggggccacaagccagggtataggatgaggggcgcttgaaggatgctggatgatgcccgtggttgtatggcaaaagcaaatactgatagcaaagttagatgggccgcttccctggttatgctgaatggtagctttcgggtgggctgaccgaacccagtgacctggacttcgattagcttgcgtacgaagtagacgcggtctcctggaaagtagcgacgggtatggagtcaacgagaagtcaacgagatcctgagccatggagtacactcatagactcataccatgagacttcccaagtaatattagattatgagacggtgccaagtggagaggcaacgagagcactggcactgcacagagtgagagcgagcctggaggtggggtcaggtccgtgtaattggatcagccactagtctgggcctagaccgcgcgtctgcccggccgcgctctccctgtctgctattttagtgcagattcttcgcagcgcgctgggcaaaggccgcagtgagagtcttgaggacaagatcaaagaacaattcaccagtatcgagcagagtaagcatccggtagaagattgttgtgcagcagactgtcgcggtgaacggtcgctgggccttgggttgtgtcatcgacttccgcccgtcgggccagaacgaggtcccggcaagcgactttgtcatggccttccatgctggttttccattctagacccttcaaaactcgtttggccctaaagtccaaaatttttttttctttcaaatttcctttttttcaacggtttaatttgattaagggcactttaacctttttgcccgttttatacggaatttcttccatgcccttacctttccttaatatcctttctttatataaaattctaagcccttaaaaccaggcggttttttaggctataccctgttttaacgggcaaatgcccgaaccgaaatttcttttccctttccccatggtccccaatacctggggtttcttgttttccgctctggggccattctgggcctttggcccccaaacaacccccttatatccc

SEQ ID NO: 783 - DNA, 2301 bp, Emericella nidulans
aaaggattgattctatcaaagcccaagagcgatcaaagccacgagcgacaagtctggcgaagagacttcgggtccacgaggaagcggccccatcaagcgcgaataaacgcttgaagcaggaaagtacatcaccagtggcgcagcccgtgcattcaagccatatggacacggaaactcctactcgtgcgcaggactcggttgagaacggcgtgctcgatcagtatccacgcaaaagcaacacacaacacgcagatggacttcccgcggagaaggcattgctccccgatcagagctcatatgcatcgccaccagcgttccaggcggatgcagtggctacaaaggagttgccagcaactgtgtcgaagccggctgccgtgctggtgtcaccaccaacgtcgctagctgatgagatggatatccatgatcaagtggacgccgggggggagcatgtatcggtaatctacacgccttcgtcaggctcccgccagtcttcacgccagccccgtcaagttgagaggtatatgccagaggttcactttgccaagacagccaagtctacaaccacaacccctcaaactacgcgccgctcgtcttttggttccagtggccggaagactacaccgggattgtcctccggttcaaagaaatctggatctcggccctcctcatctcatggaaagaagagtctttccccttccgtggagaagaaagccgaacgccatgccatctcttcagcgccatttggtcagcacggcaggggctccaaatcggagcatggaacaagcgacgttgaccccgatgctgaaagcttacgcctgatccgcgaaatacaagagcaggagtttggtttacggcggcgagcaggcagagcataatgctccatcctccacccccaacgaccgtgtcttgtgcatagggctacccacccgaatttcctttcttttagacatgctagactaggagcgccgaggtcggcaaaggaattttttttttttttttttttttttttgttgctgggagatctgggatcatggagttaatatgagctggagtctaatggatacggggttggatcgtttcttgtgctctcaattttttttccctccaatataccttccttctgtgtcggtctccttctgcgtctgttactactgctattactacttatccggcgttacaggctggagccataacctgctctcctgggtgtttatctttctctacgtccgtccatatctgctattgcctttctcttgcatgatatctcttccacatgcctgttgagttgagtacttcgagccattttgcgtttatcatggggcgtttcaaatgcgtttgtacaaactggcaattttgaatttgaggatgattttctcgctgtcccttttcatctttttccttattcggttcccaacccaggcaagtcagattgatatcagtattgttttttaaactatggacaataagataatttctttgtctctaatctcaactatcttagttctgctctgtatctgtaccagacaggttctattactcctttctggcttgcccgggggtttgttcattcaaagctgtcagtattattatacttcagcgaagaatccaacaatctataattttcattgaccatctagctaacagcagaactctcaacaaaaaagggaaaagaaagggggggaaaaaataagccttaaaactcctgcacctcaagctccttagaaaatgctgcaagatcataaagatgaccctgtacgtctctgtagcatttgggtccacgtgccttctaacattcaaagaaggggtatttcagtcatcaaacaaaaagaaaaaagaagtaacaataacatttcgggggtataccgtgtatgagtaaggatgccaacagtaagggatatcgaatgcaagaaatgagatataatgatagaagcgtcaaaggtaatgagggggagcggaaggggaagggccacggtcgtcaatgtcatcacacatatccaatcggtattcaataaacgtgtcgctgttcatgagacgttatcagaagggttccctggtccagacgtggaccaccgtttagcgcgctttttctctccgatgaagtctttgatgatacagggctcttcatccggcgtctgacatactttgcggcggttaagatgcttgaaccgcgggccaagcggaccgtttacatagtgatactggcctgcaaatcgatactgtcgatgatcacccagaggatagaactttgtcgccccatgaccgttgaagtaaaaccactctgtcggtgcatttggcttagag

SEQ ID NO: 784 - DNA, 3147 bp, Emericella nidulans
caatgctaacatgacttagatggatacaatcaacagacttctacggaaacaggcgccaaagcgacgtggtcgaatccccgctgctgaagcggccgagaacgctgccgcggaccaggaagcagcggcggaaacggatttcgtggacccgaccatggtgcgatggattagtggtcgtgaaggtagtcgtgtcgctgtgccggaggagtggattgggacccccccagggcgtatctttggaggaacgccaaggaaactagttgaggaaatatgagtgcacgattgacggacggcgcctaaaccataggcgcactcaggattcggcgtatcggttttggcatgcgtagcaggaaaggttatctgctcatttgcacttggaagaggagttcagctgggaacgggtcatcacgatactatccagggcttgcatgtcccaaattatataatacattgtctatgtgcatgaaatagtctacattggctcgcccggttttaccgttgtacgctatgcgtgggtgactccgtgcgaagagcagctttagtctgcccacactgttcgcaacttacataacacgacgaagcgtcgcaagcatgccaacgggcagacttagggtgtctacccaagttatcaggagacctgaatgcctagaagcatttatcacagtgccggcgcttgagccagtacccgaagggatttacctgacccggctctagaacccagatagtccattaccactcaaagatttccaagcctcgtcgaaccatattaacggtaggataatgactccttattttccagtattactttctgttggcgtaggcgtagatgttaaggtagagacggtctgttgcgactgatgctctggttgttgcgctgcggggaaactctggcttctatcactcgtctttatcagtacgccgaattcgcttttgtgctgccaacatacccagacggggacctcgctataatacccttattgctttggagttccctcaatgcgggctggaaggtgtagtaccctgcacggagatagatgtcagttcagaacattgagcgcttcggttcgatgattttaaggaatcgtacctgttccgacgcccattacgacggccagaacgacggggataaaattccgactcatgatgaagtagttgcgttgctgaagaagtgaaggaagattgtctagctgggtatctggctaaggtagcctaaggcgggtgggaactggctggaaagttcgccaaatgagcgccaatttaacgtccgtcgcgtcttccacataattttggttccgacgcgtccagacaaaccaaccatccatcccatcaacatctttcacctacaacaaagacgtcaggctgccatttaccgtatttggcctacgtaatttcccgagtgtcgggttctaatcaagaggtggttttcgaagaatggaactctagagacatgggctagcgcgtccgaggatgcaaatggagtcatggcgggaacgagggtttgtgccagattcggacgaggaagatgggctcgatagccaggagatggggttaatgctggatgcaactactaagagtgccaataatgtctctgtcgttgttagcgctctgcggagtgaggaggtcgctgaactggctggagacgatcatcataatgggagcgatggagtgaacagccaacaacgggacaatgcagatacttgtggtggtaacactggtgctgggaaggagggtcacgacggtgctgatattgtcgaggagacagttgcgcctgtcgacgaggatatggatttgcctttgcttttaccggacagacgattgcggacgccagacgacgataacggagaagccgaaccggatttgggaataagtgcggcagaagaggctaggtctaaagaaaggaagaagtctgttagctctcagtcatctaatggctcatccacagttggcggaagtggctcgtcgacgccgcgacctaagcaacagcatgatttttgggatatcccgagctcttctcccgatctgttgcaaagggactatcatccctggcgtaaacagacctcgcatgcgatcgcagttacgcctactcccaaagcaaaggtgcctagccagccccattcgcaaaacgagaacgcgcagagggcgctggaaagctctcctttgtcctcaccattatcgtcccctcgctcctccatcttaggcgagatggaagaacagcagcaacagcgtcgtgaagcgttggaccagacttttgaagatctgctaccccctctcgatatacctgaagatatattacgacagttggatcagccggaaagaaggtcgctccgacaacgcaatcccattcaattacacccttatcttcttgaagatgcaaaatacaagagccttatgaaagccaggggcctcaaacctgtacgctttcctcaacagatcttgcaaccagcacgcgctgcagacgatgagagtcaggaaaaagactttggcgatgatgcaggctcaacttcggactcgcaaacgacgggacttcagtacatcctgtcgtctcctctagattctcgaccgctgtcggagccacgacccatagaagacacagttaagcgcggcgataggcggtttgatcgacaaccgaaatactctgcgcgcagcaccgggcagcgctcgccgaaaagacgcagggtggtaggacctggagatgagcgccaacgccagagatatctttcagcgcctcggccagctccgccgcaggtagtggttgataacgtatcatcctcggagcctgatgcttcctcgatctttgacatcgtcagccccttgtgctcggacagtgtctccccttcactcatgcagaaggatacaggggctcaatttccgcgtagattctcgcctcccgtcgctacgcctcggacaggaacaagggaaagtgctcatgacaattttgaacccgttttactagatgatgatgaaaacggacttgaccaacaatcagatatcgcagggactattaggtcagtaaccccaagcagcagttcgggttctgatttgaatgatgaggatgaggacgaggatgcacaggaggcgattttccgaagatttcagaagaagatcctagtattctatagtgtcacctaaatcgtatgtgtgtgatacata

SEQ ID NO: 785 - DNA, 6129 bp, Emericella nidulans
tgtcgtaggctgagacttggaaggaaatgactttgcttcgtcgcgctcaggagaatccttctgttgacgaggtgtcacagcagtgacagggattctacccaagctgacgttgtggtggtggaactgctcagcatgagttttcggaggagtaatcgcggggttaaagctgtcacccttgacggtaggtagatcattggttgaataagaagattgcaagggggcaggccggctcattgcagtgggagtgcttgactcatggtttccctcggtagagtacagcgcattcgactccagagaatgtctcgctgcatgtctggcaacattgggcgaggcgctgtgggattcgtcggctgagccgccgatatggccaaggcgaaacatgctgagagagttctggggcatgctctgatgagaagagcggtgacggctgtgggaattccaagattcgggattgggagttctagagttggccaggtccaaagcgtccgagtttgctgagagctaatatctcattagcgattgaggtccggacagtgcatggatggcaggatgatgacttacgaagctcgaaccgtctctacgagatagagttgggaatttatcgtccggttcggtcaacttaagatagcttttgatgtctggagttggaatcctgtcttcgtccctcatgaatgaccgatcgtcgtcgttgtggaggaggtatttggctgtgttgaaagtctccgaagcagacgaactgttgttgtagcctgaaagattcggtcgaacctgaaagccgaagccagtggagggcatggaatagcggtggatgctagtaaggacaaaagtcagtaacacaggccctgaatactagcaggaggaatccatgtggtgtagtagaaataaagtgaatgacatctggttctttgagaatattgcggaccaggtgagtcatagagagacgtcattgcaaggaaattccaacagaagacaacaacaaaaaggcacttacgacggcccggggcgaaagggagatttagggtcgctctcaaaatcttccttttccgagtttctacgagacccaggaacagagtggacggcgaagcggttcgtgggcgtctgaactgaatcgttattcagctgactgggaggacttgtgaccgaagaagcgaaaacgttgaagaagcctggggacgaagtaacactagacgtggagaagcgagttgggcgagaaaaagctcctggaaagccgttctcacgatactccgggggagtagttggttcgctgaccgggccagatatgcctgctttcgcaaggtctttggctagttgattcatttccaactgttcccgttcgtgctgaagatcaaggagcttcatatcttcctcgaaccttcgcttctgctctcgcatgtactcgatgtgttgtctcttcttctcaaactgtagaacaatgagcggcagttcataaacaggttatatggtatcgatcaaggaatgataagcaatgataattaggcagaagaagatgattgcagaactgagggttgaggtggaacatgaggagggcataaacggcaacaggaagcctcaatagaatgaagaggacaatgggagtagtgagagtgagaggcggcggggactaaaacaaaacaataggctacagaacaatagccccaacaaagaaactgacaataggccgcgcaacataagaatggcgcagaaatctcgtgaccgagaatgcggagtatggggcatagataagtcctggggtacggagcttaccgaggagagcagatctagcgcatctggcatttgaggagaggctccaacattgctcatgtagttccaagaggagagcttgctcgcgtccgttgtaaaccgacgttggagattcgaacgaacgtcgcccgaagcccgtgggaaggctgacacaaagttcgaatggcccggcgaaagcgacgagtaaccggggaaggggatctctgacgaagggggcgagcggggagaggggaatcggagctcatcgagacgttcacttagtccgttcttaaaggccatggtgggcaggcgactggaggacgaggtttatcacagaactatacactcaggggccaaggggaggcggaggtcagctatgtcatggtacgttacggacgacagaataagcgaagcgtctgaaaaaagagagatgtctggacaggagcgacgtttgcaagcagattgggagctcgatcttaaagtacagggcgcaaagccagcagagagtgtgtgtgatagttggcggtgtgctctctctaccagcgactcatgtaaggagtcgggactcaagaggggcggaggggtgatttggcgaagcgagtctcgggaaagaacagcgactcacccacaatgaacgcctcgatagtttgagtttcaggacagtaggaagcttcagatagccgcttggtgcttgaacacgcgagtaaggactgtcttgaggcgaaacccggagccgtccacgcactttcgcagtgctcctgaaagatgcggagatctcgctgacgctatctgaattaccgcgtgggcgctggccgggacgcgctctccctcgtgtagagagcagcgagagacgcgtagttgacaaacgaatggaagtatatagaggaagaatatcgcggatatgacaatgaggaaaggaaaaataactgttatacaagtggcatgggctgcaaaagaaaggaggaagaccagaaagcgagagggaggcgagagaggggaaaaggaacgaagtgggcggcggctgggaagcaagcggggggtttgagagtgactcgatgggcgctcgtttaggcagtgctcgcccttaggcgtagggacgaccacggccaaagcgtccttttctcttaggccaccttatcgttgtgtcttttttttatttcttcttttttttgtggattcccctggttttgtctgtggattcgttgaccggttccctggataatggtcagaacgttccttggtcgcacgtatcttgactataaaaattagttacgagtactccgtaaccaacatagtggcttttatttctaccgattgctcagtaactacaacaatatacggagtagtctatctgttcatgcatgtacgccagtacctcgaatggcagatcagagattccccgacgagattactccgtactgttagcctccctgctcttgattttcttgaatgacagctgtcgcggaaagataccacaccagtccctctcgatactctgtgcctttgcagacaacgacccatcagccagaaatcgtaatcagtgtgccggcgcgttgtctattgactaggtctgtttcggaacccaggctgctgagctgtcttgcttttgccaacccttcggtcgatcgttcgttttcgatggatcaaggattattattgaatctcctgcgcggtcgattgtgattcggctaagcgctgctagtggtgactaggagcttcgtgctaatgcattactttattgggaatagagtgtccctcaaatttccagctctagacagggatcatggagtagatctccgagcgccctatcttcttctgccgcgaaaggatgcctgatgtgacagtaacgctgacagtaacgctggcactcgacggagcctactccttctcgataattcttcatggcggactctcggtcggttttgaggccgacaaaacactcgttcttctcctgctgggcgcgcccgacgtgcagtgctggccgtaggcgtggccgctgcaagtgtttctgcagcaagtgtggatcccagcccgactttaggtcgaagatgccacggcgggcccgatgtaactacatctgtatggaatgcctgggtcagggcccagaaacctgcaagtcttttcacttccacacaaaagaaaggagcgtgcggagtgccagaggcctgggtctgcttactggatcagtagtctggattgatgaccggtgccaaccaaacatcacatggcgtaccatgaaatcagctgctacggatagccatgcgcgagccaaaggtttccgttgaggggaagccaagccgatgggccagttccatcgatctctttgcttctggaatccgaactggttctcggctctgcaggcaggcacattcaatgtaagaggatcgaacctcaagtccagtcagtttgaataggtccgagcgggactggtgtcaacgattcatacgtcggagcaagagtaatggttgaacgggcacggatgattgtctcatcacaaactgatgcaataatggcttgccacttagaacgaagccattggaggccaatggcggctgctgattggcacggtggaggagaagcggtgtacaatggtgactggaggcaaaacggccctggcacgatcgtggtagtattggactacaagaactccattttcgtttcagttaagagaaactgcaggtactaaataaagtcgttctgaaagtgggacaggatttcaatgaccgagaaattcgtggagtcgtggttctgaactttgagggatcgactgtggattcggatacctattgaacctattgatagccgtaagcaaagctgttatcgctcccccgacctctgcatatcaatcgggccagggagccggtgaggttgctactagagcagacaaagtacctatgcgggtacctgctcattctcacccggatgtaaaagcaccaatatacagaggaccattcagcgatacgggcgacgattatagtactgaggccaacaagagctgaaataaaaagggctgggaaaaaaagtgagtttatgcttcgcatgccagtccctagccttctggcacagataatctccgacaataaaatcgggctaggcctttactccggaccgtacgagttaccggtagacacgatttcaggggcccggcatccagcaagccaaccagtcaggaatcccttctcccgtttgcacttttgggccagctccatggatgatcatcctcggataggccgggataccttgccgtcagctgctgcggtctgaggagctctagcagagagtgactgctagatgcgtatcctcctaatcgtccgatcgcctgacgagctctctaacgcctgaacaaaggaactccaagcaatctcccaaagtgagcacacgtcgaacctagacaatgaatttccccttgggttggcccgagcatttaccccggagtccttagccgacgctgactgtcctaacccaaccttaattgctccacaaagtgcggcttgctacagggtcgacttagatccgaggatccgatccccaagcgcaggcaataggccccgtaaactgcgtctgacaggacccgccgcgagtttgctccaggttcaagcgggttccagtccttcctttcctggacctgaaggaaaagctctattcatccaacgtggactcggatacaattctttcgttctgttcatatggacttcttaaatgaagctcgttagaaccttgctctttgcccaatcaggatcggctccatatctgccaacgaagacacaaccgctctatcgcgagtagcgttgaagggctaggcgacgaattgcggaattcctaagttgcggtcagagagcacccactgttgctaggcgtctaacatgcatgtgaggcactgatctggattatcctctcgacctttcgtccaacggctcgagctgcgcttgcataattgtcctttttcgcctccttagcttctgtctggccttcccctactgtatcggcgtaggccgtatcctcttaatatacctggtcatacacgacatcctaccgcaccagctgcaaggcgcttgacaagtggcgagtccaacattctggcgattctataattcctggtccgaaaagaaccggttggttgaaaagcggcagcctgtgattttccgttttcgtgatttattgttctcttatcaatgatcctgtcgtctggttgagccggatggccccaatgtacaaagacgcggttcagggccgggcctctcagttgctgaaacccctgttaacacctctcatagctcacttcttctgtcatgggccagaccagctcatatagatatggctagccacggtactgcatctgcgagtatcttcactggactcgggttcgaaatatacaccaacgataatccc

SEQ ID NO: 786 - DNA, 3417 bp, Emericella nidulans
ctctcttgctctcttgtctctttgatctccctctcgctgtcccaaccttatcactccacttgacgtcgtcgggctggacgttcctaaagggggattagataccgccatactttacttcaaggcctcttgtaggttgcctgccttttctcacatcttcattgcgttcatcagtcatccgctacccgcccttgtctttctgttccccttccctgccgtatttacgctctcaaccaattctgctccagccctttatccatattgaaccctctatactctttaatatctctcctagcgctgttcctcacaattcgttcgtcgtccgttaccctggagtcgacagtgaatcgtcgcgccatccgtggaccttgagaccgtccgaattcttgtcacttggtcttcaccatttgcgcttttttatgctctttgcgagctcatgtttcatttactcgtctctttcttttcgctcccgccatgggtggcttcatgaattattcatttaccgcttcgcggtcggctttccttccactttcacatctctccgtctttaatgctagtcagcgcatcagatgaacacagtccatcaaacaaatatctgaaggacatcgtctaatgttgatggtaccaggttctagcttactccacgtcgtccaccggaaagacaacagcactcctttcttccttgctgcgacgggtgccttgctgtcaacctttcgcatagcacgcgcgttctggagccttgctgtggtccataatcgcgcttggagtccagcttcacgaaatttcgctaccaatggattcgtatgatacttacggatcctcgcccaggggccgcgagggaggagattcttatatgagtcgggcttcgatggattcgtacagacgcagatcgcctggtcggttactctcgcggcacattcgtctcttcagtcctttaactaatcttcgatatagtatcccaagatcggcggcgtggacgcgggcgttcgcgctctcctgtaatgatcgatcggtacgaaccttcagatcgcagagcttctcgggacgatttctactctgcttcgcgcgaacataccggacgagaccgtgaagatcgccgtcgccctccttctccgatggctgcgaacattgaccgttacgttcccggacaagacgctggcaagcgatcgatcccctccaaccccctgccgaatcctttgaatcttgattttcaagtaggcttcaattggttcgctgaatggtggcgagctgagcaatctatcaaagaggaaaaggagcgtgcaaagcacgggggacgccggccatccgaccgtgtgaagggagaacgtgaggcgcgggaagaccgtgacagggaaagagcccagatacaggcggcttacgatacctacaaggtggatcttcaggtcaaaatggccagagcattcgttcagcaacataagaacgatgaatggttcaaagagcgctacatcccggagatacgggaccctcttcgtcgaaacctgatggaattcagagtgggcgcttatcagcagtgggagcgggatctcgatgggggtttgtttgacgaatttactctggagggcatctacaaaagcgaaagtgacggcgcgggcggcgtgattgagaaagaggaaggcgagacgacagctgttggggagacccttggtgttctagacttgcttcctgccagaggcggagatctgcgtgacgaagctttatcacaacccgccttgctcatcaagacgctggcaccaaacgtcagccgtcagaagatcgaggagttctgcaaggaacatcttggagaacaggatggagggtttagatggctcagtttaagtgatccgaacccgtcaaagaagtaccataggatgggatggattatgctacatcctgcccccgaggttgcggtcgtcgaaagaggtgatggacgcgaagaagagggcgagatggaccaggacaatgttgccaatggatcgggagctgccaccgttgctgaaaaggcacttgaggcgactaacgacaagacaattcatgacccagttcatggagattttgtatgccatgttggtgttcacgcgccgccagctcaacttcgaaagaaagccctatgggatcttttctcttcacctgaccggattgagcgcgatctggagttggctaggagattagtcgggaagcttgactctgaaatgggacacggcgctgatggttacgccaaggtcgaagaacgtgttgaagaacttcgcggaaagggctggttgcaaccaccggttactggacccgttagtgttaagagaaggaaatccaacttcgacgctgacgatgttgatgagggtgaggctgaagaaggggaagagcaggaagactgggcagacgatgaggtcgatgatgaggagctcctggcgaagaagaagaaattggatctgatggtagaataccttcgtcgagtgtataacttctgcttcttctgcgttttcgagtccgactcgctccacgagctaacgcgcaagtgtcctggtggacatctccgtcggccacgaagtggtcttaccacccaggccaaagccgttgctaaagccagtgccctcgggcaacctttccccgtcaagaggaaagaccccagcgaggaaggcgaggagcaagcaccctctagtgagaaggagagacgctcccagagatacagttcgaagtcggagcagcaactgcagcgtgcgtttaactgggtaaagacatttgaggacaagattcttcagattctcgaaccagagaatgtggacattgtcaaactcggtggcaagcccgttgacgaagccttggaagaggaactggccaaacatgtcaagcaggaggatgagtcaaagttccggtgcaaggtgccagaatgcacgaaattgttcaaggcagaacatttctggcgtaaacatgttgagaagagacactcggagtggtatgaacgtatcaaaaatgatgtaagttgagattgctctgagcggtgacaatgtatgctaatttacccactacagctcaccctcgtgaacgcctatgtgcttgaccctgctcgcattgcgccttcgcggtccgacgccaatagcaacggccacttccctctcagctccggtcagaaccaggctggcacacctcgtggtttcagtctggcagcaatgcccccttaccttgctaatggagcagtcgcagctggcctacaaggcgtaccgggaggactgcccggtttcgtgagcaaccaagcgtcttgggctgcgaatggcatggccggcggcgaattgcaccaacctggtgtcatgcgccgtggcggaaaccgctacaacaacaatcgttccggaccttacgatcgccgtggcaatcggcacgggacccagggcttcggccgcatgagaacgggccgtggcatgcttaacatgg

SEQ ID NO: 787 - DNA, 2588 bp, Emericella nidulans
atgggctgggagttaacgctcaatgatcagcaacagtataccatggcccgagtcaaaagtccagtggcaacagaagctcaactttctacccacttctcagtcgacgacctaatcaaacactgctatgctaccggttatgtcacagaggacaagcgaaagaaggagattcgaggccacaatgcccctgttatgacatttgctactcagcctgccttggttatccacaaaaataacagtcttcaaatctccgggaatcatacagtcgtctcaaccaacggctctgagagtgtgacaaaggagaccccagcctttgaaccgaccgaagctacagaactcccgtaccccagtgatattgttagcccagtaaccggggatacttctttcgaaagtactgatgcaactcgcatatatcagcgtccacaatctcgcacctcgctggcggaaaattatctcgacatggcaaatatgcaatttcacacttgggacgaccaaactgctcttctcccttacaacacagggccgctgatgcaagaatcgttcgacgcacttgattttaagcctttcctaaacatctaggtctcggttggttccaggcaactcatgatcttttcaggccgtgcacacatacactactcgtacttctgtgcaccatcatccaatctggctgttgtactgcttcgtgcacatactcatcccatttgttcttggctctttcaaccaatagcctccgacccccgaacaatgacaccgtactcgcataggccacggcagtcggctcagagctgagaccgatagtgttgaccaagaagagagtcactttcctgttgtccgccggaacggatacttcaagccatcacaaggagggggcttctcatataaatttccctatctacttccatactatttcacgtccaattccgcctcgtttgatcggtcagatctgcaatatctcgcatttttccgaatgcgcttctatctatccgaggtgaggatctatccatgctgtcaaagcctactgtccttcctgcttcgtccctctgacatttcttagttaaggaaataattctatctacggatcatgacgggcaggcggaccagcataatagcacgaaccggctacgaaatcttggtgggacaggctaatatcgatcttttcgttttatgttgttgccttgcgtctgagccataggactctgttccttcgagttttccaatagacttgggcgtgcatgaggtttcatgtatgggagaaagcatcaataccggctcatttgttatcgccggtctctatttcagagactaaatagaattatggcccgcaatgaaagtagaaagagtcttgatgacaaatgagcgaagtgcatgagaacaaatttgaagtaaatatcgtcaattcctacagctacaacctggtctccgacgaactagatgcctaccgactcggctcatatgtgtaaaggcgctcaatcattgattgctggggctacaggtcttcttctgtagctttccacatctctccgataagccatactatcactttcttaaagggaaccaggaaggttagacatgcaatattaccagaaaatcgagtctcagaagtgagccaaatatccgctgctaaagagagaaacctcagtttgcctcctcgtcagattttgagctcgttagccacactacctctttcaagctattcgtgtttgaaggggtacattggtcttgtgagatcctaatttagagataacgagcagtgatagcgtagcgcataatgaattataccgaaactggaatatcagtataaagttggaaggaagaaaccataatcatatctgacaaccctggtactatcacagttttagatcctgaagtctgcgtgctattatatcatttctcaacgtgtttgagcccgccggtagttaagggcagggactgtctagctatgaagttgaagatcatggacccaccaccggcactactccgtagtactgatggcctatctctgggatctaacttcgtcccaatgggtttgtcacttaagtcccactgtaaattcgacagcgagcaggaatagtctaggtacggttgatctgcgtcgtggtcaaagagctcgaacttaggtggtggagagataagttcttggccgaagtcaaaacaagacaagagatcggcaagtaaatccgtgtgcttgttacggactgcaggactaggggtttggccaactcttattgagtctgaaagtgacatatggacggtggtataacaagccatagtggaaaacagccaaaatgaaatgaacgtaaaaagtacagtagagaaggaaatgaaagcataacgagagacactgtgtccaaatactggagctgccaggagtcaatataatattctgcaccaccactacttcggattcatgggccggtgatctaatcctcctgataggaaatcttgcgcatttctcccagacgagtccgggcgcgacgaagggcattctcaagttgaagtatttcgacctaaaacgacatagctattagttccaatcaagcagcaagacagataataacaacatgttcaatgttgcggatacggacgaggaa

SEQ ID NO: 788 - DNA, 1124 bp, Emericella nidulans
ccgctagtccgtcgcacccaatggatagcgactccgaccatctatccgtcgcagcacaacagagccccgtagtgcatggcaacgggccgaggggcagcctcggcatggctgaataagcaacacaaccacgagtctataagttacatagcctttactaaagtcgaatcgttacaattgagatatagatagtacgagatctcattgacgggtatgtggctgcttattatatgtacttgtaagggttcaagatcccgttctactagcagttagcaacagtttggaagaagcaacaatatgggaggttggtatgggagcactcaccggatcatacaattccttcagctgtttcatgagtttaagattggtgtcattctgactgtatccaatgaactccttcttcgcaaggccaagaccgtgttcagcgctgatgctgccatttcgtttttgaatccactcatagacccaaggttcaatcgccttctcgacgtccttgttgtactggcggactgcgatgttgagatgcaaatttgagtcacccatgtggccataaccgacaaccgcgcggacggggaacgagtcatcatcaccaacaaagcccatcttcgtcaagcgctctcggcagtcatcgaccagctggtacagctcgggaagggggatcgagacgtcgtacttgtaggttccgccaaggtggctcagggcctccgtgatcccttctcgccagcgccagatgctctggaattgagtctcatcttgggccagaacaccatccgcgacgataccctcacccatgacactctccaggaaggtctccagtttttccatatcgtgctcggcattcgatccactagtctctatcaagcagtagaaagggtattcctcttctaatgggaatttattgcctgtgctggcgtgcacgagcttctgactgcggccgtccataagctcaaatgcggaaagaatttcagacagttgcttcttagcctcgccaaaggcctggcggaccttatcgtagctctcgagaccgaagtaggcaacattaacggctttcgggcggggagggcacagaatcgaaacaccagtgatgataccgatcgtaccctcagacccgatgaacaactgcttca

SEQ ID NO: 789 - DNA, 2427 bp, Emericella nidulans
gatctaaagtgtctaatactgacattcgttgttcccaaaatttcgcgttcctcgaatatcagagtgattactatggctactatgaagcgaatcttgatgcacaccttgagctcgacgcatctgcagctctcgaactctatttttggtgactttatactcaattcccttcgaagttctttgcgggaacttcgggtattggcagggcaagtcttgcaaactcgcaactcaagcaagtatttcaggtgctaataactccttagacagtcgattgtctgttttgtacgccattgtttagatcatgaaaccaggcgcaggaatttcgttgtcatcctaaactggttgaaaaatctaacggaggaacaagagacggcacttcatgagacttgcattatgagcttgtgtcggctagcacggtaatgtttggtgtctgaggctggagttggtgctggggctgatagcattaactaccaggttttcaaacgatgaagagatgaatataatccttctccgcctcgtagagtatctcggacacccgaacccattcctctgcggcgtggcgtacaccgaagtatgtcaaccatcgtcttggtttacctttacatgcttcatgacttttgtgctttgggtgaatcatctaaccggctttcagatatcgaagcttgcacaacatcttgtcatgtcgccggctgggttatttcgtcctttctggaggacactctccgtgaccgtcgtcaagaatctacaatcccgtccgtatatggcggagcaattatgcgacctgcttgggatgacagttgatgattttctgagactaacagaagtctatgtcttgccccacctggtactctggcgtaaaagggaagttatcgctcgaattgggtgtacctataaggacgccaaaacacccttcgatatatgctcagagaaagacaacctcgcagcaatacttgcgttcctactatgccaaccctcatcagagcctcagaaaatgattatgtcaacgctgtctgctgttgaccctgctttcaacgggcgtaccctagcagagctggtgagaatcgagccaatcttgatcgcgtgcgaccttctaaaaggccttggtgacagtgaggatgagaagggagcaaaggtatgttaacccagtgttctgtaaaaccaactatggggcatgtctctgatgaaaatggcagttccaacaagccctacgcattctagcctctctcgtgccacggaaatccgcatatgcgtcgaaaaagtcaaatttggtaggccacttcattgaggagcatgtccttggaataattacccaatttgcgcacgccataaatgatttccagataagacagccgctcgtggagaagaaaaggaacatcatggctatcggcgcgatgatcaaagttgcgcccgggcatgtcagtagtgctttgcctcaggtctgtttttcgaccccgccacgactagactgaccagacatactgaacccgagcagatatgtgcttgcctgcggtcggcattagagatcaaagaactgtgcaataatgccttccgggtatggggtgtgttagtgagctctctgcataaagaagaggtcgagcctcttctcgaccagacactcgctatcgtcatcaagcattgggtgacctttactgaggataccaggaagtttgcttacgagctggttgagcatatcttggagtctcaccaggaacttctgcgagatatctttggtatcatgccgtccttggcttctatacctgtactctctcggttcgaggctagtattaatgagttgaaagggacactggatgttcggagtcatttcatggctttcgcccgtcgttgcctgagtgaaaatgccactgtcgttgagcaggccttgacggaacttgtctcgtaccttgagagacacgaggagttcgtccacagatctgttctcagcgagcagccagatccagctgtcgcacatttagttaggtctctacttgactgctgcgtgaagttcaacattacgtcggaatccatcaccttgctttgcgctcgctgtcttggccatatcggctgcctagatccaaatcgggttgacacaatcaaagagaagaaagggatccttgtattgtcgaattttgataagatggaggagacattcgacttcgtactttttttcttccaacacgtgttggttgacgcctttttatcagcgttcaataccagggcttaaggtttcctagcatatgccatgcagaatttactgatgttctgcaacctgaactccgccgttacccagcgttcacgcggtgtcccagcttgctagaaataccaacggtggttagagctttccgaaccttgcgaattacctgccccctttttgccttaagaataccgttctatcatgaccctagttcaatgcactttcatgttgtctcggat

SEQ ID NO: 790 - DNA, 3281 bp, Emericella nidulans
catggagaacagaagatcctggtccatgttgccgagcatctcgacagtgttgtcgccgggcttgagcaccaggtcgttcaggaatgattggccaagagaggttccgttctgaagcgagacgtccaaagtcaggttgccctgatgatcagttagcaggacaggccagggacgattgtacttgaggagtcagcataccatgtccaactgcaacacggaggggttgggaatgtagacggagccgacggcgttgttgccgtcgttacggtcgtcgaccatttcgagagacttgatgtcgaagccgtcgagcttgttgagccctgtgcgtattcagtacatgaccaccagcaaaaatcggttaactccagctcacccttcatagtgaccgtcttattgtagtcgacgtcaattgtcggcaggcctccctgcttcaagcgaggctcgccataaacgttcaagtggaactcctcactcatcatgaccgccgtcgcgaaatccccaaaagcccccgcatcagtcaagtccagccactggtcaacattcaccacggcgccgtcatcggccttgacttgagggaccttgaccgttgcaaacacgggcgagccgagaagactgacgtcggcatcgaactcgaagatcttggggtggaacatgctgtcgctgccaataacctgtctctgggtaagatggaacccatcgggggaaggatcgctgatttgcatggactcgacggtaagcgtcgagtcatcgatatcgtgctgggcgatgttcgggtagccgacatagacgctgcaagacatggtcaataccgagggcaattgagacttggagtagtgcacacttacactggaagcacaacgaccaagaccaccacaataaaagcgatgaggtgcgcccaccaccatttcttgaaatgggccttgacgcgagcgccgaagctgggtttcgcgctcgttcccacggggacttcttcaacagcagctttgtcggccatcttgttcaggtactcgggacagcaggagcactcgttctagccacacccaatccagtcactctgcggctcagcggcgtgaggattgctcgtgggacatacaatggtggatgtgttactaacgaggtctagcgaggtctgaaccaacggtcagttactcagatcgacgataaggaacggatagggctggatgaagtcaaaatgttatacctatctcaccactgaaactctgcagacttgcaagcttgcaggctctggaaatcccgcgcaaataaaaagactagaataaaagaaagatttaacgaaagactgcaacggaagctcggaggcaccgcaatcacggggactaggagtcgagcactattttagacgacccgggggagagtctggtaggagagacaataaattggctaaacgagactcgatggatcccaagcattttatctcttcgtctggcagcaagggcagagggggcggaaggcgatcacatgtggccactgacggcagtctcattctcatcaagcaccgcgggtctttgctggtggagcgagcaagggttcatcttggtaaccttcttaaccttcttagcaacctgcaacaatggatcttgttcgcaacaggaaaggggccactgagccactgagccactgggccactgggccactgtcacgagcaagggcgacagcaatttcagtcgtagtgcctcttatcagtgggaacgtcgattgctaggctgaagcagagcccgggatataaagcctcggtgagcccgctgaaacaatcagtccaaggatctactttgacaggccatccatgcagccatccatgcatccacgcctgcgacaagcattatcctaaagctatgaaactcgaccgaatcgaccgagacgagccgaggcgcgtcaccaaaaaagaaataagaaacagtccccggcagccgttatcattgtctcccgcatgaatcctgaatcctgattcctgaagcggccgtccaatattaccgttcaggcaaggggccgccaatggaagagacctgcgtctctggcgaaagggcactgctgggaaacaagtccagcccagcctaggatggaggcggttccccaagttaccccatgttgatccagtcttggcgcccgttccagcttctcattgggcggagcatccccaagcagagtgcctggactgtgtgggagtaagagcggctagtccagtagtatagcactagcccaagggccgttgtcaggctgcgcatggaagcgaatgagaaagcacgcgatggccggggggaaagtgcaggtggcgaccggcttcgcctgtggtccagttaacgggactggtcgaggtcgccgccgtacaacacgagacgactagccagtgcgaccctgtccgtgcagcagaccagtcggtccgggccaatgcagtttctggcgcctttggctgtttctggccacacctccgtcgctagccctgaacgagggaaccactgcgacaattgcgactactgcgcccacggcgcccacggcgacccgattaatatccgagagtaagagtcccgtcgatgcgttcgcaggccagttcaggaacgatcgggtttcaagaccccccctctccaaagtgagactcgcggggtttaattgcaggtcgaatttccgggaaggggcttgatggccctgtgaatcgatgaattcagacaaagcgggagcatccgactgtcaaggctgactaaacaaagcctgatgacaaccccggatctccacatatgcaagtggaaatgagacacgtacatcactggaagggtcggggcaatgccagctgaaattcataaggagtgagtatcgtggagtatccacttccatcttcctatctatgtatgacaggtctcgtggcacgccgacgggtgatatgcaggaatgcatacccctgtactgactcaacgccacagatttgaaggtttacttaaagtagttcaagagaaggaaaagtagttcatcgatgctaaatgcccaatgcgcaatgcacaatttcgtcagtatcattgagtactagctaaggaaggcaacgaacggtccgccacaggaggtgtatgcatagaaagaaggaaaataaatggaaagaggggccggggccatccagcagagaagggatattagaagggaactaaatcatcacgcagtggttagatgaacgaagggtatccaagaagcgaattttgatgcccgcaaaagtttaaagaaaaagcagtgatcctgctcaatggtgaagtcttgcgatcggagaaaaaaaaaaaaaaaaa

SEQ ID NO: 791 - DNA, 3328 bp, Emericella nidulans
cacaaccggtttggcgcgccatcgccctcgatacatccgacaaggtacaacgtcgcgtaaaccacctgggccttgccaaagacgaacatttgcgccacaccctcctgcaagatgtcgagtcactacgaaaacagggagcaagcgctggagaagtccttgagatagtgggcgatgtgacggacttaaagacgtcaacggcactgatcgatgaagcagtcaagcgctggggaaagctggacgcttttgtcgcgaatgcgggtgttttcaggcaggctgagctgttcgagtataccagaccttctcccactgtgcgagatgcgacatcactctgacagtcatagactcgagcccgatctcctcaaccacagccttgatgtgaatgtgaaaggcaccttctactcgtgccggtccgccgcccgccaaatggtcaagcggggccacggaggctccatcatcgccatctcctcggtgagcgcgctagttggtggtaggctacagacgccctatactcccacgaaggcggcagtactctcactcatgcaatctagggctatcgcactagggaaacacaagatccggtgcaacgcgctgctgcccgggacgatcatcacgcaactggcagatcacgatataaaagatccagcgaagaaggcgtatctggaagcgaggattccgttagggagggttggcgagccggaaggcatgacagggccagcagtgttcttggcgagcgaggagatgagccggttcgtcaattggagtggcctgctggaggatgggggaatgttttgtaacctgcagtagttgtaagcatagttgatctgaatgcaattgtccaacaaaccttggtaatcccgaatttgaatataatccaggtcaagaatgattttcacgaccctcacacattattagtgtaggaggtaaatagagctaacagatcctcacgggggcaccaaggagaaagtgcatcctccactttgatctatcatcttcttacttttattccagttttctcttctgcctccaacaatggtcttaggagaatgaacactaaccttgttcgattctcgagtggtcgaaaatctcgtggtcgcggattgcgcaccaagaccggctggtatgtgtcgaatctgctttgtctcttcgttatccgctcgtgtttctatcttccccggttacctacctttcatgactaagaagagaacagtgtaacttgtcgcaagaggcaccttaaatgcgacgaagtcaaacctgtttgcggacatggtcaaagtcagccctcagtgcgactactctcgatcctcctcccaccaccctgccgagcaacccgccgaagacgaggccatccagtcatctccaaacacaaatactacagcccagtttattccttcagtaccagaaacaggcaccgataacgtggctggtgtatcgcctcgcgaacagccggattctgccgtcctttcgtggaccggtcatagccaaccctgccttcatccactcgatcagctagcagccattgtcgcaattgaccacacttctccctttgctaatagccttacagcaccgcagtattctcctgatattccacagtcggtgaccatcaccatcgagtcccccggaccagctataaatgccgcaactgtgcgatggttcgacttactcgccaatgatgctgtccgcgaaagcccccagatctcgagcgtattcggctccggtcaagaggtattggaggatgcggatgaatcacagattacacctttacagcgtgccacacgtataggggatcgaacccatcttaatgaagaggccgtgcagccgagcttgaactcgggaaaaacgattcgcaacgcaatacaatcagaaaccattacccatgcggtgaatacaccaaagggttcttctcctgaggaaaggttatggcaagcccaagagaatatccagcttcttccacatgagttttctctcttcgagaactttgttcagagggttagcccgtggattgatcttttcgatcctacaaacaagttttcaacttttgtacctcaccttgcggtatgtccctggccttcctgtaaagatggctctgactgttaggatgcgcaatgcgggcttgttgaatgcaattctagccttgtcatttctcactcaatcccggaaacgcttcgcacgagtcacctcaccgtgagacgtcgctgcagtactactatcagacactgcactacgtccagaaagctatgcaatactcgagctataaaaccagtttagaacttcttgccacagtcctaatcatctccacttatgagatgctggacgattcaagccaggactggcagcgacatttagaaggcgtcttcctgattcaacgctctcaagtgatacatggcgactccggcggactaagaagcgcagtttggtgggcatggctctgccaagatgtatgggcagcattccgtgagagacggaagacactcacgttttgggttcccaaaaagacgtatgcggaccttagtccgtccgaaattgctgctcggtctatgtttgtccttacaaaggtcatcaattactgctcacgagaggaatctgctcttgcagagataaacatacaagctagggtagatggagcaaagcctctgcgcggcatgttggatgagtggtggaatcatataactgtcgaattcagtcccctaccagccatggcccctaaacaaccagcggcatttagacccatatggattcggacgccgtcatttggtaagttgagatcttgataaacccttgacatccatgttgtttatgttccacaacgggtcaatgtcgaatcgctatcaatttcgctgactatatgaagctgtcgccgttcaattacattgtgtggcccatatcctactttactcacacgagccttgcattggaggtttggctggttatctagagcggcaaacaagaattcggcaatgcgtcgaaatcatatgcggcatcgccatgacactaaacgatggcgcttctggcataatctcatcccaatgcatatttatcggtacgttgcgcctctttttgaaacccttgtatactcacaccgtcagctaggatgtttacgcagggaagccactcccgcgaatgcgtgctagatctcctagagtcttgtcgacgatggactggctggcaagtccactctttcggagatgaattaaaacagatatggaaatcacacgaatcttctaagcctaacgggaccccagcgtacgcgagcttattgaatcgtcattgatcattgctgccactattgagctatttatgctctgcccacggaaccgatgatctccatcca

SEQ ID NO: 792 - DNA, 2108 bp, Emericella nidulans
atataagacgggcctcttcggcttacatcagggttcggcgtcgactcggtttgaatgaagatagttcgtttgccagttggaggctgcccgttgactcggccgtgagctgcagacagctggtgcggtcgcaacgtcggcctatgcgggtttctgaagcggtgattgttggtaagcgtgccgagttgtgaatacttctaattgacccaaaggcaaagggtctaattgtccgaggggaagcctcagcaaagttcaatatctgtgctgccaaacggttgctgaggattgtccgcttgaccatatttgcagatgttgagctagaagccattttcgcgatcaagaatacccaagagatatgatgtgttgtgctgcgttgaaagtatcgcctccggataagtttttggatcatggctggcaagggactctgacgcaatgtaatcacgtgacttggagctgacaaatcatcttgcacccaatcatagcgagcatgttttgatcagatgaaccgtttcgtcaatacaccttaatacacctctgaatccataggactccatggacagagagttggataatgctgctagcaggccataaaaaacgggcatgcccgcaaggcacatgtaaagcgcgtcttgcaatatgcatcaagaagcttaatctgcgagctttttagcaactgagcacattttgagctgataatctcctctgctgagcatccgatacaagccaaaccatacctttcaatcaagaagcagttacgaggcctgagtgtggtaaagtcacaagtacaccctggcaccacttcaatttgccagcaatcgtttcgtcgagaaaaaattgcacacattaaatcaacggtgccagctatacccaagtgtcttcatatttggttaaatgaataataggatcgagcggcaaatttccccagcacaatgtcgagcaagtgctccataagctgtcggtatcaacattcaacgtctccgtaacccggttcgtccggtccactgtctgctcattggtggaactataattgattgggattggaaaatctctagctcgtctgtcaaggacaacgggtaattcgccaatgcgcggataaagcagtatcgaagtatcccaatgaatcaggtggaattctgcgcctaccaacagttgaagggttgagcctcctcagaatcaactcagtcctgagggtgtctcggaaacatccataaggcatgctgagactttcagatggatccagtttctgctgcataaagctacaggcttggtgcgagtcctgaaaacttcatgaaggatacttaagctaacatcccattctggcacggtttctcagagcttcccgataagtgagaatataatcattgaattgttccatatcacgaagcaatttactacgatgaactcatcaaaggatcagacttatccgtatcgcgtgagtcgctagtctcccatgcctaggagttgtataggtaggggacgttcgcttctcatatagtcacggagctaatcaagaagtatatattgagaagttctggttgtgatgacgtggaacgccggactgaccgtcacataacacagttgacgatgaaacaacttcgcggtgttctttctccttgagcagatgttcgcgtcaatattgcgagacagcttcggacgtgtgctatccatgccatgaaccccggcaaatcaatcaagcaattagggaaaatttagacacaaaagccaggcaataaataagaccaaatcatattttgtataattttagtcaagatcggaacgctattactgcaggagcataatcaaaggatacactcttatccaatatgtctacatgccgaaatattcagactgattatggtatctttggtgctaataaacgcttatttgagaatatgtttgtgatagctgtgctgtggcgtactggacccatgccaccaggcacgaaatacatgcggcgtgcagtgtctcgcacgtgactccataccgtatttgatatctgcagttactgtgccgtgtattatcaccactgcgttccactactagaggacttggaacggacagggcgacggtcacttaactgacaatactcagccataatgacaagtacattg

SEQ ID NO: 793 - DNA, 2872 bp, Emericella nidulans
tccgctgcgaggtcccaactgcgaggaatttggtccccgattcccacctttatcagacgcgtatgatcttgatttgcgtcgtcaggtacatgaagcctggagaaaatacctggacccttgcagtaaacgaaggttacacgagggcgtgtatgccttcgtttgtggaccgaggtaagcagatatgccccaatggctgctgggggagtttggtatgacaaggccacagttacgaaacgagggcagagtgccgattgctccgccagctcggagcggatcttgttggaatgtccacagtccccgagattgtggttgcaaggcactgcggcttgcgaatcatagcattcagtttggtgacaaataatgctgtgctttcacctgttccccgtggggatgatcatctcatccagggaagggatgtgaaagagttagatgccatcctgcaagagggtaaagccaaccacgaagaggtgctcgaagctggccgggaggcagcccaggacatgcaggtaagtgctagtgcgttctcttttcccatgttgagaattgacaccttgttagaagttggttgtgcatgtcatatccaagattttctagtgtcacaactcatgacactaccacagcaggagcggaggggataaaccgattcctaagatccggccgtccgtggaggtacttctctttggagtttggacagcttggttgttgaatatatcattgtcgattcttcctgccttttcttttggccactaaactcttgtagaaagccgtcttcccacttcgtttcttctgctgcacatcattgtacctggtttcaaagcgcctggtctctttctccaaagccaaagcctcatcaacaaacgtctttttgcgatctcgcttggggatacgaccactaaagaattctgtcggaccttcaatgatagttcccacttgggagtactttggaggttgcgccttgccgctttcctttttgtaatgtcgtttagggtctaatatggaacgcatccgtagaagttgcaagtctctttttagatcaggcgtcagttcggtttttggaagattgaaccattcactgccggctgtcggcttatcctaaaacgtacgatcatcagcatatcgctagttggagactgaggggaaaaaaggaacgtggacgaaataatgatgctcagagtaactatgaaacagtgtactctcatgataacagcgcagcccaatacgggctgtagaaactgcatcaagcgcttgcgcgatgggttggttttcctcatagcaatcaacaatgataagaagggatggtgacgctgtaaacaagaaagctacctttttagaggtcttcggcactatcttttcattggcagatgactgagtgcagttactgactaatgggtcaattatccttgctgtatcgacaactgcaacatcattgtgttgtcgaacataaggttttagggaggatccagaggagaacttcggaatgctagaagatattagcactcacccatgagagccgattttggtaatacatacttgggaagtacctgtccagattgacgaagtgcgacggaatcattggcggtcctgaccgtgtcgttgcgaagccgtttctctgcctcagcgagaagatgctggatattgtcatcagttaattcagtatggtcctgtgactgcacatttgaaagctcaggcaaaatatccatagccaagtacggatgggtgtttagcacaaagaagaaaataaaaagaaagaagtgaactaggaggagcttagcgatttatagaggagcaaaaaagcgcgcagactgcgatgcgagaaatttctgtttgtggggcgagcttgggcagagctcgtgatgaacagcttgatttctccaaaattgggctgtataattagtaatagtttatatgtagatgattatgtgcataccggtggaccaaatgctgttaaagtatcggtaccatatgagctcacgcaacagagaaatttctttcttgcatagtgacatgcaaactcctgaaacaattactacttgtaaatatatggtctgtaatccacggcgttgactagtgaagatttgttccagccgactcggtgcggaggccaaacgtcacttttgaggccaactcgttcttggcgcgctctgtgacgctgactcgatgcttcccaggcttctgactacttcaaaaatagatatcttgtcttctcagatcctgcttgtattgcgtggtataactcagtcagtcctgtatcgcgcattgataacgaggcttctctccacggatcgtcatccaccgcgtggttattactgtgtcgcgtctctttgagtcctgactcgaatcctcaatccttaaggaccatcttgcaagtccccacatcacgatcgatatcatatattctagtcagaagaagcactttgagaacgatggagcaagcccagcagacttctggacagcagcaggggaggcagcagcccgtgtacgacacgagacaaggtggacactatggtaactatcccttccccggagcctcgcgcagctatgaattaaatggcaaccagactgacacggttataggtgccagcgccgcggtatatccccttgaataaattgatattacctcgtaaactgacccggcgccatctatagctggccgcacaaggattcgccccggttgctgagctgtatactggtacctgggcaaatgtgcgtacactaaacactaatctctttcttcaacagcgctaactgagcgttttcctaggtcaaccagggcttgcagggaacagcccgtgacataaagacgacgtattggcaacacgtaatcaatcacctcgaatccgataaccatgatataaaatccaccaactccgcc

SEQ ID NO: 794 - DNA, 2046 bp, Emericella nidulans
gtccaggccatgtcacagtgtcaggacacatcaagtgcacaggttctatctagagcttaaataatgtgtaagtataccattaacgaccaggccatgactcctcaccttggcctccaattcctcatataggatcatccgacagcaccgtcctctcgatcgacgcttaccttactggtaaccgataactcaggccaatatcaacaagtcatgtgcccacaaacccaagcaaccagccaaattgataagggtgaatgcccacgccaacctgaatccggctattcacggaattactcaaacccggcagagacgggataacaccaaccagaaacgcaacaacagcgcgccaatttaccagccacgcgttgaaccggtagatcggcgtgtcgggctgatacaaagcaacggtatcatattttcggttcttaatcagccaaaaatcccacagcatgatggcggcaatgggcccgaggaaaatggcatatgcagacatgaagttcaggaaattgctggcactctccaaaatcttccaagggaccagagcccacgatataacaccgcatataatctggccgcgacgcagatcaacatatgtggggaatagagccatgaggtcgttcgcagcggaaatcgagttcgcgctgatgttcacgcctagagatgcgagacgaaggagaacgcgccgaagaagcgcgccgcacgcgagtcccagtgggatatcagctcgattggatcccaggggatggagggcgtattgtaccgcgtccatccagcagaggaggcggcgatgccgatgaatgagatgaaggtgaagatcacagggagaagagggatgtacaggagctgccattttgcggagacccgcgagtaacgggaaaagtcgctctgtagatatagatattagtttcaggccatcactgtagggttggggtaagaggctaagggtcgagatacagtacctggttaacactaagcgtggcataattccccagcacactcgtcatactcgcgagccagacccacgagtactgacttccagacacagtagccctctgctcaaagagcgcgcccttcccctctgccacgaacgcccagatcagtatggcaatccaagccgcagggacaagcacgctcttggtggcgaacagccagcgcactttattcgggtggatgcagaggaacggcatctgcacgatccagaagatcatgtacgcgatcatcgtatttgtctcgattccctggtcctgagggatggtattcttcatgctaaggaacgagggccagatagcgctgatcatggccttgacggcgtttgcaccgttgacattctggatcgcaaaccagaaaatggccaggatcacgcgtgagatgattgcaatgtaggagccccagaaaccccatgaagcgcgcgcgattacggggaaggggatatggtagatggaaccgacggcgccgttggctgcgatgacgaaggagatgatgaagaaagagagggcgacgatgcccgagggattcgcgccacgaaaggcctactgcaataatgctggaggcgaattgccaggtcgcagcgttgaaggcgtcagagatccagtatgctattccatcaatcagttcttgctacattgcaagtatactgggaggtgaaggggcagtggtgggtacagatgaaactgagcgggccccaaactcgaccggcgcggggaacggggtcaagattgagatttgttcagcgtgcgttgccagatgcgaaagcggtccggtactgcttaacgcggaggagtaagcgaccgaaactcattttgggttttttttgtttaatggccagttacaggcaaatgttatttgcaggtggtatttatggtaattttttcataggcttactttttttgtttttttttaatgtattatggtgggtcttctttttcggttcttttattcatttttgtcctattgtcttgattctttttgttatctgtcttggattactgtttatttttttaatactttatgataaggttatttttttctaaattctattattattgtcta

SEQ ID NO: 795 - DNA, 2667 bp, Emericella nidulans
ccctttccataacactcgatactgcgcttgctgtagatcaccgagacggttgatccaatgcccatgatgagtagcagagcgcccagcgtacttgtcgatatcagcgccaacttccagtacttgacaaaggcgatcacaaacgcagtcacgaaactggcgacacccgtcagcacgaggctggctttctccgagattccgtcttggatgaggtgcatatcgcccgagatccgggtcgtgatctctcctgcgcccagggagtcgaagaaggcgatgttctgctgcaggatggcctgcaggtagcggactcgaatcttctgggtaatggagttccccgtatgcacaaaggcaaacgtcgcaaagccgatggtcaagaattcgccgatacccaagtacagaaagtagaagacattcttggtcagcgtatcgtaaaactcatcataaggcatcgcatagctcgcgacatcacggaaagtggacgtgatgtttccgaaaaacaccttcaccaatcagcacaatcctccacgccgagggaccatttgagtaactgcagaaagaaaggagggacgtacagtaaaaagcggcaacgctgctcccccgccaactgcacagacagctcctagcacaagcaggacaagatcccacccagttgcgtagccgtagattctaaagtacccgaccttgggtgtgggcatggcaacctgcgcctcaagaacctgcttttgcacgtctgaaagcaacagcatcgactggcggttcaggcgcatcggtcccgaatccgtgagaatctcctcgcgcgagtcggcgcccggccattcggagagcataaagagagagcggcgcgtcatgcgcattgacatgggcattgtcggctcgagaggaatctcctcttggggatcatgccaagggcccttgttcatgctcaagctcatacctctgctggcgcgagagcgccagcgggcgcccgcttgagcgctggagcggtgctggcggtccggccgcatggtgggttgaacgagagtggacggataggtagacaaacgagtggtgtgcagctggcttactagcttgcaatctgaataaacagaataactgaagactgggcaagactattctcatagcatccccatgctgagctcaaggacccgcggttggaacgaccggatggactctgacgtgatactaggattggagaaagagcagagacagcttgaccgtgatagacaagaccactgacagcaccaaaaaatgataataaaaaaaaactaaaaaaatactgaaaaatataaaaacaaagataacacaaagacggttgaccacgaccaagcgaaaccggagaagagcagagaacagagtgaggaaccccttggatagaatcctgagagtatcagtatggcaccacaaccagaaccgcaagactcagcagaaacacctcgttcagatccagacaccgacaacacagccgaaacacgcccgtgacaatgcccaatgccgttatcttgactagccttacccgtccgaccgtgtaggagaggtcatgtgtcaattcctagctaagcttcgggcgcatgaaacgcgacgagactagactagcacccagacctggggtagatcacagccataatcacagatcacagaccataatttaccgtcatagtggaaggatctgaatcgagttccggatcgggtcatttccccgtcgccggccctcacgttcgcagcccctcatacgcagtttccgccgaacgggatacagatacatcaaccgttggagatgatgcagtgatgaaacaccggagggtcctgaatcagggcacggcgatcacggatcagatcagatcccgctgaccaggctcggcagttgggaaattgcctaggctgcgggtaatatacaggtcggccaacgtcacgcacagggcagcgtggggcgtcggggcgtgtttcagggcatggtttagcattggagccccctgatctcggggctcaactgctcttaactgtcacgctagctcagtagcggctgttgatagtgggccggcgacttgtcggggcatcttcctctcccatacattctgggcccggtcgacgatcggtgtctgaggcctgtacatgcagttcgaacaggcaagcaatgcgagatgtaaacagtggctgcgctaattagagcttgaaactagcatctcaggcgaaaccataatgtatatactatagagtctatataccctgtatactctaaacctaaatccctgctctgtcgacctcgacttcacaagatcgacagcggccgcaagggagcttttgcaatgaagttcttggcgataaattgatgctcggtaatcttattgccccggactgccagtcctaagcctgcccagtctaaagcttgtcgcaccgatggcctgctagcggccgactagactggccttgaccatgtgaatgccacttgcgtagatggccgagtcgtttctgactaggtatcatgtccgtttcactgtcatccatttctatagtttgtatccgtatgaaaaatgctgtggttggccaattttccaggcattcaggcctgggacaatggtgatccgccttggaccaactcaagttagaatgtcgccatcgcttcgggacttgtcagttactgtcacatttagcatatttgataggtctgtgatt

SEQ ID NO: 796 - DNA, 3156 bp, Emericella nidulans
agtcttttagctctggtgagccatatactgaagcgacactggccacagtgctcgtgctcactactttcgaggtatagtgcattgtcgttgatgcatatcctagcttactcccttgtgtatttgttttctaatgtatgctaaccttacaacatccattcaggaatttattggtgattgggtcaatctggttgatcatcatcaggccgcccatgtcctgattcgcgaactcttgtcgcctgagtcagcttgttcagatgatgttcatagacatatcttcgagtggtatgcacggttcgatatagtcgccggtattgtctccgggaatgaaatggttctagggcgagattggtacatcgcgcgagaagagtacgacacaaaggaagcagcgaggaacccggacgacatcgaaaagcaaatgattctgctatcttcaattagtcgtcgctttggtctagagctggcgtcgttatacgctaagttgtcccgcggaatgatcgaattcagtgattttttgactgagaatgacaaactcggtcaaagtcttgagcaaatcaaggacattttaagccgatttgctacacaatatgtcgtcgaaaccttcccggatcagaaacccttgacaaaagatgaccttgttaatccctacgaacctgggcgtttacactacggcccactgtgggaggccaacttttactggattgactattactcaatgaaagccatgttcaagttccagttcctcatggccacgcaacagggatcgatgaatgaattgctggctttgtcatacgaacaggtccgtttgattgagacgattgaacgctggcctgacaaggaaaagggctatatgttcgcattcaagaacagcgccacaatggcaagcatgtttctcccgcgagatgatcggcatctcaactggagcagaggcatctttgctctcatggagcgaaatgggtgagttagggtattactaaaagtacttgcctcagaactgcaagctaacgggtgggctttagctacgtgattgcccctaaataccgagctgttcttgccgccctctggcagctaccggaaattcatcattggtggcttccggacggcagagattatccgtcaatcatccgtgaggtgcgcgaaatgaccgaggagcgaacaactaaccctcgagataacttccgggagagcgtgcgcgatatgaaagccgtatttgggaaactcaaccttgatgaaactgagagcgaagctagcccggcttctgtaagcacggatgtcccgcagtcaacgggttcaaatcagtagcctggcatgatcgcatccggtgcaacagtcgtctcctaatgagacggactgcctgtgccacgggccttctggcctcttcggcctctcgtggctataataatgtccaattctcctgagggagattatcaagacgttaaaaactacctgaatcgcatgctggacttttcctacgttcatacttcctctgatttaacgcattatacccacaacgttgttactattatacacataatcttgcagtactagacggacgcctctggtgtcattggatatcatattctgtgcagtattgcctctcaattctatagaacagacctttcgggctcgtctcactcagaccctcgatagggaacttccctcgccaaaacaaccgtctccaaacccccggctaactctcccatttccccaccatcatcctgatcaatttccccccaaggcaacgcttcaacatcaacctcccatcccagcaaacatctcaatactacacccgccccagccttactcataaccgagttcatctccttacatcgctcatcgcacacacactccaggcagcccttcggtgtaacgcaggcacaagcctctatccgcgcgacagcacgcttcaggagcgagtcaatgaactcgaatgcctttcgtgcaatgccggaaccgcatgagcctcccttcgcatcgtaaaatgtcaatcgtgcgggtcgttggcggtgtgggggcttcagcacggggatattgtcttggtcaccaacgccaccacccctcctcacaactttctgcaaatccttgcccaattccttcttcgcaaccttacactccgtcctaacatcacccggactcgagatgacaaaactcggcaggagagataagattgcatgttcagctgcatgaatcgcagcagcaatattcaggcgtctggattcgagtatatcaagcgcaaccttgggaacatcgagccacatccctttcgtcatgattgtgatgggcgggttgtcaacggcaacagcgtcaaggacgcgcccgcgtttgtcaatcttgaagaagccgtagacgatggcgtggatgcgaatggggccgaagaaagcgcgaatcgccctttctttttctcgttccagtgagcgggtgcttgaggagtctgttatttttgtggctttggttggggaggatgaggtaatgagacgcatgtgctctgtctcaacagggtcgatgtctgtgaagtcgcgctgcatagtattccaatcgaccgtgacgcagacaacacgagcaaagaagcggtcagggtttagttctttgacgagatatgtttggccttggtgaaggaagatgccaccttcgtaaagggtgaagaaagcgcgggaggcttcaacctcttcgagaaccacattccgagcgttcgttgtgtcaatgacggcaaagtgctggtcttctgtgtcgcgaatggggacgcaacgtgacggctggggtctgaacctctcatgacaatggtaaaaccccattgcatcacggacaaggcgggtggatgcgaattcagatagctggggaccaaagtagatctgatcatcgtcgggcttgatggggagttcaaaggcagcgcattgaacatggccttctaagacaagttcgttggtgagatcaacctgcagttcgcagttcggtttggagaagagctcttcaggatttcgcatgtagaattggtctgtgggatagcgctcgccaataagaatggaaaggctgtccttgtttctgcgtccagcgcggccgctctgctggcgcaaatttgaaatcgagtacggaaagccaagtgtaatgaccgcatccagggagccgatgtaacgcctagttcgagggcattggttgcacgat

SEQ ID NO: 797 - DNA, 3065 bp, Emericella nidulans
ctcctatgctatggagtcgattagtcacagatgtctcgtttcacaacgtgacgtttttgcacacatgagacctgcagctgccatgttaaaacacagaatgttccggccttgagcgacagagacgcgtgttctcgcatctttcattacctgatttccagaagcgattagaccatagtggacctgaggctcttctgtcgtgcgttcagggcgatccactagctcgctcgtatcacaagccgagcagtcggacttgttcccaacgtggtcgtaagttgattggaagagctgatcttttgatggtcgcggaaactgtgtctgcacttcctctttatgcaggctgctggccatgatattgcaaagtgagattttgccgagcatataatcactctccatctgggcgatcgtcttgagcagtatcggcggaggcttgttgagcgatcctgtatggtaaaagtgtccattgcccaccgttttgccataatcatactgaatgacgccgccgaaggtatcagatggcttgctgaccacaatatcgcccagacgtatatcaggttttcctaatgggaccccgccgccgatgccgaccgtcaaggcgaactggatattcgggtaggtagacttcaagtatgccaccgcggcagtagccgaagttgtcccatagacacccgcagggagacagaccaccactatattatggccgccaatactcccaagagtgtagacattgagatccgattttggttgatgaagtcgaggatgaacttcgtccaggaatatctttgccgccgccaactctatcggtaaggcgcatatccacgcaatagtgtaggaatcgtgtgtgaacgtcatatcgccagtcatgcgccagtgtaatatgtttcattcggttccttttcacctgtccaactccatcagtaactcgaagacgaaaacacaagataggaagggtaatcggtatttagacgaagaggcatcggggaggtgaaggtggaaaaacagccgccgcgaggctgacaccgctcaccagtgatcattggtccatgtaatgtacggaggtatattgtaagcaacagaatgtaagcaacaaactcagtcgcacaaagcaaatccatttccattgcgattgatatattaatgatgttgcaccgaatatgggaggacaaaggtccctttctgctcttgggtacaaccttcacggttattctatatggttaaacctctaaagaatgagaaccgccaaagtgagcctgccgctagcgactgataagaggacacttgatctgctcttcacagtgaagctggatgcagtaatccactgattgagccagatagtattcttttctgtccgtatgatttaacgtcaaggtcgagttcatgtcggaggcaatatcggcttagaaatgttttgtttgtcattagcgccagcatatatattccgctgggaagcgaacagcgcaccccagtcattgtaaccgggaataagcaattaagacatcgtcttgcctgcgaaaatataacgactctacctggagtccactgaaaaatacgcttcgttatcattgacctctattgtacattatgtgcgagccgactagtccaggaacttgcgaactgcgcctccgacgttcttgacatcaaggaggaatgtgtcatgaccaaagagagacacgtcgttgcccagctcaatatgctccacggtcttgttccctgcttgaatcagagtctccgcgatctcgcgctgttgccacgccgggaagagaatgtcgcttgcgactccgattaccagcacctgatggtctttcagcggcgcaagcccggcaacaagatcgttcggagccgacccggtctctgaagcggaagcagactgctcggcggatgtcgaggcagatggctgctcctggtatggctgttcaggaagtgtaaggctgcacgacgcatcattgacagtgtttgttccgctgctaatcttcgcctgggcctccgccctctgcttcttcgtcgcgagttgctgagtcaaccctaggtcaaacagatccatcgccttggagatgtagagcaggctgttggcatcgtattccaagcagaatttttcaccggcgtggtcgagatacgtctcgatgagaaagtcggggcaaagcgcaggctgtttgctcggatcagcccgtttccgaccaaagcgtttctcccattctggtccgctgcggtacgtgacggtggcaatctcgcgagcgagcttcatgcctgaatgaggtgggatcgaatcgtagtagaaacctcgagcccaatttggatccatcatcaacacctgccgctgggtatggcgcatagcaatgctgtacggatggcttcgagcacaaccgctaatcgacacaatcttgcccactcgctctgggaacagaacaccggctgcaagactctgcataccacccatgctggagccgacggacgcgtagagtttccgaaccccaagatggtccaaaaggcggaactgcgctcgcaccatatcttcaattgtcaggatgggaaaccgcgtagcatacttcttcccatccgacgggtccaccgtcgagggccccgtgctaccgtagcaccctccaaggacattggtgcagatcacaaagtacttgtccgtatctagcgtcttcccaggacctatgaatttctcccaccagccgggcttcgggttcgcttcggtgctgtgcgcatggctagatgcagacagaccggtatgcagcagaatgacattatccttcttctcgttcagctggccccatgtctcatatgcgatatcaaattctggaagcaaaccgccccaatcaaggagcagcggttcgtcggaatggaatcgttcgtggtggccggcggtataggagggttcagggcctgaaccaagagatcgcgcggaaagaagagcggacttggcctcctgggcgtcgaggcaagggaaggacagcgcgggattcgaggagtcgcgtggggatggagcgggggactgagaccccgttgatcgtaatgatcgagaatggttaaacgaccggctgttggacggacaggcgatggcggct

SEQ ID NO: 798 - DNA, 2432 bp, Emericella nidulans
caagctcgtggatgcttgtatgaagaaggacgtgggggctcagaagcgcttggcgaaaaagaagcaaaagtgaactgtgaagtgaatgtacatagactagctaggggatctgatacccgtgaccggagctgtatactgaaacgcacacttttcgatgattaagacccatagccacgggagcgggagcgggtacctacccaagtaccctacgtatgactaagagtgggaacgcaactatcatggatcgactgacagggctgctttcttgactaccatttgtcttacggggttggggctggattttcgcatttgctcacgctctctttgccttctctcgttacatctgtggcttgtcgtacatatgttaccctcaataaattattattagtccatgttcatattgacgcctttcttttcgtctagtcaggttttttaccttcattttctgaactatatcccagccggctgcgacaactctttgaggggaggcttcgattacctccaaaaaggagggacaggctttactctccaagtaaaaaagcctcagattcgccgagtagttcaaacgcgccctgctgccccttctccctccgcaaacaaggcgacgcctcgaactgttccctccgggcctcaaaagaaaactccagagacagccagtcggtcagttacgggagaaagaggcttttcaccttcaaagcgacggctgacaccattacgcaaccgtaagcgcccgactcctgaacagcggctgtccagtgacgatgacgatgacggaagcgatacggatacttctctcgaactacgtaaacgtgcgagaactggcgaaagtgcagaaccggattatgggagacggctgcgctcactgaaggcattctctggcgacgagacgaggtcacttcccattgtacacgcttcggagatcacgtctgtgcagaagccgggaaagttcaagccagctttcgagaatatgaaccagacttccgaaatatttcttcaatatcccagtgcgacgccaaaagaaaggtatgcctataagttggacagaggcgtctagttggctaatatcatttatcgggttagatatgaagctgtggttccacgcgacgacgacgaatttaagcccctcgacgatattgttcaggttatcgaaacagtaactcaagcgtatataccagaagacgaactggacgaattcaataatgagtctacgggaatcaaacgaagattacggcgagcgctggcgcggggttctgagcgtgagtttcgcgagtcggtgaaagactacaatgttgcgattgagcggctccgacgaagcggtagtatcgcgaaaaaattggacgccacctatcggctcagtcttccgcacgtggaacgcatcctaactcagatctactcccgaacagtatccccgcgggttgattctcttcggcagtacgagaacggaacggacaatgtctacggagaacttctccctcgatttattagcacgattttcaaggaaaccgggctaaagtcaaaccatgtttttgttgatctcggctcgggtgttggtaatgtggtcctgcaagcagctttggagattggctgtgagagctggggttgtgaaatgatgcagaacgcatgcgatctcgcggacttcaacaagcggaattcaaggcacgttgtcggttatggggtatcgctccaggcaaaacacatcttgtacgaggcgattttctcaaggaacagagtatcatcgacgtactaaaaagagccgacgtcgttttaataaacaaccaagcgtttaccccccaactcaataacgagctcatcaaccattttttggatatgaaagagggatgccagatcgtctctctcaaatctttcgtccctgtcggtcataagattcagtcacggaatctcaactcacctatcaaccttctgacagtgaaacagaggcagtattggtctaacagcgtcagttggacagacgttggaggctcttatttcatcgcgaccaaagacagttctcgactcaaggctttttcggaaagcctggcttaacaaactatttttcgcaatgacgcttcaagaacgttatcctggacaaatttggtacacttgtataaacccttttttttttcgttatacagacttttggctggagggacatacttttggactacataaacaagataccactactaaatcgaatataccatagacagcgctcatcgcccactgtgatttatgatatatgaccccgtttattgcaccttgccacatgcaagcatggtagaagcataagtagcgcagagtttctcgtctcgttttttagaaaaaaaaaaccatctatccagttagatatctttctagtgtggaggtgaaatatcgagaagattagaaagcgcgtgtccagaagttagtagatagaagtcgggtatcatgagaat

SEQ ID NO: 799 - DNA, 1910 bp, Emericella nidulans
ttgggttggatttcgtgtggtctgaattgcatgatttaagcttagatgaggtgctctcagatgaggtgctcgcagatcatcaggtttaatccaggtcgaatttcgacttctggcaatgggggtagatgacaaacagcctccagctaacctgtcgtatgtaactgcgtctgctgattctgaattctcaggagaagtgtagagtcgctttgtagtgtgcctgattgacataccgggcattcctggtaaatttgaagggagtctgttggagaagactgattccaacgagcatgaagtcgatctggcagtcgtggctggatagatgttgtaagagagctgaaagatagaacaaacggcaaacccatgtttcagctgtttcagctctggactagccctgactcgcagccgtcaaatgctttgtactgagaggaaggctgggctaaggcaagggacatccataaacccttgtccatcattgtgctggatctacactcaatgaacggaaacccaagaactagcggaatatgctggcgagcacatatatacccataaaatatctatacctttatatgtaccgttgtacagaaatgaataatagacagagagcataataacgggcattatagttcataagccttctcaaaccccatactccatactccgtgagccccttgcaccggatgcggccctttcagctgatattgcttcctattctccgtgtacgacgcagcacctacgtgctgcatctgagagggtacaattgccagccggtctagaccatttgcatccgccatgcgctcgatcgcactatccaccgcaagaggccgtgcataccgcgcttgccctaagtaatcaataagcgcggggacgttctcacggggaaacataagtgcctgggagcaacatccatgagaattcataagatgtatacccggtttcaagggtagcattgtaacgcggcccgcaaggaagtacagaataataagcaagggaatgcaaccgaaacagaccacaccgataaaggaattgttcagtattccttgcaatggtcgtatcgagcgacgagtctggatgcatatgacagcgactgtggcgataatcccgacgctacaagccgtataaaggagccagttctcgctgttccaccccagaaacttctccgtgtagaagagccgcacgtatagccagttcttgattaggcctctttcacgccacgactggatagttttgacactctgcatggtgtggttgtaccagttacgctgtgcgaccacgtcgtcctccagcatcattatccatggcgcctgggtatcttcgtagcaggatttcagcgagaggtggtagtcgatgagagacttgtgcttgacgtccttcttctcctcgagccgacgaagcgtagaaaatttgacgtcgaattggtcgtaggtcaggacgcggtcaacgacattgggcagccatggctggttgtagtccgggtgttcggtcggggaagttaatgcgaagaggacgtggacggtgatggtgtcgcgctctttctcggacagattatcgaggatggaagcaacggtcgtagagattttctgctcaagcggtcgcttcactgtgacgactccgacgcagatcgtggcatcgtcggcggaagtagtgaagtttcttgcgggatgggtagggtcattgaacgactggttgtacggttggagatactctagcgactcatccagtcgttttagactatactccggtcggtagccttcctctggatcgaagaaaaacgagcctggatcgcgagctgaacgaaatttgtagacgatcagaaggaataggtagaagacggcaaagccgacgaggaagagcttctgcttcctggtgaagaaaatcatcatttggccgtgagcatcttgatgagcatgata

SEQ ID NO: 800 - DNA, 1199 bp, Emericella nidulans
agtctttcgaatactgtgacaacaaaggtaagcagctcatgctcctcgtgtagaacaaaagtcactgccagatatccaatctgcttctcggaatacttgttggaggagatcaagttgacagcctccagatgaccaaaatcgacatcgtacccctgaatgtagacatagagcaatttgcacacatatttcttcttctgatacccgtcgagatttcctgacttgaacttttgccggatattcgccaattctttatttactcgcttctcctccagttcgcgcgctcttgcatttcgcaaatcagcgatgaactgaactagtccgcgcatagaagacatgtttgctgggaggtctcgtcgactcgatgaaataaatgagcggcggggtctgggtgcggtaaggagcgaacgagttatgcgagactcggaaagccgtaatgtaaggtgaactgaggggatacagttgtccttgcgatcttctgtaggtgctcacaccgtggcagggtgtacactcagtatgtgtatatcatagaaccatatcctgccgcccgctttatcggttcgtgtctgacgatgattctaggattctatgccgcatcgatcatggcgcaagttaaggaaagcgtgtcttcgacgcagctcaggagctagcgcagcgcaaaacagggatagtcaacgtcggtgtatacctgggtagctccaatatcaagccaggcactggataacagtgattggaaagatgcactgcgatcacagttagcgaaatgcgagatccgaaaagttaagcatctccctacagggcgggctacagctggtaaggagcggcccccgtttctggatgctaagccactcccagggtagatccggtggagatccggaacattgttgatacgatgcggcggtgcatctacatagctactgcaccagctgtgcaaagaaagattcccgcgcaagatattgttttcctctgataataagtttcatctaagtccttattttacatctgaatgcatgtgtcctccaagtccatagatcccaaaacgccaagccgcagccatgcataaatagaagtcggcaaatggtttcaactacttgcgtcagtacgttaatagtatgatcattcgtattatttcctgcttcgtaagaaagccgcgacctgctcatgtcgtgtcacaaagaacattcttttgcgatctgacttcc

SEQ ID NO: 801 - DNA, 1180 bp, Emericella nidulans
ggttcgctaattgtcttccctgaggctggttcaacaaatcggtagtactgggctctggtgagtgtttggtagtatcgcatatatatagtggatacacggagttcagattttggcgatggatagtcaacgaaggacgcaggacagattcatatgaaaactggaccctcggactccagcatccaccctagtccaataccataatctgcgttggggtttccagaccttcaccgacagccattttcatgttcgaagacgaagtaggatcttaggcgtagtatctatgccacatactttatgcacatgactggctgattaataaaagacgacaggacaggaatcggaaaaagtataccatggtttcatggcggtcacagatctcgttatccaccctattcgcggtgggccggtcaggcgacagatatcgcaagctagggtctttggccaccccatgagtcttagggggaacttgtggcatcctcagacgcaagacggattgtgacgtataagaaatttatagcgtccaagttgtcagctaaggtagaggcttcattcaagcttgaagaagtgttgttgtccataaaagctaccgacgcgtacttccagatgttaaatgatgtgtgcgatatcattcgcaaggtactttgtcctccaggggtagtagagccggcccgtcgtaataaaacctgcccagataggatactcggttggcgcaatgctaatattgatgatagcaccccagcgagacaagtattcccattctactcaactgttcaaagtgttggccaggccttgacatactctgcgcattacccgtaacgggccaacgcaaaacccgcaatgggtcgggtacggattcaaaccttgaacccgtgctgttttgagtaacccgtgggttgccaaacagaacaaacatactgtataagcctagaattgtgataagtcaggaggttcatgtagtaaatatagcctcatatagaagttttacgcaacatgggttcttggtgggtaacttacgggtacccatagcccgcacgggctggcgggttttggacggatcctgacccgtgggttcgggatttgatcttagacccgtcacaggcttttgtcatagtctagtgctggcaatgataaccagcagcctaacaaatctcacccgtacacggtgaagcttacccctagt

SEQ ID NO: 802 - DNA, 2470 bp, Emericella nidulans
ttcgcaaagacatgatgttccggccaagaaagcatctgcccactgagggattattccagagaagcccgtagcctagtgatgaaaccagaaagggaatgctcgcctgagagttacgatgggcgagttctagctgatgccccttgaggtcgaggaagggctgctggtactgtcccataccgaacagcatttcctccgtactgacgctctcgaatcgagctgtcagatggaagctctcgctgttcaggatgggtcgaaattctcgtgcctccacctcgatggcactgcacttgggatccttcacatccttccggttgcggacatactcctgcaatagaagctttcctttggagttctgtacttggattttcccagtctctgaaaggcttgcttgaatcttgccattctgtatcacgcccgtcccgttggactgaacgttgatgattgccgatgtcgaaggctggttgagcaacgcccaattctggtcagggatctgccgcgagcgagtggagcggactcgaatggcgtttggcccccatggctcaatccacagagtctctgcatcaaaggtgtagaccaacttgtcgtccaaaccttgaatcatagtgtgcggtggtgggatggtgcttgagaaattagggctgagttacgtaggctcacgatctatccacgctggaggagattcgagaattcaagaatcgaattaggcattccgcgatgcttaggctaattggcaaggtattactttcccactcccttgtttatgtattggaacggcaggaatttgttggagataccccaccggagccaccggcccagcagtttccctaagaacattcggaagaaatcagttcttaacggccgaatccaccgagggagtcatgcgaaagccgccaccggatgaaggcttgctaacctcccgatgggtttccggtggcgtactgtcacatcacgatctgctcaatatctccccgcttgatggaatctggagaaggctccagtaccccagatcagcccaccattatccacgttgctgggtatatacataaaagagtggatcctccactcatgacaatcagcctacggtgtaccaaatacggtcagccgtctcaagttttaagaatcaccttcacatcatggtctccgagcataacgatgggattgttcatcctacctccatagagaaggagcacgcccctctcgaagctccctctaaggatgacacatctcttgcccgccttgcggctcaacaagaacatcatttgggcttctgggaggcggtgcggtgctatccaaatgccgtcctgtggtcggtactcctctcgacttcgattattatggagggatatgatatcgttctgatccagtccttcttcgcccaaccgtcattccgagagaaatatggccaatacgacgctggcaccagtagtcatcagattaccgctccctggcagaatgggctcagcaacgctgtcagcgttggtaccattattggagcttttgccaatgggtattttgtccataaatttggctaccgtaaagtcctcctggcgtctcttgtcacgatctgcggctttatcttgatttccttctttacgcccaacttgcctgttcttttagttggccagtttctttgcggtataccgtggggtgtatttgctactatggcacctgcctatgcctcagaggtctgcccccttgcgctccgaggttatcttactgtctatgtcaacctgtgttgggcatttggccagctcatctctgcgggcgtgcaatcgggcttttctgagaaaactggtcaatggtcctaccgcatcccgttcgctatacagtgggcctggccctgcctactcttcccgatcctctggtttgcccccgagtcgccttggtactatgtccgcgtcggtaaccacgatctggctgaagcctctattaatcggctgggatcagcctcacaaagggcgcacagcaaggaaaccctcgcaatgatgatccatacagacgagattgagcgatcaattgatgaaggaacctcatatctcgactgctttcgtggcgtggacctccgccggaccgagattgcatgtatggcattcgcggcacagcccttctgcgggagtgcaatgggcggaacgccaacatatttcttcgtccaggctggccttccggagtctatatcctttcgcatgtcggttggtggcttaggtatcgcttcagtgggcacgatctttgcatggttcttgatgcgcgggtgtggacggcgcacgttgtatctatgggggctgggcttacttacgctggttctcctcgctgttggcttttgcagtgttgggagcaattcgaacgcgagcaattatgcccaggccgggctgatgctctgctggctaggcgtgtattactcgactgttgggcccatatgctatgctgttattacagaggtttcgaccacgccgctgaagaacaagagtgtatg

SEQ ID NO: 803 - DNA, 2691 bp, Emericella nidulans
tggttatctgcatccgttcagaatagcggcgtgtcataggtgagacagcgtccgtttgtgtgagtcggcagcgagatggtcaacgctcgtgcgggtaatattgtctcgaatctgctgaggtgtgacttatagattagacccgccatggtctgatctgagggttgcgttcaactcagaagatacactgttcgagtcgacctgtgagggtgacagtgcattggaggtctcattctcagtcccagtggattcatcaacccccgattgctcctccaagtgtttatcttgatctagatctgacatattagggctcgtggtaccatcgctgcgattgtcgctcgtcgaaaatcctatttctcgagacgtaggctgtcgatgcgaagagtcatcatgagacgtgggctgggagctcgattgctgaggtaggtggagagccttttggatggcgagttcagaaaagacagaatctgtaaccctgctcatgaaatctgtctctgcgatcgatgtgaaagcttaggggctgagagagtctgcatgagtggaaacttttaagacccaattgaagttcagatgagtaaggttaggtatacctctggaccttccgcatgtgaaagaccagtcatacggtaaccggccttcgggctccgatcacatgatagttattttactttaacggcatgatgttttttacgtagatttgatatctggcttgcttaatctgaacactacttgacaagcatgaatacatactcctatagatagacctaacgctggtggtcgattagacattagtgtttgtatgccgccgagaagtagctccgatgatttcattcggttgcgattcgtcccaccaccacaacgaattccaccaacacccaacagctgggaataatagtgcgcggcactttcagactcttatctgaggatggtagggatccagactaatggaaaaatgaatgtgattgattcggttctgactttcacatcattctcagtcgaagcaatacctttcatacggctctgcagacaatagtaagctaagctttgtataattttctgttgttcttcgctgaaatgcagtagctcatcccactgatatatttgctttggctgtgaccgaaaagcagattttgtcagcatcagggtccaatgctctccaggttcattcgacgaccaaccctgattttcccttagtccaaacccttgaagcccataaggccggatgccatcatgtggtgaccgatgcaaaaggatcaagggccgtcagtgttggctttgggggtgaggtcgtaatttgggagtctcatgaggggacgtggtctaagacaaaggatgttgtgcttgcggatatctgggccgttgccctctctgccgacggccagtacttagccggtaccacgcaggatggtcacgtcaaggtctgggacatgaacgcaaacgaggaagaaatacgtgatcacgaaacaaagggcagttttggaacctgcatagacttggtaggcattccggtctatcgtctgcgctattcaaatctgatcttctttgatagtcaccggacgggcgattcattgccagcggccatgagaatggcagcgtatacattttcagtacagaaacgggacgcatgccatttagtctatcaggtatgtcctacacttaacattcgtttcctcgggatcaaaacgcgcacgtattaaccgctcaataggtctggtaaaaccggtacggtccgttgccttttcccctggtgggaaattcctcgctgcggctggggactctagagtgattgtgctatacgatacaacctctggcgagcaggtggcaagccttaccggtcatgctgcatggattctatcactctcctggagcaatactggagaatatctcctaagcgggtgagtgtcttctctttatcccttgtgaccccgagctgatcaaatggtacaagatcattcgacggcaaagtcaaagtttggtcaattgatacgaggaactgtgttgcaacccattccgaaaccgaaagagccatttggagcgtgatatggttgcctaagatcggaaagtcagagggatttgctacggctggtgccaatagaagcatatctttctacagggaagccacaggaggttgaatcgctatgttgagcattaagccagcccttgtgcagttctaattacggtcacgacatcgcgtatcataaaccaatgctgagatctgcttaccttgttcttcaatatttacgtgctccatacttacacgagtctgcgttctatgtaatacatacgtattgaaagcccaaaagccttcttgctgctgggctgcactgggacatcctgacatccggcatgaatatctaaacatttcacgccattaaatgtctcaaccacgagatgcttgcggctgttatattctgaacgcagaaacatctgtagatacgcttagataagcgcaccggttgcgggcgggcggtagcttcgattgccttcttctggcgacttcagcgcacgttcacaccggattagtcgtagcattaacttatcattttcctgacaatgacgatggcggcagcggcggcggcgaatggacctggatggtattacatgacttgacctctactcaacctagctgatttatttcgctcctatctccctcgaattactctttacttcttggctaggtacacccgaccttgg

SEQ ID NO: 804 - DNA, 5336 bp, Emericella nidulans
  unsure (1)..(5336): unsure at all n locations
cacaacctgtaggcaatgatcgtctttgtcgacttcggcgacaagtcctggggtgttcgcgcctgtcaatcgtactttggcggcattgacccgtcaagaacactccacgtgggcgatcaattcttgtctgctggtgcgaatgatttcaaggtcagtgttctgtgacttctttttcgtctgggagaaggtgattaaatggtctgatacaggctcgtctggcttctaccactgcctggatcgctagtccggctgagacggtgcagttgttggatgagttggacacgatccagaaagttctagcgtgagagaacttacattttggcatgggttttattcggcgcctacttcggaagagattctgtaatcttcgcttgtgatctgactcggccatgtccgggttttggtttcggtttctttcagcgtcttgtcattcatttgatatggttaggtatttcttgttataatctgctgcggccgattcttccatttccactcgacgcagtttccttgtaatcaactgccgcggccgcttcctgccattaatggaattagctagagcctgttacggaccatgatctgtgcggtttagctcagatttaggtagaattgccaataggactcgattaacactataatccgtacttcctataatgggtataaagtcggtaaactggctgggtcttggaacactgctgagcactgctgagcgacccatatgtgcgttccgaaagatacttaagtctactttgcaagtcggaattaactgaatcttgtaaatcttcttgaagttttaaaaatccattcattcactgcatgttctcataagctggaattgagtcttatctactcttagaaacgaggcactagacgcaatatacacctcccaaacgctaaagccagcaaagagccgacatggactcatgacaagtgtgccggactcgaaggtcgcgtccggctctcatcctcataaccggtccacattgctttggcccccgcccgtcccgacaagatgttaactgtatcctgcaactgcaaccagaattcggccttgggacgccgtctcgcccagtccgtctcgaccttctcgagtccatgttcaccacccatgacggagaagaggacttgggagcccttgatgccaatgacggttgcagacatctcatcgttcgcgatttcgtcttttgatttacccgcgtagccctccaggtgcatcatacacttgattgccatgcgcagcgcgcgaatgcggtccatgggcgagggcttgcctccctgctggaagtggccgggaactgcggcacgggactcgaagcggccctttgcttcctccttgatcatatcagcaatgacctgtgtggtgtatgtggatgaggcagtctcattgcgcatgatgatctttccggcgcggttggcacccttgtcgcgggcaaagttctcgcggagaaaatcgatgtctcgggcgagcatcttgatgtcgattccttcttcagggatgtatacggcgactgcgccgacggccaaccctgctgttgtagcgatgtagcctgatttaccgccctgggtttcgatgacgaagacgcggcgacgggaggaggaggctgactggcgaattgcgtcgcagaagtcgatcagggcgttgaggcaggtgtcgctgccgagggagtactcagtgcccgggacgttgttggagattgtggcgggcaggacaaccatggggatcttgaaggcgtcgtatttgtcgcgagcttggcggagctggctcactgccgtgaaggcttcaaagccaccaacgacaaataaggcgtcgaacttgtgctctttgaagcacctggcaacctcgtcgtagtcttcagacgggagaccgcggtttgtgccgatgtcggaaccaccctcgtttacccacgcgtctgtttcttgccatttgacttcgcgcactgagctgatgggttgatctgcgtggtggcggatcaagccggggaaaccgttgtggatggcaatcggagtgtggccacgggtgagacagtatgtcacggcagctcgtgtagcttggttcatgcctccagccggggcaccgacgtggacaatggcaatgcgcattctctgctacgcattagagagaggctatgcttaacggtaagagactacgtaccttttcttgggtcaaggagagtttggggtgatcaggtgtggcagttttcagataagcaaagtggtactctttgaattctgagtcgcgcaacaacatcgccttctcaaattctctgtttttgatgtgagctgtaacctcctgcgtggccttgacagcgtccatcaacggggtgcgcatgatcttgttctcgcggatcgtgatcactggggaaggagagtccggcgtcatgtccaaaacagcacgaacggcctcaacaccttgcagggtcgatagcgatcgatcgtaggcgcaggcggctcctcctctttgggtgtgtccgagaattgttgtacgagtgtcaagtccgaggcgctcggtgagaatatctttaacgcgatcacttgtgatcttgttgaggtttcgatcttgcgctccttcggcgacgatgacaatggttctgcgcttgccacgttcccgacggttctgcgagatcgtcagttgactgagcctagtcaggatccaaaagttctcacctttgtgatgttcgcgcacatgatatcctcccagccatccttagggggcatctcaggaatgaaaagccagtcggcgcctgtgctaatggcagccatcagagcaagccaaccgcaatgccggcccataacttcgataacgaagcctcgctggtgggagaacgcagtgtcgaagacgtcatcaacagcatcgcagatccgagtcaacgaggagtagcagccaatagtggcatccgtaccggacatgtcgttgtcaattgagcccacgagaccgacaatgttcaagactctgtacggctcgacctgctctgccgtcaattctccattcttcaccagctcgtccaataaaccaggccattcagagcggaaaacatcggcaccagtcaaactaccgtcaccaccgcagacaaccaatgcgtcgattccgcgcaggaccatgtttttagcggcgcggagacggccagatctctcacgaaaagacatgcagcgagcggatccgatcaatgtacccccctgggagagccatccacgaacatattcccagtgtagctgtcggatcatgtccccgccttccaccagaccttcgtatccctcgtaaacggcgtaagctcgcagtcggagtgaatggccatgggaccaccgctcgtactgcaccgttcataccgggggcatctcctccagaggtgaggacaccaatgcggcgcagcttgggagggggaggttgagtagcgactgttggggccatcacgacggtgactgcgacaaatcgatctccaggacgaagagtggcagctcagtcgattgagctagaacgatgcagggcagcaacagattggataaatgggagagaagaagcagtgacgaaagagtgagttgatgggagacgatgtggtgcgtggtgggggttccggtgagaaaaagcgggctgcgggtaaggtacgtcacagaccagcttgaagctgatgataagcacacacgaattactgctcaatgatcttgttagcgctgtagtcaatcaaaaaatcaaatggcattgatgtcaattgctctcagtcctgaggtcagcccggactctttatgcctgggtaattgggtgattgatcaggatatcaagttgtacaatctgactgccagcgacctgagggggaagatctgctgatgtcaccgagtgggcccattccggctcaattgggttagcgtaatacaggagcacgtgccagccctctagggcagggcttcgagggcatgtgacgacttggtaggctgctattcgagatagtatggtatgcattctagcaaaattggctattagatggcatgagtatggcaagatgctcatcctcttccgtgtttgctattctgccacgttgattatcagtggtctcggccagcctcgaatttcagtggcgctcgccaagtaaactcccttcgacgtccaaatatatatatcggcgggttactgcctatcaccgcgcaataacctgattcactttacagctactccgtaaaattatcgcagattacgtggctaaaggctaatggaataatgaggtcgtaaccaccctttaccaactgtacagagtaactctaaagtgagtacaacatacctcgttcgaacgctcaacaaagcagcgacggagccggtcacgtgcactaaagaccaagctccccgaccaagcggactttcgaagtcgacttcgggccactcgcagggtggctcgtctacaatcatgtcggactctttcaccgtctcgcttcgcccgatacgcgaaaaacgcgatcgtccagattctttaccccgtgagatcgctcagatcaacgcgcaatgggggtccttccgagagctcagcgaggcgaagttacgggagatgatcgaggaggacaaacacaaggaccattgggaggaagacgatgagggtgacaaggaatcgacggacttggagacgtcggagcagttggaccaactttacaaacgtcgagcggaaatcatccaatatgcactgtaggtgcattggcctggaattgcggtgccgaggtgctatactgatgctttatagacaggctcacatggaggcctctttcgcgctagattttgtttccctgttgctatcaaagcaccaaccccgccaggctgaaacgtctatgtcccctttcttaaagtcggccgcaccccttggctccctcaactcggaagtcgttaatccgccgccgagacccgaattgaccttgnaagacataaaatcggtggccagaggatggcggctgcagaatttcaactcgaccgctgacaaacttctccatgccggctcgagactcgagactgaggttaactcggagacgaagtactggaatgaggtcttagcggtgaaggagaagggctggaagatttgtcgattgccgcgagaaagccaggcgcttggggtacaatatggattcctagaaggtaagaccaattcctggtgtttgggtgtgatgctgaccccacagctacgcctattttccgtgaccgagggctcgctgcgctgcgaaggaccgacgatggaagcttgttcctggataaaggcttgatccctctgaaatcgcaaggagtacgtgtccgtgtgagacgaagcgatcgtatcgtcggatgctcaaaagtctgccgaccgccgcaagaggcctagtcaaagagctgagag

SEQ ID NO: 805 - DNA, 3062 bp, Emericella nidulans
gaaagtgttagtatgtaaaaaaatagcagatatggaaaataaagagtcaaagataagaaaggaaagtagaggggatatgaaatggatagaagggaggcgattgaatggaaggggaaagattccgtagtgtagaccagggaataggaaaaacgtgtaaatatctgtttagagggtgaccataaagaagacagtataaataaataaaattcagaagaaacacagtaatcgaagatttagatcgttaaaagaaatacggaaaaaagcggaaaggctgtccccttcttatacccctatcatccgggttgttaggtgccagttcgggcctacccgcataatggggcaccaccgatgccatccaggtcccgcccagcttgacgcaacgttagaatacccccaccgaacggaaaccggggcaagcagacctccgaatccgagggaaagcggcagtggcgtcaggattcgtcgaccacggttcgcttctgtaggcgatttccagccgccgggttggtcgagccatgcggtgcacggcaaaggacgacccgttcctcccggtgtcttggaagcagaatacggcagaaggtcgtcgatgtatgaccgataactgagcgatccgatagggaatcggctggggtaggatgatgataaaacataaatctatattactgacattctagggattgcgtccgtctctggtgctgggttgctgcttcgattcagcaaagacacaacgttatgccctgtttattaccttaccttggtttcaattctctgggagcaggtgtcggtttgcctggtttgcatggtttggaatttgagttcggatctggatttggtgttgacacaacagcccggttttactcgaagagcatgatgcatgatttgagagtgtccggcgggcgcctctcaccattacgacttacgatgacatgacatgaatacggctagagggcgttaggacacctactgggttttttgcatagctacgctttctttttctttctcgatatttcgtactttgggccatgatttcaacttctcgatgtgtatctagcgcactctatttggtactagtctttccaatcctgtatctctcccgtctacatgatacgcggtaccaatatcccgaccaccgcgctgcagacttgctgctactgtcgtccatcgactgaagaagcagaagaaccgtcttcgtcaagcctcagtcatttatcggaaaaccgttttttggaaatgaacgcccccgaaccgatttcctgagcacctgacctggcctggcccgtatggactgaaactctaccaacgcaagggacgagagtcaattcaacgcctcccagcctcgcagtcagggccaccccgcgtattgagaaaccgtcgctcactcaactcgtctgaatgagtactagacggatgaagagccggaagcgagaagccagaagaggaagcgaaagcagcaggcgcagaaacagaagcaacctcggccccgaccggcaccaaaatcctggtacagccattggctcgtgaatccgtcttacgaatcgcgccatgatgaatatcagctcggcctatctttctggttcaatccaggtttcgatcctgagcggggcgcgggaggctggttaacggtgtctcgacgcggagtccctggcctggtcggtcactgacgtcagtatgagcgggtacttggaaacgcccgtatatcagggccaggaccagccccacgattttgacggtttatcttttctcgcgtctgtgagtgtcgtgcagatacgagtacggtgcaggtgtacactaccctacttcgtacagtgctgtgaagggtgcaggaaaccgcaagggacttgagctgcaaccaagtcgcagtccgtttaatacaccatcgaatcagcaaaaaaatcagcaaatcaccaaagtcaacaatatggtatgtatactctttttttttttttgaatccatggtttgcgacgggcctccacatgtcgttccacgtctgctctgcgaaccgttggacccgcggctgaaccacggttgcttgaccacggttgctctccctagtacccatacccttcaataactgcccattcaatccaataactgcttactatgtactaagaccgcgaccacagctaacatgagaacatccaggccccaattccccttccgcatccagtctcgctcccctcgcttatctcctctctcgtcgcctcatcctcatcctcatccacttcacaccatctctctccgcgccaatcgaactctgacacaagctgcaactgttctggctctctctccggcggggccattgctggaattgttatcggctcgattgccggtacgcttttgctaatttggctgtggcgctcatgcatgacgaccgaggcggttcatgaggccgagaagaccggcgcgccgctttataccgcaccagccgggtacccgactaacgaggcgactgtgcaccatcgacggcggagacgcaggagccccgtctatgcggatgatccgtattcgcggcggagtgctagtgggagtgtgaggaggccgaggagggtctatgttgcgtagatgcaaagcggactgagtctctgcctccattctgtgtgcagcaggctgatggtgaagatgaagggcatttaagtggcgggtgtgctcagtctaagaactgtctgggttcgcgtcgtataaaggataacctaaagtaggacaccgggttttgtttatgataacgattcatgcacgatgttatggctggttatgggaagagagatgtgtctactaatgcggtataatgattgatgatttatgatggaattggataaatactaccttccatatttttgagtttggaaagaatgaccgtatagtgatggtgagcctgcaagaagtcgcatcgtggcatgcttggtttctgtgggtgaccacccggccgccactggaacggagagaagtatcatatcaggtataccaatggtcaagtaaagtcaggtaataagcacccaagcattcccaagtcatgactttctcacttctagtgagacgccgccgagacacactacaagtcgta

SEQ ID NO: 806 - DNA, 2492 bp, Emericella nidulans
taaagagcacaccagcattctcagccctgtcggcaatactgataacctccccaatcccagccgcctcctgctcatcttccagcgccataatctcctccctactatcccaccacttctcctccgccaaattaaacgcatccttgcggagttcctttatattcttctccactgccactcccctctcattcaacgtctcaagcaagatctgctgccactcctcactcgtgcggctaaagaattcacgtaaagtctcaaacgggcgcggcagcggtctgctatcctgaattgacggctcggcgtcttgctcttcaatatcgagctgctccaggtctcgggttacggaaggcacggttacatcggtggtctcagtgggtgcagccgaggcagtatcaagagacatcgcgtcctcttcttccgcctcttcttcctcctctccctcttcatcatcttcatccatctcttcatcgctgtccgcctcgttgagcagatgccaattacccggctcgttgtagaagatctccttgactccgtccatcttgcccagatcaattgagtacatgtcgttgaacgtgaactcgcggtctcccttctcgtatgtcccgccgaagatgaaaagcgtgtcttcctgcactgcgagctgcgcgttgaaacgcatatggggcatctcgaagcggacaatagccggcttttccggctgcacgggttcttcgtcctctttaggtaggaactcattatcgtcgtcgttttcgtcaacgcgtatccctttcttagcctccagcgccttcagattttgcaatagctcctcttcagtagctttcccctgttccgagatttagctgcctgatttccttgctggcttttacccgtgttcttgggacgtcgcagggtgagagggaaaaaacggtttctgtccgtattccatgcgaacaatgtgttgaaaaattcactttcaataccctcctcactcagctccacgtcgtggacaccaccaaacataatcccgcggcccttgtggtacgccatcgtcgcaccagccctagccgggttaggcgagtttgcgggcttcttgcggcgctcccagcggactgttggtggcgtcgatgggggcgcttcaggtgctggcggtgtgatccgaaggaaccatgtatcttgatgaaccatgggcttcattgtcatgcgctgcgggccgcctttggcagacttgccgccggcccctgcggtcaccttgacgcgggagtatccgccgtacagtactgctccggactcgtgagggaggaacgaggacgaggaccgcgggtcgggcttttgtgaagcggtcgataagacggggttgtaccatgtgtattttgagcagtcatagatccaaaggtcttggaggtattttgtttgctgtgatgtgtcttggaagccaccaaagaggatgatgtagttctaatattattagaaatagggagaatttgtcgattggtgaggaaagtaccttgaaataagtcattctgtgcccgctcctggcaggaggccctttccctttggtctcaatacgcgaccactctcttgtcgatggatcaaggtgccagaaatcgttatagtggtagaaagtcccttgcttcggcgaagaaaactcgccgccaaagagatatatccccccagtattacctccacggcaccaagcatgcccgctcctcggcagcgggctattcggactggtaacctcgcgccattcccctctgtcaatgagatagacgaacagattattatagaacgttgccagtgtaccatcgaagtactccccaccaaaaatgagtagctcattcctattagacggagaagcaagcacagtggcagacgatcgaggggatggaggccctgagacgacctctgtgaccttcagaaacctggcctgttcctctgcgtattgagcgagaatagcgtctagatcagcgtcttcagcgtcactgtctgcatctttgcccttggacttgtgcttcttttctttcttgtctgctttcttggattgttttgccgctacacgctccttgtgctcggctgatttcttgttctttttgcccatggcttaggcttgtatactatggagtttgttagtgatgggttcgatctagcagcatcacccttggaaacaaaggtaaagagtacctactgctatctgactctgtcttttagattattcaaaaacgtggtataaaacaggtacaatcaggatcctggcgtgtataatcgtcggcggggcaagggaaaaaaaaatgttaatctcccgctttttttatgccctggtattgttagcgtatcattattaccaacgatcagtatgaagcgcaacaatggactcttgaatattatttattttcatttgtcctacgacaggatgggttcaaacgtacactgttggtgctaaatgacccctgatcactaatataatccagattgaatgcagtcagtccaaggcaactgtttggagaggaaacggtcgctca

SEQ ID NO: 807 - DNA, 6768 bp, Emericella nidulans
gctgcgaactgaccccatttctgttgtagctgttgccataacgtttgtttgtgttcaggtgccgctaattgatctccgctcgcgaccacgggctccgtcgtcttttcagggtcgctttcggggtcgctagcggcaattgggggagtggaggcgactgcgccgcttgggagaggttttcgtttggggactcctgatgcaaagccgttcattgtggatgatatgtggaatcttaggatccagacgcatagtgagtccagagaggcacggacggcaggtggtgttaataaagggacggcgcttgacgccgaacaacttgcagggatcgcaaggttactccaagcaagagtctagggctgtctctgagtccctgactagccgaattcgaatcaataacagctagtcaagtattgtcgattaacaagggcaattaattggcgataacccgtgcagcggcgaatggcttcgttgagtcgggggctttagtggtctgccattaggctttagccgagtccagagatcttcctcaaccacaataagaccctcgtaccttccgtttccacatcctccaaatgccattcactcatcgaatgcgaatttgcctactcatcctcaccaatatccctaggatgtatgtttgctagcaaccgaagcgaccgattcgatcgtatcgtggggaacttggctcttcttggcgctgtgcagaacgacccacattatcctcactccgccatctctgctttcgtcattttcttcgtccaacaggttgccgcgattctcgcaacatacgctgcacttcgacgcgagccatcatcagggctgcgtgctgcattcgacccaatatcgcaaccaattacgttccccacgacggtggaaacgcaagacgatctccttccctatgacttaggaaccgaggagatattggaggactgtgattgatgcggggaagctcttctaggatacgagagacgtgatggcggaccagtttcctccacgcgactatgcttgcgaaaatcatggcaccgatcggagatctgtcaagtgtccaagcctggttgacaaggcgaagtcggtttggaacaagaccggcttggacctgcagtcaattatgctgatggtcaagtgagtgtccaacccggatgggaagtagggtgctaatggacatcgcagaggcgcaatacctccaacaatcggactagcaatgtaagaaccagctccgttgtgtgacttggattcgactgacaggccaaaagttaccaggccgactctatcgcggcgtatttcaccacttccggatatctgatagctattatatcggtactgggattcgccattatgccccgcgccaagttcgttcagatgatgctgctcgatatactggctgtatgcgtcgcagctgctgtgaatgcgttgatgatgtttgcgaccgtcaaagcacgcgagcagtcgaccagttcggatcaatctcaaccgagtagctcaggctttccgccgtacaattcctctgcttcggttaccagcggcgtctttttattcttccagacttattttgtccattcgctcagagcccattaccagcagtttcaattccccgtcattatctactccattgtggccaacgtcaccttctcgtttgcaccgcttctgtctactatgcccgcggcgctatcgatggttcgccgactgcttgaggctgcgttattgggactggggctctctactggagtgtcctttttcattttcccgctctcttgccgagccgtggtattcaaacaaatggcaggctatatctctgctttaagatctgctctgcaagcccatactgcctattttgaagcattggagagcgagaacgtgtttgggcgaacagcgacctacgactcaaccgtagagaagatggataaacatggcaaggtctattccccagaagcaacaacaattcgaaaagccgtacataaaatcacagagctccatggaaagatggccggcgatctaccgttcgcaaaacgtgaaattgcgataggcgagctcggtcctgatgaccttcaatctatcttccgccatcttcgccagacgatggtacccgtagttggcctcggcttcattgtcgatatctttgagcgactatcagaatacaacaaatggaacgagcctattgatccatcctctgtggtatctggcgacctccgcgaccgtgcggtgcatgagtggcatgagattatgacggctgtccatgacccgtttgtctctatgattgaaacaatagacgaagcgttgcagcatgttgcggtgactctaaagctgacaccggctccaaagaatgtgaacttggaccccgagaccgctagcagtcgatcccctggtaacaaagggtttagtgcttatatggaaaggaagctctctgatttcaagatagctaagcagcttgccctgcggacttggagtgaagagaaaggcattacacttccgccagactttttcgagcatcctacaactgcgcatctggaaacggaggacatacccgtggatggctctgtagatagagaccgcgctcggagacaattgtttctgtttctttatgttggtgccctctcactataccatttacccagtgctaatgtcgattagatggagcaattactggcctccactggccaggtggtccttgaattcgtccgatacgccgatcggaaacgagagagcgggaagctctcgagaacgagattgattatccctggtggcaaacgtctgcgcaagtgggccttgagcattttcaaaaccggggatcctcaaggagaggaccatttgggcgatgtgaatgcgaacaatggcgtgcttcagcttggcgaggcgtatacaactaggaaagacccagaacatttaccgccagaaacaacgcttcagaagttaggagataagattaggcgaattgcagcaatgctccgctctccacaatcgtcttatgggttccgtgttgcatgtgctacaatgaccattgcggttgtttatttcattcgagacacgcaagaattcttcattagacagcgatttgtctgggctatcatcatggtcaacctgagcatgtctccgacgtctggccaaagtctttttggtttcgccctccgtatcgttgggactatcctagcaatgacgcttagtctgctttgttggtatattcctggaaagcagactcctggtatccttgttttctttttcttgtttgtcgctgcgacattctatataccggttaagcagttccgtttccgaattgcaggagttattaccgtgatatctactgcgatgatcgtgggttatgagcttcaggctcgcaaaattggcgagcaaaacgtcagcgcaaacggtcagacgtactatccgatctatctcctggctccgtatcggctcgcggttgtgactggaggcattgcagttgcttttttctggacgtttttcccttaccctatctcggagcattccgtattgcgacagaacctgggatcgagcctataccttctcgctaattactactcaatcattcatgaaacggtgactgcgcgtatgcgcggcgatgaaggtgacaatgccctcaagacaccagcggggaggcggctgttgaaggcccgaaacaaagtattttcaaaacagatgatcatgctgagcagtctccgcacatactctgagtttctcaaatgggaagtgcccattgggggtcggttccctaaacaacagtatgatagaattattacctgcatcgagaagtatgtcttcccaggccattcatgaaactcacagctaaacctaggttcagcattgtcaactacctcagtcttcttgggtatgcctcggattcacttaagcagcttgggaacgatgacgaatcggactccgcttggcttaatgatctgagaaggttgattgccagtgctcgaattactacgcaccagataacatcagtgctatgtcttctctctgccagccttacgaatcaacaacctctgcctccatttttgaaaacacccagaccgtacagcttctcgaagcggcttgaacagctggacaaggatatcctgagtctgcgacatattgcagagcctggattcgctacgttttctgttctgcagatttccactcgctgcatcgttggtgacgtggagttacttatgaagtatgttatcgtccgagattgatggtacccactctaacggagttatagggatgtcaaaagccttgtgggcgagctggatttctcattccacgccttgagtgcccgtcaaagcagtatatcgacagccgatgtgtcgcgggcaccatcgagagctacagagcgaaacaaacttgactaagagtatatacatagctaagacttctagacatagagaaccaagcaattgagcctaatttatagttgttctccattttcttgttggcaataggcttttcagttaccgtgctacttatgctgatcctttgcaggttagacgaaaaccagctttggagcccctaattgcatatcttcatgcaggaattatccgaaaagctgccctattacgtccattacgtacccgccaaacctgttccacagcaaaggtgtttgagaggatgctgttatccgcggtcgtacgtccgtgctcgcataccagacgcttatagcgacgaatagtatcgctgatgataaaggcgtgctctatcccagggggatggaatgcttaacagtcacgcatggtttaaccctacgatggacgatcgttcggtgtattttgctacccacctgcaataatttccgaccaggctctggtcaccctaacccacaatgagtgggcgcatcaccgaactcagcgccgactggctcgtactatatgatatatactgcttcggcatactggcgtcgaaactctgacccaaacatcataaccggcaagaggcgtcctccgatgaaataagccgcttgacagcttggtggatttctgccggatgagggcagaatctatcgacctcggtcacgccgacgacgggttaaggacacagttgcacgaaagtatcagtgcagaggatttgggggaaagcgtttacctggagcgtcctccattttctgactcgtcggccgattcagagagcgtcgtctggcgaccaagacttagagaatggcttgttttgatttgcgtctccttcgtggcaatgctagatgcatttgacgcgacaatgttggtgcctattataccggtatgttgttagaatttggtccccgatcagtcttaacatgcagcctttctttcgcaggtcctgtcagctgtgttcgaacaaccgcttcggaccgttctttgggtggacacgtcgtacctcgccgccagggcagcaagtcagccaatcttcgccatgttgtctgaagtttttggtcaaggaccaatcttgatcgtcgccgtcgtcatagccatagccggaacaggagtgtgcagcgggtcgttgagtgtgacttgccttgttgtaggccgactggttcagggaacgggcaatgggggtgccattgcggtctcgtcgctcctggtgaccgaccttattccatatccccaacgtgttcgattttccgactacaagtgtcgtgcgtgggtgcttggagcaatccttggaccggtatctggaggggtccttgctcgatacgggaattggaattggacattctatttcagctatattttctgtggcctgagtctgtttgtggctccgtttgcaatcgacttgaaggagtgcaagagcatctccaggcgtgcggcgcgtgagatggattgggtaggagctatgttgactgtgttggggattgggtcactcttggttgcatgcagttgggtagggcagccacaaaacggaggggaggactggcgcattctagccaccagttgcattggtgggctggcgatggtggtgctagtgctttatgagagcgtctgggtgtcgcggccgatgttcaatctcgggatatttagttccatatccaagatcatgctgtatgttggcagcacatttcacggacttctggtcagtgtaatcaccttttgaattaactggatcttgctgacgatgcccttaggtattttggcacttgcagggcctgtctgtgtatctcttcctcgtcaaagagttttccacgccgtttatgggcgtaagcatcataaccatcaccgctcctgctctcccaatcctctttctcacggcgaagctaggaatcggtagatatcctttccggccgcgctggattatccgcgctggttggactcttagtcttctcgcctcaggttgttttatcctattaaccgccgaaacaccgatgccggggtgggtattcatcttccttactaccggtatcagtcatgctctactcatctcaggatacaatctatgttcccaaaccgaatcgcccattcgcaaacgagacgaggaagacggccgacacacggcgcgacggggcagagctgctagccctgcctttgccattttgatgtactctatccttagggcatgggggatgtgtatcgccgttcctgttggcgggtctattgtcgtgacgcagatggtgcaagagcttgatgcaagcgggagtgctgctgagccgtcaggctcattgaccaggaaaggtgggatagtcctgacgctagataagagacaggagctgggtcaactgtttctgagcagttttggtttcttgtggcggtttttcatgggcgcgtctgctctgggggggttgtcctccttgttgatctgataataggcgtctcaatc

SEQ ID NO: 808 - DNA, 1184 bp, Emericella nidulans
  unsure (1)..(1184): unsure at all n locations
aaccgtttctgtctccctagatgcagcagcacagtcgaagctatattcagaaatggagatgatgatctgcgtcaggccaaccagttccttatgcaggaattcggccggcggccgtatttcagaggaatctatcaagaggataaacaagttctggggatccaagaatcggccgggcgtagtggagttccagtacgaccaagccactcagcgtcactgnatactatccaacattcgaaccctgcactttaacggagaaagttcaaccaatcccatagctctgcactcgaatctgcacagctggaaggcaattgtcaaggaaatgagcgttcgaaccttctgtgccccggacagtgtcatccgtaagcacatacatgacatccagaaacttctggatatgctgggcgcaccaatcgccacttttctcgcatttgaggagctgcagatgcggactttgatttggatgaaggagcagcgcgcgcggagataccttgctgaaggtgggcgggctatttcgccgaggacgagctattcatcgcactgaggattcttccttgtattaacacgaaaacatgtactattagcagatcttgtagattattggcactcctggttaccttggccttttctcattttcgactgaagcagtcgccttttcgccttgaggttcccagatctctctctaatcggttgtagcctcataacgtagacagagatgtcggtgagacttagtggtagaggaagacccttgttggttgggacacacgcggtcgacgtcataggctgccgggccgatcgctaaaggtacgagacaacaactttctcaggcttcagaatttcgaactccattttctccgagtttcaccggcaagtatccctcagttatgtggtagaaacaataaatcaagtctcgcattatctttaagttcgtggccgctgcctcttgatgtcatcccttgcaaaaggtcatctggtcctcattaggacagactccagccaaagcttcgagctctgctagtaaggatgagtgtggtgtttgactaacctgcgtcagccgctgttctcttcgctttccgttgtttgttttcaaaaccgctccgaatattaataatggctggcctctacatacttacggacagacgtgcctcctcgctggcgacgatccaggcgcctctcctggatttctc

SEQ ID NO: 809 - DNA, 1658 bp, Emericella nidulans
cacaccagaacggcacgagggcctttcttattcgaggacttgaacgcatacccattataatctcggctccaagatctcatgtgactatgcggattcccagggttagcccatgaactcaggactcacaattaagtcttcgaaacttccagcaatggaatgttcctctgcgtgtgaatgttatttcacttcttcatctcgatcttaacctagcctcgtccgcccgacccctcaattacgggccattgattaaacaatcgcagcaactgctgtggcccaccgactcaagagttctcgtgttattgcggcatcgttggttagaacgaggcttctagtgccccaagcggcttgctccgggctaagggttcaaagcttcggacttgcaagggcagaaagcggacaagttagctctgagattgatctcgacttggaggctaaagtggagtgtttctcgctagggatgccgtaatttacagggattggatccgacggcgcctgtgaagtttctacttagtttatcatatccgttgacaatccatcgaattcagatatatatgattactccgttcatcccaatgatatggtccgactactcgggacttacagcagagtccttgtactgacatggcagtgtcatagcacgcgaggcccatttcttaagctctcatcatcccttaacatcgtgacatcaatattagatccaactagaggtcttctgcttccgcaggtccagatacttcgccgcataatcattcgcgagaaccgagtcccccgtaagatgcatcactgttgcctttttcgccatcatctcacactgacccctcaaatcctcaatctcctcatactgctcgtacgcagagtccagataccccagcgcccgattcatatactccttctttgcgggtccgttatccttaccctcactccaaagcctccctgcaatgcccatgttcgcatccacgagaagtgagtacgcacttgccgcaagatcacagtcgctcgtttcaagtacctgaggcataatgctttcaaccatcttcgcaacagcctcgaattcctttagactcaaaagtacaccacctagtgcgacgatcgcttcccatagacccgggagcaggcgcgagcgataggcaatgcttgcagctcgcatggccagtgagaagccacgctggggctggcccattttctcgaagatgcgggccttcaggcagaggagtttgacctgcggttggatgtcgaaattgtcttggtgaattgactgagctgttttttcgatgagttcgagggcttgtgcgtagtccgcttggcgaattaggtgttcgacggtaatgaaggagaggaggaaggagaggtcgctgtcagggaggtcgattgctcggagttgagagagtagctggcttgctgattctcggtcgtcgctgaggatgggaagctctactgttagaatcgtaacacactgggaagaaaggaggaagaggagagagcatacttgtatattttgcgtctgagttgaagggccccagagaagaacgcccagtactgacccgttttcagggattggaatcgttctaagctcatatctgccatttggacggaagcctcgttataacgaccctgctgggcgcgcgcgattgcgtgatctttcaaaatccggtgtcgta

SEQ ID NO: 810 - DNA, 5032 bp, Emericella nidulans
atgtggtaggtacggaaagacatatgcggaagcgggtgagtacatgagggatgttgttatgaagaatggtgacaacaatgatgatgaaggggaagtggtgaagattgcactccatccattcgataacgaggcgatctgggaggggaacagtacgcttgttgatgagttggtcgagcaggttccccttgttgcaggggatgctgttgagggagatgggtatggggatatggcccttccagttgatgcaatcgtgtgtagtgtcggaggaggtgggctattgaatggactcgtcatgggacttgagcggcggcggagacagctggcaaaatcttcatcaagaaagacggcgcaagcaagaccgacgcatctgattgccgttgaaacgcgtggaacggactctcttgctgcggcagtagcgaaaggttccctggtgagtctgccgaagatcacgtcgcaggcgacatcgctcggtgcgatccgggtttcggaaaggacgctccagtatgcgctacatccgccgcagggtgtcaaagtgcatagtacggtgctgtctgatgcagacgcggcaagaggcgtgctgcgtcttgtggacgaggagcggatgctggtggagttggcttgtggagtgtgtgttgaggcggcagttggcgatgcttgtcgggctgagaagacgaagaagaggaagagggggttggatgaagggtatggagatgaccgggtgtcggcgggtgagagtgagggagatttgtcagatggaggggtggctgaggatcccttgcggtcgcggttgaaggagctggtgccggacttgaaaccggagagccgagtagtgatagtggtttgtggagggagtaatgtcactattgatgcggcggtggaatggaggacgatgctgaacgaaggatggggggacgagaactaggtaaataaatgggcgtttcaaatcttgggttgattattggcgttttcagaacatgatattcagcaaatatggtaaattggatttgggtctagaggaaacataatggatagcttagcttgctcattgatattcacgcagaagctgggacttcttccgcctcgattgtccgaatgcgatagttccagtagttcttccgaatgggatcgtacttgtccttcaggaggttgagcatacggacagcctcagcgcggccattctcttcagcgtcagcatacacgtcagctagccactccacagcgtggctactcttcaccgagacgtccacaatctgaccctggtcgtcccgcttgtcgacgacgaatttctgcgcaaactcggtccattcggagagtggccgactagcagctcgtaggataccccgagcgtacgaccatgggcttcggttctctggcgctcgaaggatctggtcctgagcgtacctcagctcctcgtcgaccagatcttcgtccacgacggcaagtcggcccttttcggcaggcgacccgccggtgttgaccatgccagcatcgggctcattactacgagggccgaagcgtagcatataacggtgattccaggcggaattgttcctgacatccgagttgagtagggagttcacgtccgcgagctcgcgaggggaatcccataattcaaaatgccgcaccagccagtggcggtaggtccatacatgatagttttttgagtcttgagcgaacatttccatgagaaagtccatctcttttggtgggagactagggaagtgctctcgtgaggacatgataacctggcgatgatgcctggcggggttagtggtcacagtacctcacccggctggagagctgcctaccagatttgataattcttcaaatacctcaaggagacgccgttcagccactccagctcctcgaggagatctttgttcaaagcaaagacgatcttggcacgatatatcctgtcgggtttagctgcgtccagatatcttcaaggatcacttaccagactgtatagtgggctggattcatggagataatgtcttctgtgagtttcagggctctgtcagacatttcattggcggccataaccgcacgaagatatgaagttgcttcgagatattcctcgctgtaggcgatggtggccagcggcatcgcgcctgactcggagccatcattgagcggaatgggatcgattgacgcccactcagaatcagacgcgtattttcccatggtgaaatttattccagattacgttgtgattgtaagggctgatgaggagaacaagcgatggaagttgtggtgatcaatttcgtgaagttgaggtggggatggcggcctaaggcagaaacaacaagaacaatataaacgacgcaacaatcgagcatagctggacaagaattgacaaagttcatattgatatggctagaaattgtgatttgattcaggataggcgtattctgtattcatacggctactgaaggtgaggtctggggaggcttgggatcccgtgacccccgcctgccttgaataacctcgattccagcctaataatgataaaccagcctcattgtctcgccgaatccgagtctcgaccctgaccgatcaatcccggcggattatcaggtcaagttcgacggcactgatcgtgattcgacctcagccttatctgccaatgcaagttgtcgaccccgcaatgtgatagggatcgcttcccgacagttcgctcctggcatcggagcccaagcttgaagatcacctctctccaatttctcctctttctttgcctctctgtgccttgtaaagatgcgcgtttctcctttcttcatctagattccctatttggctacatttttcagtgataaagatgcgtcgcgtcaagaagtcccgcaacggttgtgcgcggtgtaagagcaagcgagttcgtccttcaacttcctagactttagtttgagactaacccattctcattaggtgaaatgtggggaagagaagccttactgcagccgctgcgttcgtctgggcgtaaggtgtcctggatacgtcaaaacgctgcgctgggtttctaatcaggcatctgctggagatggtggcctggagccagccacggataatgaccaggtccaatttgtacccgaatttctatctcctagaaaggcagatcagttgccccaatctcagccgcaaaaccactcagagaactgtctcgacttgcaccggtctcccctgccctcagatgactacaagcttcccgacttagatggcctcgttggcgacgatgccaacgatatagatgacctctgggatttacaggagcctggatctttaccagagctgaccgatctatgtcctacctcgcccaattcagcggtatctgctggagaccaggcagctaatgcctcggccatggaatttgcctcgccagcaagtttgggctcggacccttgggctttcttctcgttagccgcccctgcgctccagaaccagccccgagacttcccaggcttcgacccttcgaacattgtccgtcattaccccccgccgtctggcgtgccttctcggccggccccgcgggatctcacgtcaatcccgcagccgttgaacaatccgtcatggactctaattgagtattatttcaaagaggtcgctgccctattctctagctatgacagtcagatgaaccctttccgttctaccgtctctcgtctttggggatcctccttagccatgtgtcgcacaatgcagagcatggctgccgctacccttgttaacgacttcccgcaattcggtcctatggggaagaagctgcgcaacgaggccattgagataatcagcaaagagacgaccatggacgacaaatccctgcttgctctgcttatgctcggacaaaccgccagctggcatgacccgaaagatctcggcattccttacttcaaccatctacgacgacatttggataatgctgccctggccaaggcagcgaacccaacgaaccgcggtaacaactaccagttcttcgaggaagctctagtgtattgggagatgctcctttctttcgtcgctgacgacgcggccgtcctaccagcgcctaaaacaaattccagcacagccgattccctcgtcttgcagcgcgtaccccatccctggacaggcatcgcgcgcgacacccagtttactgtccaggaggctggccgacttgtgagagcagagcgcaaacggatccgaactcgaaggttcacatgtcaagtcgacatcgtcaacgctcaggtagctctcgaaaaagcccgagaactcgaagaacggctcctatccctcgctcatcccacagaagcggaaattgtcagtccaggggacgacgaaacccctgtctggcatctccttaccatggccgaagtttaccgctgtacaggcctgctacaactctaccgtgcattccccgatctcctgcagcggcgacttcccgttcaacagcaacaccaccattcacctacacagcaatcccaccccacaacttcagcaacacgatacccattccacccctggctcaacgaaacctgcacacaaccatcgcctagcccacagccacccccagaccaatcctcgcctacctactacgactcctggctcaccgaatttgccctgacaactctctcccgcctaaaatccatacctctcgaatcccgtacccgctgcttacagcccctcctccttgtcgcctccagcagcgagctccgtctccctccatcttcctccgaccctctcgctctctcagccaacgggaatggcccctgcgtttcctcgcatgccctcgacgtctcaaggacaaggaggtttattcttgggcgcctcacgtcacttcagtatgtgctgccgccgaaaccgattactgtttgtcttgacctggttaatgaggtctggcggcggatggatgcgggcgataaagatgtctattggatggatgttatgatcgagaaggggtgggaaacaacgatggtgtaggcggggaggagctaatgatgcaggatactgggtctgcaattcggtggtttgctagcaggcagaagtggcggtttggctcggg

SEQ ID NO: 811 - DNA, 1739 bp, Emericella nidulans
cgagcctctccactttgaccggcccgataaggtgactaaacttttaattaaaaaggcccttgtcggcaaggtaggtggggggggtcaatggaccggtcactttgagaggccttggccacgctgagcctggtctaccgtcttgtacacatcttcgacgtcgctctgggaattgtggttagagggagcatcgtgcactgagacatgcggggtatattctttcttgggctctgtatatccccaataaccctttcgctcatatttctacacggactgctctctactttgtggacgcctttcatgatacccccaattaatcaattatgaacagcagtacaagggaaaatcaactacattagtccgatgatcttttacctaaccttcccacacacccacacacaaatggtcacttttaactgcctacatcccgtcagctactacgctcgcaacttgcaacgacgtgctcacctggctcgagctcgatctgctccatgaacgcagcaaggcgacggattgaaggttccacagaagactcgcacgccctcaatgtcgcaacgcccgtcctatgtggctggctatcctttgtgagagattgcaaccctttcagcagctccagcagtttcatggaatttttcccaaggagaatccgtaccagaaccgccgtctcgtcgtcgtcaagatccatttgcccgagcttcatcttgcttcttatgcaaaggaattgaggcagtgatgagtcgaacaaggcgtccttccgcgtaacattgtactccaagcaggctgcctcgaacaaagcgagcgactggtcggtgagggccggaagcgtcatgagagtcgatccggggtttgctcggcattctttgcacttcagcatcgcttgaccctgactatgtatacggtcaacgagaccgaggatcgtctcgaactcaacgacagtgggcacacttcggagttcgttcataatttgcaaagcgcttatcgaacactggcaggtagcctctgactccatcgaagcaaggatgaggtggtaaattatgcggtcgattgacagacaggtgttgcctatttctgctgtgttgatgttggggtacgtcggcattgttggcccctgattcatgtgctctgcccctgaacaagcgtttaggtaggcctgatgacaagggagagactattatagatggcagtggtgacctccaaatgatggttcctcttcacatgcgtgatgttgcttggtgttgacggataacgaatacaacctcgggttcgcgagggagcgtcattcatcagcctcacggttttatcatatcagggtgtaagccctgttggtccgtccttccacgcaggccaaatcactgtggcaccacacacttcctccgacctgccgaaagttgcacagataactatagcctggttatggttaccacatcagtcacctgggctcagttgggcgctgaccgtcataggtacctaacaatgaggcagttcagcccttatgggagagcttcggctacgaaattctacacatgaagatgggagggccacagtgcacttaaccaggatggtaagttgtcttatgagtctcgaaagcaaaagaaattatgtcaaggcctagtcaacgcatccaactttaccatgatccgtcgcagcctttggtacgtctctttcatcagtagcactttccccctcgaaggtgtcaggaactcgtgcgtgtaagcaaggatctgccggactgttctatgcaa

SEQ ID NO: 812 - DNA, 3652 bp, Emericella nidulans
tgtttttgaagttccaggctattgctgaccaagtcacccacttaggctgtcttattgtacgcgtggtcgatcataaatcggtctccgcacaaactaggaagtccaccgcatcctcctcgaacgacaacaatacacccttttccatccataactataatgagcacattactccgtcggcatatgtcccgtatccgaaacagaatcagttggcgttggaaaaatcatccgagattgaaacagcagcagaacagtcagaaacgaaggatgacggtgaatcatcaaaagacaaatcccagaatgtcgagataacttcaaataaaccgacaaacccgaaacctcgcgtcttcacaactgtccttcatccaacccctcgctcattacaggcggagttgactctgcttgcgactacccccgatccaagagccgctaaacaagcagcgcccgcgtccggtacagtaccgccgtcgcctggtgcatctactcaacaagaacggggtcattccgcaaaacggcagaaaatgctcgttgaaccccatgagcttctggagtgcgaatcgaagttgaccagggcacttgcgcccccattgttcttggatccggtcaacagtctggaggaagtgcacagtctcttgaaatacatggagagtccgcttcaccgcgatcctcccccttcacccaagcgtaggaaacgcacagttgcggagttggcagctgacgaagcactggcggctgaagaagaaaggtttatgctaattatggacgaaaggctggaacctaccacttccggagctgcaggagggccgaaatctgcggctgtggatgacactgggggtgcagtcccattcgagcctcgcttttctcgatttaagacacttgagaatatcaggatccaacatgaagaaaaaataaggcgtgagaacgagacgaagataaaacaagaaatgatcaaaaggcaacaacaagagcaagagagggagaggcgtcggatcgcggagcagcgccaggcggaagaacaggccaaagaagagaaccgaagacagcatctcgccgcacagcaggcccaggcacagcttgcagcgcagcagcagcaaaaccggcacgtcatggcacaagctaacggcgttagccaaggacctcaatcctcgccagtggtacgcaaccagactcctctcaacacttcatctccgctcgtcggcaatgcgatggcaacgcaggctagcgtgcctatggcgatgacagcttccatgcagggtgctggtagcccacagagacctccctctgctttgcagcacgcccatcccaacatgatgagccacccaatggggccgtctaggagccagcaaggacaaagcagacatattcgccacaaatgacgcagggaacaccagccatgtcccaagcgactccaataatgcgcaatgtaacacccactcagcgtatgagccatgctagtccaccacgctcctctatggcccccacgcctgttatgaatcaggctgtgatggccacaccgcagatgggaagtcaatccttcaatcaccagcagcagcaattccttatgcaaaggcagcaactcctcgcacagcaaggacagcatttgaaccacagtcagctcactccgcaacagttcgctcagttacaggcaaatatgcttgcgcagaataacatccagaaccagcagcagcagcagatgatgcagcagcagcagcagcaacaacaacaacaacaacaacagcaacaacaaaatcaccagaatcaacaacagaagtttgccaatccccagacataccaggctcagatgatgcgcgcgcaactcatgcagatgcagctcgcccaacagcagcagcaacaaaggcaacagcaatcacaacagcagcaacaagcgcagccgcaaggccagcaacagccacagcatcaacaaggacaaatgcttcaaaacagccctcagctcaacgcccagcaacagcagatgttgatggcagcggcacaagctaacggcggccaactcccgcaaaacatgcagggcatgggtatgcagccgcgaatgagtactccagcgcggtacaaccagctctatcagcagcggcttttgagactacggcaagacatggctacgcgtctgatgccacagtacggaccacccacgcaatatccgccacaggttgcgcaggagtacagtgttggccttgaaaacgctgctaagggcttcgtgcaagacctcattcgcagggagcgtgtcgagtttgctgctgctcaacagcgacaagcccaggctgctgcccacgcccaggcagtgcagcaacagcagcacaacatgatgcagaatggaatgggcaagtaaggatttatttgacgttgacgactaatggcttggaggcagcagtttctttattttttctactcccccctttttgttccattcatacctatatccctccgacaccttcccctcctcgacctaccacctcctatgagacctggaggctttcagggtctccccaccgcacccttcacctacctcccaccacacccttcacctacctttcgcattctttgattgccactgcaagaataatcttctcttttgcttattccatttgggagcaatgtataggacaaaccagggactcgagataaaacaggggcggccggcgtttacgtttatgatcttggttcacatgagtcacttttttttcctttgcttttattttaaccttctatgacttgatttttctctttctttcttcttgtttaagctactttgggcacttatatcattgggacaggctgttgtttttatctttccgagcttctttttttgtttcgatgttgttctttgcgcttggaaggagcaagcaggaaaccactcagacttgataccaatttttatataactaggggctcctctttacttgattttagcagatcagacaggagaattcagacggttgttcataagtactctcgtggttggcagctagcgaggtggatatcttctgattttcggattggcttgaccttcgcatacttagcaaactctttccaaatgcacttctttagtagggaatattgcttgcataaaaggtttctacgtctgcctgaggacttgagccatttctacctgctagaaggaggtctcgcttctccctcttcgcctgcaaggtacttgctttacctgtttctctgtgcttataacacgttctagctcctactaaacgcaagctcagaaactccaagaacagatctaacaatagttgcccctaacccggtaaaattatgctcgaagttctgcaaagagggacactctctacatcgctctgacgtatcttcctgctcagaaagaagataacaagccctgctgaacaacagaagttatgaaaatgggtgttctataactatggagtctagacacagacacctcaaatgactggcactttaagcagacattcttaactcatgtccccgccgacgtttcttgtttttcactaacatgttttataactgtctttcttatctttttctttactacgttttaattttttctaccttctcacttcatctcatccctttatacctttccctattattactttcattaattctttcacatctattttaaatctcctataccttatcataccatctccttatc

SEQ ID NO: 813 - DNA, 3054 bp, Emericella nidulans
  unsure (1)..(3054): unsure at all n locations
agatgttaaaagattggcaactaccatcttaagctaaccaaccttcctggcttcgcaaattcggccacagtcggcccattctccctcctacttctcagctcaaagacactctgataccacgacaatcgactgccgaagagcagataagcgttggaattctcatttttggtctatatttatttggccttttgaatctttttccattatctgcgtgcattacactcatttatacctcggtctgacgatttttctgccctgccaaatcttttttacgcgacgctatgagcacaaaacaaccaactggtgacgcctgggatgatgactgggaatcgcaagccgacgttcgttcttcctcactgctgcaaggcactttcaccctcttgcctcacgactgcgcgtctaacttgaatttcgatccagagactagccgctgaacccaccccgcctccaccggaaaagaaagtgtcgtccaaagtgaccaaggcccaacgccgagctcagcagctggagttcaaccgccaactgtgggccgaagcgtatgttttgctatttcatatcatactgcgtttagtctgacaagtatctcttacaccagcgaatctccgcaaacattccacttctacgaaaccacttcggatgtgcccctcaaacaagactttaaacccactgtcaccgtgctcagtcgcaatcctcagatcgtcgccagacaatcgtcggccgccggggctgcggccggtattgcgcaaatggatctgaatgccgatgagtcggatgaggaaaagccgccggagcctaccccagaagaacgccaggcaatggcgctgagaaaccgcgaggagaagcagcgcaaatacgaagaagtgcgcgaaaggctgtttggtaccccatccgcgccgacttctggggcatcctctccacgaagtgcgactccaccgagacaagaaggccgaggaaaaggtagaactcgaggaaacgggagggacaataacaatcgagaccggagagatcagtctgccgcgtcaggcaagtcgaagcaactctacgacccggcttctccatccaggcccaattcgtcctatggtagaaaagactggcagagtggtgacaaaaatcacgccgaccaacttcagtccccccgtcaaccaatccgcaaccctcgcggaccggatggtagcggaaggggtggctttagggcacaccgaggagcgaaaacaccctagactacgcgtaatgtattgctacattttacgcattgtgcgctcaaatctcgactatcggctgtttcgtgaaattccacagcttcactaatctgagctgacgcaattacttgctatgagaacgaaacgtggctatggcaatcctcttccggaattgatcgcattcgcaagttgggaagtattgggacgattatctgctgggcgtcagcttgatcgcaagtcaaactaaggacactcaccggcatagcgctcatagctgtcaagataaagatccggcaagctcgtcgtcgccttgacgctatcattggcctcgatagcgttcacccaagcgctccatcgagttcctggttccgggtccggccaaccacggtatggtttcaaaacgcggttcaagcggattatccagggcgcaacttggacatccacaaaagagagatccggtccaagaaagaacggtccttcggggtcggcgacttctattaacgtgttgaatgagctatggagttcatgtgcatgttcaatctgcttctgctgatcttgctcttggagcacgcgatagaagctagggacaatgtgacggttgacctgcatttgttagaaacgtcgagcaggatacgaaggttgtgtcactcacaaagtcagtccacagccgacagtgcgctctcagcttcgcatcacccggaggaaggagaggagggccaacctctaaatcctcaagctgccgctcatgttagtcttgacccagaacaagggagggctgggaggtctcacatattcgagcaacacagagctctcatacgacccccattcaccatgccgcaatgctggaaccaggccccttgggttcacatcgagcaatgattgaggctttttatatgggtcaacctcaatatactggtaaggaaggcctttgagctccagggcaatccagacacgctgcacgaaagggctagactgagttaggatactgatattgtgtactctgagaagctatggataaccgggattgactcaccagaagcaactcccgtacaacttcaaatccgattctttggagtgattcgctaccgtctcagccgctgcgccggtggcttgagtgtggtaacttttcggggcggacattgtcctggtcttgtacgctctattagaatatatatgagaaagagtcaatgacagttggtgtgtcgtgatgtccagaaataaaaaagtcgacgcaagaaaagctcggaagaaaagcggggaagagcgtggcaggtgtggcatgtccctgtcgccgcgtgacgtaacccgtcacagacaaatcatacagaaggcaggagctcttgaacggtaataccccgtaaagacagacagaatagaacgagggaacaaactcacagtcaccgacaatgcttttttcctctcccttgcctcttttagcagaaatcgttcacgctgttcttcttcactcgatcggtttctcgagcgtatgacggtgcccttcgcttacccaacggttttcaatcggttcggtccaatcaccgctgaatgggaaaaccgtgccactgctctggggccttttggaaggcgggtggcggaggcccaaacgttggtcgtctgcttcatttgggtggagttccccccccctgagccgggcaaactccctcccgcgagagggactgagagggttcacccggggctccccgttaatggggcaccccccctagaaaaaggagaattttttgtgtataactgcaccacacggcgggggcaccccctgggggtattttttttgttgaccccccnccccccctttttttttttttatttttaacgtcccacctaaaacaaaaagaaa

SEQ ID NO: 814 - DNA, 7270 bp, Emericella nidulans
aacatgagattttttacctattctgcggctcggggccctggagtttaataccacccgcatattccatccattctgccccatcgactaaccttggccacagcatcctccttgcctactgactgactggtgttgaaaagattcggctctctgtgccgcttgccgtttttttatctacttatcaccatgctaaggtgtggatgcaacaatgcggcgcacatgtggtgggacagtcgaagttcgctggatctggatttcaacaggggttcgatctcgtgatcggcaccttgcttgatagattgatatctaggctggagcggttttcactagcgactgggtttgttctagaatgccaacaatctcgatcaccagatcgatatcgacgcattccttagattatcgtgagtctaaggaatgcttgaatactacctacaaaggcggaagtctagactgggaggcatatcagatctacgtgccctgcatgtgtttgcatggaggcttgtacgagtcatttttgctctctcacagattgcattgcctttctttgtcttgtatagccagttgtacagagtttcataaatgattgcacaattattatgcacatccgcgctcaacaaaatgcaagaaaggatgttattagcacgtacatagagcgacgaagtaaaagtctttgccagcccccaagacccaacgagtagtagaggtatttgtgacgcataatatcaccgtctactcactgtttaagatagcgccgtcatagtctccgtaacttgcataatccccgtagttcccatactctccatagctaccatagtcactcgggacagtgggtgatggggtgggactggtcgtagcggaagcagtagggctggctgaaggcgatactggaacgctcgagctggggatcgggacaacagtctggcgcttgacgttggcgttgagattcttgctatccataatcttcgagttggcgtcggtttgttcagaatccatgtccgcgcccataccgagtgtccagtccgggccttctctttcatgtttccgtcggggagatcatccttgcagcgtcggtattcggttgagtgggagctgtatccaccatgccggtctcaagtgaccagtcggatactttttcgttttcgtgggtgctgggccccatcatcgccgcatcgtgattgcggtctctgcgcaggtcggcagagtgctcataggtattgggcatgctgaacgtccattccggggtgactttcccagactccgaggcgccatctcccatcggtcgacagagaaccaggcccatctgcgccgtcagggccaaaagtccgacagggatgaggtgcatggctgacgagtctagactgcggggtggcgtggagtgagagagttttggtggcgtctccttgaacaagaaagctgggttggcagttgaaaagaaggaacaggggcgagttggccagtcttgggggccctaggatgtcagctgtatttatgctctaagtgccgacgatctgatagatgtcagaacaagatcatcgcagttgcttccgtctttacgcgtaagcccccaattttcttttcctcccccgcgcgtatcagaccgggtgaggagtgaggaagggtgtttgttggtgcatcatcccatcttctggcagtagagtgtttgattgaaggcgcagggtgcggatgcggtgttaccacgacccttacacagagaccaattggataaacgaggtctcggacgttttgtctgggttccccttgctctttcgtccttttatgttgaaggggttcaatgggggtcctgcattgtaccctctctcgtctctggatcttcaaggctccttgcttggtttccaaggtacccttgcacaccgtcccatacattacatccaggcctgtagaacaactccactccaatttcgtggaatcatttacaaccttttcctactccgcagttgaaggagactgtcggtacgcgatcgctgtcatacggtcaccgttaacagccgacgggctggacacccgcatagcatcttcgtttccattcgccccatgctgttgaacattgaaaaatgccgaggttacctttgggatatccgccaattctgctattggctggaaacggtatcatttgattgctatactacagatagcacgagacagacagtgaacaaacactgtatttgcggatcgggagcctttctcccccggccccttccttcgtcatgcggagtccagattctagatcatccttggaacgagaatgctccttcttgtatcttagaagagcttctcagatgaactatctaccgcttatggctcttcctctcgacatgatgcgtctggcaggtaaaggttcggaagacagaaccaagagccatgacaggctccttgacgacagcgaagctgtatacccatggagcgggcaaagcaacaaagcagcgcaatactcagggagtagccttggttggacgatagtgttgttcatcatcgccacggcactgtcttgcatgatcggtatttttatcggatatcagcgcgataatctggatgatgtttgctcgcggcacacctctaattactgcatgctatcttctctgctttgcagaatctgtcactaatgcaagctgtcagcaccggtcatcacgaacgttcctatcaaataccaccgccagcgatttaacggctccttttttaaagagaacgtctatcgccagaatgcggggccagaggtcgatgcggcttgggaggcgttgggtgcgaattgtacgttggtggttggctgttgcgttctgatcctgagtgagttctgttcagttccttctgacccgtgatgcatgcagataggcctatccgcgtctcagttgaggaagcagctgggtccggaatcgcgctagatcatgtccagatcagcgaagcccacggtggtgggtatccggcaaatgtcgaggggcttcatcatttgcattgcttggtgagtatatcttatcggtcaacccaggaaggccaaagacatcagtagcgagtgaggcgagagggagcaaaaaattgctgacgctgactgcacagaatctactccgccaatccctctactataactatgaatactaccgcaaaaagggagacggtgcattccgaaacgatgattttatcgtccggaaacatgtttgtatgtctccctcgtcctgctggacacatgcactctaacacctaccagcacattgccttgatattctccgccaacagctaatgtgcacgattgatgtcggcgtcctagggcaggtctggatccatccggatcatcctagtcccttcgttgacttcaatacggaacacgtttgtcggaattttgaggacattcgggagtgggcacagagaaatcagttgcctttgcctgcgcatggacatggggctgatggtgcacaggctgactttttggtcccaccacgaaaagataaggttttgagcgaaattccctgaaaaaagggtgagaagagtctgggatttatgtacaagacgatatcagtaaataaagtacatgtatggtgaatgtctagagcagatcgagggcataggaacgctgtgatgatacaactgagcaataagccgtttcacgatgttaatagtaaatagttctctcaacatgtcctcattagcaattaagggacttcaaggacaaggtaaaggacggatagagacttcaaaggatacaatagcttgcaactcagcgtaaaacatatcgccctcagcagtttgaattggataaatgcagctgaaaatggattcccaatacactgtgagcttcctgtttgtatgacaaggacacagcacatgcaatatatgtagactagaaagatagagtgaatagtatccttatatgacgagcgggctgtctaagaactccctgatcccccaacgaattgacggcgctgatttcaaatcttccttttcccttcccctttcgagggccatcaatcattggtcagtcattaaatgtcaaattgtgctcctccggaggacgggtttccagtaaaggagagaccaggtcgaatagccggcgacgttcaaccatgcgaaaggcacaatcgtcgctccaccctcttataataaaccagcttcatcgaccacacacgcactgtaccgtcgtcttttggtccaagaccttattcggagagtcattattggatgctgtacagaagccaagaaagatccagttgtcttcgtccacatctggaatgaaaatgctttgtgaattggcaccagaagacaaaggcttcgagcttctcacgcggctttacctaggtgaaagacgccttattaccgtgtgtaagctctggcattcactcttaccctaagatgagtctgctttccagtcgcatgctccggcttccgcgagaagacggcagtaagactgctcgtcctggcccaaggtgcttcacttcagtaagttgtatctgtgaaagacatctgagcctgatcatcggtagccggagacagaccaaataatgaacctcaatactgagattccttccgtgtttctctcatctagtacaggtatcccttctcgatcaattcgtacaccaagaaacacatggcggtgtcccgtcctaattgaactcggcttcaaattcatccatacttagatgtactactcccgtaagcctccagcctcgacgggggatccgccacgcaatacctatagatgggatgttctaggcctacgagttggaaggtcttactctgagcgatttgtgcagcaagcgcttcacagaaggacaacagaaaggcatttcagatatatgcctgtatcctatcacaacgcattccaaggccgtgctgttctgcagacacagcccaaatttcagttatgggtggttctatatagtgaatgactgggtgaataccctccctttgtgagcacgtgattaggtctcgattcagacggtagatcaaccggacttatatatcatcaacaacaaggcagtattgcaatatttgctccaagtggtacccattctaaactgctttaacggcgcatagcatttgtttcgccgtcggtgctagcgaatatgttgaccactcgaatcagcaccgcagttttacttcatcgcctcagaagatggaacgagttaatgccagagatgaggtcatcaaagccgctggattctgattgtacccagcattcgagtgatattgattccttatccaacgcgagaaccaccaagactaccaagaagcctttcaatctagaacaatacgactccatcgaagctcggacaaatcgcgcaaatatatcacaaaggccaaccgaactgtctcgacagcgtgccgacaaagaggcccaatgtggacatcaaacatatgacgctgttaacactcgtgtggtatacaatgccagctctaaaccttgtagcgatggacaaagcccagtaccgtttcctggaactggctctgacagacaacggaataaccaaagggtcgagttaggtgtccatgtactcgacttaacatatacggagcaaagcactttgggactaaacagaaaatcagtcaagacgtcgagcccgcttttcaaatttatcagcttcatcgcatcgcgacagttcgatcaatatcgtcaatacatattcgatcagcacattctcaagtcgactggttcgctaactttcctctctagaaaattaatgggcttgctgttccggaacgagatcgcaggtagaggcgcatcaagcctgtacattgcacccctcgagtgctcgagctacagtcttggggacgacgcagcctcgccgaagccagtcacccggaaacccacacccgctgcgccaaccgcaagttcgccaatagttaccagcttctccagagaaacagtcagcaataagccttccaatgacgccagaagctgggaaacaaccacctcccaagcgacaccgacacccaagccctccaatgccggctacaagcaaatacaatacaaaatcgttgggtaccaaggagatgggctggaagcgccaatcgtatcaactcgaccagcaggacgcccaccctctaacaccatttaccagatctacgtcgggattgcggatgagaccgaggaggaaagcgagcactacgcggtggtcgtgcggaccccgcctcacttcgcagaccccatgggcgactgcgcctggtaccactgcataggatgggggatcgaggaaacgaaccactaccgtcgagttgtggatgagccgcaacctttcaaatcgtcctacctcaagcgccggatcggagtgggcataatgaccgaggcgcagcggcaggatttccgccgtgccttccggcagacgccccctcagtcaagtgaattcttttgtatacatttcatgcggaagctggttaagactggaatcatacaaccctaccagatccagcagattgagtccgaggttggtgagcctcctgcggagcttgagtgggatcctgactactgtgattcgccggattttgggcctgagactttggactatgagggaaatattccaatttttgagatggaggatatcgatagagtttaattcttggtttgttctgttattgtcgtttgatgcgttgggttggcttaattatgttgtaacggctaaagggtagggctggcttgataatctggtctggagttagggctgtggaggtacccgaggcctacagaaacatcatccacgcggcctggtacaaagagcaattagaaatcgataaatcattacttgattacagtgtcaaggcagacgctgttaaagacgtgttcaagtgtagcttataagggcaaaatgttgactgctgccgcccaagatcaaaccatgaccctacagcaaaacgccctcagaggtcggtcgtccgaactcgtcatgtcaacgcatcacattcactaaagctcatagaggctacgtattcacccaatgaaaatgcctgataatcctctaatcggcacttcaaccgattcctcaagtgtgtacccgacgagcagcgcgtcgttcacctacaacatgaaaccgcctcatctccccacctcgtgtgatcctctaggtcgttctcgtccatctcacgcaacattcccattctagctctagttctatcggtacgatggggaaggcaatgaccatgtccatcctcgagttcatcgaccgcttgaacgtaatgtaaggaatatgtttcggcatgactataaaagataacaagcactattctagcttcgaattcattgcaggagatgacatgttttccactcctttctcat

SEQ ID NO: 815 - DNA, 2745 bp, Emericella nidulans
ggcctgtcaagcagagccgagagttcaagagcctcgcggatcgtagcagttgcgtcgtgcaagtcttttctgttcacaaaaaccagtgccccgctgaaaatcagtgctgagagggcggccgtccacgaacatatcgcctgaaattacgccagtagtctggcgctgagccaaggtgttaagaagagtcgtttttccagctcccgaggcgcccatcaacgcaatcattagtccgggcttcgcataaccactgacaccgttgagcagctttcgagtcccatttccataaggaaccgtgaattcgacgttgtcccaggtgaagacgcgctcactagaagaaatacgattgaaagcggcttcattgttgcctccagactgcgtcactgcatcgccctggccgttttcttcgtcgttgggcttttccgtggcagctttgatttgtttagcattactggaacgcttgaaaaccagggcaccgtcaccgccaccgacaaaagacagagtctccgtggcgatgacagtgaccagcaggtacaaaacagtaaaagcgatgacaacaccaaagttgcgccagaggtggtgacgcgtgaactggaatgttgtactcaagtaatcgcttcctgcaacgtcggttgagccgagcttggatccggtgagagcgcaaccctggtactcggggctaacgccaggaccttgcgggaccagcatagaaggatcgcaggccatgactcggtcagagaactcattggacaagacagactcataactgtacgatagcgggttgacatagaacagccatccgaaccaaatcgagccatcaatgagaccttgcttcggaatgacataaccgacgaacaagaccagaacgttcaaagcaataccagaaaaccggacggcatcgtcaatagtcggggacagcgcggcgaacatgcgatacatagacgtgatgcagaaggttgtggtatacacgaacaggaagtaaatccagaacttggaagccgtagcatcgagaccagcaaggaaatagacgacgatggtaaacggtatacacatgcagaggatagccgggaagtcgacaaccacgcgggcaattgcaacggcggacggtcgatagaaagcatagtctttgtgtcgcgcgacaatagcacgtccggaaaccgcaggcatcagttcagtcaactgcagccaaccaaggaagagaatcgagaagaaaagagcgccaccacgagggaaggcaccattggtgttcatcgcctcgccatagaatagggaagagacaatgaaggcgttcgagatgattataaagtacttggtgtagagagaagtcttgtcaccccagagaagccagaactcgcgacgcacgcaagcagccacctggcgggcgatagagacagtataaggggacttcttcgagacagtcttactcttagacgattggacagtcttctgaaagcgttgggtatcggcacagttcgtgtcgtggagctgatcctcgtaggcctgaacttcgttctgaataagcttgtagtactcgctctgccggaaagcagcctcaagttcctcgggagtcttcggtgtcgatgcctcgcggccttcctgaaactgacgggcgttagggtcgcaaagcgatgtcaggaagtcggccgttgtcgactgctcagggcagtagaagccaaggttgacgaagtattgtcgggcgtagtgtgcagggccttggaatagcatgcggccagagtcgatgacgagcaccttatccatcagctcgtaaatactctcaccagcctggtacaaagtcaccaaggtagtgcgtttgctgacgtcggtcatgatacggagagacttggcgtagtccagggcagtgctagcatcgagaccgcgagtggagttgtcccagcagacgacggacgacttggtagctagggtttcagcgatactgacacgcttcctctctccaccagagacaccgcggacgtactcgttcccgacaagggtgttcttcgtgtgggtgataccgaacattttcagcagggcatcaatgataatcggaatgctttccttgtcgttcttcttggtcttgttaatcaaagagaacttgagcgtctgccagacagtcaggtttggaaagtgctggtcgtcttcctggttgtagttgacctctccacggtagtgcctatcctgctcagcagcgctgagaccaccgtagctgacatcaccttcaacagcagcaaaagcaccgcggtcgttagcaatggccttgaggaaagttgaacaaccggctcctgggcgaccaagcaccagcatcatctctccttcacggacagtgccggtaaagtcatggatcaggtcacgcacaggcggcttcttcccaaaccgcagctgaggcacaaagcggcagatgatgttgtatagatccggtccaaaggttccaatgacggcatcaggaagcgttcgaacaaaagaagcgccggtctgaacgcccttgaccgtaaggttcttgaagacaacgcccactttcttcgccgggtctcctgcggtggtacgccgttcaagatgaccgcccatgaggaaatccgtcaagtcaaaaccaccatactcgctttcgccctccttctcgagatcctcctcctggagcgccttttcgggatcctggtgctggctggcgcgggaccgcaatcgatgagcgtctttggttgtcgacttggttcgctgcaaactcaatcgggtcaattcctgcgcatctcttcatag

SEQ ID NO: 816 - DNA, 6803 bp, Emericella nidulans
ctctcattcatcacttacctgccacccgatttgttgcataaacaatcatcttaagcagctccccacatgcgtgaagcttgttggacatgccgtaatcgcaccattcaatgcgatcagtcctgcttcccctgtctgaaatgcaaaaaggcagggctggagtgccgagacaaaaagcccttgcgatgggtccaaggcgtggcgatccgggggcgaatgcggggatatatgtacaaggagacacctacaaatcatgatgccatactgccgacatacctcagatccaagcgggtcagaagaggaggccaccagcttcagcttacgctgcaggacccacgcatgcagaacctggatctatcgtcgagatactacattgactactgtgagtgtactgggaatctgctcgattggcgagatgtctatgctaatacaactgacccggcccagacagccagcgtatttgcagactgtatatcctgcacgacagcgacagcaacccgtttcgcggcttgcttgcttacgcgcttgaggatgctcccttgcgaaaaagtgtcattgctcttgcagcgcggcatactgcgaatacggggtactcatttgaccagtctgacaaaaacgacgtggtggttcccactccacagttgacgtatgctactctggatgcgctccgtttcaaaacgcaggctatcacggccttgcgagagagactgactcgtcagcatctggagtttgttaagacagacacgacgattgccagcatcttacttctcatcttccttgagcttctcgagtcaggactggatgggtgggatgtccatctgaaaggagccagaactttggtccgcctttatcagtcccttagaggaaagacttacggtaactgcggctctggagatatggagcaagaaataagcacgtttattaccagacaattttccttgtgcgtctgcctgagtgaattgaacaggtgacttactgacaagaccggcaacagaatcgaaaccctcggcgcctcgctctcgcactttaaccctatatctgaagatttttgctctacaagctatatactcaacccaggaaaagagtctattgttcgaagcttccttgggtgtccagaatttatcctaaggtctatccagttcttctcaagccaaagacagcttgctgcggagtcgccgcactacacagcacacatgcaggacacccttgcgatgcttgaggtaaccggaaatttcaattctctagaatgggcctcgaggctccaacatcagcaatcaagcccggcttctccatatacagcagaaatggaaaatttatatatgctgggcgaggcgtataagatagctgctttgctatacggcagacaagtacttggaccagagttggcaactgcagagagtaatggactggtcttgcagcttctgggtctgattgacgccctcaaaacccaagattcgctgttcaagtgcctcctctggccgactttcattgctggccttcactgcctggagcgagaccagcagggacttgtgcatgattgtttgaaaaggatctgggaactgacggcttgcctaaatgtcatcagtgcctctaacatcctgaaagattgctgggatcggaccaggttctcagaaacccagtttcgttgtgttgggttggatcgccgctggcttttgatatgaggcgcattgccgctctcctacgccttacagtactttatggatagtctcatgattgagaagtgtctctcaagctcgagtccggtcatgctgatatgaaaatacagcattgacgacttcagggagtagaagcgcgctcgaggcagcagtgatgaaccaccttggttgctgtggtcctgcctctttcgaagcccctaaatgccccagctaggtatttttgtgagaaattctcatcctcagctatctggtttacggggtttgatcgggcggctttactctgtaaaggagaatctctcatgcttctatgtaaacatatcatatcacgacaaccatcacgagtattgactatcaaactgtactctcgtcgcgattgctctctccgccaaccccgtaccgagatctgaagccggaaccagcctttccgtagagctcggcaaaggccaattattctcgcttattgatccgacctgctcagtgtagatatggggtcgcggccatgtcgccgggtggaataaccggctcttgcgcaagcgacgcagttcgtttccaggttctctaaagctgcgcttactatcttcaagagcagaatctgagaccgacgagtcatcaaagagcaactcaatacgttcggcatcgtcattgtccacgctagagtccgggcatcttatgactcggatcttcgctaccttcgcataagtcttcaagcgctgaataccgcccccggtattaggcaagaccgagaatgcgggccgggagttctgcgagagcgcaatgagttctccgactgtgctccagctcccggatgtgtgtctttgcacgatgatgtagatagtatgcgccgttgccatgaacatatgaattaggagtacggacatggcgaggtatgtagctagggaactctgcaatgaaaaaccgctgattttcatctctgctttgagtgtgatatacctgtctgggttggttgatggggcctgcatagctggtctgttttcaagaattaaagaagtgaactctggaaggggggtatagttcgttatggaccagtctgacaaggatctagtggtgttgaatacgcgatgacttcctgttcggctcagaccgtccaggataacactacagatgatggcttcgaccagcgagacgcgttcccaggctgcgttgtcccttgaaagccatgattccggacttgttgctacgccggcagcgtggaagatgctttcgattgtggaagggtaccaggaactgtcctctagggctgttgcagcggccggcggtgtcaacagttcaagccaatcgtcgccgagtgcaacgcggccatttgttcgctcagtggaggcagggttgtatgcaggggtccggtcgccgaaaaggatattccacgggtaccagcctgtccagaaggtgtatttgtctgtgtaaactgtggctggaacccagcccgcctggactgtacaaccgatcacagctctggatgactcgcccgtccatcttgacgaccatggcgactcgaagagtcctcctatactggcggctccaaagtcggcagggaggtgaacccattggaaccgcaggtggtcagcgcgagttttgttcagggtttctacctcaagtggcagagcatcgccgaagtcgaaccggccgtggacaactgggaatactacgactgtgtctgaagcgcgtagttgctggggttctccacaccggacgactgtaatggcattcttgaaggtagccaaggcagtccggtcatcgacttggttatctgtgaggcctttctcttcttgaagggcgttccaccagtcttctgctagcttttgtaatatcaccgttgtagctgcgtgtggctgggttaacgtggtcttcccattaggctcttgctggatatcgccaagggcgtaaagagggggaatcagtgataaaggactcgaaataggccagtagaatctcgatcccgagagttccttcgcgtaggagcggacgccctgggtttgaaatgtgctgctattcatggttccccagtgagctagtagagatccgtatcccccgccagggcagattgctcgctctgcggaggtttcctgtgtgcagagtgcctggagctctgatatgtcttcagataggtcatccggccagaactggtcgtctgtgccgttcaggtagaagggagtcccgcctgcgctccagtcttgagatttcggaacgagtagcgttgcacttgcaggtccagctagggcagctactactcctgcgacgagtataagagctatcagagcaatcttgcgggtcttgcttccggcagccacatatctcaagctcccgcgaaactcctgggagatgaaatactcaacatgattaaaggctagcccggagcccagaagacccaaaggcagcccttctccaaagagaagttcatggcggatatattgcaggacgatcacggctaggctggcaacgatcgccatctcgtgggctttggcacagagttggaagagcatcagattgattgtctcagatttgaaaggggacattaggtctgcgccgagatatgcacccttcatgctgtatgctattacgatgcttgagactagaatcggtaaaagatggactgcgcaagatctgagtgctgccaatatagatcgggttatgacgacttttgggggctcttcatgatcagagcaggtgctcgcaatggaggaagtctccatggatatgtgcttgccagaaacattccagaagggtagtcgcatgctttatggtaaaattgcttgtactaagtcctgacgctgctgtatcaaagaggctgagcttcactcgaacgccgggaacgctggggtaaacatggagcgtaggggagcagatggggctaaataagagtcggccatctcaggggaaagacgttatatctagctgagaccctgggcggctaaaagtaccttgcttccattggcactatgaagccagttcataagacgacttatcgaacgtggacaaatagcaggggtgggtcaagaggagaacctcccgcgcttcgagatcatgagtaatccaaatctgcgcgccgttcctgctggcagttatatttgtctgggtaaaaacgggtttcccagcattggatggcctagcatcaattgaagtgatgcactcgctggtagtctgagggcaggcgcttagggctggaaattgattggacagcacataggtcaggcacgctaatccaaaaatggaggcggccaaggatctcggcctcagttgtgtgaagtgtcgtcggcaactcctgaatctaccacttctttccctcacccgcttccaccatcgactttccgccatattatcgtggtttagtatcggcagtccatttaatatcgcgcatatgtcctgaactgcatatatcgcccactgaagccgctaccagcgctctcaacgttcgcgttcaagaccgacgatcgggcggcactatccgtccacggcggtggacacgccaggaatgactgacgtctcgcgctatcttcactttggccgattctctctgtccgcgactggggtcatcgttctcagctacttcgtcctctacgtcctttccctccggtactaccatggcgttagctatcgtgatccgacctcgtattttttcgacgccgaccgcgcctacgagcgacattattcggcgaaacgagttgcggaggcggaatcatttctgagcgcggctggcgatgtagcgcctccttcaagggtaccgggccagcagccgtccttgtgtatgggcattgtgtcggtcaagcggaggggagatcagtacgttggcttgacggtggcgtcgctcctggatggactgaatgagtgggagaggagcaagatccttctgtacctccgtatcgggaatacggacccaaaagtccaccctatatattcggagaaatgggtagaaacgctgcccgatcggctgttgacgtactcgccagacgaccccgattttgaacaactcaaagaatgggaggaggggggatggtatcggaacaagacgatctacgactttacgacgctgatgaaagaatgttatgaaagcggcgccagttacgtcgcaatgcttgaagacgataccctggcagtcaagggctggtcccatctgccatgcgtgcccttgatacagtccagtcgcggactgcgggccgagactggatctacttgcgtctcttttatatagatggcctgctaggctggaacggcgaagagtggccgaaatatctaacctggtcgttcattgtctgggcgtccattactggagccatggtcgcttctaagagagcgtttaaaacagagctcaggtccatcccgatgagcgctatctggctcacatcgaccgtatttatcccggccgccatcgtcctccatttcctggccggccggcagacaatgtggcccataccgcccggtgtccacgagatgaataagtacggctgttgttcgcagggccttgttttcccgcgggctatcataccgccgtttctcgagcacacggacctaacgacggactggttggttgacatgatggttgagaagattgcagatagccaggggtggagccggtgggctgttgttcctccactgttgcagcacattggggccacgagctccaagggatacggattcgataactcggccagtacgatctggaattttcggtttgaggagtatgatgtttagtagtacacataccttggaatatactctcgacaatccagtttccgtcagtactaggcacacaatcaacaatgcgttggggttatggtacccctgcccttgtagtggttgatgcatatattgaatagcgtctgaaggagtatgatggtggcaggaatgaccctgcagagcatttttaaggtatactagatgtctcgagatccgctacagaatccacttaacagacatcaaggcggcttcaaacccctcatcctacgtaaggcacgcagtcgccagggacttttacctgctggccatctcgattaggttatgttcctgcaaggcagtgatgggaaatttcatacgttcctgttacctggaatgtcgaaaccgggcagactccataatgtctagacgtgtctggagagaggaacccactccgtctagact

SEQ ID NO: 817 - DNA, 1627 bp, Emericella nidulans
  unsure (1)..(1627): unsure at all n locations
cgtgcggcactcgtccatacttcctcaccagattagcaaccatatcccactgccttccatcagtcaccggatcctgaaggagcttctgcaccaagcgacttgagatatcttcatttgccgtctcaatgatcgtctcgaagaagtagttggccttttcgatcttgtcccaatagaagagatacgcctggctgagctcaagctctttcagcccgtacgctttcataatcggtacccggaatatattggtcgatgcaaagagccagcatcgcccagaagatcgctggttcgtgatcggcgagccttcaatgggtactttgacattgaatacctggatatcggatcgtagagccgatcggttggcgaggaggtcggtgtaggaggcgccagctagactggagattgccagacgattctggctgggttagtcctgcccagtccctaggccgaagctgccagccttacctttggatccgcaagcagtgtctcgttccagtccttcaggcgatggagcgacaagctcggttcccgctcttccattgggtacggcggagctagaatgtcagcggcactctcccatgtcttcttgaatatgaccgtaggacagcagaacctacgagactctttctccttgtgcttatcggtcaccggcggcgacagagcgacctccgtctccccccgaggactcttctcctcgagagcgggcactgagtaagatgatcccatcttgcgtgcggtctgcagctgcctcttcctggcgagggtgatggagcctggttagggagggaaaatggctgtgatcagagtcggtgcggggaagtgaggaccgggaaggcgccgatagcagactggcagcgtattggccaagaagagagcacgcgatgcaaccaggcttgcttatcaagcggcagtcgcatcccagtagttctttgggcaggcgtctgcagtagaaggtggtaagccgtccttggctgcaggagtataatctctagcttgggagcaaaataggtctggtccatatatccatataatcataacaaaactgtgaatttccagaatagatagttctccgtaacaaactgggccagtagagagtgcagcagtggttatatttatatatctgtcagatagtagcatccgcatacagtactactacctttatgcactgtcttgggcttgaaatcaaacatctatagccctgtctacaattgactatggtcatcttagacatatttcttacgtgcaagaaagtaagatacctctctgtttaataggattattagattatcaacattctacgaactggttaacataactaatttccttgaaatctagcataatctacttgctgttttcaaattagttaagcacctattccaggtacatatactagcactttatacttagattgagtacacttacccctttatctctcagcacaatcagtaatgaagggtcaggtcgagttattgagcttgacctgtgccatgcgacagcttgagtactgagaatatagacgtgttctgtaaaaccggcgtaccttcgctgcaaaccaaagagtatgcggggagacagtgcggtatctaagacccttgaggtcggctagggatcngtagtgtcagcgtaattg

SEQ ID NO: 818 - DNA, 3182 bp, Emericella nidulans
  unsure (1)..(3182): unsure at all n locations
ggtagtttccagagcagaaatgcctggtaaaccatggcttatacagccagggtgttgcaattctgcgaagttcaattgatgtatgaagtatgattgattgttgtgttgttctgaagctatcgccagtgatatcatttcttattctgcccgacgaccgaccgcctgggtcacgggctatcatccaggccacaggccatcatcccgcgagccaggctttgggatatggcaacaatataacccttcatgactggcttgctatctttgatgatctttctccagaccataaaaactgggtatatacttggggtgtatctattagcctataagacctttccttcctcatgtgtggattattggggtggttatgtaatcaatatccgtagttaacgatttcattgaaggtcttgatctcctaactacgatctgtataggcaatttataccttttccaaggcttcaaaaaagaaggttcttgcttatacaggagatatccttgccatataaacagtataaggcatcaaatagatatccctgctatataaacagtgtaaagtcttaaatagacaggcaaataaacaaggtaacttactgaatattgattagtaaggaggaatctcctccagttgacataccccctcagcacattgagagtccttcagtttccttcttgggattggatgaggtctttcatgtctactaggttgagcatcctgacaaattcttggtatttttagattataaggctcttagtaaggccatccgcaattatctggttggtaggtatctatttaacatggagtcggccttcctgaacctcttgacaaagccaggatctatatatggcaatataacagagcttagattgttgcttaatattttcagaggtaagcaagttaatggtctgttagttattatagtatactgctatctaatgttgcagatcaaaacctatgtgttatgggtcctttgcctatacaaggaccttagaccttagtgactcggccaaggcctgcgctgtcctgaaggcggtgagccacctacaagacttcctcacaacaacaatccttctttctcctttcttctttagcgattccttcttgtacgtacggcacgtctagataggaagatccatctaaatacatcccttaacattaggaattgcttactaatctcaataatagtatgaggagaccttttactatgataatggaagaagaaagtattatattgttgctacagcagctccaggagctctgtacagagatatagacttagaaataacagctctaagaagagaataacagcttataggcagaactacaggctgtacagaactcacagctaagaaaccatctaccagttactactacagttatatctgtaatgcctatcccttacaaacaaagctatccctgtccttgtcacctggatattgaaccctttactagagaagaccctaaggactaccctcctttctagataaatctttgtacaaagtttataattgacactgcctgctaccctatagaggaggaacaagtttactatgcctacagctgcctgagaggaaaagccagccagcatatactaccatagctcttggcttgctagaaatctgagactcctgtgctataggcagaattctctgtagtactagacaaggcctttggtaatcctgaccaacagagaaaggctcttgtataagtaaatataataaggtaagggagacgcgactttgaagagttcttgaataaatttaacaaagaacttcttaatactggagggattaattaggataataaccagaagaagaccttgttagacatggtaattaatattgagttgctaaaagccatggttggtattaggcaggaggatttgtataataactactgtaattaactgcatgaaatcaaccacaacctccagagaatagccaggcttatataaaaaggatcttatactgctgtccctatatatattgcttgtataagaccagcaggaggctctgactggaccagaacccctaattaaatagactaggaagccacccatgctcaaattgcagccctataaaaggaagttgtggccctctatataaaagggaccaggatcctaagaaaagctagtcaggtgcctgcagaggagaagtaaaagaggttgtctaagggcaaatacctatgctgcagtgatcctgactactttatataagaatattctataaaacctactaggcgccctaggcaggtggccacagtttaggaagaacaagactaaatagataactacagcaagagcaagtcagaaaataaataacctctatgcaaagttgtatatagaggggttatacagctagagaaatactacttaattggcaagatttcaacagctcgcgcatgaatacccccctattcttagtagaggtactagttaaccatacctataatgcttgtataataatagatacaggctgcctgacctatggggtaatcagtaataagtttatcaagatatattaaatacctactatacctatccacccaaaacctttcaagggagtgactgggaatatagaggagattaataagattatataggttcagctagatatcagggtgtatatagaaaaaggagcctacttctatgtaatacctgataacctgggctatgacttgatcttgggactcccctagctggagcaatataatagaaggttagaggctaagaggggcaggctgtacctctgtactactagagtctatctatagagtactacaaagaggcccttaccaaagctgaatatagcatagatatctgctgcaactataggaggatttatataaaggaaaaggtgctgtagccaagatattaagatatttgcagtcttattagtagatatatagaaggtactggccctaaagagacatattaacccctatacaaagctaccaaggcaatactggaaatacctaaggctctttaaacaagacaaagtagaagaactactactgtaccagggagataggattaattacaaaatcaagcttgtacaggaggagagtaggaaggatcctgaagtcccctagggccccctttataatataacccaggaagaactaatagttctctggaaaatactctctaaactattacagaaaggctntatctatataagctattccc

SEQ ID NO: 819 - DNA, 1024 bp, Emericella nidulans
tatgaacgaattggactctataatgccatatgcttgagaacttcctgatatttttgaggttaaagagaggagtgtgatgggacagacgaagggagggctttcatacaccacagcaacgatctgtatctagggttgctactgaacatgggctctgcggagtttgtgattgataaagcttcacgtgctgttggtaatgtccgatgtccttcctggcatatctactgattcacatcatattttacgcttcttggacagtttaatggattgtccctgctttaaccgccatcctccaggttgctctacatcctacactagcaaagcactatgcaaaactaagatacaaagaacttattctacgggcctgcagcagtaccgtcatagactagacagactatttacaatattggtagcgggcttgcagaataatggaaatacatccggttactccaatgtctgcttaatcctttgaacatctgctacccagttcattcggcatattgattgtatgtacattactctggcttaaccagtgggcgcttctcaatcttcacccacatgtcgcgccagaaacccacgcctcccttgatcacaaacttagcctctggcttcccctggacggggtagggcttgtagtaacggaagaactagatacgttagacttatcagacattacatggatcaccgggggaagaaacatacctgaagtggccccttgaacagttccatcatggcaatatctctacccaaacacactcgggccccgtacccaaaagtaaagaggtacttgttcatgatcttcgcccgctcgggatccatccagcggtccgggttgaattcctctgcgtccttgccgaagacggcctcgtcgcggtgcatgatccatgggtttcctgttatctcggtgccagccggcgccaccttgccgtacaaatccagtcctggttcggagacgtagcgggggaagatgtttggagcgggagggcacattcggagggtttccgtacgatcgcacgaagaatgggag

SEQ ID NO: 820 - DNA, 2434 bp, Emericella nidulans
aagcctgtctctcagactccttaatcatgcgcgtgtttctgccatttgctatagcggccatgaccgtcaacgcagccacgtttgactgggactgcaccaattccctcggagcatgccagaactactgcttttacgcacagtgtcgtggcggcgcaggccagcaactcacctacgatgccgacacttccaaccgtgcaccgcgcagacgggcttccgggtgcagcaagaccccctgcagcgacacgagcctgtcgtactcgagcttcggcaactcctgtgatgagtttccctttgcgagtacgcgcgagggcgggtcaggcgctcgcctgagatgcgtggattcaaccgagaatagcagtacatctttcacctccaaattgattagctccactgacctgatggataggcgagggaggtcagcttagcagtttctacggcaccattaacgacggcgacacgtttggcatcaccattgagaattggaggggagcgtatgttctggctaacaacctgctttttatgtcatatagtagccctgctaactctactgtcagctcttactgcgaagataacccgacatgctccaacgacgggggcgaattcttcctcgatcctaccggcaactttgtcgacggcaagagaagtatcactggtcgtggactgacgcttgatccgggttacagcactccagcggcaaaactgaggacaatcaaaactgaagacggcaccgagcatctggtgatcgctgaggattctggcaaccctctaaaggccggtgacgagatctggagtgcgcgtcgtaatgccactctgaaaattgtggattagtagacgcgcaagcagtggctgacccaagtgaaagaaatcatttgtactatgtagggagtctgagctcactgaacatggatcaaaatgggggtaattgcaactaccttagcagggataatatgagtatatagtgatgttaatgggacattcaggcattccagccgttctatacttcatacagatattgactggacttccatgattctcgactagttataagacatgccgtacacgtgtttacttttgccctttctccacattgagggatgatgcagcatatctcgcatatgctgacctctgctcattgacaagagaagccaaaccccagtttgtctcaaagcaccgaaccacgtcaaatctgcagacggtgctcttttatgacctttggtgccctcttgcttccggcattcctattgatcaacttcgaactattgcacaccactcccagttcctgaggcagcccatatatcttattttccttatcttccccttgtttatgtagcgcatgcagaagcactgttgcgtaccttgtccttgacagcgtccactcatggtccaaacacagatactaaagatactttgaatctttcattcggtcctttccgttctaaacccatcaaaatttcgccgataatagattcatgcacctagttatgcggttgtcttggtcggccagactgtcgccctaaaatacacccatctacaactgccctgatacagccacacgcaaacatatcaagctgtgcgagtgcgacgaggatgagatgcatatagaaagcttgaatgtctttcaagcatcattatttgctctttgctataaattaacgagaattcgctttgctcatgcctggatgaccctcagtcgtgcagacgctggcagaaatcctcaacctataatacactgataacggtgaggtgtctcaacagcagcggttcacgtctctataggatgcctcggaaatcagattatcctgtgacgctcgcaatctcgcttgcaagcagagatccggtgtttcttctggttgttgtatatctttgagtatattagtattatctctcgcagtagtggctactggcttctagaactgtcattgccgtatgatgaaggattatacctcccacattccaataaggtttgactgcaaagccgtccgtgaagatttattgccatttccgctgcacctgaccctatgggcaacgtatattacccttcacgaggccgcgagctgtattgttgaagagcaggtcccacccaagctggttgcagcggaaaggtcgcaagtgcagtacagctgtggtattcaaaattctcggagctattcatatgaactgcccggtccagctgtggaggtaattgcatcttttctcagcatattgtccttctgagtcttattcaaatctctgattcagcgtgaccactctccaagcaggattcattggctgcgccatttctatgagcgtgatccgctctgagccgcaggcttgccaacagtggcatagcctcgatcagcatcgtagactctctgcgcttgttacgggccgccttggaaaagagacgaggaccctgatgggtattggcactgagctagtggtgcggcggtaacta

SEQ ID NO: 821 - DNA, 2532 bp, Emericella nidulans
gtgcttcgtcttgaaataacctgcatggtataccggagctttgattgaagcttcagctggctcgaagcgggacgagccgactcctctgtcaggatctggtttataagccagcatataatcttgcaaacgataatttccaccgttcgacagttgttccaaagccttattgcccaggttgtcttgtataggtcatattggccattacaagaaacgaaagtcgtactcccacggagttccctggtagttatgtacggttcttgcagagcgagcatatcaagaacatgctgaaaatcactctgaatcgcgattgcttcttctagaaagtccgcccaggatctgggtgtctctagaaacttgtcctgatgcttctttgcgacgcccgcgaaaagagttgcgcaccgcgtggcgaggatgccagctagccatgatgcatcccaacggtcggtatatttggtcgcctcttcctgcagctcctgcaagtcggccggaaacggctgcacggtctggatacaagccgttgccatatcggcgcgcacctggttgaacatcaggatggcagacctacgggcgaattgcgatttgccgcgggcaaccaccaacgcggccgctcctttgacatgtcgaacccaagactcaaagttggagatgtgctcgaagactcccagcgagatcaccgccatcaaggtgctgtctttgatggactccgccggggatagtgagaggcagcagattgtttgtgtcacaggctatggcctggatcttggttgtcggccatgccctcaacctagttctaaataaggtttctgcaacatcagtgtacagcttcggaaattgcggcctcgaagcttaggaaaggagatccgtcctcataactttggaaaagggatccgtcggcatacaggtccgggaagtcagaaaggttgataaagggaggaggaagatatctgtgcttctattttttgtttctttctctaagcttatgatacttgtttgtacaggacatccagttgaaaataatactgcctatgcctgttacaccaaaggcctgttgaaagcgacaacgttcatggacatagctatcataatcatcctcataaaggtgcttaatgagaatatcgagatccactcttgttacaggaaacttttctctgtgtttccaagccagtacttgggagtaagttcgttttgatatgctgccagccattaataagatatcaagtacaaggggcaaacagtaggcacatattataagcatcgtccttcaaggtatctggtagcttcgttgcccttaccctttcctattcgctaataaaacaggaaaggttctgcaaaacactgtgctgacttggcaaagggccctcatgaagcacaatatagctctctgaaaagagcttgaggatttggataggaggatagggtcgccctccttaaaatacagatcttcaggttggtttcttgatagcatccatctgttttaccatagtaatcaatatctccatcctcaacttagggcggacgaggtttacattctccagttgtcaacagcacgctcatacctttcgtcagtagccagggaccttttcttgtgactgacaatattctccttgtttatcaggttctgttggtaatcttctgtaaatccacgtgattctgccaacttctgaagcagttcaagcttcttgtgtttcaaatccagtttggacaaggccatcatgtcacgtgagttctgagatgggggaaatgtaaataagataaacataaacgtaactggcatacagttaaaaggaatcagataaaagtcgacgaagccctcgctattaatcttaagtttggaggactcatagtgtggccgaaattttggttctcactcttctcacccttctcaccccccactcactcaggtgggtgatattctcaccttgctctcacccatatcacctgcactcaccctagtcttagtgtctctcacccctaaaagcagcagcgcactcagggcttgttgcacttttatccgcgttgataatagtggctcaagtacggctgagcggacgggaagccctgttttccacaccctatggtcgtatgtactagttttcagagtagaaagtttgatattgtccaaactagaattctacggctgtacttgaactgatattctcagggtttgggattagggcttggatacttaccattggcatttagcaagcaacaaaagtacatcaagaacaccagcaccaggaagcagctaatagaagcactcaatgattaatcaaccataatcgaaacaaagcattataaaagagaaattaccaacattcagggccacggcggatatcaaccccgggcttggtggttcgcccacccttaaggcagtcatatttcaccattcagtacattagcgaatcacttgtatatcaagcctgtcagaagtctcattataggacgtctcaccctatttttcgtcgtataataaactcatagggtggacgacagaaggtatgcgaaggaagacagcacgacgtgcagggaaag

SEQ ID NO: 822 - DNA, 2681 bp, Emericella nidulans
atccccacttcaataactccaatctcgtcttgctcatgattgaaaatctcaaatgctgttgccgccaacaattcgaactcgcttgccccgatgcctagtgtttgatcccgcagctttaccctggcctcgatctgtcggaagagcgactcctggacaacccgttcatcgattgtaatgcaatcccagcgatcaattaagtgtggcgaggtgaaacggccgcagcgaacccctgcggaggccaggatatgcgacaggtaggcgctgatcgagcctttgccattggtgccggcgatgtggatagccttccaggacaacggggtctgttgaacgagacgggatatcctgctgaggccaagctcaatcattccgtcaagtgtacgatgtgcaacggggagaactggaacccagccttcatgatcaggatatcaggaagagcttcaaattgccgccaatccattcgctttcccgcgggaagcttcggagttctgtttatcgataaatgtgataaggattacctgttattgtagcctgaggtgtcaatcctgtagagccatatgtaggcgcacgcagcggctactccgtaccctctttcgcataaactccgttgcatttacggatactgactgtcagacgaaaccaaaccatcgagtagaagacgagaaaacgtttttgagagcttgttaggtcccagagcgatagagacagcaacccagcttgattggcagtagaaacgcgagtgtcgcgccacatcccagcctcatccgagcgctctcagccgctgcccggagtcgcctccgcttttacgtttaggagcaaaatcgaatcttgccgtttctctatcaacaccggcttgccctccgcacccgaccctatcgtcgcggcatcttttcggagtcacactcgttctttacacggttctcggagcggcgcctcttttgtggattagttttgcgacacttgagttaggaataatcggcagttatgggtatcccgtgagtttgtcgctatcctcccctgctgggtgccagtatacgcgcctttcgcagcgccttgcggtgcgcatacgacagctgaactgactggtgtcctctagtatgtaccatgagccttcttccgcagaggccactaaaaacaacagcgtcaaggacccttgtgctgccgctcgctctgcaattcgtcgccaggccactgtccgccgcccttcgcgttatggcggttctgcttggcgcggtggcactctgcgctccccatttcctccccctataattgatgaggtagagcgcgaggcgagcggactaccgcgtcattcgcattcaccagcttcgatgcccacacgttccagcgatccctttgacctcaacagcagcctggccgacaccagtcgcgggttgcgaatgattgatgacgctcttcgtcatcggccaagtcataggctacggataccgcgaacctcgactctatcagatttgaactcgcgctctgccgctgacgcgaatgcccggctagaatctcaggatcatctccctctcacgccccgattcgctcctgccgtcgcatatcatagatcttcaacacctttggtaggctcagattttcttcggcggtcacctcatgatggtcttggtgatgaggctccggcaggatcattcatacctttattgcgacgcatcggtcagcgctccatcaacgatacgagtctgacaggccgtgggccgtttatcgacggcctaggagaccgccaaagaagcgttgacttagatgacgaccacgctaacgatgcttgggaaacccttttgactactataacgcccgataccaatcttcccagtgctgattcttctttcacttccgcatctgcctctgggtcgactggttcgcataatgaaactttgagaagttctgcaacatcactcgagtccgttctgaaccctgtgccttccacagtacccacatttcagatgacgcttaatccttaccaagagtctacgatcccttgtgactaccccagttccaccgattcggataccgagtcagacggcgaaatcacccaacaatcgctattccggcgctaccgccgtcgtatgcgagaggtcgagtccttgagacgctcgcaaaaccgccaatcggttattaacaatgcttcttctattcccactatatctcttgccttctccgattcctccgcggaccaggatctacagaacatgcaagccattctggatcgtcttgcccgtcgtgaatatgttcctgatgaatggtgggctgcagccggactgtctcgcaccattgatcagaggacacgggcgggcgatgattccgacagtactcccgggccagaaggtcctactaggcatagataagctgatctcatttttccctttcttttagttaagatttgttattctagtttatgcggaaggtcttcatttcaggcagatttagcgggaaggatatcactggggcgtttgtggagtctgattttcgggctacctttacctatcttgatattcatgaagcccctccggttgaagatgttgtacacattattatgcgttttggggcagggccagactatgaaagtgtgtcaatcacacgcataagattgacttcatcgggaatgtacttgcccgtcgtatcgagttgttctgtttcacgaagttcgtcaacagaatatcgagtcg

SEQ ID NO: 823 - DNA, 2674 bp, Emericella nidulans
aacatggtctgtcgaacctacgcgaacattgcaagctgcaaccgggtattccaatcaagcctatgcttgctaagccgaccaaatctattacagaagtcctagaccgctttgaaggcaaggattttacatgcgagtataagtacgacggagagagagctcagatccactacgtcgcacctgacgaaacgaaaaactacccaggcgcccaacttaccttgaaggagagcgccgggctttctgccattttctctcgaaactctgaagacctatccaaaaagtaccccgatgtcttggctaagcttagcacctggatcaaacccggtgtcaaaagctttgtgctggactgcgagaccgtcgcctgggacgtggaagcgaagaaagtgctccctttccaacaattaatgactcgaaagaggaaagacgtcaaggcagaggacgtcaaggtcaaggtctgtgtattcgcgttcgaccttctgtttctaaacggagaggtatgtatatctatatctaaatccgctttaccattagagcaccactaacactacactcctccatagcccaccgtcaaaaagcccctgcgccagcgccgcgatctccttcactcctctttccaaccaatcgaaggcgaattccaatttgcccaatacggaaacaccaacgacctcgaacaaattcaaaccctccttgacgactccgtcaaggccctctgcgaaggcctcatggtcaaaatgctcgacaccgaagagagcggctacgaaccctccaaacgcagtcgcaactggcttaaggtaaaaaaggactacctcgccggcgtcggcgattccctcgaccttctcgttctcggcgcatactacggccgcgggaaacgaacttccgtctgcggcgctttcctcctggctgcgtacaactcgaactcgcaaacatacgaaacaatatgcaatattggcacgggcttctcggaagctatgcttgatgaacttcacactaccctctcgccccttgtcatcgaccgcccaaaacccttctacagccattccacggtccccaaagaccaaccagatgtctggcttgaaccgcgctatgtctgggaagtcaaaactgctgatctcacgcttagtccgcggtacaaggctgctgcggatgagtttgttggtaccactggaggcggcggaaagggtgtttcattgcgctttccgaggttcattaaggttcgtgatgacaagaagccagagcaggcgacgactaccagggctgttgcggagatgtatcggaagcaggaggctgtggcgaaggaaggttcagggaagggtggagtggatgatgatttcgagtattaatgatttgcattctatcattgtcagggctactgctaataaggttactttggttattcgagtgcatatgggtattcggacgttagaatgcggcctagtttactactgtatactaatctcaaccacattagatgtacttcgtgtccatccgaaacaaacgtggcaagaaacacaaagcaaaataggttcgcctttccaggttctgtgccaccattgctcgacgttatcgcctcccatcttgtgttgtatacccggcgtgtcgtccaatcatggttcattgccacaaaaatgatataaaaagtacatatacacgtaatgttgtacagctaacttaaccatgcccatctattaggataatgatcagaaaaccaaagaatataggaaaagaacgaagcacctcttggcgacatacaaacccacacaagaacatcaaataacaaccagagttatatcacaggtcgtcgcggccaccaggtgggtgagtaataccatttttagggttaccaggcgccggatagccaggactaggattcttccttgtaaagcctgattgccggacgcgtagtccaaagttgataagcatgatagcgaccaaacctaagccgatgattgttgggccccatttttcgtagtaaactcgtttaacgtctcgtcgtttacggatcttgtcaacccgccaaatgtacagcattagactgtagataagggcgacggctgcgaggatagtgaacgcccacgagcaagcaaacgtggtgtaatcctcgccgaagtttagcagggtagcagcaatggttccaagcataatggaaaactccagccacgagaggaaggtccgctccgcagcaaagtaaacttttggctcaacgcgaacagggacatggatgcctatagaaacgttagatgcagctgcagaaaggagtcggtttggcctacgtttgcctttgggggcttggaacttcttgacggttcgtttattcccaatgacagcaattccgttttgttcaggtgccggcatattggtcggcatgggcctaggaacgagagcttttattatatccactgctttagccgtggttcggtgggtgtaatgcttcgccaattgtttataatagtatgccccgccaactcgtcgcgcttcttccagctcttcagagtcaaaggaatcgtcatcggaatcgtaaagaggatagtcgtcatctcccggaagaggctgtgcggcaatgcgttcctcaatgtccagcgcgttcccagtaggttccgcgaacaaagtgctttgttccgttgcacggtagtcatgagcagagccacgccgaggtctcccattactgccttcttgccct

SEQ ID NO: 824 - DNA, 1177 bp, Emericella nidulans
caaattattttgggcatagcagaccctggactttgacccagggacggaggctgtcttccgtgccaaaagcaacgagccgcacctgcctgcccggtgagctgtggcactccactcgtctgctgaatacattctttactctttgctgtttctggtcttcatttccaggcctggccatccttcaataacagtactccagtcctgcgtcctcctcttattgctttttcccgcggccccagacagtacacgttgtgctgcaggttgcggattacaggtggaatgcaagccattaagcgtggattgataagccacgccatcccactgggcggcgggcgcatacgtagcttgtacgaagtaggtcgagggcgacgcctaaagcaggcaacctgggaagcagccgcgccagaccgatcaataatgtctcttggagttagcttacgggtcggcctcagagctgctaaatggtgatctcccgccgccgattgttgtctttgtttaccccgtaccagttcagcgagccagcaaggggagccacactgctgttctcacaattcggggtctcgttatctgtgttgcgcagcccttgttactataattggaaattcgatatcggagcactggatcgtccttgcccgtctgcactattcctccgttgaagcaaggttctcggttattataaacagcccgtcgccctggcggccggagggtcaagcgaaaaataccctttgtagtcgggcctcggctagcgcgtgctgttgattatctgcgattccgcatgtaaggagggcttttatgctgccggcccatattagaccaatctgggtgcccggtctaagaatacgcgacagcggttaagccatgtcagtacttgtgagctggtgccggacgtaatacacccagaaaggcgacccgccgttgtaaactggtactttattggtcaaaagccaaagacatgcaaagtacaattcaggggccgaaaacggctaggcatcatgccggacgccaaaaccgggagacatgagtggcaacttggaactgtgagatgacatctgcgacatggagcaccaggaagtagctctatttgttagtaggactgggcgccactctggcttgctcggcaacggttgctgctgtcacagcggctgagttggtcgagcctggctacgaatgttgctagcat

SEQ ID NO: 825 - DNA, 2301 bp, Emericella nidulans
tgatcgttggtaatgaccagggttgtctcaactgtcaggcagctggacatgcacagtgcctcttcatacgggtaagataatccttccaacccatggtggccactgggggtttataataggaactgatggctctggctaacatcacgcaaagatgaactcgtgcattctagacatgaagattccagagtccaaggttacagtggtcacccagacttcctaccagcaacaagactccacgatccgacctcctaccaacgacgacggcggctcagtaacaccatacaacaccccgataccttccgcctatatatcaccaggtgtgcctcgtgtatatattccggattcgcataggctggaatgggattggaaggaccatggttctgtcttacaaggggataaagctcccactaagacgatattaccagcgaccaacgctgagtatcctgagtccagctctcacgtgtttactcttcaggggcagcaagataatggggcccttagtatggcgcctgcagaaagttcgctgttatctccagagtatggcttagaacaaaccgttccggactataccaaccaaatctccctttgggagagcgactacggaatcatatctgcagcagatagtccggcctgactatcagccaacatcttgttcttctgccttcgaggttgcgacaggtgtcatcgtggcaggggacaatctcctcggaaatgcggcaacatatggataaatttgtagagctcgaaggacattcacatcttgagtttggatattatattgtggtgttagcaatctatgaaagcactttttactcagccgcgtccgcagagtaccgatgtcaactagtgagcggcagagctctccatattcattgggaaactcttgttcctcgatatcgtgttgtgagctagtccatttatcttttccagcccatgtccctgagggcacgccatctaagccggaactctgcatcctgattccctgccagcaatgggatctcttcgctctcagacccagcaataatgtatcagaatctgttatgatgcgcagtgtctgcttgccagatggtctgcatctctaaccagcatggggacgatcttgttggcgaagtccatttttatggatgttactgcatggcctcccggtccacaatcttgacaggctgaacacctatcgcagactgttgcttgattttcgaacgcttgaggttaccatggcttcttttgctttacgttcagaaataatgacctttaaagctacacaaccgtcacagaaaccgccgagtgagcattacttggcatcactgcgtgcttagcgaggcacaatagatatgcgaacgccatttggtgttctcagagaacaagttctatggagaatcgggtacacaggctgcttttaccatcgagagatgcaacgcccgacatcgccttcagaacggaactctcccacaagtggccccccagactactgtctacgggaaagacatatagtggccgatggcctaagacggagtgtctcaattgagtagagatgatctagctgctcctcacagagctgagcggacgggatgtctgttccgtacaacctataatcgtatgtgtgttaatagaaccaaagtacgctgaagataacgcgtggtagacgtgctgtaaccgaacaagccttgtgtagtagagaggctcagtagatatatgtcgcattaaattaggctataactagaatcattcaaactcagaaacatctgacaagcgggtcgtctcggcatgtatgagattgactgcatgggaacagctcaggaggaaaatgcgaaacgagtacccgtaaccgatggtgttttctttcagtcgcattcggacgagtcagtatatttttcactattgaaagtatactatcgattcgcagtaataccgtgccagtctcctagagtgcaaaattgttgggcgtgggtaacctaacagatatagaaccaagcagaacagcaatatggcaaagtctttgatcaaataccaccgagcgcatatatttcattattgcggactttcaacgtactttatctatcacaacagagattccagctcggttcggagaccttcgattggcagaggtcgcgcagacctgattggttcagacgcagcaacggctctgagacttgcaacccctacctaaattatatgcagaatgcatacggcgcatggggccacatgacgaagttatgtttgctttttggtttggtgttcggtcttattcaacgtcgtttgcgtctcagttttcggttgtggcaatgacatgttcaaggtgag

SEQ ID NO: 826 - DNA, 5418 bp, Emericella nidulans
cgggcctccgtgagaggatttccggtcccgtgggatgtcaaagccggtcgaaattcattaaagaacgggctaaagaacttcaagtttttagagtaggccgccggtcccgcagagcacagcaagagattgtttatgagaagccccggagcagccgcaagaacgttgattatcgcattatccgcccggatttggtctggccgatagaggagccggacaatgaagtcaacgagtccccttcgcgtcgaggccgtggtggaggtggcagtacctggcagcgctcactatttccaacctatggacccttcggaggcggcgggccgtctgcgattctgggaccaccaggagcacatgctgcaactggaggagttgatagcgacagtagcgatgacgagggaatgcagcatcctaaagggtcaatatctggacctgctggcggcaacctgccacttcctggagtctttggagcgcaaacccacagtaccgacgcggtgcaaggccactctggcacaccggcaaacctaggccgcgtcaaagacaagcaggcactagccgatgcagatccgctgggcgtcgacatgatagtcaatttcgataatgtaggagggttgcaaggccatattgaccagttgaaggagatggtgtctcttccgctcctgtacccggagatcttccagcggttccacattgtgcctccccgtggtgttctctttcatggaccgccaggaacgggtaaaaccctgctggccagggctttggcgaacagtgtcagctctgagggtcgcaaggtcacgttctacatgcggaagggagctgatgcgctgagtaaatgggttggagaagccgaaaggcaacttcgtctactatttgaagaggctcgcaaaactcagccgagtatcatcttttttgatgagattgatggtaagttctaatcttattggaaataatgtgttgatgctgacttttccaggattggcacctgtccgatcaagtaaacaggagcaaattcatgcgtcgattgtctccactcttctggcgttgatggacggtatggatggccgtggtcaagtcattgtcattggagctacaaatcgtccggactctattgaccctgctctccgccgtcctggccgtttcgaccgggagttctacttccccctgccaaacaccgaaggtcgtcgtgctatcttagatatccacaccaagggctgggatccaccactaccaaattcgataaaggacgaacttgcggaaatcacaaagggttatggaggtgcagatttgcgggctctttgcacggaagccgcgctgaatgcagtacagagaaggtaccctcagatctacaagtcggataagaagctcttgattgatcccagaacgattgaggttgcacccaaggacttcatgctggcaatcaagaatataaccccttcttcggagaggtcgacaggctcaggtgcatcaaagttaccgaagacagttgaacctttactacgtcagcctttggccgaactcaagagtatacttttggagattcttccacagcgcaagaggctcactgctctggaggaggcgcaatatgaagattccgtcgagtcgtcgatgggcttccaacgcgagcagatgcagcaagaatttgagaggtcgcgggtttttcgaccgaggttgttattacggggcgctctgggaatgggtcagcagtacctggcgggtgctctgttacatcacttcgagggtcttcacgttcaagcatttgatcttcctacactactgagcgattctactagaacgcctgaagcggctgtcatccagctctttgctgaagtaaaacgacataagcctagcgttatctacatcccaggccttcagaattggtctcagacggttggtcaagctgtgatatcaacgttcatgggccttctacggtcaatcctcctactgaccctgtccttctacttggagtccttgagagctctgaagatattgatgctacgctggtgagaaatctatttggctactcgatgaaaaatatcttcgagctctcaccaccgggccaggaggcacggtatgaatatttcgctaaagtgattgacctcattaaagcttcgccttctcatctccccgaccctgacaatcggaagaagagacagcttgaagagttggaagtagcgccgccgcgcgccgccgccagagaagcctccgctctcgaaagaggagctgaaagctcagaagaagaaagattaccagacactaaacctcctcaagattcgaattcaaccgatcatggatcaaatcaaaaagtacaagcggtttaggacaggtgtcattgatgagtctcaaattcggtatctgtgggaagaagaagacccgaacattgtcacaagcgatttgcccatcgaacagcggacaacattccgaccgtttgaaaaggcgcaggataagcacggagttccgggtcttcgggagacagtgtccggcaaatttttctacaacttagagattgtgactatcgagaagcggctttctaacggatattacaagcgacccaaggacttcttggcggatatcaaacgtatagccaaggatgcacggcagctaaatgaccaggaacgtttgctccgcgcgaacgaacttctatccaacgttgaggttgatatcgctaccattgagcaaacggaaccggcgctagtggctgaatgtgagaatgtttaccttcgggagctggagcgggagaagatcgcaatagagaaggcgaagaaggctcaagaggaggaggacgcaatcgcatacggcgccgcaaaccgggtcccgcgtgggaatacagattcggacccaacgagtggacccgtggtgctaggcgcctcatttccagatcttggtcctcaaatccccggccggcctgtcacgcctacacgccggtcaactgtgagttttatgacaaatggatatcaccgcggcgatgggtcggatttgaacgattcgaatgcaactaatggctcgcacgaaactcaccctgatggcgatggggacacatacatgacaaactctgaccagtcggctggaagggacacgcaggtaagctcgttcggaccatctgcccagcccaaaccggcctactccatgaccgccccctctcagcaggtcaggcgagaatcgggcctatcgagcttctcgcagagagggcccatgacccccatggctccgggatcccaaccagcagactacatcaatgaagcctcgacaacgcaaacgacgtcggacaagaagtcgtcagagcagtcctctcacccgcatcactacacccagagccccgttgtcatccacggcacgcgacaagattacccggaccttaccttgtatcccgaccgtgtttcgcaggaggagcatctccctgatacccagcaaggcgacagcagtcagccgtctccgccccagctacgcgaatctcaggttgtgcgcgctgaagtccaatcacagcctaaatcgcagccgcctgtacctcttttcgacgccgcttccagacaaccaaccgctctgcaagcccttctcaatgaagaggacgagtcgccgaaattgatcattgaccacgagtacgtgcggaatttgcataaggagatggcgcagcgcacgagtggatgctctgtagagcagctcgagcagatcaattccgcgctgatggatgtgctctggcatacccgctgcgattggaaccgtagcaaagtggccgctgggattcagcacgcgttcaatgatgtcctcgaggacatgcaggccgtgcaggaaattgggccgatcagtcagaagacgcaggatcagctccactcgatgtattagactctgttcacctcacctgccgtacctgcagcactacgtacctactaccccctcctctaccttttttgcacgcatttggttttctattggcagcagcaagcatggactgtgtaatgagataaatggcggatattcagacttgcttttcgttcttttatgcccttatctgtagtctcctatcgttcccttttatacctcgtttctgttctagggttttcttggtgttgcgtcagcttgtccagagcaatggaccgcttcaattccttcaattttttcatgcatctacgtgtattatcagaaaaacgaatctaaatatttagatacctatgttctatactattcctgagtatagtcgacgctcatggctttttatgactgccgtgactaatcagttaatcccgctccctaggaacgcttcctttgagatccttgccgccacccgcaactcgcaatcgccctcggcccagagtctctctaggctatcgtcaaacatcaaactggtggaagtaaatctggacgacccagcagcaatatttcataacgcacaccgcgctgaacagatacccatttggggtgtcttcagtgtccaggtcagtagcctgtgaacaccctagacacaacgaaatcgacgcgagctgacaaaagcctagcaggtcgccattggcaatgaatccctagaagaaactcaagggaaggcgttgatcgacgagtctctcaagcaaatgtcaagtccttcgtgcagacctccgttgatagaggcggcgaggcaaagtcgcctaacaaccctacccgcatcccgcactttattcacaagcataacatcgagcaccacctcatacagcaggccaaggtgaatgatatgcagtggctcatcctccgccctaccgcgttctacgaaaaccttgtcccccgcttctttggcataatctttgcgacctgcttcaagatggcgctgaagggaaagcctctacagctagtggctacagcggcattggatctttgctgctgaggggttctgaaccccaagaaaaacgccgggtagggggcctattaattacactcggccagcttacactttattcactttggaggatttttgtgccaaaatttttcctgaccttaatatccacctattttcggacctatttgtttatttatgcttgattttttatcaataaatcattttattcctaagccgttttttacaattgcttttcctcttttactacttctcttcttttaatctattacgtttttccgttttatataccgtcttcatcattctactcatttctacatctcatccatatctcccctctatctttctcctttactatctcctctcttccttaaaacactttccacttctccttctcaacatcattttccactttctttcattccttaatcgaccaacatactcttctttcttctctcctctcattgtccttactctctacactaatttattatccctatttccttttcctctataccccactttattgtccttttctctttccaccactctcatctctctactatccttatattaccttcacgcgtttcttctcttctaatcctcaa

SEQ ID NO: 827 - DNA, 2466 bp, Emericella nidulans
tattcagctgcggaagcggcggctttagtgtttccacgaactttggcagctctggtgcaggtagtctttttggcggtcaaagttcggcgtcgtctcagactccatcaaaacccttgttcggagcgaagccaaccgagcaaacaacctctgcatcgccttctctgtttggcgcctcctcttccgcccagcctgcttcctcgactcctgccgcgtcgtctttcagttctgcaccgttgacaactggcaatacctcatcctcgctcttcagtacatcgactccgaaacctgcgacaacgggacaaaatctcttccaacctactacaagtctatttggtgcatctacttcttccaccgcgcaaaaaccctccgaggaaaaggcccaggaagggacaaaggcaaaccagtctacttcaacccagccatcgttcagcttttcctctaccacaactggcgcgtcattattctccagtaacgcaagcggggctccagcccagtccactggtccgtcgcagcctgtatcaacagggagtttgttcgctcccgaacctgcgtctactgaacaagaaaagccgaagcctgctgaaggaaatccttttagtagtttattcgtccccaagccagcaaatgcggaaagtcctaagcctgagcagaaatcgttgccttcctcaagcccatttgctccgaagcctgtgtctagcgaaggcgcgaagacgagcgagcagccgaagacatctacccctgcatcgcccttctctgctccaactcttggtgcagcatcttcgcctgtatctcagtctactgctttttcaacttcagcaccacagacaagctcttcaatttctgccttctcccccactacaaccccgcagaatcccttcaagaccaatggagttaagccagctggcataaattcgccagtgtcgtctactactagtagttcggctttgagctttgataagcttcaacctgcgaacatgccatccggcctggataagggtaccaaagaagaagtggaaactgttcatcgtgttcgcttgctaaacgcctgtttccagcgcgaagttgcaaagctggatgctaccaccaacagcttcgatcaactgatgcagttttacctgcgcgttcgtgagacaattggtgctccggttgaatgggcgggtaccaagcgcaaagcttctgatagtgataacacggttgagccttctaggaaggctgcgacattcggcaacggaaacttggcctccagcgctgcttcaccggacaccacgacgtcgtcgaagcttttcagtggcagtcaaaacgcaccttcgaccagtaacaagagaaaggcgactggggatgatgatagcgatgcatcctcgcctgcgaagcgtgtagatggtgactccgcaactgccaacattttcgcaaactctttctcaaggtccaaaaccattgagtccaataaaccagcaggcactccatctcccaagaaacttgatgctcctgtcctcaaaccatctaccccagagtccatcaaacctagccttttctccacaacaccaaaatcatcgcctcctaagctggcattttccgcatcctcggctcccaaagagtcttcagcatcaagtgcaacttcctctcaatatatgcctgctttcaaacccgcttttactgcgtcagcaagcggtaccccttccccaagtcctttcgtcgtcaaagcttcaggtgatgcaggccctagtacttctgcgcctcctctagctattcccaaattcggctctggtggccctatcaactttatgtctcagttcaaagctcaggctgagaagaacgctgaaaaggagaaggaaaaacgcaaggcggaagagtttgactccgacgaagatgatgaagcagagtgggaacgcaaagacgccgaaaagcagcgaaagaaacgtgaggaacttgaagcgcaacagaaccgacgcgctaaattcgttcccggtcaaggattctcttttgaaaattcagctacagaagaggaaaaatcgaacacgagcgctgcctcgtcagtcttggattctaaaccaaactccttttcaagctctagcaacatattcggtcatttgtctgcaacaccatctgaaagcggggagaatgagcacgatgccgctgacgacacggaggaagactctgttaccggtgatgatcccgttagagaatcctcttctgcgccgacagaagaccttcacgcaagtcgagctgattccaagataaacagtacggcatccgcccccagaagcagtgatgaggacgattctacaaaggatttgaagtagtcaaaccaggcgggcaactccgaacaacacggcgctgaagacggaagctcaggtggcaaaagcatgtttgatcgcgtggagtataataaggacggaaagccgaagcgccggggtgaccacgctaaaacaatgcttccgcgctgcgctactggtcatggaagggggg

SEQ ID NO: 828 - DNA, 3036 bp, Emericella nidulans
ccctataaggtgcaatgtcttggcatcaaccgcttggcatgcgtaacgatccacttacccaggtacaggatgataatcacaggaacaaatcgaaagaaggctttggtctaaaacaggagaaatcagccttactgcgttggcgccggggcgggtaaggtaccatctctttgagaacgggaatctattgcaagtctgtcaattcgtgcaaggcttttcacgcggcataaacatacaagacttccaaagtagggattcaagctgacgagggaaaatatcctgtttcagattgttatttttctgttctcgatactaaagatgctctggtgcaaacatgccttggtacgagaaacagtgcctccaaagaaagtatgtcaaacgacaggtctgtgatgtattcgtcctttttacctaagccgatagttcctaggcagggtcttcagtaaagaatccatagagcaggcacaaaagactgcatgaagctacaatgcgaggtatttggatgtgggagctgattgagtgcgatcggtatcgttggcactctgagcagtttcaacaaaatagtaaacttacttgtcacgacaaatacaagtccagtcccaattatgcacagatcccagaggttccagaaggtcatctggtagaaaagcatgccagagtctacgaggccgctcagctcatcataagcgaaagctgcaatccagacgtataatatggcttcgaagttcccaactctcgctgggtttcgttccagcaggactgcatagtagagaaggaggaaggagacaaagaacccagcttcgaaagccttccgatacacaggaacacggagacgagaataaggatcagccgtcctgttatgctcgtgagtacatctgaggcttgattttggacaagaatgaggggcctaccttttgttgaagcgctgaggtttcttggtggagtggacactcagcgagtcccaaaagactatttctccgttccaaatgtcattcaccactttctgcaccaccttctgactgagaaacttctttgcgtgggcgatagtagcaatctcgagtgcattcaggccaaggaacatggagaacccatctccatctccatcagggaagtagttgttagtctccagatgttcactaccaaaatagtcctcgtgttgtctgtttctctctaaaagttgtgatcgagtagtggagctggacagcaacggcgtatgctcatctccgggcaaattattctcaaccatacaagttgcacggccgcctataccagcctcggcagagtcaatactgctcgtgtattgggttgggggtttaagctcctcaaggagatactcgatcaattcgcgttcattgagatggcagaggaactgccaagccacatactcgcacgcatatcctctcgtttcgttttggccatcgtcgtgctcagcaaacttatcgaacctccacttgaggatcctgtatcgcagactcagaaacacagtcaaggtggagcggcatttcccaacttacatcaatgcaggcacaatacgaggattatgagaatcttctgccaatgaatttaccagtgctcgcagacgtgggtctggagccagttttaactcctcgaatttatacaaacctctgatatagacgatatcatgaaactggccaaagcgagttagctcagcacgggcacagcgatcctagatcatgttacctatgcaacttctgaaccacatcgacgagaggctcgtcatcatcaataatcgggatttcaacacggtcatttatcgacggagctagcgatgccatggactcgtgcaacattatgggagatgaatgtctaacccccagaagacttatccaactctcagccgactcaggggtctaccacaagttgggaataggtttggcttctagtactgtatactgaatggcgataactcgatcgcccgtctttaacagttgagaaatcagaagtctgtcttgttgagagcagtgcctacatttacggtctggcagctagttagatgctataggcaggcttaaaaggacttggggccaggaatgcgcacctgggcccaggtacggacagcagtgacctagcgattttggagctgcttattggtggagatgattcaaccttcgtgcaaagtaagccgtctataggtcaggaggagaaagagatatagtcgcattcaagaagctctgcacatcaattttgccaaatacacttcataatgaactccaagacattaagcaaagagaaacactaaaggtggtcgtgcactacctagaatattgaatggaagatggccaaagagataagccggccttcaccgcctttctgccatgtgatgtcgcggccacccgtctctggaccctcttaggtgccgtacgcgtcctctgtcctccaattgtgatctctgatcgtacaggtcaggtctcatcggagatagttcgtgggataatcatctgggttttctttagatgctttcctaaacatgattgttttatgaacctattcttatgaaatgaagacgccgcgacactatgggtcaaggctactcccttacgaccctctctgcgggttcggcggggatcgatatttccgagctgtccgacctgacatatgagaaatctattggtgggccgccggttcatgaagagttttcgagcaagcaaaaagaatgcttattctttgtaaggtatcatgaaccttacccagttgaagcttggccctatgtaagctttatccctatgcttactggttttctccataccaagtttaaaccttacagggaaccagcttttataatttcaatgggtggaatataaaaacctcaacagaccgggggacccttctcttcaacccaccccttttttatagaggaagagcgccctttctataaacaatattgtataacccctccccacacaaaaaaagagttgttccttcctcttcccccctctgggactcctccggtgttttcccgccgttcaaaatatattgtcgggagggtttatatttttctttttttcggatactcttttt

SEQ ID NO: 829 - DNA, 4283 bp, Emericella nidulans
catattaccctagggctatgctggcagcagcggagtatcaggagccgcagatgggcgtgccctcatcttcacacgacaatatgccagaaactgcatgcccaagatgcctaagaaccagtcagatcagctttatccactcagcgcttgttgtcctgagtgcgtcaaccactgactgtctatcaatatatctaccagttcttaacctcacgttgcaattgccagagcaagcagttgattcccggcctacatccatcccttaacttctgtaatgcaccaattttttcatcctcaagatccggatatgtcatacaaacagaaaagggtggaagaagccccggccacaactgccaagagtcaagggaaagttcttcttgccgataccatcggacgatcgctatatctacgccaaatccaactggatatatataattcatgttcagagcctctgcttatttcagaacctggccgactattcggcagcaagtcgcctgcatctcagtggctactagtgcctagccagcatctccctgggagcgccacaacttcgtccgagacacttacgaccgagacccgcgatgccactctctgcaataacagcccagcgccgtcgaaaagcgaccgtcacacctctacagaatctatcgcgtcacgagctcggatagttagtttgaaaggcacggctacggagcaagacgctgagtggcttgcacttgaatacggtcttccctcacagatggggctgctggaccctagctattcaatattcataaacgagcaaaaaagcggtggggtatgcttcaagattttgacaaggtggccgtcgtattaggtgaccccctatgccatgtaacgcagatttctgctctcatggccgaattcaggctctatcggcatcgaaaacgctggggggtctcatttctaggtgctggcaaagggctggtcgagtattctacgtccgcgaaagaaggaacgtcgacgatactccagtttggacacaatcgagttctgaatcctctaacgaacgaggtcatccacgagacctgtggcaagcgaatcctaacgcagaaccgacaactcctcaatccaagcaagggagacctctcgcttgagatctacactccatctgcccaaaggacggactacaggctggaatgggaattgagtgcaatttaccacgactggtgcatagcccgcaacgctaccaagaagccacaagccttcataacagaatatgatcccttcctcataccaacactgatgacctacatttacgcgcgggatagtcacggcgcagtcctcgggtttgcggccctccgctgggtggtatgaaaggcggctaccacgttgacccgtgtatcgcagcacccggggccagaaagggggtaacagaccttcttcttttcgcgtcgatggcatacctacggcaacaaggagtttcatatctaagcgtagggtatgagccttctgagtcattggcagggatatcagggttacaaggccctcttgcaccattgacggaccggctctatcagttcacattccaccggcttccaatttcagggaagagagcgtattttgacaagtttaggcctgatgatgcacagagcgaaccggtttacttgatattcccttcaaagctgccgcgtccacgagatgttttggccgtcgcccatgccgctaatatcaggcttcgccggctggtattttacggcagccctaggtcgtgatataatgattcgttgtcaatccattccttcgttccctttcctttgttgtcttacccttcctcccccctctatatagcagacgatgatatttaaacccaccagcccgctcgctttcttgtgtcatggtaatttgtcggctcatcccctaatactactctgtatgttctcttatgttggtctaaagtcggctcatactagggcaacaatgccacatttaccacaagctggtctcatcatcgttgcgaagccacaaccatctatctgtgcaatcaacacaatcccacgaatattgcaacgaaaacatcgtccgtaacactggtgagcctattattcgcgtgcgcctgttccaatgcgttccagacaggtgcatatatatacaacggctgaacagtaccataattctcgtcaaccgcacacactgttggcggtattatgacttgaactttcggctttgaggcatataagaaggcgccaatattgatgactgcttcatggtcttcagcacacggggacggttcctacctgaataccactgcacagttgtctcctcttgccataccacttggtgaccttctttctttcacccccacctgtctttctctctgctttctctctttcttttgtttcattcattcattcttctctctctctctttttttttttgggattcgccattctacacaaacattgcggccaataaaccgtaatagttcgttgcgtgctggattccagttacaagcattaccctaacatattaacagccggtttgagaaaagggagtgcgctttgcaggttttcatagtatattcgatattctagctgatttatatctagtccatacctcgaggctggcatgtcacctgactcctagagtgctccgctatctgcagggaccgcgtacacccccctcctcccacaccccataccctccccacttccattgccacccttcttggcaggcaacaccaacctcatctccccacgaccaatctttcaatctcgcagctttatagttgcaaccagtatccgatctctaacacggattctgcttgtctacacacctctgggcgaccatgacacagcctgaggatccactcactcccgggctttccaacaatgacctctggcggctaatccgacgtttcgacaaggtacctaccctgctgcgatcaaaaaaatagaaaaaaatccccaaaaattactcgtccaatactaacatcgcgcagcaagtctcccatgttgaagcaattccctgcacggactctcaccagcttgacctcaaccgcgctgccgacgaacagtttcctgcatccaaactgcagaaaacaatcgagcgcttctacgtctctgttcttgtcaaagtcggtctcttcatcagtcacgttaaccatctacgatcgtgggatgatccccgtaggacgggggtctttggcgctgtaagtagactgacgtcacgtgtctccggtatgggctaatgtgttcgtctaggtatatctcatagcatggctgtgcgacttcatcatacccctgctcagcagtatccttctcgctatgatattcagcccttcgattcgctcgtctcttttccctccgatccctgagagtgagttgcagacgcagggacagccctcttcaagggaggaaagtactctccatgtccatgtaccgccagtaaacgagggggaagccgaggatgaagctgcggatcttgtaaacggcatcaagtcttcgatccaacaggatgcgcaagaagctatcgggatcccgcctggtattgatggtttagaacccgaagtcgtggtcgcatcagataccgccagcgccgatgagccggggaaggcaaagacttctccggcgatcagaataactctatgcgtgatcagtgacataacagatctttgcgagaggttctccaagtatgtatctctgtagatgtgactaggggattcctgacataaatgtatagccttctctcgcctactccgccattcagcctgatcgcgcctcgtctgcagctggctgcaatactcatgctcatattcctggcttcactatcagtttcaagccacttgatcgtgaagacatcctccctggcaattgggtttgggttctttggtgatccggttctcagtcgagccatggactttctgaataccaagattccgaactggaagacttatctggatattgaaaagtttgttcccaaatttgattcttttttccagatttgtatctaacaaccggtgtaggacactcctcaaaggcgttccaacagatgctcaacttaccttgaccctgctgcgcatcggcgaactgaactcaagcccactcccagttccgccccggtcagactcggcctcaagcccagagcagtctccactgaagctcttccgccggaaatcttccaagacagttgaaactgggtctgatgcatcggatgcggtcgagtctaacaagagtcaaaccgagaccggaacggattcatcagagggagaatccacgaagaaatcgaaagccaagaaatggcttcgcatactaaatatgcgcgcgggctca

SEQ ID NO: 830 - DNA, 3550 bp, Emericella nidulans
aagcttagacgcgaatcagtttctgcgcgccggtccgcgcgttctggatgaccacctcgaccccggtttcgtcgcgggtggtccggacggccatcgagtcgtagaagatgttgtttacctcgtcaatgtagttcgcagccttgttgaaaagtacgtccgtcccatttttggggcggatgtacccgccgttgaggagggcgtcgatgtgcggaatgccaaagtactgaatcacatagagggtgggcctgtcgagcatgttgcctacattctccgcgaaggtaaatattaggtcaactgcgccccatagcgcgtacttgtcaacaaattcccgaaacgggcgcacgaggatctcagggacctcctcgggcagatcatacagcccttgcgccagataattgaactgctcgatcgcgccgcggtacagcaatgctgcggccgtggtggtaagcagctcgttaccaggcaggacgcgctcgccggtccgaaaattgacgtgctgggtcagaatggcgcctggcaggagaggttcgtagtccacatctagctgcgcgaagaagtccttggtgatcttgttattgaagtacccctcgaccccgtagttgacataatccccactgggcaggtagagcgtctccgcgtggccgcccagcttacttttttgctcaacaagggcgacagtgtagccctgttcgcggagctggacagccgcaaaggtgcccgttgcgcccccgccgaggatcaccacatcgcggtcgatcgtgtcttgggcattgaaagctgcggttgcggccgtgctcagcagcgtcacggagagaagggcgccgagacgcatggcggagggtatgcgtgtgcactgtcgggctcacagagtgcgagtccatcgcccttaagaattttttgggggtctttaaatttcggggggttctctttggggcataccgtcgattttgggttccttctggcgcaagtatcagcggctcccatttgccgacaccggtggagtcgtcgcctggggatcagccaatttgcattccaagagcagcgatcgtcgagggaatcgatagtgtgtgggccagccagatcgctgcgcctgtgcctgacgctctcggcgtcgcgcctggcaagggctaatgtcgttcacgttcatggatcatttgtcgtacataatgggctgtatgagattggaacagacagcgttgtctgcaagacattcgataagatgatgcgaatgaagatgcaagcaagggaggaccagttcaggcccaaagacatgataaaaagggcattgtatattcagggtagaataactgcacatcctaaaagcgcccataccctgtctcaagcagtctcaaagtcaattcaacgtctcataatgcatgtctactggtctaggcctgggacgggggaggacgaaggccgctaccatcttgtcaggagtgaggctgaccgatatacattgtaatagcaaccaaggcagccgtagtccaaagtttttatttttttctccttttttttctcgctgtttgttgttgttgctgcatgggtaccttggatatttaaggcacatcggctcttaggcaacaggggagttcggcactttaaagagcagcggaaatcacgatacggtctagcgatggcgtatactctcctgacttaccgagactgcagctatcatgcaccagtcagttatagggttagatcttcttgagtgcacgcggatagtctgtgttagccaagcaatatattgactgtgcgtgccagccagcttgccgctcgtgaaagaggagagacgagaaagtaaagaaaaataggagagcaaatttacatccgggcgaacgttagctatcttattgagcgaagtatattctttgttgttgagagaaacaataatttgagtaggaacctggcggtgcctagaagtactgggcataaaggcagcgcacggtaacagagaagagagggagaaggggcatcacttggaccaaggagaacaggtgatgacattgagaataccctagcatcccgaatcacaaggcgtgagaactcatatttctcttgaggtcaggcaactgggagcgcagagtaacaagtttgcagagactggatctagtctgactagagtgcatcattttgccgtgaacaatcagatctacatagtgataccaagccatacgaagagtctcaaactagggtacagaaggctcatacagtagaagttctgtcaaggccatgacggtgatctaaccgccgttacccaccaagtccagcacagagaccagtgaccgtcgtcacccaaattcaattgacacgtcgtgttctccttattcatcgtcgtcgccaataatcgttttatcagactcatagtcgtcatcttcgtcctcgtcctcgttcggcctctgtagtctcccctcaggctcttgacactcaaaaccgtcatgctgcgccagctcgccatgcttataaaccgacttcttggggtagaggcacaggtctcgcacaatctcccgggcagtgctactgtctgcctttgccgacagagtgtccggtgccttcccctgagcagcactttatggaaatagggcaaacaacgcacatcgatgaacttctcgagatcctgatcgagactggctaggtcctccttccgtttgttattctctgtaattagagcttgtttgcgcttaagaagttcctgtcgggcctgctcaagcttctctcgctccgcatgctcgtggtttatccgcgcaaccatcaattcgtgctcatctgactctcggtgctcggggtgcagctccaggaattcctccaccggtattagaggaagcgaccggtacttatgactaaaaatctccagttagcaacgaaaatatctgagacttaaaacggctgtggcatactcataagactggcaagcggcaatttcccctgtcaggtgtcgctgctcgtaatacaggttttgaagttgcagatgtagccgatcgatctcctgccgggcctccgcagtacgctgctttgtttctcgaactcggaaaattgcatcacgattctgacctcggagctgagcaagaagagcaaacaggtgcttttgcaccgactgtggcgattcggagagctggtcggcggcgcctgacgggtccagcaatgacaatagcttgtgacagagatcccgagtctcggcggcagtgttcaagacgggcaacaatgaggggtcggaaatgatatctctgatagcagtaccagccatggcgagaaagacgatgctggcaggcaaagaggcaaacaacgaatgacgatggcggataaaggcacttggggagccgtttggcgggagggcgggttgaacgtggaaaggacgcgccaacggattggactgaagagacgggtaaataggtagataatgcacctgatcgatgatcgacaatgtcgccctacggggaggaacctttgctgtcggcaaaggtcgttagacaagacgaaaatgaacgtgaagaagaattgagcaatggaggcttccccactctctcggccttctaaggtccaatctccacggact

SEQ ID NO: 831 - DNA, 5165 bp, Emericella nidulans
ccatactcgtccgacgaaagggaacggagggagctgggcatgcgggcatcgtcgctggagggaaggacatggacctggccttcggtgtggaggctcggtctttgtcctcatctttgagggagtttttctccatagtgatcaagggacaaggtgaggagcaggtgcaggcggccggtagttagagcggattgtcttgagggatggtgcaactcatgctgggagcaggctgaactatatgcctgtcgttatcagtatgtccctgcagctatcttccccagattgacggtgtggagacaaagataatcggcaattgaccgactccaactagtcactatccgtggatgattagtacagcaggaatgaagtctagaccagagacagttagggctggaggagctcctcccgaggccctgcggggcgatacgacatgctcctccatttgcgcaaaacatacacccataccaagtatatagatagctagaactgagatagggatcctaagcatatgttcattattagctctaccaaaatctctctttacctaaccaagccatctccaaaatgtcccatcccactcctctgaccaccacaatccgcaatccccgtctgcgcctgcttaacaaattgcgccgaaatgaatacccccttatgacattcatggctttgccatctgtgcgcattgcccagatcctctcactcaccggcctagacggtataatcatcgattgcgaacacggccacatctccgacgacagcatgcacaacgccgtcgccgcaatctccgccctaggcgtctcccctataattcgcatccgcgggccagcgcatgatatcataaaacgtgcgctagatacaggcgcgcacgggatcatggtccctcaaatcaacaacgcggatgaagcgagggcgatcgtggcttcttcaaagttcccgcctcaggggctccgcggtcagggctccgcattcccggcgatagggcacggccttacgacacctgaatacatgaaatccgcaaatgagacgattatcacaatgatccagattgagacaaaagacggagtcaagaatgtcgaggagatatgtgcggtggaaggggtggatatggtgttcatcgggccgaatgatctggcgatgagtctgttggggtatgtccctgctagaggggatgagcctgtgtttgttgaggctgtagagaaggtcatttctgcggcgagaaagtatggaaagtgggcagggaggatggtcaatgatgggactattgcgaaggccgagagggagaggttcgacaccgtcgcggtaacgggggataccaaggcgatcacgaattggtatgtgaaagagtttgatatcgctagatcgtagactacatagacttgcttaatatgggttactgttttgttcacaaaatcactgtacgagtacgcttcaaaagtttgtaagcggacttcgtgaacgtcacccgttcatgatagctcctcactctcgcaatgtatgctttaagtgttggtagatgatataatgtcgacagaagaatatccaagacagtttacagctggttatagagtaagtttggtcacaaaatggtaggtatatacctgcatgagagcagagaacaagcgtctcacaacaagatactcatttgctgtctctgcagttgcccggattaaatgccaacagaaggcttccctatcgcgcatttatcctacttaaaccagcacattcattcctttctgtatccattccattctccacagctactaacattagaagtcgaaagtcgataataaatcgtacccgttagatttaaggactaataattaaagtctatacgtatctaaacctgcgcaatgcactcaatctcaataacggttccctcgcccggaggcagcgcctggagacaagatcttgacggcatcggcttgggcagaaactcaatgtagacctcgttcatggccgcaaagtccttcatatcggcgaggtaaacgttgtatttcaccacctgttccagggacgacccagagagctcgaggacttcttttatgttttggagaacggtgcgctggctacatatcagttggggtattggagagggtagtgacgataaggcgtacagttgcctgcttgatttcgcctgtggcggtttgaccggcaaggaagacgaggccgggaactttggttgctgggcctgttgaaacaaaattagagagtgctagagactgaatgcgactctgttgtaagttgcgtacagttgtgaggcttgagaggaaatttctcgctggagatgagttggcgtgacattttgatgaaactcagttatggctatgatggtgacatgaagagaaaaggatccggtgtacatacttccctctctttaaatcgatcctctagcaatttccatggtgagtttttggaggagctctaatgaccagggtgcaggggctgccctgggaggagctcctcccaccctcctcccaccctcctcactggctcctcctccaccctaactactatctcgctagataggcttctgaacggctatgtagaggagctctccaaaagtatccactccaaatccaatcaggggcagcagattgttggaggtcgagttagctcagcatccggagcgctggaagccctaaaccgccagcatctggatctgaggagctcgcctgatagatcatgagactgtacaaggcgcctctatagtccgctcaaggtatataaccatatccaattgacttgctgtagtacgacttcggtataccatcagttattctcaccgtcagcaccagtccagcaaagtcaaacagtatagtttctcacaatgacccctgcaggccccttcaaccccccttcccccaatctccccggcaagcccttcgtgccagaatggaatccgcctccggttaccaagcagactgagagctttgctaccctaaagtcaatcgatctgtccctcctcgactctgaagacccggtcgtggtcaaccgtctcattcaacaggtcaagattgccatccgcgacgacggattcctatttctcgagaattacggtgtctcgcttgagcagctgcaccgccagtttgcgctcgcgcagtacctctacaataacatgagcgaagaagataaggagcgccttctgtttgaccccgagacagggaggtggtcagggtataagcatccgtacgggttcaaggtaatcctatatcccgtctccactctttataactcgaacatccacttaactgggcttcgtcttatgatatagcgccaccgcggccccccagacggaatcgaacagtttaacttctacacgcgcgagtggaacgaccccagccgcatcccgacgtgcttacaccctttcatggacgaaatcaccgcgttctgcaactaccttacgcaatcggtaaaccgccgactgctgaccctcttctcacgcgtgctagaacttcctgacgactacctctgggaaaatgtgcagtcgcacggattccccacgggggaaggctacttccgccacgcgctgtttcggcctgtgcagaaggagacgcaggaagcgtccaaagggctgcgtatgcacggacacacagattttggacttacaacgctcctcttctcagtaccggtcagctgccttcagatctggggaagggacgaaaagtggtattatgtcccgtacaagcctggtgctctagttatcaacatcggcgacacgctggagattgtctccggtggacacttcaaagcgaccaggcatcgagtgtataagccgcctgccgatcagctaaatgaggagcgcctgagtcttgtgctgttcaatagctcggtcggggagttgcggatgcagcctgcatatggtacgtttcgtccctttccgtatctacagcccacgagcccggaatgcggatatgtttgctgactgtgagaacgcgtagagtccccgctcattcaacgagaaggctgcattgaagagcaaggtgtgtacaaggagttcaagcgtctcacggaagcaggccagctcgtcccgagcaaccgcgagtggcgcgagatccagatcgccacggcaacagacccaacggatacagatcataacagaattggagtccatcaggtactaattgatgggaaggtgatgcatcagagagagtatatgggggtgaaggtagtgttgcctgtttagttttaataagccttcgttgttggaaaacgtgatgtgcttttatgggttctgccagcatcaacatgtaactcattggaatttggtatacagtaactatgttctttatatctaaatcgcttctgctctcctttactctagctctgcgtgatttccgtcgcctcctcaagccaatatctgattctgattcctgggcatggctcaaggcagatcatggttcaatcatggacccagcgccacgcaggttgagtggcccatgagctgaatatgtctgagatctatggttgtaccgttttgtgtctgggctactttgctaatctctttgcacatcatgattccttcagaatgtgtcatttactgtttcacacgtctgcgctagaaggcctaaccggccgaagagaatctcccacaagtggacaacattggtactcgactgggtccacgcgtgcgaacacatcccgcgatacatcagagggggttgtgtcaatatagcgtcctattgatggctcatttaatccgcaaacagagcgctgcagaagttacgggcacggggctggaaccagtaatgtgggaacttgccgcgtcgttaccgaggccgggttacggctagcaatataggactgacgggcacaattctcttcttcggggccatatttctcttaacttgttctggcttccccttccggtcatgctggtcttacttgctatcatgttatatttggagaccatctatttttgttgtgctttttccatggcctgggcccttgtggacaggaagttggcgaagcacaaaacgagacacttcagatggagctgacggcacacttgaggttgaaaggtagaccaatagacaggccttatgtagttctgatcatgagacgtcctaagaacaaatatgacgggccccatgatcatacattaactaatctaaatataacctgacaaacacctcgaaaagaactttccatacatgacattttggcttgct

SEQ ID NO: 832 - DNA, 2029 bp, Emericella nidulans
cagctttagtagtagcgctgggggcctgtttctacgaagcaacttgaaggaaacggtacaacaaatttagtccacttggacatccgccactgtgtctttagctcttcatcgacttaaaattcactctcagccggcttttaatgagccattcaaggctattgtttctaacatagttctaagcacctagttttgaaccaagcattcaaaggctagtgctgtttacgactcctgggctggaatatggccggaaaggcttgagcagtctcctcttcgtaaacatagtcagctgcggaacaggatgcacttagttacctcttccaatacagctgcggagattcagtcttcgaatattttcgtatgtttctcctatttcttgacccctgacagagaatctcactccacccattgcaaataaaatgacatcacgagccgtggcagccatcacgtacaccgggctttcttattcagctttgacatacttaaaatgacttttacgtaccgttgagtatccgtttcttcagcctctcctgcctgggcgatatacgctcatcaaaagcattccctgcacctctgacacactaggcatgactgatggctaccaagcgaggattcggagcatatcagaggatggctgttgctccccatgagttcttcaagcccgcatgacaagtcggacctacaatacaacatggttctgctcggcaaacagactcaaggtgtcacaggctatggcctggattttggttgtcggccatgccctcaacccagttctaattaaggtttctgcaacatctatatacggcctcggaattgcggcctcgaagcttaggaaaggatatccgtcctcctaacttcgggaaaggagtccgtcggcttacaggtccgggaagtcagaaaggttgataaagggaggaggaagatatctgcgcttctatcttttgtttcttttctctaagcttgtgatactcgtgaatacaggacagccagtggaaaacagtactgcctacgcccgttacacaaggtccgcagaaggtcatcgtagatccacggtacgaaaaagaacatatgattctatcttaacaatcaggacaggccgtaaatatcacgttaggggactgcctgacatctgaaatttttgcgtttgcaggaggcctacctgggatcgatgcagtgaactgctatccgctcaaaagagacgactactgattaccaaacaccggtccccctgcccagcactcagcgttgctcctgtcctatcgatgttgagggatgtttcgtaactatcagatttgctgcttccagccttttcgttttcatgatcaagtacaacactgcctgattgcagccactttaagctccatgtatggggtccttggaggcacactggaagttccctcatgcccgtgctcacggccatttaccgctattgtatgcctttgaatttagaacggttagtatggccggtgtcactgcctattagatccccgttgacctgtgaggctgggacttggggtcgacgatgcgtttcagcgattcatcagcgatttcgctgcctggaagggccagttctttgagcctctcctgtgatgaccaatgatctaagcagccaatgatagttttagttttagacctagggaaagagctttaaaaatagcgacaatactcccacgcttgatgttctcgcaaacaaactccgtaggtagaatgcgatctcgcgttccttggaactgaggcttgcgccaaattgcatgaactgcaccacatttgatgccagacccagggccagaattttacgttggggtctcccgcaattatatgacctacctgaatatgtttaggattaaggtgaactgtggaactccttctcctggctctactatgaggactgtcaggcaagggcttcctcggagacttgggaatctatcgctgcaagaggccgggtcgggcgcgaagctgcgtcaagttattgaggagagagagttgtacttagcattgaggccaccatggggtttgaatttatacgcagatg

SEQ ID NO: 833 - DNA, 2763 bp, Emericella nidulans
gtctactgaattgtacttcttccgcttcgactttcgcttgatgagatcaatcgcaataggctccttgatttcgacgtagtaatccggatacacacctttgtcaggtagccgctcaaaatgccgaactttaagttgattaccggggcctttaagtttccggatcccctttaggactgctttaattcttgcttccatcggggtatcaacgcgcggagggcggcctcgcttttttctctgctcaggatccgcagacttgctcgcatcgtcttttgcaccgtctcgtttaaaacccgggcgagggccgcgcttctttctctgcggccctcgtcatcggagtcctcatcatcgtcatcatcctcgtcatcttcgtcctcgtcgtcatcttcctctggtagaggatctggctccggaatttcaccaagatctggaagttcagcttcctcggcagtgatgattcccgcttgaactaatttctgaagttcggtaacaaaggcatccttgatcacgagcgaatcctcgtatgcctgggaattcggccggttgtaggtttgcgcattgtgagggatctgtatcgaaggtgatgtcagacgcacatcgtgacagcgacgagcatgataatgttctagactgctagcttaccagggcgcaatcccgcacgaactcagagacgcttttgtactcccgcttgttgatcttctgcttcaggatactaagcgccatcggctccttgatgatatcgtaataatcgggaacattacgcttgttgacgctgcgatggaaaagtctcgacgggtcatggccactgagagatgaaaaggtgtcagcacaggtttatttttgcgacggcacgacccaggagcatcgccctttgggctgtcgcgcgatcagtctgacaaccacttactctgcttctcgaacctcatagatcgcaaggacaacatccatcatatgtttccattgttcctcagtgacggtactggtgacaccgttctgcttgccatcgtcctcaattgactgaacgggctcctcaggagttggctgcgcttgcgacggttcggaggctttctccatcgtattggccaccacgagcacggagacagcagcgcaagtcagagaggaaccgttggaagtgctggtagtgtcttttcaattgattctttttacttgaagagtatccgaacgtccagaagcacgcaacagcaataggcagaggttcttccagtgagtatgctgactaaggtttgaattcgatactgtaaggtaccaggctgtatctgtaccgtatgcttacgatctctagtttgtacaataactgagaatgaactgctcagccaacagaactacatatgatttgccatgctcttgctgttgattcgtgttaagggcagggtaattagtgatagaatacaaaattccctgcgtggacccctgcatgataccgccaaaatgtatagcagtggataccctcatagtgccattcatacttctgcagtctagcgatttagtagagagtttaggtctcagtagatatatatattctatatgagtgaccttcaaagaactgtgcttgatgattcagttaccgatccctttgcctcaggtatgttcattatgtaggaatggccttgtaatgacttttggtacagattacttgggtcagtttggtactcagattttgggctttccctcaacgggtcctctagagtcatccattcgcctggcatcaaagcagaccgattggtaaccctggcagcagctgtatgacggagaggtctttgcggatggccatagccaaatgcggagaattgctggaaattccccgcactcccactctatcaccttcaactacttacttgtttacaaagcaaaagctcgcaattggcgcccttccactcactggaacacgccaggcaccctgatgaccagtagcgccctacggcactcaacgtccaagggtgaccacagctgtaaactatctcagaactcttagctctggattctcacaactggcaactgctggcatcttctgccccactacccgacttgcgtcactgatcttccgccgtggcgcggtagtttcattaatcgttcctttatccttcatctctgtgttcacttatacttgcgcggatctgtaaaaaatgagaatacgaatacgaggtccctctgggcaatttgctattacccttgctgaggacgcaacagttggagacctccgaaacacgatcattgagaagacaggattgactgcctatgacgcgaagtacggctatccgccgaaaccgatatcgttggaacatgcagaaacagaccagaaacttgtcgagcttgggattcaattagaccgggagcagctcattatctccgccaaagatggaccacctggaccatcaggaaagaaggaagacacttcctcttatgccgggcaatcatctccgaaactctctttatcacgcaaacaaaatcccgttgccgaggatacaccaaaagtcccctcgccggagcatggtggtctattcgttctacgtgtcatgcccgatgacaactcgtgtctgtttcgcgcaataagcactgcactcctgccaggcgaggacaccatggttgaacttcgatcggcggtggcgaaacgatcagaacaacccgacgagtactcctccgcagttttggagcagccacggatgactattgtcgttggatcaagaatgagacatcgtggggtggtgcaatcgaaataagcatattgagcaacattttgatgttgag

SEQ ID NO: 834 - DNA, 4130 bp, Emericella nidulans
ttgcgaatacataaatatatgcccgaaatagtagcagagtctctcttgctatttagcaagagacatacagttaccttgactttggtctgcctaaacgccgagtccgatgacgcagccggtgctccgatgattggctgggcccccatgtcgctccgcaaccagagcaagtcacccggggccgcctgagcagtgcatcatcttaccaatcctgctcaacgccatcatcctttctccaactccttcctatcacctcgctgctccttccatcatcgccctgatcgttattcgtaaagctcattctttcgtttccttttcctcgctcattttgcctccttgcctatcatgaaggcttccttgctcacagcttctgtgctgctgggctatgcctccgccgaggttcacaagctcaagctcaacaaggttccccttacagagcagttcgtgagtatatgagctcaatcatcttacgatatgatgtttgtttatggctgtgactgattcattcagatcacgcgcaacattgccgaccatgcaaatgccctaggccagaagtacatgggccagttccagcagcatgtacttgaggacgagccagtcaacgccatgcgcggtcacgatgtgctggtcgacaatttcatgaacgcccagtgtatgttcttaggactctgcgtggctgagtgatactgattcttgctagacttctccgaaatccagctcggtaccccccctcagaccttcaaagttgtccttgacacaggtagctccaacctatgggtgccatcgtcagagtgtggctctatcgcttgttacctgcaccagaagttcgactcttctgcctcgtccacatacaagaagaatggtagtgaatttgccatcaagtacggatccggcagcttgagcggattcgtgtccagggacaacctgcagattggcgacttgaaggttaagggacaagacttcgccgaggctaccagtgagcccgggttggcttttgcatttggccgttttgacggtatccttggcctcggatttgacaccatctccgtcaacaggatcgtccctccgttttataacatgatccaccagggtctgctcgatgagccggtctttgctttctaccttggtgatgccaacaaggatggcgacagctccgttgccacctttggtggtattgacaaggatcattacgagggcgagctgatcaagattccccttcgccgcaaggcctactgggaggttgaccttgacgccattgctcttggcgatgaggttgctgagctcgagaacactggtgtcatcctcgacaccggtacctctctaattgctcttccttccaacctcgctgagatgatgtgagtaatatcattgccgtttcacgcgatctctagatactgacattgacatctaaaagtaacaccgagatcggtgccacaaagggtttcactggccagtataccattgactgcgccaagcgcgactctcttcctgacctcacttttactctgaccggccacaacttcaccattggtccttatgactacaccctcgaggtccagggttcctgcatcagtgccttcatgggcatggacttccccgagccagttggccctcttgctatcctcggtgacgcctttctacgcaagtggtacagcgtatatgaccttggcaacggtgccgttggtctcgccaaggccaagtaaaggttaggaaactgtcgttaatgtgcctaaaccgttcttgttgggccgcttgcttccgcttgggtgcaaagctcaatctggacagctcggcagctgtttctgttatgatttcaggatctgatttcgaggctgagcagcacctgtggaccttctcttcctaatcgacgattcattgtgatattgttgtggttttatcgttactgaatttcgtccgagctagtggtgccttgacttcaagtagcatttagaactgtagtcaggaatggccatttcaatcactagactgataacagggtagcttctaccagtatttttaaaagaacccatccgtaggtaaataagccgatttgattacctaggaatagaaagtcgagtctaggctaggtctggagcgccgccccgcacgggcgcccagtccagctccgaccgcctgcagaaacctggttgttgccttgccaaacaggctgccaaccttgtttgagcttttggacgagccttgaggtcactcgctgtttcgtcaccccatcactgcgacctgcctgattcacacttcccctttattatcctgtgctaaaacacgccttatttgatttctgtcctcatactatccgtttgctgtgggcagcgaccagctcttctttgattccagctttcttctctgcatttccccgtcgtgtgcgctcatagcaaccactcatgtacctcctcttctcagcacaaccttaaagcgaaataaatacatatcgtctctgcctcgcttgcgcctcgctcgcgcaactgcctttatcatccgcgtttgtttatagtgggcgttggaggttgggtgttgtggcgacggctctcgattctccatatcgacgggcatggctccatagctgtgaagagtcctttcaaatcacaatcactgccgcacagcggtcttattcgcctacttcaactattgtgattacggagactaacgaaggagcgtaacgatacgcgagagaatcaacagtcgatacagagcatgcttcttcgtttaccgccaagcctccactaccccatcaccgttacgtcgttgttaaagcagccgggtgatgaggtggagagggacgaggcgatattctggtatgcgtatcaaactattgttacagaaggagatgggtggggaaacaaggttgatgtgaagcggacatttcccactcgatttgaatccaccgttgatggaaatattgtgcaatggaagattagcaagggtgatgttattgatggaccgtaagctgctcttatatccttacagaagcttcatggatgctgacttgacagtgttgatgttgttgagatagatgagccatgtgcgcacgaagtacagtatggcggcctttgcgccgagtgtggaaaagatatgactgagtaggtatcgagttatatgttagattatgaatttagcttactggttcagggcgacgtataataccgaggttccgggctccatgcgtgcgcctattcagatgactcatgataacaccgcgcttactgtgagcgaacgggaggctatacgcgtggaagaagatgcaaaacgacgccttttagcaaaccggaaactctcgcttgtagtcgacctcgaccaaacgataatccacgcggcggttgatcctactattggcgagtggatggcggacaaggataatccgaaccatgcagcagtgagcgatgtgcgagcgtttcagctggtagatgacggtcctgggatgcgcggctgttggtactatgttaagctgcgacccgggctagaagagttcttagagaatgtggccgagatgtacgaactgcatatctacacgatgggaaccagatcatatgcgcaagctattgccaatattatagatccggatcggaagctctttggtgatcgcatcctcagtcgtgacgagagcgggagcttatccgtcaagaaccttcatcggatctttccagtggacacaaagatggttgttatcattgacgaccgcggagatgtttggcggtggagccccaaccttattaaggttataccgtacgacttttttgtcggtattggggatatcaactcgagctttctacccaagaagcaggagctggaaactccaggggaaaaccaggaacaaaacccaacgccaccaatacaacagcaagtcaatgggttggccgaaaaatctgacgcgacagagctatcaactctagagcagctggtgactatggggggtggggataacccaagactcctgcaggaacagaccgaggcgcaagacgtgacgatattgcatcaggttgaggatcgcccgcttctacagaaacagaaagagctagacgctgaggatgaatcggcagattcgagggaatccggcttgaacgagtcgcgagattcggcgaagccacgccatcatttgttaattgacaacgaccaggaac

SEQ ID NO: 835 - DNA, 1944 bp, Emericella nidulans
ccggttcgacgagccctatacaaagggaaacgtctctccaggtattttagcggtagcagcaagtttcacagagaagatgcgagaaaactcccccagtccatacaccacaaaccccatgacgcccaagtcacccgagaagtctctcattaaggggcaattccacaagcgtatgcagtctttgcagaatactgatacgcgctcggagttcttgaactacgtggaaagcaggtcgccagagcgccccctgcgcgcatcattctcggatcaaagcgcaaagccgccagagaaggctgtaaagtctgagatatcaccgaatcagcagagttccgaagatcttccaaatgtcctcatctctaaccgatacctctctaggccactttttggtgaaagcactcctccctcagccacaatgctcgctttacagaatatgcaactgccacctcaagaggcgccacggacgaacgggcctgatgcttcttccgagcccaaatcctcccagcccaacagttttgacttcttgtcaaaccagatcctcagtctcacagacatcgccagcagtcttcaacgcgagatggcgcaactgagtcgacgaagcaaagataacgctaccgatttgattagtctcaaagctgcaacgaacgcccgagatgaagatattcggaaaagtcttcgtgatctgtcttcaaacttggctgccaagtttctagatgctgatactgccacaaggtgggatctcagtgctctcctgggttctgaaaatgctattaaccagacggaaccggatagttctccgaactataagaagagttattctggaccgagaatgcaaagccccagccccttctcgatggaacgtgaatactgtgcttcccccgggcccttgacagacggatccgccagtattgcgttgttggagaaggtactacgagaaatggcgacgaaggaaggtcaggaaaagctgctcgagctcatggacgaactgaaatcccgtccagtctccgatgattctagcaagaacggtgataattcaatgactgaaatgctggaagaaatcctcaacatagtgaagcaggactcaggagccagagctctcgtgcgagctggcaagccagagcaagacctcgaatccaacatgggggtcatccgccagcaacagagtcccgtgacagatgagatgctggatattttgaagcgcgtaagaagcagcgtcattgaaggtggtggtttgacaaatgaggtgaaacatctggtgcgcgaactccgaggcgaggtgctggggatgggtagaaatatcgccagcaggctggaagacgctgagcgggctcgagccattgaaaacgcgcccaagggacctgggcccgaggaaatcgccgaaatcgtcgaacagggcctacaagaacttcggacccaactagccgccattatgaatgacagtaaacaccagtcttcaacactgagtgaggtccgggccgccatgaacagctccgagatctgctccgtcgtcaagaaagccttggatgaatttggcatggccgagctccgtgataggcctgagggagctaggatggacaaggaagatatcctcgaggcagtcagagaagcctgggaaacgtacaagcctgagatagaattgcaaaactttgggcttgagcgagatgagattctcgagtgtctcacagagggtcttaaggcctaccagccacagcatgagcaggccgctacttacgaccaggttttggcagctgttcaagcaggtgtgcaacaatttgagcagcctccatcaataaccaaggacgaaataatccaggtgatccaggaatccattgagagtgtcgaacctcgctctttggatggcgagcagctggctgcacttcgagatgagatactcaatgcagtcactgattccatagcgacgcgaaggacaatgcaaaaaacgaaatgttg

SEQ ID NO: 836 - DNA, 3522 bp, Emericella nidulans
ataacgacagccacatcgtcgtttcttgcatcccttgatccggtgccatgactgtacgacaactccatgcaaagtatcatggccgctagcaagaagtcggtgtactgaattgaatttggaaatagtctgttcctgtacatcaggccaccaggctgtatttcacggtacaagtctgcatgaacacgtaggatctgtttcgcagcagtaatgcacaccacccgcgagtatgcgtaccgcatatttgtatgcacttctcccaggtaccttcgatgaagcacgcagcgagccttttcatatacatttgccagggtgaaccgctggaatattaactcgggaggatctgcgatgcagtggttaatcgggcgaatgtgatatgctgggggtttgagactgttcgcttcctccaagagccggtcaacttcgagtgtttcttcgtaggttactggtttccgcgagaatgccatatccagaattttcccaaaaaccatcattatacgcgacttagcgataatgtacgtcattgcggtaatttcgttcatcgggcgtgatggaggaagttgcaccgtattttggtcaaagtcttcatctaataagttccttggcagctccgtgtcaaattgccagtcttgtagtgtccgtggaacgccgacctcaaaagaaagcaaggcatcaagctgacagagaaatacccatgcgcgccgtcgcatctctccgtcgaaagcggatatagctgggaactgctgcggatcacggtgatagccacttcgcatggctagtttaatagtaatccctaaaagaaaagggactcctgtttccacatcatgttttttgtagaactcgcccatggtatacagaaataagccctcgactttataccgccctgcggcaatgtagttggattggaccaggcattgcgcacttctttttctgaaaacgttggcaatctcaccgtaatccccatctataccatatatcggatctccagtccgttggtaaaacataatactcaatgtcataattgcatacagcatcccgagccatgaaagggaaacgctctgcgggttgtcccagaagttgttgtactatagggcatcaattgaccattcgtcaaatttggtatgtatagcctacctccttttgaaatgtaggaatatggagaattgctgcagcatcttagcatctacaatcaaatgatgagttcaaactcttaccaactataggctctttagaaatcaggtaatacgaaaccagtctgtccgttacttggcgagccggaatatcagaaagcagctcctctttgctcatctgtctgcttattccgaaccagattgtgggctctctgctgctaatgttatcatcctcagacacttcttcatctgataaatcatcactctcctgcagtgactgcttaaactcgtttatctggcagcattttagcatcaagcaccgggtagggagtcactagtgatttacctcttcaagaatagctttccagtgcgcgctgtagatatagttcgttacggtatccttgaccagcagctttccgtctcccccagaaggcgagctttcgctttcaggcgatggtccctcgggctttggcggcgaaggaggcgtcaacaccttcgcctgttctcgggccaatggttcaggcaagggtactgggaacgatggtgaaaagtcctgactcggaggttctccctgcttcctctgctgggcaagagacattatcaggttctcgaggtgctgcaagcggtcctggacatgtgtcgggctagcccggccgtgtgacgacctccctcgaggcccacggccgacaaaggtgcatgaatttccttcccccctctttaagcaattgttgcaagggtgcgtgcgacagcatttcagtctgaaatccatatcagtgctttattttgaatattcagggagaatgctagcaacgcacttccgactcctgcaggctgtgcaagataactgtactctggttcttttcctctccttggatagatgagctgtatcagtggcttggatctcggccatatcagcgttctgggatgggacgtagaatagtgtgataaactacgaatgtcagcaaatgcagcttcagagcttcctaataacgacgatctgaaatctggattaggttttcgatgaaaagacagcggaggtcgtgaggtcaacctcgaagaatcgctggttggtgttcaggttgtcagccactgtaagatcggctttctttatctccgttgctaaaccccgtacgtactgggctggaactttcacaacattaaccaaactacgtatcttaatagcacctctagcatcttttgaattccacgtctagaaagggggatcatatatatcacaaacggtactaaatgcactgtctaaattgcctagagcttcgcacggtatgctgagcggatgtaatcaagccctgggggcccgtcgtagatctgctgctcgaccacgcgagtgttgacctgttgccgattgtaagtataatatgaaggggataagagccggaagcttacatggtgaggtcccaattgctctacgcgctcgcaaccaagcaggcgcatagcggtggacgtctcgtcggccagaactaaacacagtcaggaagttcgctatagcttttaatgcgaaaggagtcatactctgtaatgtgcgcttgacaccggcgacacccccagctcccagaccccacagagcgggccttccaattcccacggccttcgcgccaaggcaaagagcttttacaacgtcggttccgcgtcggataccgccatcaaccaagacctcaagcttgtcaaaaacctcaggacaatatttgcggatctctagcagagtatgtactgccggaggcgcagtatcaagagctcgtccaccatggttggaaagaatgatacccttgacctggggaccgtggagcgatgcaatatatgcgtcttcatgggtctggagccccttgagtatgatgggtaggtcggtatgctttttcaaccaaggtagggtgtccctccaggtgagcgtcgggtccgttccctggaaaaactgcttaccaacgccgctctcgccttggccagcaccggttgcagcattgccccgctcgtcatcttcccgtttaccaggaactggggcgtcgagaatgaagaccacaaattttatcaccttcagcttgttgacacgcgccatctgggcctcactcttcttgcgattggtctgcccacacaactgccatccgaacacctgatcggcagcagcattttcgacaatctgctccgaagtcatggagccgttgttaaacataatgtgcatccccccgaaactgcgacacgcttctgcaattcccgcctcaccagctgggtttccaacacgtgccatgcccgcagggtaaacataaattggtattcgcagcttgtaacaacgccaccacaggagtcaatagagtatttaccactccagcattatatgccgtcatactgccatctttggtccttggttagcgtgtcaaaaactttt

SEQ ID NO: 837 - DNA, 5169 bp, Emericella nidulans
tcaaaggcgagggccttacaggtcagccaaaataagatctaggccgggattttgtgttggatttgagcctgttctggcgtatgatagttcttgggctgtcatggcccggaccggtgatactggggaagggagcagggcacgctctgcggagtcagcgtctcgagcagctggaggagactgtaggaatggtagttcgtgttgcgtatccggactagagtctgggccggattgttgacgccgatcgtgagattgcgaatggcgaggatgcgagtttggttcgaagtccgggtggtatatatgctccatctgctcaatcacctgctcttctagaacctctgtcaccgtcagcatgcccgctttccagcaactaatgcagagactgccgtgaatgaatctacccaatcttgaatacaggctctcaatttgccccttcttagggccccgtcgtggcctgttatggttcaccacgcagaccctccccgtcatcatacaagagccgcattgcggtttggcgcggtcacatcgtgccttgcgcttgcgacactcttcacatgcgaggcctggttgctgccgcgctggcttgaatggactctctcggggctgaggctgggctttctgcggcatatggacaagctggataagcgtggggtgaacctcgatgagactgttcacactatctatatctatgtatatccgagcggctgtcagactagacaggctgacgggctctcagtgcgattgtccacgggttcagctctttttactttttttttctttttttcattatttgcttattcgacaaagctaagcaataaccaaattgttgtcccggaaaacttctacatggccttatatctttctgcaacctctgaaaaataacatccgcccatctgatcccagttgttcgtgagtagtcagttgtctacagatacacaagatacatgcaccaacaatttgcacctcaaaactctgccgccagtttccttcatcggtaatattggatgaaggagagaaccttgagagaccgatttccgccgctgatttactgtgacgtgttgagttcccgagttccataattatcagaacctcattattggttccattgacacgaggcaagataaggaataagcaatcatccatgccctaacgcttgatacccactttttaaagctcaatcgccattattcagggtggctgaagggtccaggagtatcttctcggtacagctgaacctcatagaaactccgagctccgggatgactctagcagggcttagcaatgggaaaattggtgctcaaacacgtcagccacaatccataacctcagaatcaaacgatctagcatgccgcgtgtagcgagatgaggtgagaccagagtatgggtcttctacggcgaagaaggccgattggtctcgcatacatcggatcagctttgaaggatcgaggctgaggtgagctgtacttgtagtataggggcaattagggcttgtaattgtataggtcgctcaccgagtcctccggtagatctggtgtaattgatgtaccatttaaatccgttcgtgctcacacctgcgttgtgcgattctatactgtcctggccttagattgacagtgcatcagactcacattgtgtacatcatgcttgggacgttgtatctctggcccacgccagcgccgtcatacaatatccatgaatactcgtggacaaaaccctcaccgccatcagcaccacggcatttgcaagcttcaatacccccctcctttcaatcaatatcgagatcaaccaccgtcccaacatcacctcaaaaagccacagacactaccctccatcttccccgaatactttgcctccacggcggcggcacaaacgcgcgaatcttccccagccaatgccgcgtcctgcgcgcccgcctaagctcacacttccgcctcgtgtttgctgaggcccccttcccttcagcaccaggtcccgacgtggtgagtgtctactccaactggggtccgttcaaggcgtggttcccgccgggctcggcggcccagagagcaggtgcgagtctcgccgcagcgtatgcgcacgctcaaggtcagagtggagatgcggtccgaatagacgatgacctggacatccatgactttgccgtgcagagcattcggaaggctatcgatgacacgatgaatcaggacgatgaactaggcgcgacgggggactgggtgggtgtgctagggttcagccagggggccaagatggcggcgagcctactattgcaacaacagagggagcatgaagccgagatggaaagcaggaactggggccgggaatgggcgccattgacaaagtcaggaaggaacgtcgactaccgcttcgcggtcctcctcgccggacgagcgcccatgatctctctctctctgtcagaggaggacgagacagactccctcgtcactgatacgagctatggtactgcgtttagctttgggttcgaaccggctttgtatctgcccactatccatgttcatggtcttaaagacccaggattgccactacacagagatctactggatcatgggtgcgagtacggaagtacaaagctcattgagtgggaaggcggacatcgagtgcctataaaaagtcaagatgtggtgctggtggtgcacgcgatgctggaaattgcaaggaagaccggagtgataccgtgactgggtggtgggtgggcaggtctgaggtctgcccagctctatgggaatggcatcgggataggtgtcattcgacccaactgtatatggcaaaaggctcggattggctcctgataatacttttcctgtgctgttatcaaagtttagaagcacttcactggctgacattacggccagctccggtatcgctgtgccctactgattcccgcattcggcaatcccgaagcctgaccgtgaatcggtctgacaattgagtagtactgccgactatgcgtagcattgtggtagaagcagtggtgaaaacagaggcgagtcatactcgaccttatgaccagcgttctctgcattagatcattgactgcacatacgacctcgtgccgatctttcctaccgagaactcccttagtatggacaaccacttgttagcgtcatgggccactgaaccttctcagagtacatcaaggaaccccacatacatcctcctgagagacaagggctgtatcggtcttgacgctagcgatgtggggtgtaatgcatatacagctaactagttgcagaaatggttgaatctgcctatccaagcctatcatatcgacaacaagtagcgtatcgtaaattcataacagttgacatagaagatagaggtaaccatcggcccatgtccttttaatatcatgcttttaatatcagctgtcaatcaaagagacagtatatggaccgacttacgcaaacactgcaaccttgcagggaagccgcgaaggcgcttgactcaccgctacaagtaatcgttcagcgctcccgccctcttgcatattgtacccgcccatacagtgccatagtttgagtagacgttctcacaaataatatagtgcagcccttaggcctgggaccgaggtccagctagccgcggattgtgattagttacggttagcgaaggcctggcttggactgaatacacctgtcataccacgcatctgggccaggtgatctggctcaccctctgtagcaaaacctcatgataattatcaacaatcagaatgagcaaattatatggttcgatcgtcgttctacccatttatacgctcaaccggtcgcaaaattattgtgtggggctcgtggatcttgttaatatcttacctcttatgccccatcttcctactggcgccagacgccgcgccagctgcggaacgacagcgctggggtcggtctaaaccgctcatcgttcccagactcgcagttccaggatttcgagtttccagccatttgctgctcctcagttgcgctccccctcaggttctccaggccacagcaggacaaacgcggtgccgccaagccgaagccctatatataatagatcacctcggtcagaggaccacaggcaaacccagcgatgaggccatgctcactttccgacggggtcattggctcacttgtaaggctgtgcacatttggacagaattgtagttcagttttgggtcacgcaaccgcgcgccggcgacaaatatggtagatgaggtggcggtgcagaaacagacctgagggggaaatattaaacaggaaatgaaatcaataaaacccaaaaaaggagagaaaagcaaaaaaagagaaaacaaaaatgaaatacaaaattttgaaattattaggaggtttaagatacaaaagaatacgaaaataaggataaatgttatatacaaaaaggcgaaatgaaggaaactccctctagtttgatgttagacaatactgggatttgaatcagcaggattggtgctccaagtagcgaactcttccagccaaagtccggggccccgcgtatcctcgcgaataagcactgacgcactactgtggtcgacccggtgattcttttagtacactgtagtctaccataagcacctataagcacgcgggggttggaaacaggaataatccctggccatcgaccaaggtaatgacctattgggtataataagaaactagggagagcccgggctatacatctagagttgctcgtacacgggtggaaccggagaggaccttgaggggactcgaaatatctcgatttatttctcgatttatttctcttttgcttcgttgcaaacaattataggccagaggaagaactgcaggccaattggatgctgtgtagtctgtttattgtcatcccatgagagaaacggagcgagtctcatagttgaccgagcaggacgatcaggagatcagcgatgatcacctgcgatcatccttgcttgtgctcttgggtcgcctatccagagccagacaatgtggaaaagaccgagccaagcagggggccacagtgatcgacgcgggttagtccgggacagtgactccgcccacccacgccggtcattgttgtgctacgggtggtattcaaatgagaacccctgtcaaggattaaaacagaactggcgcagtgagcagagcagacagacatgtgaaggggcatagtactgtgctcataaca

SEQ ID NO: 838 - DNA, 2511 bp, Emericella nidulans
cctgctctcccctcgagctctctcggagcgccaatagcaagttatattcattatacatcccacatggaaatgcggggccatcgagttcgccttttgcaacagcgtccttgaccttatcccagacaacgatcttcccatggtcgacatcaacatctccatgagaatgctggggaagtgcaaactccgacggcgcaaacctctgacatcctgctgctattgccgcggataggaggttcagttggtagatcactatttcgggaccgggaataaggagcgtgctcacgacggtgtgtatgtcggatagagacgctgttagagagtcgacgaaggtgtagtctacgtagcggatctctgttttaatttcactatttttctccgtattaaaagaggtagtatagatagaggttgtgtttggcggaattgctgctgttgctcgggagaggatgatcggattgtattttgggctgtcgtgaagcgctaatacgagagaggagccgattgtgcctgtgccaccggggattgctattttttgggacattgttattaacaattaggaggattgagagggtgaggtcgacaggtgttcggtgaagcctgtagagaagaagtaagaaaggtactggttttttttataggtaggcttgagtgactgcattacgtcagtagtctcgtgctgagagttcgatacgaaggatatgagtcattttacttcgtatctgtttcagttaagttttatttgattcgctgagcacagcggggtaccaggcagcattaggcgactgtagacgctgagtattgtagagggcgaagttatctgatagtttctgaagccagcaaaggccagtgtaattatttaaaacagcgacaagcgtacttgcaccaatattgtcatacatatggaaggcccgctttacttttaattctttaatctgtcaaagaccagatctttccaccagtatgttggctgttggacgagaaatcgcaaacaaattagaacagtattcggagaggagtcttgcgtttttaagtccttttggacccatgctcaagctaatcctacttggcctcgcaggtatatccctgatccttttctgagcccttactattgcctgccgtcatctcttgatgcaggaactcctcggcagagctattggttaggggcggaggaacgttagcttaggtgaaaaggaactccagcatggtcaaaaggagctatcctgcaaatgatgcccgatgtgagaaggggatgttttagtcttcagtcacttgaactatgtcttcttgtgttgttgatagtgtaacctgtccttgatcattacttcaagctccaattcaaacagagtttgaaaataatggtttggcttttaagtgtgaacgttacccattgctccagaatgaggttgagttggctgactacatggtttgcaagactattgagaatcctcatctcttaaactccccacagaccagtacaactgaacaagtcttgcatatccttggaatgtgctgttatgctgctaagcaggtgtacagcaaatcttaaatttaagggtattaagttattcttttgtagtctggcaagcctaacttcagcacaaaaccagtcactttcaaccagtagatgcagttaagcttccttgcagaaatactaaaggtaatgttccagcttgacctgccgtttgaataggagttatgacaacaagaaagcagtaaaagaagatccccttatgctaactagactttacttactttctgccattgtcagcaagctaggttatttggtggcgtattcttatgcaaatgtacactagaaatcaggagatggcttaaaggcgaatgaactctcacgaggtatcagatagaaataaaggagaaaaatagagcatcttacagtagcctgcagtaagcaacatattggtgtcctatacagactatctggagtctcgacgttaactacacctcaccttcgagtgacagacaacctaggaatgtgggcggacacatgtcagtaatcaaataacccttttaaactgggaggtacttcattactcacctacctaacagtttagatggcgttaaagtcgcgacagaacatatgccatgttgacatgccaatgccgcagggtctacttatttcccacatggaatttgtcttgtccattagtatagagctggattattgtgacaatgtgggtgttcttttgagcacgtactagtaataccaggatactgattaagctgctcgtcaatcccgtgttcaatggcacatatatcactaaatttaagaaccccattcgatcctaacttaccgaagcggacaaattgctcatcgtcgtcgatacggtcactgcccaaaaaggtttgtagaatctgaaaggcgagttcgtaggcacatgttctagcgccaaaggcctggatcaagttccctagccagcgtcctgccgcgtatagatggtacgcaagaatattacagatcaaggtctcttgcatatatctgaagcatgagaagtc

SEQ ID NO: 839 - DNA, 3372 bp, Emericella nidulans
tgtttcttttacttggttcaaagcaatggacagcactcattcaatccagcattgtggcgcatttcaactgtacgattgcatctgccaaactcatgataaatacattctgctctagagcaaagtcacggtccactctgatagaggtattgacagcgaaatatatgcaatcacatgaatataggcaacaggcattcctccaagcccctagattcgcccgattgacaattggctacggcgctgcgcaaggctgaaaggatgattcattcactccaaccaaccattcgtgagctgaccagctccctcgccctcaacacagtttaacacactcagccccatctgtattctatttcttcttccactcttctctaatatatccagagtttcctgcttcatcagacgcactgacacacttattagtctttgtttccttcctttgctgcccttcctttcgcattgctccatctctacgtcccccagatacctagtactatacctggctctacatctaccagaactggtcgcaaaatgagtacctcagagctccgagagctccttttcttcaaggatgccgataccttggctttcatcgaccccccgtcctacaagccagcttggtctctacatcccagctgcgcccagtcgatcggccacagaatccacagctggaagctcctaggatcggcatctccatttttgcaagcgcagttcgagcagcgcacgcaggagcgaaacatcaagcgccgaggaggtttaccagacggcatcaagtacatcattgacctcaccccgccctcggtagaagacgaggccctactcactatatccgagctaagctgcccactcggtataaggacctgggcctattcacagtcgcgatggattctaccggaggatctagtaggcggttctgagactcagggtgacatcaaagatcagtccggccgtcttgctgagtactctcctgagaggcaccgcgcgggtattgtccaggtcctaagagtattggagggcctcgagccgaagctcgacacgccatgcaaactgtggacgttctttgccgtagcaaagttgtacgggcttgcatccatgcctgaaattagcgtccgtgttagggaatgggtctacgaggggaataacaggcgcctcattgaaatttatccggagatcacttatcgattggggaagggtatccagtgcgcccacatgatgcgagactcttattgcgtcctagtcggggaggaggctctgcggcttctgcgcgattgtagcactccggctccccgaaagcgaaagactacagtccatggaagaccgctgggttcgttggatgatgacgacgagcaacgggtgcaatacgccggcgagtcgctcctaggctatgtgatagagcaattcgtcgagctagccgggaccgaaatgcgctggctgcaccggtcagagatgtttcagaatgttcttgcctacagcccaaggacacagtacgcattggagacgaaggagaatctcatatcttgcttgaaagactttgtgcggacttctatcatcgtggcgctttctcagagagcgaagaccagacttctccagaacgcttcccagagaccaatgagctacccagcgacagattttctggacgtctttaacagcctgagcttgacggagcgtttgatgtccaggaccttttggacacttctcagtgacacacgactttccgagcgtgatggcagtgctgatgttgcagtgccttggggcgcttcccttgctagtctcggcggcgaatttggggcttttcgtggccagcacgacgcaattatcaggcgtatcactaagcaggagttgtatagcagggtcgccgcattcaaccgcctttccttaaacactaaccttggatctcagcctgaacgacaccaacacaggtactctcgaaacgaatacaatgagctgacctatgggccagacggacacttctctgtacctctcttccttcaacaggcctattatcacaggcgtgcatttatcaaaaggatatttctgcaggcccgagatgaaatgaattacgttatcgcggacaccatcactagtctcaccgagcagcagtatcagtttctccctctatgggctgacggatgtgatgacggcactggcggcgtttacgccaaccaagtaccgcttgctgaggtagatgggttttctgccccgggaccttctatccacactggcagtctgcgccgtcagtacgccgtcacgtacgccgtccgtcgcttcgttcctcgagagcacagtccacggcgcatctcaccaagccacagaaggaatttgtagtgaagttctgtcagtcagttcagagctctctttgggaactgacggggcgagtatagccggttctccggatattcaggctgttgatcatgagctgtcatttacgttggagacgtcggcggacgacgttgacgacgatccttttgataccgacaccagcgacaacacagttgttcttgaccatggcgatcttagcgagcttagtgaattcgaagagctggatatgcaggacggcccagcgccaaaccttcctattaggcagaagaaagcttgagtgaagaattgctgggcttgacttggcttctcatgaggatgattaataatgagcaggatgataaaatgccaataacgaagtttatgatctacatctgtttggaaacaacgtactacgtgttagaactagatgcctcatgcaacttggggaaatgtttgatagcacgtgacagactgggacttggcgtcaccaacgtcatggcgtcgagttcaacctcgagagctggtcatgtcagacttcttcttgaaaatcccagaaaattcggcggttggctcttggtattttggctcttgtattaccaatagtcgcattaaagcgtaaaattcactcatcatggcttcatcatcgaagccttcgagcttcctgctctagtatgtcacctcagtgcaccctcccatcgtcgcgccatttccacctacatacagagacaacttcagctaagaactactccagctcctgcatcgcccaccgcaccaccatcctcgccgaacattctgttcctggttcctcctcaactgccgcatcctcgctagcctccatcatcctcccaaagatcagccatgagcagtctcaaaagctcacatacacccacgaacgcctcttcgtgcactacatatccgactcccctccggtcccgccgacaccacaacctctgaaccgtcctcctacgcacccctaagctacatcgttgttgcaacggccgaacaaggccgacgcatcccttttgcctacctcctcgaaatgaagcgccgatttctgagtacttatccgccctccaacac

SEQ ID NO: 840 - DNA, 3483 bp, Emericella nidulans
tacaataaagccctcaacgggcgaaagatgcacgcgccagtctgaggggaattcgggcgagagcaacgagaaaatgatgcagtggtttgatgccatccaggatgatgtttccaaggctttccctgaactgaacctgttccaagaaggcggccctctacgtgaaacattggtggatgtgttgaaggcgtatgcgatgtatcggagtgatgttgggtatttgactggccttcatgtcagtttcccaccgtttgcaaacagatatacttcaaagctaactaatcgcagaccattgccgcacttcttgtgctccaattcccaacaccctcttccgctttttgcgccatggccaatgcccttaaccgtcccctacccgttgcatttatgaccatggaccatggagccatcggtcgaactttctcgctagcgtctgccacacttcgctacaagttccctcgtctggccactcatctatatgaaactctgcgactatccgacgaagagattttcgaaagcatgttccggtcactgcttaccaacggcctcgacttggagcgcctcagccgtgtctgggattgttgggtctttgaaggtgatcgcatatttattcgcgctgccgttgcaatccttggctgcctacagacgcagctgtttggttttactgagccagatgaccaaagtcgtttggcagtgaaaaacattcttgcgtggggaccacacgatatcggaaccaaacccaaggaacgtcgaagcgcacccgcagctcctatagctggctttgcgggaggtctcatcggagccgctgccggccattactggattctgacatctgcaggtgatgaagatggattcataagtgaaatgcgcgaggcgggcaaggttcaaccacgggcctagcactatatacacttgttcaagcagcagtcgtttccataaatagcatagtatgaagcattcttattcaagtaccacaagcagctgagctcgtggggtcgttcccaggctcattatcaaggacccaactgtgcaataacatcgtgattatcaactagttctttacagtcacaagcgctgtgtaaatcgatagtcattttacagtggctatggataaaacctcgcctttcccgtgcatgtcacttatatccgtcttcaaccccagcagatgtcaggtttggagtagttgggggcatagatgcagagagtaagtggattaagctctgttcacttgtactcgtactcgtatacagtaggcttggcatttgcttatttattgcagtattgattactcagtcgcactgtgacatgacatcactattatcgataagcagtatcacatgaccttgatcgcctcgccggccgaggcaaactaaacgtgactagaagggcctgtttgaaaagtttcagtgtaaacatcgtgaagctgatccacccgcagagacagagcaatcgcaaaatgacgggtctacccagcatcagcccaccgggaatcattccccaattgtacatatttgcgtgcgaccttgggcagagctgcttccgggggacccgaaaagaaggctgtgcagtggaccctttctttttctgcttcgatccttgttagtccatcgtattcgtcctctacttcttcgcctcctaaaaccttccccttcccgattggcattatcatttttaacgtcatatccttattattcttacctgccggctgtcctaccttggtttgtcccggtcctgggatgtcttctccatccccgctactatgtgtccctcacctcgtacggatgctgatgctaatgccattgcctcccccaatggccgccagagtgcctatgctggcggggagctaagcccctctgacagcgaggatgcgggcttaggtggttcgcattactcctctggcggcattggtgcagctggggctgggattgccgaccttgacgatgctgacgacgctgacgaagctgacgatgtgatcggagtcagcatgggatatgatcagactcggctcaagtctcgtacaacgcctgcggaggagaagacgcgcatcatagagcgcaatggtggatatagcggggatgaagggctctttgcggcggacataacagaggaaccggaatcgctggcggatgatggtgatcaggataaggatgaaaattggagggctccggctgggaaaaatgggacagcagaaactccagttgcaaaggcacaaaacttgcgcactggctttacacggtctatcttaaaaggtacgctgccgctgcggcctcgcgcgtggtccggcgatagtcatactggtagtcggagcgggttgaagaaattcttcccgtcgttgcacctccgagcgagcagtttgtcggtttctcggtatcgttcgcggagctggtcatcgcggcttaatcttgatcaggagaagggtggtgatgtgtctgcggctcctcagtcacctcagtcaccccaacctcccaacccaagttcgacagcctcgaatgggacgctggttactggcacagcgcctgtggaggacccgatcggcgacttgagccccctgcaggctccgtccgcgcgaactcgcggcaaacattcctttgtcggctcgaacccgacgttgcggcggtcgtcttcggaccaatcgttatacctgcgggcttcgtccaccgcgtcctcactcgagcatcgtcctcagtacgagcatatccattcgcagactaacagccgctttaaagccatcaaggacaccttacaggactctagcagccggcttttgagcatgccgacgcttcacttgcaggatttgcgcagcgattggggtacaagcagtttctttctgatgcgcaccaccgcaggacggagacaaatcagacggatgacgcactgatctcgacaacctcgccgcccgaagctaatgtgcattcaccctccgctatcccgcgagcgaagtcgactcgcaagagcgcggctgcgacataccctgtcctttttgaggccatgagcgaattgaccggagatgtcgtggtcatgggtggctacaggggctcgattctacgatctgctaagccaccacatcggcagctctgggtgcccatgaaagtcgggttgaatctccgcaaggtagacctagaggtcggtctgaatcctgaggacgaagaacgcatggaagaaaccgtcattccggatggtgttctctcgcacgttggccctgtcgacatttgccgacggctcctcaagcggctgcagaaatgcgagaatgctgtccgcggcgaactgcgcgtccacaactacggctatgactggcgtcttagcccgcatcttctctcccgccgcctcatcaaataccttgagggccttccctgcaactccccggatatacccccgcacaagcgaggcgcgtacgtccccgcccatagtctcggtggcctcatcacccggcaagcagataaatcaacgccctgagctcttcgcgggtgttctatcgcgaggtgtcccaca

SEQ ID NO: 841 - DNA, 2353 bp, Emericella nidulans
taaggtctgctgccttcttgttgtagccgtcaaaaacaggccgctcaagaagcacacccagcccaggtgccttgggaatagccatcttaaattcaccatacgagtcattgatacgggccggatcgcaaccgcaccgaacaaccattgtagccatagcgaccatcttacggatctgatgcatcatgaaactctgaccgtgcactttcaggctaagccactcggtgccgtcgatgatgataggttcggggttgagcttgaaggacttgatatgccgcttagcggagggatcacgatactgtttctgaattgtgtagttgtagaagttcttcgtaccgacgtacttgtcgagggcttgttggatacgagcgagacgggtggcagggatgcggtactcccgccttgcttttaagtaggccgccttaacggttttgacggcttcgtagatttgtctccgaaaggcgatttctgcctcgtctaaaggctccggttccgccgatgtctcttcagatgaggcttcggcaacgggtgcggttttggctccccgctcggtgctcgtctgcttggtttctggtacgccatcggtgtcgtcgtccatatgcagcgctttctcgactggcttgcggatatcttcgggaaagctttcaaggagcggcttaataactctctcatcaatatcctcccagtagttggcaacctcttcttgacgcgctttgtaagcctccaagtctccctccttctcagcaatttcgacgagcttcttccctagatatgtattgggatgcgggggaaggaagcaatgtgacgggataaggtactcgtaaatacgtgaatcacacatctggtaactgctaaacgacttgttggcgactaaaataccccagacacggatctgaggactgagatggtcgttgatcttctggacaatgtccggatcctcgacaatcagtttcaacgagacgatatttccagccgcatggacacctttatccgtgcgcgcacaacggaccagggatgacttcttcggatcggccgcgttggccttggagattgcgccggccgcgacaaacgcagtgaacagttctccctcgattgtcttttcagttgtgctcctacagtcattagtatccaaacgctcatcaagaaagcaggatatcgcacagttgcattcccttgtagccagttccagagtacccgattaacacagcaaccttcttcttcggacgccgttgctcgttctcaatatcttccttagagaactgtgtagcatatatcggtgcaactacctcctcgccattttccagcttccttcgctttgcttgttcggctcgctcgttgcgctctctcttatctggcatttgccgactagcctcgttagcgtaattcgaccttgctttcgtgaaggctggtatcctttaaaaacgccgacatacctacctccattcggccctgcccatatcgcgtttcttatgcttgcgaccagcatcttggggtccctcagttcttgtgccgttattgtccatggttcgttgcgtttcacctgccaccatcgtagacgggctccgcggcagtcggtagaaaggagaagacggttcggaaaggttgagcgaaggacttgtgaaggtattcgtgtacacaggtgattaggagtcgaccactgccgtagaaggaggtgggagcgcatggagaacgaattatctggaatgatggtcggccttctttttcttgccgggggttttttcgcatttcggtcgctagtcctgtttgggactagcttctatcgcctcaggctggaagtgagcctcattctcgaacttgcgaagacatcattcatccaatttctcgttctttatccatcttgcaacctgccatctcactgtgaacggatggcagcttctcccagttcataatcccatttcttacttctttacggtctttacctacggtagtcgaaagacggagatatacaaagagagaaagtcaggtgtagtacctcattagcaacctcttcgcgcagtggaacgctctaattttctcactttcactttactgtctcttgtcggaagtgctattttatgaacagcaatggaccttgcagataccctagttcggacggtagcgcggaccttctacaagactcgagacattctcatagttcgtgcgctcttcatttatacggtgtatgtgtagctaggcaaagggagtgacatgattccaagaggcttagcgagctagctatcttacggaagcagatccatgctgaagatacttacattctatcagggaaccccgagaaagagctagcagctctttgcgcctagttactcgaagtaaggccgatactgacactatgaat

SEQ ID NO: 842 - DNA, 6324 bp, Emericella nidulans
  unsure (1)..(6324): unsure at all n locations
gaaaagaaagagatgtgtagaagagatagaaaagagaagagatagaaagtaagaatgtagaacaagaagtacgagattaaggatgaggaggatagagggaaaaagtgggggtggatgatctacggaggtagggtcccaagtaggtggggggggtattcgctcccgaggaggacgtgtgaaattgcaggaagaaaaattggggaaggagcaagtcgaaggtaaaaatggattaaaaagctgacctacaggatgggaaagtctctccccctttccacacctcttaacgtctccactgctgaagaagacttccccatatcggggtgtggatacatatctcccggggactgtccccaaagagttctcggaaaagcgggtaatgcacgcaggtttggaatgctctgtagccaatgcggtatgttgtgcaaagtcaccaccccaagcgggaactttgaggctataggtatgcggggtgccgtcaagatctggaattgtgacagtgttccgtttctcttcggtgatttctttcgcgatcctcgcatttgtattggcactggcgcggtcaatctgggcatccagacatgcaagtaacgcgcgcgggaaaaggggcttcccagaatcataaagggccttgatatgggctatttttgcttgtatcttggcgagtgttgcgtcgtctgtatcgatttcgacgtcgatgtcgatatcaacgtcgatgtcaatgtcggtttcagagaggtcgtggtcatggtcgactgaggaggagaacgagaggtctgtagagggagaaatagatggattaggagaaggggaatcagagtccattgatgcagtcacggtcacgctcatgtctttgtgtttcttgtggctgtgtgggaaatcagggccttagtctgggtctgctggtggagagggtaggattttttcgaggacgagacaatccattcgaactgaaatgttggctactgataaatcagatcgtctgaggatcgtgcacagtttataagcaaagagagtctgaccagtaggtgaatgtgatctatcggcaggtatacatcaacgcaacggcctgacaccgactcccaccgcgtggacaaataaacaatcaccaaaactatgtactctacgttgactaaataattaagcaaacctttgagttttgctggcccgtttcgctgaaattgcttttttttttatttggatagtctctattgtttgtctctgatttaaaccagggctgtctggcctcaccgcttgacgcagctagacaccagaatcagttacagctcagagctcagcgtctccaaatccaaggcgagaggagcgcaacaatatacgacccaatgcgctgggattgtaccgactaagtcattggccgctcatcatataactagccaacttaagggatgggaaatgggaataggccgtgcgctcagtccgccctgttgcgccctgacagttgggttttccaacgtacataggcgttgggatggtctggagccaacgcaggagccttggttggcctatcctggtcttatgcgatgtaggcaattatttgactcgcatatcgcggagacgggattagagcaataattccattgtgtatgctgcatcgcctcgttttgttgggccgggatgcaccatctaggttgactagtctctttagtgccagtctaacacacgtgcaatccttgggcattggaggatatcccagggtgcttaaggcgcagattgaatggtttgaactttatgctcggtccctgtcaatgtctccatattccctctggagaaattcagatcgtggaggcgtggaggcgtggcatggttggtggttcatatgaccccagtcaagtacagcgtagaccactaaggtcggagaaggcaacttggaatcctgcggctgactcgtaggaaatagatcgccttgaggtggatatccacgcctgccataattagaatagtccactgcgccgcatctactcagagtatgagattgagaaaatcgctgctgcttttctttcagaccgccacaacggatcacctaggttcgcatggcaaaatcacattgaccgttaatttcgtccatctcaaaaaggaagtctttggagctgtatcgaggggcgtgatctcggctcattgctcaagtccacagtcaggcttgccattgcaattgctagacgtcatcagttaaggcgtttgggtagctagaaaccaacagaaaagcctcaatggcccgtcgcggttgtccacctgccgccactatgtatagccatgcatcctgacgattatccagttggacctgggtcggtcaaatcagcagatgcctggggtcgtcctgtaacaagtggtccgtgccatgaaagactggttagcgagaccagacaatgccctagattcgctagattgacaccagctcctagacggctacgggttcggtcagtgaagggatgaatcaattctccgacgcaatgccgcaatgtcagctggcccggcgcgacagcaccctccgacaatgatgccctcccagtccccttctgactgcccttgtaccacatcccaaaggctctcatcccacgggcatcgcacaaccgtttcccgcgccacccatgtcttggtgacagggtcgtacttctcgcccttcgtgccatccggatacaacaccagccatggtttacccgacgctgcgtcccactcatccacgaagccatcttccttgcccctgctcagcaagcaatgcaactcgtcgcgcatgatcgcaacaatttttgcgacgttttcaatccgcgtacagttcagcccaatgccccatggtcgcggcagccccgggcgctgtccaaccgccgcatccacccactgtctaacctgggttctgtccacttcctccgcgggaaagacaccacatatccaccagggttttcgccttctgtgtatttcaggtcctacgcaaacgtccttcatcgctccacgtacagcacaaacctcgtccgccctgatgagtgtttcaaatgcgacaaagtcgacctggtcccacgattcacgatcgtcaacaaacacattcagccgtcccgcatgccattgtctcaacgcatcctccccatccatctcaggcggataagcccccgtgtactccgccgcaactggggacatcgttgcaccataggggcctaatgacagcgcaacgcgacactgctgtggacgttgcctcgcagaggagggaatggcgcctcggacgagcggaatggcagatcgcatgtagtctcccgcatcattaatcgtgtggcttgcgtctgtccttgcgaaaccttcaatgctggactggtaggttgctgtcagcaggatgtctgctccagcgtcgtagaaggcgcggtgggcggattggagggtggatggggaggagatcaggaggtgcgacgaccagagaggggtctcggaggtgaaggtgatattgaaagggtaagactcgagtgttgtccccaggccaccatcaaggaggaggatcttcatcttggttgttcacctgcttcaacgattggcataaggcggggttgtgtttgttgagctagagattacaagtagaaactgtagcttatcgataaggatcgtttacttggtaacggtaagttacggcctcagcctgctcactcgaccaacctctctttcttgccagcggagctggagacctcagctatggaatgctcaaaaatgattccctatacaaccgttatgtgaacctggagtatcgagtaatctaccccaattgctgaactcacgatcatgcatactgaaaatccgcgagttgcaggttgccctctgaatcatgccttgaaccctcaccactgcgcagagctttgaactaaggatattctattcgcgaaatcccagcattcttggggttgaatcatcccgatctctataccagaagtttctagtctcgacgcaataataagttaggatcgatcctcccnccaagtatacttccggcgcgttcgaaagaaagacctctcagccagtcatggaagtaatcctataatttgctgagccaacagggcgcttcatcaggtattcaatcaagtgaaaaacctagtacaaggatcagctagaaattgggtctcgctttcccttcatccctacaccttccgcagtacatggctttgacgccctggaagacggtggcttcaccacagccatggggcatctggacagatcataagcgttccgacataaacacggacaaggcgcatcggattgcaattgtttgctggtagctcagctgcttcatacttgaaacgagctgactaagcaatatgcttctaagcgccgaactgacttgacgcatatgagacatgtcatggcaaagaactctgtgcacttagatcggctttcagtcaacgttagcatgggagattccaggttagcaattcctagctgaaatacgtggcgggcgctgatgcggctgtgaggttgcagcttcttggcttccataggcccctgtcattttgaagcaatggaatccaagaagattgctgttatgttggcacccgccaaagaccagccatatacgagagcctcgcgatattgtaggccgggtcaagcatttgaggcctcgaggccatttgataaagtacccataaggcaacgttgtcacccaaatcgccattgaacggtactgactatctatttacctcttggcaggccaccctcgttaacacttggctgaatggacaaatcctgcgctgttcagttcagacaagtcggggctcatatgcggcaccaactttgcacatatacgctcggtgactcgaccgaagcctcaaaaaactctcggctattcgtctacattgactagaatataccttctttcttaagatgagtccagaggggcccgttcttgttcttaaacatttaaaagcactgtgtcttgacacatctggtacggctagaccaccgcatgacgccaccagatactagcaggcccctccacgaaaagagcagcgctaacacagttcattccgcaccagttacagacgatgaggaccaacaacttctaacggcccgatcatggccccacctcaagttcgaaagtagaggcttaggcgcaatatgcatcaatagttttcccagccgaccaacaacacccagtcgtagctctcgcaattggctttttacaattgacctcgagaatgatgccaactagtagctgccacgatctggcggcgaaactgccaagtcatcccaatcagtgtaacgattaaagaacgacggttatcacaaaaaggaacctgtcagttgaatacggctctgacagctgattggaatatactgaatatatcgtgataacaaaaatcggtgccaatgacgaagccgcaccgcatctgatccagaagacgtcagttctggttgggtgaaaccagttcggcacacatggaatcatggaggctccacagtcagtggtgtccctacagtgcgggtggaatggtaagcttatgctatactactcctagactcacaatctgagtctgttctgcgcaccctcgatcaacggcatattccgcaaccaagatcacagatattgtctcccgggcttaccgaaagcaatcggataattcccacaccgactctgtgacacagattgactccaaatatcacaaagagtcactgctagagtcaatatacgaacaggcttttcagtacagtttccttcctccgtgcaaagccaaaatctgtctatccgatccattcgacataacagaaacaaaccgcgcatggttctttgtctttgacacctcatcaaggaacccttatttattatcgtatgcttcgagacaatgtggttgcattagcatatcttgacagtattttattttcatcttttgatcacacacgtccacttaaagaacgatccttcaccctgctaacattatatagctatctctatttttacttaaattcttccctccttatccacttccacactttgctcattctctcttcgctatgtcttcctcactctaactcatccttacctctttttctctcctcatctccacctccttctctccgcccactcctactatccttccttctccctcctgcctactacttcctcctatttaactttctcttcatctttctgcgtaacactactttacacccttactatatacataataaaatactcactacctctctcatatcttcacatacacccacatattttcttctcctctccttccttactcttctctatcttctcttcattataacatctattacattctattctcctctctctcctaccttttcctcagttaccgtctgttattcatc

SEQ ID NO: 843 - DNA, 2299 bp, Emericella nidulans
atcatccaatggataagttctgactgggcaatgcttgcctctctggagcatcttctgtccgcatgatctactattcatcatcattggtgtcgtggaaaaataacacccgtacaacatggaggggcaggtatttaatctggttgtaccccaacttagatctcccaacctttactctcttcacctctcctcgctctcgttcttcggtctgcgtgttttcaactcctccaaccgcggactctcctgattgaaacatggctaccgcgaccgttctcgagaagcccaacattggggttttcaccaaccccaaacatgacctgtgggtggccgagtccaagccgaccctcgaagaggtgaagagtggtgaaagcctcaagcctggagaagtgaccatcgaagtgcgcagtaccggaatctgcgggtaagttgctaggtcgccaacctctgtcgctttggccttgtcccggctgacaactggctccgccaatacagatccgacgtgcacttttggcatgcaggatgcattggtcccatgatcgtcacgggggaccatattctaggtcacgagtcggctggagacgttatcgcggtcgcgccggatgttacttcactcaaagttggagatcgagttgcgatcgaacccaacgttatttgcaatgcatgcgagccatgcctgactggtcgctacaacggctgtgagaaagtcgccttcctgtcgacaccaccagtggatggcctgctgcgacgttacgtcaatcaccccgcagtttggtgccacaagattggcgatatgagctatgaggatggtgctttgttggaacctctcagtgtgtcactagctgccgtcgagcgcagcggtctccgtctaggcgacccttgtctgatcactggcgccggtcctatcggtctcatcaccctgctcagcgcgcgcgctgcgggtgcaactccactggtcatcactgatatcgatgaaggtcgcttgaagttcgctaaagaactcgtgcctgaggtccgcacctacaaggtggagatcggtttctccgccgaagagactgcagagggtatcatcaatgcgttcaacgacggtcagggagccggccccgatgctttgaggccccgtatcgcccttgagtgcactggagttgaaagcagtgttgcatctgccatctggagcgtcaaattcggcggcaaggtgttcgtgattggagtcggcaagaatgagatgaagattccatttatgcgcctgagcactcaggagattgatctccagtaccaataccggtactgcaacacctggccccgagccatccgtctcgtaaagaatggtgtgatcaaccttcagaagctagttacccaccgctacgcactggaagacgcgctcaaggcttttgagacggcggcaaaccccaagacaggagccattaaggtccagattatgagttcgactgctgacgtcgaagctgcctccgctggtcagaaaaattaacgttgatggagaaatatcgggggtttcagatctggcgcgtcgccattgccatgattgtctttacttttgtttgacggacggcgtatgatgttggctaactggtttgtttgtgcattgcgataatgaacattgttgatgttttatgaccatttccctagagatgcatgcaggctgtgagaatatagagatgcaggtagaaattcattctaatatctgttttctttctctgctcgatcatatgtatgtggaaggagcggtcaagaatgaccgggatgagcgacctcccaaggttcttctcccgaggtcacctcctcgttcctcctttcctgcaactcatctgtcacttagttcgccatcatttcgacatccggagaatataactgaagctatgcgatgagcaatcagccacaccatatataagccgtcgtcttgtcgcaaatatactagagccaggcagactcgcgatgtgtccaatgtttgcttcgtctgaccagccgcccgcttcactacataaccggtatgacatgtatctatttgtctatccgttattggaaggtgctaacctttggagagtatgttgccgcagtccagtcaatatcaccactaaatatgccaaaataagctctttttgaagccgtttttcgggttcttcagacttctgagtgcttggccctgccatgaggtgtccgagagaactttcaggccccagaggcctagcatcctgagcaaagacatccagctcggccggactgtatccataacgtggtggcatgttacagcactaaagctggagatctgcatactatcatcggcttt

SEQ ID NO: 844 - DNA, 2458 bp, Emericella nidulans
gccaaaagctcaagggtccatcgatcttcatttaccaaccaatatctgtatatcacacatcatttcttctagatatatccatatagaacgcttatatcctatgaagtatcctatgagagcaagagatacaggtttcaaaacttacacaagatttctccatgtcaccgacagccatgtggtgttgacgaaaagccctatatcggggttaagatatcccggtggaaaaccgaggcgatggcgtttatgaacccgagcatgtttcttcaggtgtctatgcttgcttttattattagtattattttttttattattattttctattttttctattttttggcggaacggagattgaattccggtcgtctccactggcgctccagagaccaaaattagggccggaccggatcagccaccattgcagtagcctgtaagcctggaggccggaggcctgggctatttccgaaacggatcagaagctccgaatcggtttcaatagtctagactttctagctgatcgacgggtgtgtggtagatccaaggtcgtgtctgaaggctcgtgctattgccgagtcctcactgttgcaggatgtctgccagtatacactcaacgcaagatacgtattgttactgatactctaatggatactaatagagatcaatatttatactatcgttagaaatgccgcgttgatacaaagtctggctaaaacacagtagataggaattatctaagactcaaactacaaccatgcaaaacaagaggtatcaaaagcacaacttcacacgcagagacaaactacaaatacgccttcacctgctcctcattccactcccaccatttcctacttgtctcggtatctgtaaagagatcgcgccgtgggcatcctatcttccctggcggcacgacccactccttctccgccacctcagccgtgatctcgggactcagtcccgcaaacagctgcgtatacgcaccgatctcgggcttgttcgcgatcagtttgaccattgtcgacatcaaccggcccatatcccgctgcagtcccgtattcgcaatgcccggatccaacgcgatgctgacaatgccagatccgtcctttctggcccggcgcgccagctcaacggcttgcatgacggtcccagccttggagcgcccgtacttggaccggtctgactcgtttctgcggtagtcgaggttgttgaagtcgatcgcgggcttgggggcccaggaggcggcgtcggatgagacccaaacgacccggactgtattcttgggcgcctccttggccgttgccgcaagagtgggatagaggagttttgtgaacaggtgcggaccgacgttgttcgtccctagctgcagctcgtagccctgtgatgttgtcgaacccgcaggcgggaacatgacgcctgcattgttccagaggacgtgcagtctggtttctttagcgaggaactcctcggcggatttcttgatcgtgctcagatcagacaggttaagcgagatgctgtcgagcctgcccctggaggctgggaagcgctgtttgaggtcggcgatcacctcggcggtctttttggcgttgcgcgcggccaggtagaccgtgccgttgttctggtagaggtatgtagacagcagcaggccatagccagaggttgcgccagtgacaatgaagacctagcattcgcgctggggttagcttggtctcgatatggactggcccgtcggttggctgccggctggaaagaggggtgtaggtacctttcctgactgatctccaatgttggcctctgtgagcgctggtggacgcgatccaaataccatggttgcaagtagtcgaacagacaatacgataacaagctcgagaactgcgacagagtcccggccagcgtgggggtgggcggcccatataagtagtgcgccgcctcgactggccccttgcgtcggccacgaccggccagccagcacaagccagcaagcggaattgcagatcctctagtccatcagggtcgctgtggcgctagcagtcaataatgtgccactgccacggcctggtcgctcccgggccagcgagcgagatactccggactccgggctgattggccatctccggagccagtcaacggcatcaccagacagagacgcattcggggccagcagggcaggaaagagacgagaatacacggctgagctataccaggcggccggttatctggtctctgacgtgtcgacagccaacgggagccggagaacattccggtctgcacagctccagctcagctccagttctagctctctatttgtcagatcggcgctaggcgcccggatttaattaatatacgatccttatctccaagcccaggttactgagcctcgatgtcatcgcgtgacgaggttgtagattaagcattgtgtaaagagcaattagggccaactaaacaaccggactcatgcactaatgct

SEQ ID NO: 845 - DNA, 1195 bp, Emericella nidulans
ctggacgggtgtaacataccgagaggaacgaaagctttgttgctttcgggaacgtccgggtcagacatggttgacagtcttaacttgaatcagaggtagaatcagcaatttaaggcgtttggtgaccaacgtgtttgatgtataagtgtggtgttgttgttgttgttgttgttgttgttgttgttgttgttgttgttgttagtagaggatagcagagagtgagtgaggggagaaaatggtgttgcggggttaatagtccacaactccgcgttgaaggcggaggcaatttgtacgaaacaacaaagcctactgcatgcactgacttagcgctggtatagaaatcgcacatatcattattcattatcaggaatatttacgtttatttgcctgccagcttctccccgcgcttcaaaggcgcatagatctccgtccaaagctcactcgcctcgcccaaatagtaggtcaagctgacgtctgccatgctcgcctcttcgccgccagagagagtctcaagctgagaaatgagattctccagaccgaatgcctttccagtagcctgcgtagcgcctgcctcaagcatgacattgacaatatggatgtggaaatgatagtaggtcggttgatctggagcatgtcagcactcgccggtaatcaaaacggacaaaaaattagattcacttacaatgcacgtaaagcttcaactgatcttcttccaggtccggatacattttcacggttccctcaagcaccctcttcctcaaatactttagccaggggacatgcttcttcttcagatctctcaagctccataaatcacgccgatgtacaagcgccagcaaatgcaacgatcccagcgtttttcgatcccagttcagatcaggcagcatcaagaacgcatcctcggctccgtgcccatcatcccgcagcataacatcctcctgctctgtgcgaccctccaggatattgaacacccagttcagccgcccttcctccctcttctcctgcatgtatggtcgtacatagtcccgatatatctccggcgttttccgtgaccatgcgcagcacctggtccgagtacttcttgatatgctgctccgtgcacggccagatgacattgagcttaaaaatcgtgcgactgatgcccatcacaatctatgcccgaggatgctaggtaccatcgatatagttcgttatc

SEQ ID NO: 846 - DNA, 4681 bp, Emericella nidulans
tctttcttagggcattatctcattgggaacagtatattcgtcagtataagactcgttccatgacacaacagtataccagcctcgaatccctctacgaacatcttcagggaatctatagtcaaatagacgagccagacggcattgagggtatctcgacccatctgcacgttctcaacattgaccaacaggtgcttgagcaccggaaggcaggaagatgggccacagcacaaagttggtatgaattgcaacttgaaagggaacccgataatctcgacgctcaatggaacctcttcacttgtttgaaggaatcaggccaacaaggtatacacactttctcctctgatctgaattttatcttattaagccttacttctttcagatgctattctcacgcgtttcgagattctccaaaacacaagttccgttcccagattccttccattcgcggtggaggcgtcatggatgacagggaaatgggagaagatgcacaactatctcgagctttgtccgcaacaggctacagcggacttcaacataggcattggcttggctctagatgcttttcgtcggggcgaaccacagcagtttagggaaatcgttgataagttgagactgagtgtcgctaggtccctcactgccaactctgtcacttcgttacaatcttgtcatgatagcatgctcaagttgcatgccttgacagagatagagtctgttgtcctagcaggaggcgcagatggaagtcaaggctcccgctcgtgtctacgtgatgctttggatcgtcggctagacgtcctgggaggatatatatccgacaagcagtatcttctcggcttgagaagagctgccatggaattggcgtacgttgtcccttctgaaggatgggctatagcattactaaataaatgaccagtggcagcttcgcagattccgatatagccgctgcctggttgacaagcgctcggatgctgagatggggcaattccggcaaccaagcgtatcagtcaatgctcaatgctgcccacttgaaggaccgctccgacaccattgaacatgctcgactgctctggaaagacggacatcaccgcaaagctatacagatcctagagggagcgatagccgcaaatgaatttgccgctcctgcattgagctccaataatccaaatcgtcaatacggttcttcaaaccatgaaaaacaacaaaatctacttgccgccagggtatttcgttcagcgggctcgttccttattctcccaaatcggctaacttcttctaggcgcatctattattagcgaaatggaccgatagagcaggacaaacgcagtcggacattatagtgcaaagatatcgcgaggcaattaagctccataacaggtaggcgaagcttgatctctagtaccatcttcctctaacgagcttcagatgggaaaaggcacattattatcttgggaagcattacaacaaaatcttggattcggagaagtcgaagccgctcggaaaagaagcacaaatctagtaagttctagaatgagggacgtgggctgttattaattattgtagcttgagtggtgaggcgtcaaaactagtcgttgacaattaccttcggtcattggcacatggaaataaatatgttttccagtcactgcccaaagtcttgaccctctggctggaacacgcctcgaccgtcgaacagcccttggatccaaaaagaggggacaacacgtatgtgttcatctatgttttccccccacagtatccaattccatcttaacagcattgaagggatttccaagcacatactctaaaccaacggaggaaaagtctagatgacatgcactcgcagttgaggaagtatgtcaacagaatgccagttgcattggtaagctgcttatcctggatatagtaatgtttctgctgaccatcagctcttcacaatcctcccccaagtcgtcgcgcgaatatgccatccaaatcccacggtttataacctgttgaccaagatcgtggcgaaggtagtgaatgcctttcctcagcaaggactgtggaccgtccttgccgtagccaagtcatcatctgcagacagagcatcgagaggactcacttgcctcgacaagatcaccgtatgctacaactaaatgtcttcaaataaggcgcaatccaggctaagatgattaacaggatatcagcaagaggttgaaaacagaatcaaccactgacatacgtggaatgataaaccaaggccagaaattctcagacgagctgttgaagttgtgtgtggctaagatcgaaaacaaaacctcccggatcaaccttgcacggaacctcaattttaatcataaagtagccccgtgccgacttgtcgttcctttccagactatgctcactccaaccttgccagctagtcatgacgccgagtacctaaagggattcagggcttttcctcgggatccaacaaccattgaaggtatgcaggcattacacacttaggagtgcacctttcctaatgagtctagccgtcctcgacgatgctcaaatcctcaactcgctccaaaaacctcgcaaaattagcattcgagggtcggacgggaggatttacaatatcctgtgcaaaccgaaagatgacctccggaaagaccaacgcctgatggagttcaataacatgattaacagatttttgaaaaaggatgtagaatccagcaaacgacgcatgtgtaagcatttcaccgcttgtgattcttcccacttctgctgatttatggtagatatcaaaacatatgctgttacgccgctgaacgaggaatgtgggcttatcgagtgggtggacaatctcaggactctgagagatctggtcacgagggcacttaaggagagaggtataacgccgaatgtaaggctcaaagcattttttttccgtttgaaaccagaaattggccccaatcaacagtatgccagagcggaaactgataatttcttagtatgatgaaatacgacattatctcaatgaggcatgctcagacccttctaaagtctcaatatttacagacaaggtcctagcgacgtaagtgtttggtatagcccctttcgatgctagcccactaattacagcacagctttcccccagtattgcacgagtggttcgtggagatgttccctgagactggtgcttggtttgccgctaggcttcgctatactcggtcatgtgctgtaatgtccatggttggatatgtcctagggtatgttgatcttattgaatcaagcttaccttgctaaccgtccactctacagcctaggagaccggcacggtgaaaacatactctttgaggaaggcactggtggcatcctgcatgtcgacttcaactgtctttttgacaaggtggattgtctcgatcttcttggactgaccgaagaccataactaatcacgtgcatttagggggggacgttcgataagccagaggtggtgccatttcgcctcacgcagaatatgattgacgcctttggtgcttacgggtataatggttagtcttcactaatgcagattaatgtccttttttatttaacattcataggtccattccgaaaaacatgtgaactcagtctcgatctcctgagacagaatgaagacgccctcatgaccatactggaaacatttttacacgacccgacgactgattttattggcaaaaaggtacgtatctcacctttgcttattaaggcatagccaatattaacaccatcaagcgacgaactcatgcaaatgtcccggatactcctgctggcgtcctcgaaaatgttcgtaacaagctccgcggccttcttcccggtgaatcggtcccactgtcagtagatggtcatgtcgatgaactgatcatccaagcgaccgatgaacggaatctcgcggcgatgtacattggttggtgtgctttcttttagattgaggaaagagcacgggctttaatgctccgggactgtgacaagcaaattagatcgtctcgaaaggtacttcatcataaatgcaaccagaactcacgctgtatttaaagtcaataaaccattatcagggctgaagcatttccagtgcattgcgggttaatcactagacacttctgtacgtctcgtaagaattatctccttgataaaccgctgtagcgcgcccttctccgaggtggcgttgtcgaaggagaccgggaagaaaacgatcgagaacggcgaggtgatcgagaccgggaacgcgagaatgaccgagaccgggagcgcgagagtgatcgggaccgggagcgtgagagtgatcgagaccaggagcgcgagagtgatcgaggtcggtataagtcatgtctctccatgcccatggcccgggaacgaccatacctccgaggaggagaagctcgctgctgatatggcgagcggcgagaggaatcgtccgcaggtcgtcccggaaggtgtctctgacgtccatactttcctcgcccttttgacatgggcggcggcgaacgagaaaacgctctcttcggtaatactattgacacattcaggactgccccatcaagctgggcttcatgcatatgcgcaattgcggcttctgcatctgcaggatcatggtagatgatataagccgtgcccctgttcgtcatgactacgcaaaactaggtcagctgcgtttaggcaaatgaggaagaaacatacaa

SEQ ID NO: 847 - DNA, 2181 bp, Emericella nidulans
ctcaagctgaggacgtcatcttacccagcacttgtcgccgattctctcggggcgagagccacggataccgacaccaatgacgtgtgtggaggaatagaagagctgcttggtcagaccgatcaattcctggtcaccaatctgctcggcgaggtagtccacggccatggtggaaacaagcttctggtagccgacggtggtgccatcgcccagagtgacggtcttgttcttagggttaaccttggtgaccttgcccttctcaccgaagcgggtcttctctttgggaagggtgttggcaacagcgatccagataccaccggtaccatcgcgggcggggaaacggaaagtagcgttaggaccccagttaccagcggtcttgttaaggataacgttggtagtcacagccttgacgttgggagcagcgacacgctcaccgagccaagcgcattgcatctaaacaaggtcgaatatcagtatttggaccaatcttgggatttcgaggctggagggccaatttaccttagtagtgggcacagcccagaccttgtagttgtaggggcgcatgaaaagatcggcaacaccggtacccatcatgcgcacaatccactcgtcgaagtccttgggcttggtgttggcgacgcggtgctcgatagcggcatcgatcataccgtcgatacacttgacttggtcctccttgggaagcatggagatgttgttctggaaagggtagggaacccactggcccttgcaacggacgtaggagatacgctggtgctcgtaccaatcatcttccttgggaagagcctcgttgatgcagtcatcgaagtacttgtagtgggagaaaataacgtggccaccgacatcgtaaagctgcaattgtgttagttgcgcagtccatcagatatcaccattgatgaatccacatacgaagccttcgggggtgacatcggtagaggcaagaccaccgggagtctcgttggagtcaacaaggagccacgagggaccgttctgaggcagaagttaggatcttctactgcgcgcaattggagttagaggtcgtacaatctggttcagacgctttgcagcacccaatccagttgggccagcgccgatgacgagaacgtcaactgagctgtagttgatagcaaactgtcagcgttgaacccctgaatggcatcgcagagagagctccttacatatcggggtgggtcatcctgccttgtaggatatcctgaaagctgggaacgcggttcaaagtcttgcgagctagactaagcatagaagagagcgaagctgcagttggcgctgcagaatttaaagagaggaaggtggaattggaagggagagaagacggtgagggaaggtgggcggaaagatacactggtaactgggcagctggaaataataatagccttttcgcggccggcggtcggcaggggagaacgtgacgaagctggctggacttcttggtggggggattgggtttcaaatttcgactcgacgcctttgcaaattttacattttaaaattgagattaaagtaatctcatcattctactatgattcgcggtcattattcgaccactccagacggttgcgtctgagccttggaaaggagactgccgaaaagggggacccaggcgctcaattgaatctggaggcaaattgtgtctcatcttcatatctggttgcgaatgcatcccttcttcttcttgactagctcccgtagactactctgcgccatctgcgcttctcccgggacttcgttggacaaagatctatcgagcaagacgagatcttcaagggatactactgtatatcaagtgacaaggggcgattcgccggatcctggttgtaattggctaatccaggcagtgatgcttatcgcaatgcgcattgtatgaatggcatgcctttaaatgaactctgaatgaactctgaagccaagcgaagactgcatgactgaggctggttcctttccagagtagactggaactggaaaagctgacctgcgatcagacaaggaatgctccaggtggctggcgaccctgaagcggatattcgagcgacctgcttagagtcaacaacgcccgttgtcgaatgcatgatatgacatgataaccatattgggatacctcaagggccaagagtcctgcttcgggttcaagcctcaaaagagccagtg

SEQ ID NO: 848 - DNA, 2326 bp, Emericella nidulans
aaggaaaatgggggttggtttttgtttaagagatgaaattggttccaatttgtaagaggttaagttgttttcggtgtttaataaaaagcacgctaaaaaaaaagaaatctccggtgccattgaaggaaatcggcgctaatcggaaggcatttagagccaaaaaacaaccttagtcggcttggttataatcgaatctgtcactgcaaagggacatatagggtccgtccctgccgaatttacccggcacggctccaacagtacttgctagtcgaagtggctcaggcgcccacgcaagcgatatggtttcgacatcccaacgcaattccacaccgcgaccctatatctctccctcccgaacactggcccgtacctgaagctcctagggggagggagagaccatctcatcgcactcctcaagaagtcgccgtctggagaggcgcctcttacacttcttcgagaccggtgggatggtgcagtcgaatcagagcggagttttgacgtggcaaagcgggcgaggggtgagtttgcgggagttttaccggggaagacaaagaagtggaaagaattctacgggatgagtttccggtgggtgctggaggaagcggtcggggcggggttggttgagattttcaatacggggagtgttgggcctggagtccggtgtttatgatcatatataccctgaatcaaatctttatatctttaatagaccaattaatgcctacaccatatggctgtggaaacctaagcgggaacatgaaactataccttgaaaggaccggcttggtctgggcttcagagatcaatttgttttcagctatagaaggttaattattgagtattagtatggtattatataaatcgtaagtagtatcaaaatgtcgatccataacgccgtccatgaaaaggcatcctcattaaacccagccctaacccaatgagcccaccaagcgagaaacaaagtcataacaagacgtcacgcaatatatgtgcatagctgagagactctatcccaattaacactcgtatatgcaggtagtcaggtagttaaccaagatcgcttacgatactacccacggtcactctcccacgagaacctgaccggcctagagggaggcggcggcggcggcggcgtcgtcgaggcactgcgctcgtattccggatgcaaaacgggaggtattccagagcaagcaccggcatcaaggctagcactccaccttgggagtcttcccgcctgaaacaccggtgctggctgtgtgattgccgacatcggcaattgcatctgcaactggttctgctgatgtcgaaacgaagaggatattgacatcgaccgtcttgatggcgctggagagaatgcccgcggcgagtacggcggcggcggcgtctcccttgtcgccgttgatgtgttcccgtagctactcgggaacgagatggcagaggagacgtccgacgagacttcttcggggcgcgggtgggtgtgataggggtagtaggggtagggagagtcggaggtggaggtggaggtggagtgggagtaagtggctgctacctcttcccaagctagacgctgcttttcttctgttgctgtgctgttctgataatactggtgatgacggtatgtttcgttggagactgaggggtcgcgcatatgtgctgctaaggtcttttcctgggcggtcatctctatccctgccggcggtgtgtatgccgggagaggggctgacgtatagccaccatattcggaaccatcttgtggtggttgagcagtgttaatgtcgcccgttgggacgttaggatagtggggtgtttctctcgcagattcgatcgatttggtaggtaggcagcagctgataaggctggaaaggcacgacatgctgctatggtttgtacgcagtattactttggtccagttcctgtggcgctcgatggcaaacccaggcacgggtcttgcttcatagattggatggaatctcggtgcctgagtggattggccgcaccgtgcacgatgagcggatgctccgcaatctagtacggagtaagagtgtttggtgatggacccggtggagggagattcagtcgattgctcggtgtttcaggtgctcaatagcaagcccatggcacgtccactgtctacctagacaggccagacagtcgtctaggagaaggaaatagaataaagaggggaacatggggagtgtcagcttttagaggcacaattgaggctgtgaacaagcagtcctggccttaggcagagcagttatggcgctcactgattggttgtggctagaaactccgcagcccttagagggcatcaaatttccctttt

SEQ ID NO: 849 - DNA, 3814 bp, Emericella nidulans
tattcacgccacaaggtgaacctataccgaatttttgcaacaggtgcagaatcagagacaggaattacaacaagaaaatgatcatggcgagacgcaagatcatgaagggaaatacattgctcaacaaagagcgaacaaacccgccgccgctcttcagactgaactaaccgaattgcaagaaaagccgtttcggcctcgaaccccacggcgggcacaaagttggagtatggaagaccaaaagcatgagttccatcggcggctgatggattttgggaaaggcgcggagcgtgggttctcggagacttgaggtatatctgaatcctcggtcgacttgaattcttggtcggatttctacgctttgtatattagctgtccttgtgcacccatcgctgacctatattacttttttattgcagctgacagaatttgactaggcttgagcattgtacacaatccggtggacacctttcatgaatgccagctaagaaaatctgcaattggacttccaggtgcccacctcattgaattgttgctactgtaaacccgcctactctgcttagagccacacagagtcagcctcatagcatctctgtcacgacgcacgccaacactggtggcgatggtttgtcactgacaaggtcggattccaataaggtcacattgtatcgccggtccagttgcaatgcggcaactcagctccaggtgtaggggcgatgtggcacctgtggcacaaggttgagctctgaccaatgttgaatctcgagtaggtctgctctgaagctgatgcaggagacttgatatgttccgcatggaccaacatgattatatccacaaattttgctgcacattcttcaacaatagccaccatttaatacttgcttggtagagtctagagtaggtattgtttgtgtaacttatccaggcctgtttcaaccaagaggataatggatacgtgccccggggcgggctcggtgctgtatacttgtcttagtatttccttcttcctgctagccagtatatcacacttaaggaaagctcagaaagttacatataatcaaacttgccatggtagatttgcagaggtatcgcactttaagagaaattgggtgcaactgtgggttgttctttgcgtagccatcgctgatattatgctcagcgaatcgggcggactttgcgaccctttatctcaaagtatgatcttccaggcaaggaagagctcgtaataatgatatccagacaatgatttttctatatctgcgacatcgggttgactggcgttcaagtcgaacgacaatttgccatcgggcggagtattcttaacttctcagaggagaggagctgaactattgcgctgactggaaagcgacagttacaatgtctatcgatcgcttgagacctttgagagcttgatagtctctaagatacgtgggttctacatatcttcagattcgtagatagagtcaagcgcgctatcctgctattttccgcaacactacgctgcaatcgaagccttcccccggcacaaccgcggaatatcggctgatttatatgatgatagttctgacgatggctttaatgtgtggcgggtaaaacattcccctacagtgtaacatggcagcttctcgccaatagttcctttgcgttcgcggggttcagtattaaaggtcacagcaaaccagccgttcgttccgtcacttgcacccacatattagagatggtaaaaagacccagattattccgcgcgtcccagggatgagtcgggttgagaagcgccaagtcgaaattgcgcaggagctacgacagtcagcgtatcatccagaaggcagcaagcccgcactaagacctgtttcagctcacctcaaatatcatcttcccaatctcaacctgggccactggttttcctaagcactggaacttcccgtgcccgaagataaggtcgttggtccgaaccatgagagccaacttggtagggtttggttcaagaagccaccgctccggccgaaaagcctttgcgtccttaccgtatatcttctcgctgcggtgcatggcatatgccgagtacccgatgcagacaccaccagggagaaatatggactggccattgacgacgactgtgtcgccgtctttgggcacatcgcgcgggaagatgttcgacacaggtggccagacccgtagcgcctcgcggataacagcttggagatatggaagctgtttagcctgcgcggcggtaatgaggccttgtccagcagacggagcaaggccccggtgcacggcatcatcgatctcccgttgcaacttgacgtaaacccggggatttgtcatgaggtgcagcagcgtgccacgaatggcgccggcagtggtgtcggagcccgcgagtatctgctctaacgcctcagtacgcagttcctcgcctgacaagccgtggcgtatgaaagaggccagcatgtcggaccgtttatcggtagcgctcgcggcgcgctcgtcgacaaagcggaagcatgtggtcatcaacctcccaaatccgttattgtccttgggcgagggtgcaaagaatttgccgatgaagggcgcttgattgatgttgctgaagcccagcgcgagggcagcattgccgattgcgagaccttcatcgctcgattggaggtattgatcgacgtcgcggtcagcttccagcataccgaatgccttgccgaggccgacgctactgatgacgtcgagcgtaaagtactggaccttctttgctagattcatcggcacagcctgctcgcaggaggagacatatttggcgcggatgaggtccaggaggttctgcagttgcttatccacagaaaattcaaggtcagtattctccctgcccgaatacttcgcaccaaagaccgagtcagcaggcgtctacgcggagtgagtgtggaaaatacccctggagccatctgcttcctcctatactcatgcttcgcgttatccgtctggctgaagacattgtctttccggtattcaatacgcgcggcattgtagtaccaatcggagcgcttgtagccaggcttgttgttgacgtgcatccaaacctccggagacgaggtgatgagcactcgaggggcgactcgggcgattgggcctggcccgattcagaactgtcagtatcgggagacacggttgccaggtccttgtaccatatttttcattagcctgggcataaaactcgtggcaactgccccgaagcatggctatactatgaggccagttggagatgcccgtccaggctggtcctctgaaacgcatcagcttcgcatacgtcatgatcacccttaaaacgtagagggctaagaggccgcagagcagcgggatagcgggttcacgtaaagtggctagtggcattttgtgaggaaggaagaggtatgtttgaactttaatcttctgcaggtagaaaggtcagctaattaaggggtgaagatatcaactctccttcatcaagctacaatgtggtagactaatcttttaggcagtcatgtgaaaaaagagagacaaaaggaggggtaagaaaactgcagttgcctgcagggatgagatataagtacggacttgcccttttaatgcacacacggagtcatgccactatatcactagagaagcttgaagccagcctgcagatcagggccaagatcctcatcataataatggaatcgatctgattggctgttttgtcctcattgtgaatttccagtaaagcagtcccgatcgtcgcctccacttgcttatactcctacagcaataaaacattatatcgactaccaggcctcttgtgcttcgtggggtt

SEQ ID NO: 850 - DNA, 5865 bp, Emericella nidulans
  unsure (1)..(5865): unsure at all n locations
gggactattgttcgaactttgccttcgctgaggtcagacgatggatgcgatcatcggacagataaggtcatttcttccagtttcggcttatatggcgggtaattgcctggtatgactagggagtgtttgttactatttcaagtttcattcccagttcggaatccatgcgtcatggccttccagatttcgtaatgccttgctgtttcagcgtactgattccagcgtcttcaagtatggtgctgctacgtgccgagtgtggcaatcgaacgtcgtgtcctgtgctgactcatgctggtccattgtcctaaagtacggccccttaggctgcgagctgctgacctgggaagacgcggaggttgacaagcgcacccatgacgagctaggggtacgagcacgatctatccagattactggcggcacaggatttggtgaaaggggtgtgcatcgcgttgcttattttctggggtggccgacgcgaccgttcctattcggtgtgtttggcttttgggttgtacctcgaacccgtgccaagacattctatatagagtaaggcttggcatgggttgattgctgcgctcgaccgacccgggtccgagccgtatatatcaatatcaaatagcagctttatatggtagcctcacgtcaatataaatatgtccgggcaaaatgtacattggttcacttgtttcggtattgctatatgtttatacgcagtcagggtgcttggccagattgttttaatggatccgcgctttgtatatcctttatatatattttgtcatcaggttctgtttagtgggagtataccatcttcccaccaactattaaatgtcaatcagcaaccgccgaagacttaaatttggacacaaagcacaaactatacaagtactcccaatgaaatctaatcacaaagatataccgacatggcgcaaagatcaaggaaaaagtgtcgagcgacgcgaatctatgtcgacagcatgttaaggtacacgccgcaaccgacctacagcaaaccaaaacaaccacgagcgggaaagaaacacaatgcatacgtagggtacattagctactaagatgaagaataggtagaacaaagcccggagccttccacgctgtcactccagaactcaacgacataaccaggaccatcagatcagccgactagccgcaccacgacgcggacgcgaacgcgcgaccaaaacagagcgaagacctcagaagggagtatggtgattaacaaagccggttacgagcattactaggagcaagggttgattttttgatcgtttgtattcatatgaccgcgtctcatgcagcacggtcgtgtttagcccatggcgccagccgggagcatgaaggctatgatacagaaaaccaaagacgaacactaactggccagtagtggacgtgtgggaaatagtaaatagaaagtacgttaaagcaaacccagagacccatgacacttgtgtaataaaagatcaagaacaccccaacgtcccagtcataccgtgaaccaacccgaaaaagcaaaccgtcgcgtcactgctgcggaaggacaactgacgcgccgaccgcgcaggatggtggaaacgaaaacaaagcaagaaagagcgcgcttaaccaccgaaaccgtagagggtgcctgagagcggacgcgttagaaggaattgacgtttcacgggcagaggaacactcacggccttgacgcttgagagcgtagacaacgtcgagagatgtgacggtcttgcgcttggcgtgctcagtgtaggtgacggcgtcacggatgacaccctcgaggaaggtcttgaggacaccacgggtctcctcgtagatcatggcagagatacgcttgacaccaccacggcgagcgagacggcggatagcgggcttggtgataccctggatgttgtcacgtaagatcttacggtgacgcttggcgccaccttttccgagacccttgccaccctttccgcctgttgagacgcgttaggatgattgagatagcctcatggtgatatggatgtcacttacgtccagacatgttgatgtgtgaagagatttaaggttaaagttgtgaggtggagataaattaaacgtcaagtggacggcgagagatgttgagaatggaagaccggatgggctcccacgggacggcagatatttgtatagaagacggaagcgcgtggggagagagctggaatcactcactgtcggaggatcgaccaatcagagggcggggcatgttgatctgatgcgcggccctagacgggcggtaacgtgaccatgacgcagttgatcttgcaagaggaatttgatcgcggcgcgaggacgcgtcaagacgcggatttgagatttgagagtgcatagtaaattcctacgtactacagagactcctggaattcttctgatatcctaaaaattcagggatggggttgggatcagtatgtaactgggggacattccagatcaatgatcctgaatgcttattggctgcccgggaaagtctcgcttagcgcaactgccagcctgaccgccctggcccgcaaccctttcgatcttgccagcaaaactgggccgcgaaatcactgcttatggtgtgctggtttccggacggtttttttgatcaaaggaaagggcgctaagaccacccggctttgcagccaaaccacaggatcaccacccgcctctcgcttactacaaataccatcccccacccgccccctccatctttctttcatctatcctttccgacatcctatattcggccatcgactttccatcaattctataccattttcatctcaaagccccactaattccatcaaaactcatcgtcaataatggctcgcactaagcagactgcccgtaagtcctcactttgttgccctacctctcgtgtcgtggtcgtgtcacggtcgcgtctcccaactgcttcacgatgctaactttaccccaacaggcaagtctactggtggcaaggctccccgtaagcagctcgcgtccaaggctgcccgtaaggccgctccctccactggaggtgtcaagaagcctcaccgctacaagcctggtaagtaatacctatgacttggttcgtggttgcgtctctaacgtactccaaggtaccgtcgctctccgtgagatccgtcgctaccagaagtccactgagcttctgatccgaaagctccccttccagcgtctggtccgtgaaatcgcccaggacttcaagtccgacctccgcttccagtcctccgccatcggtgctctccaggagtccgttgaggcctacctcgtctccctcttcgaagacaccaacctgtgcgctatccacgccaagcgtgtcaccatccagtccaaggacatccagcttgctcgtcgcctccgtggtgagcgatcttaagttgtttttcgtggttggttcttctgggacggcgataacggggttcatcttttctttttcatgactggcgatacatgacgggttttctttttccaatatcaatgggttcggcactgggttttgttttttctcgctacgttaaatagtaggctgcccattagcggctggacggattctcatgggtcttgaatactatgtacattaagaatcttccacatggtgtcttgtcgatgccaccggatggcatagacacgaattcagtatctatgatcaaatcaactccagtcgcccctattcgtcttgcagtaaccataagacgtgtcggccgtgttcacgctcacggctacatgcgtctacagaaacaactgtgcttgacgcaaagttctgatttccatccgctttgtgtccatgatcgaatatgcagtgatcagtagcttaagtagtctttgtagggtgatttccctctgaggaaacgcgatcgattggattctcgtcagtcacaatgcgaccgctggccagtctctgaactataaaatcaccacccttgttctttgacactctacgaaaccatgtactggaatatcttgaaccagtaccgcaacaaacggctcatatatttgggtgcatgaatgaaatgtgggacttctgtcatcaagccttgaccaaacgtgtcactatacccgtcaagttccatagactggccaattctgaccatgtaacaaccttgtcccttctcgaaactcaatactaccactcgacatctcttagccttagacagcttagcataagttctgcctgtgtgctgtttcgttcctgctagttggaagctgctcgaacggttcccagacagggttcccagacagacatgttctcatctcatcttcgttgtcctcgtcatcattctcatctacttcgtatcaattagattctgtcctatgacaactgaagctcgctttcttgggcacgcgcaaacggacgctgggccggatggtctgcgacttccggctgtctttacaataagctcgagtgcgttatatacatatcattgctgaacgcacagtataccttgccactaaagattcacatcatccactgcgtatcttcgaccctccaccgattagaaagtcgcatagttcactttatagaaggtggcgactttcttggatatatatatccgtgccgctatagctgcctatagacatatactaggagccacttataggatgcaaatacatcagtggcatagtgaagctcagtggatcccttcggattaagaaaccaagactgaggttctttgttagcgtccaccgaattttggctaagaatccgagaggcatcttcgagcacagtctagcacaggccataagtcgatcagtatgctgccaaagtatgcttccgaattccggccctaaggcaccaacgatccaacagccaagcttccagcgatgagattaataatttataatcaaaaaaaaaaaaaaacaatcccaaacagaaacagaaataagttgatcatattagttgattctagcaaaagccccgagaccaaagcccctctaccattaagtgaagcgccaccagatgaaacatttccaggatatacctcggcaaatctggtcaggttgcagcataattattgtaattattggatgactcagatcagtctatccgacagttgttcataagcctcataaatcgatctagacgtgccccttaacggtcttcaccaggcacggtgggtcagaatggggttgccgcttgctaagttttctactttgccgaggtcccgaaagtgacgggtccactgtttagatagaggttacggcttacgactcaggctggtttgtccagaccgagaccgtagtgtacagagtaggatcactaattcctaaatagtaactagtaagatctaaatagcaatctctgagaagtaatcactatataggaaccattaataaagaataatctctaaaagggacccgaattcaaggttctgatttctggatcgtcattgacgatggaagagcggcctctgagggcgaaagagtcatgaggcctagctcgataggacggttgcactgcaggtcatggggggcatggggggagaattacttacagtaccgaactagaatctgactgttattctagatagccaccgntagagggccgccatacccgagtcccaatgcagtttaatgccccggtgagccgattggggactgggatgaaccgcggtaaagtgcttaatcccgatcagctgaacccaactttgactcttaagggaggcttattaaaaagacctaattttgtatttgcccgcgaaggtttatgcgaaattttttgcgatggttaacggttcccaaccgggcccgggggaggttttttaaaacaaatttttggggtttttttgaaaactttatgggaaaaattggggttttacatttgggggtttccataaattttggggg

SEQ ID NO: 851 - DNA, 2818 bp, Emericella nidulans
ggtcggtacgtgtcttccatcttgtggtttcaggtctcctattcaatatggataactgtatatattaagcaaagctatggtccacataaatcagatgcgtctttagctagatagcacgtacaagtacataaatcataaagtaccatagcaggaatcgtccccagtagcagagcgtaagtgcaaggcggcatcgagacggacagaatgcgtccaacaatgtcagccacaagccaggggatggataagcaccgttcgcaacaggcggcaccgaacgaggatcgtgtatagcgaaaatgtagattccaaaataagtgcactacgttgacagctgtcgacaggcattttttgttcattgagccttaagctctgcaaaatcgccggatactaactgcaataataccactccctacattgctagagtaggcccccttttatcttgtccaaacgttagtggcatccattcaagacagctttcccattagctcgcgcctccagaaggctcggtggtggtggcggcccaaacactggcttctctggctgctgaggcatggtgtgatctccgctggcgctctcgagctcatactcttcgtcactaataccctcctcatcctcttcgtcttcgtagtcctcctcatattcgctctctgttccttcatcatcgccatccaaatccacagctagaccctgaccacggccctgagcttgcatccgccgacatagcgcttcgagatggtggcttttcttccgccatttgtcgagttcttcgtgatttcttgtgcgttcctcagccatttccagtatgttacgattcgtctgatcgtgcttgcgagttagagtgagattctccttttctagcctcttggtctttttcgacatctcctccatctctttgcggaaagtcaggaacagctcgttactgttgttcaaagtatcctcgacctgaaatattattattatcgagattcagaagtagacgcaacccatcatacctgtttgaacttttccacatagatattcagctgactgcgcaattccgattcggtgtgcgaaaatgtagacacctgagagctcagcgcgcgacagcgagcagcctcattttccgctgcacgacgctgttcttcatacttggcggtgagacactggatttcagcatccttgctgcgtaataacgacttatagtgtaactcgcgcatctcgaacttttcaccaatggtcttaatcttggctcggagactacaaaagatatgtcaggcaacgcgcaaaaaccgaggagctacgacttacgcttcgtccaggtcaatgtcgattttctcgcttcgaggattacccttcgcagccatcacatcttgaatgtcgtacagaagagagtcgagtcgctcattgacaatcgcgcgggccttcttctcgttctcctcgagtttcttattctcgtcctgcttgcccaaagatggaacattagccaagtgctaatgataccagccatatttgtagacccaccttgacttttttattttctttagtcagttctcgacaaagtttctccagtttatctttcatagtgacggtcttgttcaactccgattttcctttgtcctggtccttctgcagctgatccgcccgctttttactcttggcatagtcacggtctagtttcttcatatcggccagaagctcggtgtacttcttatggacagtttcaaggcgggtcattggggattcgatattggtcaagagctggttgaggtccctagtcgccttcttcacttcccgttctataatcacatattgttagcttgtgttgccacgcaatacctgaagaaccccactgtcacaagcggaacaccggatgtgaacacgcaccgatttcctgctcctggtctttttctcccgccgcatcctgctctaactgcgaaattttggcggcgagaagcttggacgtctcgtttgggtcggcgacccttcttccccttgtttttcttggacatggccgtagtcgacatagtcgatgagtccacttcgtagaatgtccagctggcgtcaggttgcgggacgtccggcagaggtcgcgtggtcgatccttggaaagaaaaatgcgaacgaaacggtgtgaaagtggtgaggcgtttaatgtgtgaccgaaaattaggaagccacgtcgacaaccaacgtaagaaagatccgtgtaagcaatgcagcttctggtagctaccaaggcacagcgtgatcaacggtaagtcttgaattccacacttgcagtgagcggagtaccttggacttctaggctcgcagaactcggagcaaccgggtctccggatcctacagcaaccaagtcctgcaaagccgacaaaaaagtccagaaacctaacaggagttgtcgagacctggtggagcgaaaaccaactggcgagtagcaacgagtcaagaacagtcggtcgaggacttgttggagagatcgaatccaatctcgcaagtcggagggggtgactaacactagcccgattcggaagtatattcttggcattcctcgctgtttgtcatcgcagccgagttcccgacagccagcctcgattttcctaccatctttctctctctctttagaattagacggcggttgtttggaagcaaatattgattgccttacgtctgcgctatttgctcacattttaactaattgctttggtcccggctggaccggtgccaacttcaactcggcatcaataagttgtgctaagtcgtgctctacgttgactcgaatcattttatcacatctctacgatatgctccggtcatacttgcacctaggcaggcatcgaacgcc

SEQ ID NO: 852 - DNA, 5921 bp, Emericella nidulans
aagctcacttttgggagagctcgggccacgcatgctgtgcacacgatgcggatcgggtccagttttatcggatgtactggtacaaaggagggggtgctaaatcaatgacatggcgtaactgaggtgtcttacaaagactaggatgaacaccagcatggcgactatgcacaagatacatgaccaatctctagttcctatgatgtatatgaagaagattgagaatgtgacagctttgagggagcggcaaaagaagctccgtaggaactgattacggcagaaattgatatcttaggcaatgtatctgcagacggagagcaacctatgaaaggctttatagtcagggctcgcgacattgatgcatactcgttacagcccctaatcagagtctgatactcggacgcgcatagacagcaagacacagacattgacgctatcaagatcatgcattggcaagacatatgattatattgacaaggttttcgcgcgaagtgaatatgagcccatggagctgtttgattactacttcccggaccttgttgccaagctcgtcacgaacagggacaaggttgtctggaccactcgctggcggcgtgtggccgaagacgccgacgctcgtaatctagtggagagcgagatggtcgaagccggacatcgcggtatactggacgagatccgcggcaagacagtctctcgtgacaatgattcgggtcgacccgagaagaggatcaagatggatcttatggacgtcgacctgcccaaggcccctgctgctgccgaggaaaagaagaccgcggacggtggattggtcagagggctccagcccaaacgcttaatcaacctggaaaaccttgtatttcatcagggtaaccatttgatgacaaaccccaacgtcaaattgcctcagggttcaacgaaacggacattcaaggggtacgaggaaattcatgtaccgcagccaaagtctaagcaggagccaggagagaggaaagtcgcaatctccgaactccctgaatgggcgcgtatcggatttggggatgcaaaggagctcaaccggatccagaccaagtgttacccctcagctttccaggatgatggcaacatgcttgtctgcgctcctacgggctcaggaaaaaccaatgtggccatgttgagcatactccgtgaggttggaaagaaccgtaactcccaaaccggagagataatgcttgacgactttaaaatagtctacatctcccccttgaaggctcttgtccaagaacaagttgagaatttcggcaggcgtctcgctccttacggcatcaaggttgcagaattgaccggtgaccgtcaacttacgaagcagcaaatcgccgagactcaggtcattgtcacaacccctgaaaagtttgacgttataacgcgaaaggcgtcagagacgagctataccaagctcgttcgtctaatcatcattgatgagatccatcttcttcacgatgagcgtggacctgtcattgaaagtattgtcagcaggaccatccgacaagtcgaacaaaccggcgatgccgtccgaattgtctgtctcagtgcaacactccctaattaccgcgatgtcgcaagcttccttcgtgttgatcccagcaagggtttgttgcactgtgacaggtcttaccgaccatgccctctaaaacaagattcattggtgtcacggacaagaagcccatcaagcaactgaaaattatgaacgacatttgctacaataaggtaattgagcacgtggggcaaaatcggaaccagatgctcatcttcgttcattctcggaaagagacagcaaagaccgctaaatatctccgagacaaggctcttgagatggagacaataggtcagattctgaagagtgactctgcaagcagagctattcttgccgaagaggctgaatccgtcaatgacgccgcccttaaggatatcctgccttacggcttcggtattcaccacgctggtctaagtcttgcggatcgtgactcggtccaggcgctcttcaaagatggcagtatccaggttcttgtttgtacagcgaccctggcgtggggtgtgaacctgcccgcgcatactgttatcatcaaaggaacacaggtctactctcccgagaaaggtagctgggtcgagttgagtcctcaagatgtcctccagatgctgggacgagccggacgacctcagtatgatacgtatggtgaaggtattatcattaccactcaagctgaaatccaatattacctctcactcatgaatcaacaattgcccattgagagccagcttgtgagcaaacttgcagacaacatgaacgcagagattgtgctcggaaacatccgaacacgagacgagggagtcgactggcttggctatacgtatctgtttgtgcgcatgctgcgctctcctggtctatacagcgtcggtgctgactacgaaaacgatgacgctcttgagcagaagcgtgttgatcttgtgcactctgcggcggtgctcctggaaaaggctggattggttaagtatgacaaaaagactggacggttacagtctacagagctggggcggatcgcgtcacactattatatcggccacaactccatgttgacatacaaccagcatctccaaccatccatcggaaacattgagctatttcgaatcttcgctcttagcgatgagttcaagtacattccggtccgtcaagatgagaaactcgaactggcgaagatgcttggccgtgtgcctgttccagttaaagagggtatcgacgagcctcacgccaagatcaacgttttgctgcaggcgtacatctcccgacttaagctggagggtcttgccctgatggcggacttggtctatgtgacccaatcagctggccgtatcctccgtgccctgtttgaaatatgcttacggcgcggttgggcgtcggtagctaaaaatgcccttgatctttgcaagatggctgaaaggcgtatgtggcctaccatgagccccttgcgccagttcccgcgatgccctagggatatcctccaaaagtccgagcgaatcgacgtgccttggggcagctattttgatctggaccctccgcgcatgggtgaacttttgggcatgccccgagcgggcaaaactgtctgtgacctagtttccaaatttcctcgcttggaggtccaggcccaggttcaacccatcactcgctccatgctaagggttgaattgacgatcactcccaactttgtctgggacgaagaactgcatggtacggcccaggacttctggatcatggttgaggattgcgacggcgaagagatcttgttccatgatcaattcgttctgcgcaaggactacgccgagtcggagatgaacgagcatcttgtcgagttcactgttcccatcacggagcccatgccccccaactatttcatctcccttgtatctgaccgctggatgcattcggaaactcgcatcgccgtgtctttccagaaactaatccttccggagagattccctccccatactcctttgctcgatatgcaacgggcccctgtgaaggctctcaagcgtgatgagtaccagcggttataccctgattgggaatactttaacaagattcaaacgcaaacgttcaagactctcttcgaaagcgacgacaatgtttttatcggcgctcccacgggcagtggtaagacggtctgcgcggaattggcgattttgcgtcattgggccaaggaagacagtggcgcgcagtctacgttgctccattccaggagcttattgacagccgccttgaggactggaaaaagcggctgagcggcttggctggtggtaagagtattgccaagctgactggggagatgacagccgatctcaagatcctcgccggttcagatcttgttcttgctacgcccacccaatgggatgtgctttccagacaatggcagaagcgcaagaatgtgcgcgctgtggagctgtttgttgctgatgagctgcacatgctcggtggttacggtgggtatgtctacgaagttgtggtctcgcgcatgcattccattgcgctccagaccgagagcggcatgcggatcgtcggtctaagcgttcctctctccaatgctcgggatatcggagagtggattggcgctagcaagcacactatctacaactttagtccccatgcccggccagtacccttggaactccacatccagtctttcagcataccgcatttcccttcattgatgttgacaatggcaagaccagcatatctctcgatcctgcagctgtctgcagataaacccgctctcatctttgtgcctaaccggaagcaaacccgcgctactgccattgatcttttgacagcatgttctattgacgacgacgaagaccggttccttcatgccgacatcgaggagctgcaaccgttacttggccgcgtccatgagcgtaccctggcggagtcgctctcacatggtattgggtactaccatgaggctttgagtcagactgacaagcgcattgtttcccatctctacaacatcggtgcaatccaagttgtcatcgcctcacgagatgtctgctgggaactcaacctcaccggacaccttgtggttgtcatgggcactcagttcttcgagggccgtgagcatcgctatatcgactacccaataagcgagattctccaaatgttcggcaaggcttctcgccccggtcaggacaaagttggccgaggtgttcttatggtcccgacggtcaaacgcgagtactataagaagttcctcaacgaggcgttgccggtggagagtcacttacagctctacatgcacgatgccttcgttaccgagatcagccaggggacaattgcctccactcaagattccgttgactggttgacgtacacttacttttaccgccgccttctagccaaccccagcttctatggtctcacggatataagccacgagggtctgagtacattcctttctgagttggtagagaacaccttgaaggagctgtctgaggccaagatcattgatctggatgaagaggatgacagtgtttcacctctgaacgctgcatcgatcggcgcgtactacaacatttcatacatcaccatgcagaccttcctcctttctctgtctgcccgaacgaaactcaagggcattttggagattgtcacagcggcgaccgaatttgagtctgtccagatgcgccgccacgaagaacacatccttcgccgagtgtatgaccgcgtccctgtcaaaacgtcacaggtcgccttcgactcaccgcacttcaaatcctttgtgctgcttcaagctcacttttcgcgcatgcagctgcctattgatctggcgaaagaccaagaagttattgttagcaaggcccttaaccttctcagtgcttgtgtggacatcctcgcctcggaaggccacatgaacgccatgaatgccatggaaatgtcgcagatggtggttcaggctatgtgggatcgtgatagccctctcaagcaaattcctcattttggccctgaagccatcaaggttgccaatgagtataagtatgttactcctgctttatatgctaaaactcgttctaacatttgcatgattagtatcaacgatatcttcgagttcatggatgcgatggacccgtccgagaacaaagattacaataccctagttaagcgtctcaacctcgacaacaaacaattggcgcaggcagctgcgttcaccaacaacaagtaccctatcctagaactcgactttgaggtcgaggacccggaaaacattactgccggtgaacctgcgtacctcaaaatcaaggttgagcgggaggtggatgaggatgaagagtttgacacgacagtgcacgcgcctttctaccccggccaaaagatggagaactggtggttggttgttgcgacgaga

SEQ ID NO: 853 - DNA, 1737 bp, Emericella nidulans
tctccacttcaaataaagagaaagaaagtaggagtgcctatttaaaattcaaagaatttagattttcgccaaaaacataaaacccgggatagcatataataacggaatatgccaccgcaccttaccaaaaaaaatggtcccttcggggggagaaactaggaattgtttgtttaaagatacaaaaaaaaaaatacggtgggtggaatgtggcttacctgtaaaaaaaacaggcgaaaattggaaatttcgaaacagccacagcgggaaaccaagagtggttagttggacagccttgtggagggcagagccgtatccattaatattgcccaaaaaagagattaaaaactttgttaggttgggtgtgtgaaaagttaagattgagcatattaaatatcgccagaaaaggatgcgacttacggaataagtcaagttgagggtaggttttcagaatccggcattgtttgacccgtaggggcactagcagatgttgagggtatctcgtagcgaaacgaactgggcttgggcaacgggaccgtagtaccaagtgcagtagcaatactcgaaagagcctgggagcgcgtcatactataaaacatcttcgagaaatccaacagttgctcgcggctatgaatgggctgcagataggccgaggaaccggggtagtaggggttggtcgcaaggcaatcgtccggcactgctacgccggcttggatttgtgcctgttccgtccatagcttctgcggatcgagtccagctttctgccatgcttgttggcgcaggcggcgaatcatatcccaggcctcacggccccgtctttcagaggtcgctgagttgttacgccatcttcgcctccgacgacgcctccatccggcccggtgagtgagaagattttgtctacgaacgcgcgagtcttcggggcctctgggctgtagggccgctcatagagatcaataagcatgatcatagtagcgtgcattggctggtggttcccaggccaactccattgaaacggctggaaatcagggtccgtggcaagggagatgaacttttccatgaatccatgacaatggcggagtgcgctacagaaattagtttgggagtactaaacgtgggctgtggcacgaacctttgtcttgcagctggccaaatccggctcctggcattcttaaggaaaggctgatatgcaacgcaatatgcctatatccgtggtgttagaggttcagtctgcttagtacttgaattatcacttactttgtcaacataaaggctgaggacgatccttgcccatttatgataagctacaagaaccggcgtatgatactgctccgtacaggtaggagccgcgtcgcccggaagtgcctgatccatgctcaacccttctgttggagaccgtgagaaagaccaggatctattggaagtattcgaggggaaatcagtctgtctagcctctggaatccgctcaactattgagttcagctggacttggaggtcgacgaggattgatctcaattcctccatgtgccgccgtgtaacaggcttggttccaagttgaatcctcattatccgacggacagcgcctggcacacattaaaagttgttcacatcacagttctcaagacagtacttacgtgccatgacatatttgcctcgggctgccaggtagtaaacattcaccatagatggaccgccacaaactgttgggtcatcgggattactcgagggcgcaaccagctttga

SEQ ID NO: 854 - DNA, 2301 bp, Emericella nidulans
gctgagcatgtgaaaattgataccaatgagactggccagtacttttcatggtgatgactcgagcttgcagtccaaagcggtttactgtaatggttgttatgctggatatgtgcatgtgactgggtgtcaagctgcttagcgcgtcttggtgcaatcaacactcgacgcacccgcacccttcgggcatacaattacgaaacacaaccttcttcatgacagcctccttctaacagacatacgtagctttcactggaagaatctcaccaatagcaccattacgatgcctgcgaagcgaaagcattcgggcaatgcgctcgaccaagacaacgacagtcggcgtaagaggtcttacgcctatctaaagccccaagtacggcatatatcagagagaacgatcaagtccaaatggtcgacgctcccagaaccaatgcaggacaagatccgtgatatgctacaagccctcgaacgtcctgtcatcgtccggcaacagaatgagcggaaacgctacgaggcacaggcagctgttcaggctgttgtgaagaagtacggtagctgtgctcataagctatgtggatatgtgctaattgccgtgcgtactttctagtcttggaaagcgactgcctcgaatgccttttcctccgatgacgaaagactcagtattcgagtacgaagcggcgcttaaggaacatgtatgtgtccttcaccaagcagcggcatgcatacgtactgactctcctattcagagcgcgctagaagcttctctgtctacaatgaatgacagcatcgttctgttgaacaatgagattgcaaaggaggaggcgtttcttgccaaggaaacgaagcagttgcaggagatggagaaaaatgctaagcgcgcagaggcagagcggaggaggctgatgaaaaatgtatgctgcttcgcggccataggttttttaactggcgctaattgatcgcaggaacatcccgctctgcgacagctccgagatgttcgcgaacaacaaattgaggctccgtctggattcaatttgtcccatgcgaaggggtcccagctagacttcagtgaagtaagttctcagcccctggacaacgtgctccttcctaacgtctttctctatagctcgaggccgacccagaggcctccagtctcctaaagcagttgaacaaccacctgaaatcaatgcagagcaatattgcacctcttactggacttaaggacgctattgaccggtctcagacagctctaagtcttgcaaccttgcccgatgactgagccatgcctttagcgatttcaaagaagcgcctaggacattctcatgaaattaggcctctgccgactacgactgtacttgcacccgactattagaagggtacgcaaaggcgaaaatgtccactgtcccagtgctaggtcgccaaaggatctaggcagcttgatcttcagttgcgaggtgcagtgaactttgtacaacagctggctacgcacagaaaccacacccttgcaaaggtacctgacgcgtaggggtacactatgatgaaacatgcaataccacgaaactcccgcagtggactagaccctaggttcaaacaagccgattctggctaggcaatagcgttatgaagccgatcagagggttgtttgactcatttggaggaaatgttgttcgagaactgtcagcttgggccatgtcggcccagcggctctgccaagctcccgaccgtctccagaagaggacgcatagctcaagcagcaagaatgggaatagaagctagatctacaaaattagtaaataagaccgaggcatttagctgcacatggattcgggaaagtgctccgtaggcaagatcttccgaggctgagagccgtttttgcggagccgcctgagctctttaaaaaggcggcgtttcccaatgcggagcaggtcgggagatgaatttggctgccgagattccactccactaccagtagtgcctgtgcccaaagtgcctgtgagtcccgctcaatcggcggggaaagtgtggtcgcatgtacgtatctccagcttcacgcttgttcgtgcagctgaaccgatgatctcgtcctccttctcgctgaacccacgtcggtgcctgcaagtgcccatcaccctcttgtcccttgtgttcccaacccaacagcgaccgcgacactagcgagccggctcctgcgcaacagctttgcgcctcgcgatcaatgacggagaaaaacactacgcagccgggttcggcccagaccagtacgccggcaatggaacggcggaaaacacaggccccagcaagactttg

SEQ ID NO: 855 - DNA, 2093 bp, Emericella nidulans
cagaagacttgccaataacatcaagtacatccacaacatgaggctcgtattcgcgaattccgttctgtgtcataggagcactaccgctaacagttgatgctcggttcctggagaacctattcaacgcggcttcactcctcctccgcatagcactcctgttgtccctcagctgcggcagaggctgtgtaggttgtaccgacggtctgacaaattccgaggttggacgacgcccactagcaggactttgaggctcttccatcacagtatgcatctgcccgcctggctggagccgtggaagagtcgctggggttggtgcagaccaccgtcctggccgaggctcagagttgctgcgacggcggccgccttcaaacgggtcgctcttctcttcgacgggagacgctgcgccacgtgcaactgacgcacctgaaccaatgtttctgatgtcgacattgctgctgctaggttgaggcgaggcgatagaccgaatgaacgagggcgggcgcgttaggcgaattgatgagcggttcgagtgatttgagcggactgaggccgcacgccgccgtccagcgaatgtccgatgacgtcgtttcctgtgcaggactcgccgatgaagcccgtcgcggctggggttggggaacattaagatgatccggagacgggcctgccggctctatcggatccattgagacggtttggcgttagaagactgatgaagtgaggggatggagaggaaaaggaagaagagaaccaagataaagaagcagcattagtcaacccaggctcgaacgtcccgctgaacccgttgaatcccgccaagagctgtggcgctcatccagaaaaaacagccattcaagctgagagcatggagatcggcatgacattgtctgtgcgcttttgaaagtccatttggcgagttgattgcttgagaacaaggctcttacaaagatgatgaaacaacattcttcctgttggcgcttagttctctatttcgaggttccgctttttgagagtttcgtgcctgaggcatatttatgtaattctatacttcaaaagagctgtgttattcactgcgctattcaaatacactcttttctgctcaactcttttactcacttgagctatttgattgtggaagctttatgatgtgttctctttcatttcttcctttcctacgattcaaacctttctcctcactctgggttcaattaagtctcaggtgcccaggcatacagctagtagaagaatttgtctaccaggtgagctagccacatcccttttcgcttcttttcaatctgatacaatactgatcctccttctagtgttcaatcgtggcacgaatttcttaatggagaggaaacgcctttcaggagtcgaaagccctcgtccccaggctcatgagaacaatgcgactagtaatcaaggaaaccgtgtccatccatcgggaaaacgagtcttcgaagtctttggcactcgtaatagtgccagtgtcaagtcaaaccattctttatcgaagaaagcgtctccttacaccgataagttcttcgctaacgttgcggaagctatcgttcgcagcttcccattcacggagttcgcaaaggaaaatagttgtgagatcaaggatgttgtccgagcacttaaagtcacggttgtggaacctctctccaagccatcgatacagaaaagctcgactcctgcagaatacgctcaacgcgagcctgcgacgctcggttctgcaccttcaattccccttcctccagtagatccgcaaaatagacgttggatagtatctcgtcaacctggacaaacaacaccgccatccgcaacttcagggagcacacggtttagtccatccaagcgtcacccagggagaagtcagaagggaaaagctgcagagtatgtgcagaacaacttcaggtttgaggtctcatccacggctacctccgagccctccatacttctcaagggtggccgtggagtcaagagacgcaagacgatggttcctgttgaacaacagattataaagcaggacgcctatggcaactacgttcctgtcaaatctataacaacggcgagtggtcgctttggcgatgatg

SEQ ID NO: 856 - DNA, 2558 bp, Emericella nidulans
aatctggtgagagtttaatggaagcggtctaacagacagccggcaccgaaggtttgccaacgcaaaagccttctacgcatcgaacccggaaagttatgtaacaaaatgccgagggtcagggcaaagggtacagggtttctccagctttgtatgtcgcaggccacgagtgcctgtccttctaccacgcttacatatacggacagtcagccacagcgttaactccgcgcagtcaaagctcggatgctacggctagctgatgcatccatcgatgataatgccaacatattcatcagcacaatagtcggtttattttatttgtctgcaggttctgttgctgctagttgtcttggacacaacggagggaggaatatggaggcacaaagtttgggtctcttggaatgaactccttgtttagaggcccaaatgatcgagacttgtaagatcgaagtagacctgcatcttttgctgcagcagtgctgtttatctgtctcactatggaaattctgtatttccttcaaacgtcgagaaggagaaagaaggcagcttaaagcaggtcacctggagaagaggcccagacactcattaacactttttcaattcttttcattagtgtttcttcaaattccattcaacgagttatccaagattattgatagaggttgtcgtctctcagatcaaattgagctatcttacgcctcaggcagaaaataattaccgttaggtactagaatcacatgactctcacataaaagcagatattgttcgtggatgtgatttggtttttttgagatcttcaactctttcgaatattacgggggaaaaaagctgccctgaatgctcttgtggtggccagtctatcgtacgctcacgcttaatgcccttgggaaatgttgcgtacgacaatcgcctagtaatcggtgaggtataattcgatcgaagagctacaccaaccacagcatacaaaatggcagactccacttcattcgatgaaaggcctgctgctactatgtccgccatgctgagcaaggacaaatcaaaacgtctgtcaaaacagaacatcaaccccctccagaaatgcataggagatttcataaacacgcatctctcgcaatctctattagcgcaacatgccgtaccactcgaggagctggtctcctcgctccccaaacgatacaccatatacgagcccatgctcctgcttccgctgaacgcctttacccaccctccggcctgggccaagctttatgaaggtttagatgacaaccagcgccagactctgtacgcctccatcgcgagcgccttctcgcgatatggggtaacacacgttgccatgaacgcaccaatcgtgcttacagacactcaaggacatgagaacaggatgcgcagcctatcgggctcatcacgctgcatggagatttcggaccagccacgtcgcgggatggcgaggatatccagccctcggaagatgattacaagcgcgcattctgggtccgtactgtccagaatcacgggatcgtacagatctgggctccgctgcataccatgttctctcggggaaatgtcactgagaaggcccggatactggggcatgggtctacgtttgaggggttagatgaggtatcgcttcatgggaagacagctggcgatgtcgccgtcatcgatatgtacgccgggatcgggtactttgttttctcgtatctgaaacgcggggtccagagggtttgggggtgggagatcaatgggtggtctgtggagggattgcgtaggggatgtgtggagaatggatggggttgtaaagttatcagggtgggaaatgatggccagctgagtgtgcctgttgacgagctggtcgggggcctttgtgatactgatcgggtggtgatttttcacggagataatgggtttgcagcggggattatgcgtcaggttagagatgctatggagggtcggcaagggtggaccaacatcagacatgtcaatttggggcttttgccatcttccagcgacgcttgggatggtgcctgcaggatcattgacggggacaaaggtggctggctccacgtgcacgagaatgtcgatgtgcaacagatcgaggtgaagagaggcgagattaccgccaccgtgcaaggtctctggactgagtctgcgtcccagattgcgaatacggagccccgtgctgaatgtcggcacgtcgaaaaagtcaagacttatgctccaggggtaatgcattgtgtttttgacctacacctctcccatcaagagatttgcggcaatgcgccatgatggtacggagatatacgcaatccacatcgcatattgccagcatttctgatctgagctgtcattgggatggtatctatcatcttatatgtgtgtaaataacgcccgcaacaactcaaacatttaagcgcccctgggaatacataaaatatacatgatcacacacgccccttgcggaacttcgccggaatattagccgcgacaatggccatacgttcaagctggtccaatttctgcatggcctcgtcttcctcgtcatgcctctcgcaccgctcccc

SEQ ID NO: 857 - DNA, 4023 bp, Emericella nidulans
tggtatcatccagaacgcgggcgacaagctattgcatgacgattgatttcaattacttcttcatcctgttatcttctcgtacatatctactctactttttccccagccagcgactgtcaccctacatatctattctcttcagggttctatcctatcttcatattagactacgcttaccacatcctacctcttctccgcggtacatatatatatgtatatcacatctgtcacatctgccatctccctcctatactatatataccattctattgccatcaaccatctttctccataatcaaactactaaatatcatgtatctgccttgatttcaaccagcctcgaaagcatcaaaagaacgattcaggatatatctttctgcctcaagttcctcttacatgaacagcctatagtaccctcacaactcctcaacgaccagacatgtccaaaggtatttttgcattcgtaaatatatcgtgtcgccattatacttcgtggatccgaaccttcctaccaatcatctacatctactactgatcacttatgcatacctagctattgagctctctttctgcatctacattaaaagtcagtaaattcatcgcctgatgcattcgcccgtgtatcaagtaaaaaactgttccgataaagaggaaacggaccaaatccatttcgattgatatcctacgttaataggtatgctcactatcctgcgctccacatgcaagcggtgatggaagtgattaataagtaaaataactgaagcaagtcgaacttccctaaaaacatgaatatgaacttgaaaggactcctgaaggcgtaagctgacctccccataggctcgtgtatgggcggacggagaacaggatgaagataagagggaacggatagaaggagatagacaagcctttattcgcggtacgccagtagtatgatatggtatgtactccgtattggagatgtatatacaggactgaaaagaagagggacagacgggctcttcaagggaagaaacgaaggccaacaatgggaaggtgcaagagtgagatataaggagattggttttgtggatttattaatagcggatccatgtgatgctttgtttcgtcagcctggatgcataatgagaagtggctccatgctttcagattaatctcggggtaccgagcacaaagggagtagggaccagtgagcaacaagaagattagttaaggcgatagggaatgtgccagtgtttgctggccagtgttctgataaagggccctgctttagctagtcaactgcataaaagccggatcgacggcagcaggtcccgagacattttccaggtgggtcacttccggaagccctcgacgcccagcgtaggtgtttcgaccatccggtcattcggcacgccctcatcgcgcctccgggagaagaaactgtcacactcagacacgatctgggcccactctgcaagagcacgtcctgcgtacttgctggacgcaattttatcatcagccgcggctgtcaaatcgttcttcggggctttcttaatcttcgcatcagcatcagtcacgttctgtttcacgcctggggcaagcggatccttctcagcatccttttcggcttcagagtcggttgtgtcatccgaagttgtatcgctatcttctgatttgagcgttgaccttcgaagttgtagatgtaactgtgaagcgacagggagggagggagtatataatcgtttattcttgctaggccattgtggccgatccatccattccagggagaatctgaatgtatatggttgatgtggagtttttggtctttgcgattcactagggttattaccgcctcgccagctgacatctgcacctttctccccagtggcagaggagtcagacactgttgtatccgattcatctgagctggtaatgggagacagctcttcattggaacgcgaggcgccaaagacggctttcaatatgttccatcgctttttcgggggattctgagcctcagaaacatcatctgccttcatagagatgctgctcgtggcctgattaggggccgacgcgggcagaacacgatcgaaggacatgaagagattcgaaggcgacattggattgtcgcagcgaataatgattatccggcgccctggtgcgggggtacaaggtgcagaagataatggtgctgcgagaccgctttgcgcttttgtttgtactgcgagataaaaatcccagagacgctgcaggcgatttgacagagtctcatatattatcctaaatcattagtacttcgcaagctgtgaggcatgggtgtacttacgagtcaagtggtgatgggtccccgttgaacctaccaagccgccagcaaagcaagcggtggaagtaagctcggaccatggggctccaatgactgaagtaatggtagaacagtgtttcatcaagtaaaaatccaagacaaagggccgctttgcgttcctcagaggcgatccaggtattccagatgcagaaaagaaatgaaaatactcgaacttcggtaagtgagttatggctttgcatcatctgacgacatgcttcgagccagaacttccagtcgaacaggtccatttctattgatcttgaataccgtgcaattatgggaatggcctcctcgacgaaatcgcacagtaggaagcacgcattgtgatcgaagagagacgtccgctgggccgttatcttcataatcatgcagaatgactctgcgtagaataaacgtgcatgatttggctcaagcgacgattcggaaagataatctcgaagtagtataatcaaacgattttcggccatggaccgatgactgttagcggtccccaagggaagggctgatgccgacccctctgcaccctcaatgaaatcgtcaaaagtgatagccgcggtggtatggggattttctggcgcttgattctgtgattgcttgtagagggtgtcctccagtacgataagaatttgagcgtgtattggaagcaagccgggtgacagaatgcgggcgctcttctcgaaataagacggaatggcatcggcgtacagcagatggatgtatttgacgaaaacgtaaaagagatccgtgtctctgccacaccaccgggttacccagggactctgccactgaatctgagttatatttaatggtacctcgggcttctgacgcagataccgcaccaaggccgtgtgcgtgtgaaacgacaaagaccgcagacctggagggaagttcagcgcaagttcttgggtcatcgcacggagaccggagctcttgtcaacctgagtctcagcgtataccctccgacagatatttgctggtatattccagagtctgacaagcatttccgccacgccggggcaaaagaagaatgcataagcacatgctttaccgcagaaagccaccaaactagcaggggcgtgcctcattgacatcctctccaccacaaacgccatctgggtcaacagattattcgtgaaaatatttctgatgttgtgatgaatagactctacaaggaagtctgaaccagaagacgcttcggatgtttctgagatggacgctcctgagggctttagtggtttagggagctgtgcatctggggaggacatcgggaacgggactttccattcgggtcgagacattatgccgactaccgcttccagatataccggcctgtctgtaccagagatggcttgattattctttccgtttagcatgtctagtaacccggtccaccatttattaagaatgttgacccgtcgatccagatcttcgggcctcagcgctttgatataatgtggcggatgagcgcgattcagaaagggtagaagcgaagagcgaatgacattcgctttcaatgctgtagatttggactgaaatctggcgggacattagcaagcaaaaagtaaaagcatactagctacatacttctggaagtcggcttcaagaccacggaaagcattccaaagttcgtccttctttcttggagggtccagatttccagggacatccccagaaacggcggc

SEQ ID NO: 858 - DNA, 6177 bp, Emericella nidulans
cagcattctacttgatgggttcctcccattcccctatctgaacctgtcaaacctgcagaccatctcttacgacaatcacgcgcgcgacccattatatcacaactaggaagacgagagggattggatgattccggcctggacgtgctttattacgcgcccggatccccagcgcgggcatgggttccaccactgccagaactgtgatacgcgccctaagtcttaggctatgctacccggctttcgtgaggaacaaagtgatatgaacaatgaagggcgggtcttaattgacacaagaccagcagaagaaattattggtgaatggattgcgcgcctgcactctatggagtggctaccttcgctgacaatcgcggaccgcaagataggacggccagagagggagaggatttagacggtgctattgcaacggcacggactatgcaggattagtggaaagtgacatcaatccggcaccgaagacaggcccacaataagtactgggcacagcgtgctatttatgctgcatgggtcgcctggtcagttgcagtcggaggagctcgcgatgcgtaagagtgaatgagctgagactctccagcggttgcattcgcgttggtggcaagatggaggtgacgagctggaggagtattaccggggccttgctggagatcgtgctctttgactttagtcccggggttttcgtacatgcttttacggcttcttgatcatacaagtcatccacaaacgatcctatatctacgcactgaaatacagtaaacatatttttggccatggatttgccgcttgtcacattcaactcgaagaactgcttaaaggcgattccctgcgccgagtagattaaccagcacgagtccctagcacgaatgagagtcatggatgagtatatacaccaccaacatactctataggcaacgctctagccaaagggtctaggataagctcaaaaataaaacgacaagaaaagaaaaaaaagcaggtatgagggacgagcatctgtatcgctagccaccggatgcgtgtgatccaatatgctaaccaacccggctcgaataacctgacctaactccaaacctcgccccacagaacagtctacaatataggagaatacatagagtagtctatggtgggggagaggggggaaggaagaactagagaaataagaaaagaaatctatggtaaaggtaaacacactcataccggaacaacatgcgcaggcctaatctcaaacctctttcccccaatcgcgcccccaccgagcccccaacccttctcgccaactgggccatgccctgaaccttcactatcttcagatcccgtagtgagataaaagctatccccccacagccccctcttcttggactcctcgcgatccctctcctctacgctctgaaaatgcggcagcccccaccccatcccaaccccggcaccagggaatttgctcctcgagaaccggttgtacatgagtattgaatgctgcttggtatttaccgtgctgtttggagggaggtgtgcattgcggctgagcgggcgcacttcggctgggcctagtgggtcgatttggtgcggaacattcaggattttgtacgcgatgctgagaactgggatggaaagaccatggattactatggaaaagagtacgaggaagtaaattgctgagtcacgaggtcaatggtcagtaccttttgacagtgggttctgggagaggcaggcatacttggtttcagagcgcgaatgagagtcgtttctactgcgctgccctctccatcctcgggaaataagtggctcgcgtgctcagcgtagaagatgccgccaattcctatataataccgtaccatatccagtcagttatcctactgtatttccaggatagcaagaagtgaaaagaatctccgctcaccaatcggcccgaaataccccataaacagcgcctccttccagctcgtacagaccttgggcatcaacttccacaggacaagcaagctgggtatgcgccgaaacaaaagaaccatgaaacccagcagaatgagccgcggatacgtaattcccgttgtctctggctggtggaagtccgcccatgggatgacggcaccaatgtacataaacccagcgaaattgaggagcacgtcgatgctgggattgacttcgtcgtggcgcgcttccgtttcggacagataggctccgtcccagttcagtgctgtgccagctgagaagcatgccaggaggtcgtttgttccgattacgccgcaggttccgatggtaaacaactgggatataatgagtggcggggggttaagagagggtatgtggttaacgtacacctaatgcggcggggaataacaggtaactctccccatctacccattttcttgtggaaggacatattatgttagcatttgctttagcttaatcgcgggctcggcctccttgagaccttaaggtagaaaccaacctccttaacgcaaacctcaatgcatgcataccggcatagccaacaacagcaccatacaccgcgcccataaccacatagtagcaccacgtctccaccacccacatttccatcgccttggtcagccctccatcctggtgacctacctggcccgcccgggtatacagagagatagaacggtgctcaatctcgtcctgatcgggattatgggcaggatccccctgcgtataccgcagtaaataagttgcgagcatcaaaaacggaaagccaaacccatcatttgcgccagcttccgaggatatgatttcacgcagatcacgggcgacgtagcgatctgcaaacggaccttttgcgatggcctgcgagaggatgggatcggtggatgtgacgcacgaccctaggaccagggcgcttagctggccctgtacgtcagccggagactggacccatcggtttgtttggaactgaaaggagacccacaagattcaagcgtggaatcgccagcagaatacacgccgacgtgcagagccacatcaaggccatattcggcataaggcagatcagcatctccttccacctgtggatctggtacttggctgggagctggaatcccacaatcaccaactgaacaccgatcactacgcggcagagaccctgtttgttcatgaattattagcagagtaccaacatcaatgagcaggccatagttttgcaaagttgccccgcataccaaggtaattgcgtcttgctgaccccatactgcagaaccccattctgatgcgtccaagaaacgagcagcgtatggcccgagaacaattcctattagcagagctggcactgtcgcgcccgagttaggtgtgggactggaatgggctgatgaagacctacgtgcttcgccgagataccagtggttctttatcttcacagaggctagtgcatagaggataataaacgcccctgcccatatgtattagctaacctgtatcgtctgaaatgaatggattattcgttgacctaaaactgaaatcaccacattcaactcactcacaaccaacgttggcatgacaagcactatcagtctcgcaagtgaaggcaactgtaaaatggatattcgctcaagtacatgaacacaaggcatataatatgggcggaagtcacgcaaatttatgagaaccagatttcccaacatattcgctgtcaggggcactgtctttcctcgtggcgttgtcaccacagtgagagcgggatgtcttggcgaatctccgccaagcagccaagtccagaggcagcggccaagaagcccatgtgccgtcagttctgtagcatgactttgcgcgtgtggccgtcatacgacgattttaatgacttgagtaccagtgggtaccctgatttcctgacctgtgcagtacaaggagaactgcccgtaccggtcgaggaatctagtgcccaatgtctttcggacaagaaggtatcatccggtatacgcaggatttggagtgattcaggactccgtgcgtcataccccctcacatcagggcacccagcgatcctgcacgggttcgtcggatgtttttgttctacgagtttaaggataagaagtgacgcacacagttcatgttccgatctcgtcaactcactgaatagtataaaatcccatataaatatagccataatatcttgctgagataattgaccctgccggatatatataacaactgccctttgtctacgcccaatcacagttctaagcgcattccagacgtatccagcgcgtgtcaatcaaactctgatttggccctgcctttcacaataatccgttacctagtgcatgctctcaacatgaaacgcctcatctatgatattttcttccccacttactcgctcaaattccctttttagctatatatacactgatctctccataattaacgggcgtaatatgcactgaaccgggctcaaaggagcggacggagtcgtaatagttctacaatgctatgtatgcgttgattatactcgtacagagctaagaattgttaaagatgtacttcctaccaggaaggcctagaaatatctgcattatcacattgctcttcgtgtcttgggaaaatagagcttgtagaattaatatcatcaacctcccaaataatcgcaaagagcgcgattgcttgggctaactaacactagcctagaacctgctggattctcatcaagtcctagcaacccacgacttttgcatagcggcttaacaagactagctgatggttctgctataatagtatttcttatggcggggtgcctaaggcttctgctgacgcttgctgttagaacctggctagatatgtacgcctggcttggcccggggcagctatatatgcaaaatagcctacatatttaattctttctctccagatgtagaatgtagtattatggttttgttatttgtagtatactagttaatttacacccagtcctcaaccggcgcaaggaaatgccttggacaagctctcggcggtgttcgctagaagacaggaataccccataaggtcctctgcaaatatgaaaacagtacttattgcactctatgcataagaattctccaaatcactgtgaccaatatgcctggcaagccatgcctgctgcaatcccaggcaggaacagtgtaagcggtccagattctgcaagtatttagtacagccccacaacattttcttcgaaaggacaaggagctcagtcggggcatcattatatcatacattagaggcgtctgtgggctatacgggccagtcatgtcgctgatgagtcgggacctcatacaaatgacttgcatgtgcgtccgcaatcgcacgcacaagatgcaaggaatgcagtacgctttgctccttccctacctgtctaaagcagtgtttcactgcttccgttatacggattgtgtatatcgccccatgcttcagccgtacaaatgtatcactgcttttgaccatttcttggcacacgagcttgcaacacagttctccacatctctgcctccatcaggcgacaagaatattggggccggcctcgcttgatttttctttttgctaagaatgtaggagtaacaggaggcaaaagaccacgcctccccaagatgcttctcaagcaagcattaaattgaaaaaaaaacaaaaaacataagaccaaaataaaaactcgaaagaaaaaaaacccagataaaacctttccggttgtatttatgtattttaccaaacccgttgagtcgcggttgcttgagacggcgtttactttctaactaaatttatcggcttataagttattcaagcttggcttttttactaacccagggacctccggaagctttcccgtccttaagaaaggcgggttctttccaaatattgggggccctaatggccccgccatgcccgacctataggtgttggtaacctaaaggccccctttttaattcaaggatttggttgtcgtttaagtttcttaaaaaccccctgggtaaatggccccccccagtcccttttttgccaactgcaaattttggccaaaaaaccctaggcttagaaagtaaagttttaaaccctaaacgagttgcggtccaaaatgcgcccaaccttgtggtgggtaccccccctggcaagcgattccggacatttattatttctccctatatgggaaacccccttttttgttaaaactcgctactttatttt

SEQ ID NO: 859 - DNA, 3700 bp, Emericella nidulans
gattcggatctccgctctatgttcaaatcagcggtgagcagattacccgaaactacgtaagttcaacccgctctgaatacctgttcagtcacgtactgaccctgagatcagatttctgaggaattggttcaaaatcgagttcttgccgctcgtcaatcaagtgaaacctatccttttgatcccgtcaagttcatccctcggtacctggccgagtaccagctctcatggggtatccgtggcgacaacaacccggaatatgccaagtacctgggttacctgttggccaaggatctgtaccctgaattccagcccatagacttcaaagactatcttatcgaagtcttccagggaacagcgaaaggaatctacacagaccgcaccatctccaaggcacaacagcgcatgttcccacgaagcgagtcgaccgattcgttgcagggtcgattcttcccgagaaccgaatccagcgactctctttatatgtcacgatagacgcacatccgtcgcaaatgcaggaacatttcacgaatattacgaggcgtgccagcaggtctcagtactttgtttttcagcatagaacaatttccttaccaaggtttcttggtacttgcttttcatttggctatccgtctctagattgcggcgtttggacatcacacgaggtctattgtatcagagatcttttatatacctgtggtattgcttcatttctttggtcatagatatatgcaatagggatcagacaaatcccctttcacttattcgttggtctttcatctcatgaattacattaccgtatatgcctcataatgtcctcgaacgtgagccatgaccctggacaggcacggggtgtacaggatttcctaaaaaggaaggtgcttgttatggtctgggggccccaacgctcaacactttcaggcctcttatcttccctacgaacttaaaatgtcactgttactttaccatcatagaactcttagccagatatgccgcgagtggaagcgtcaagcgatccgtcggacttgcgtgatgcggacaccccagagtcggcctccacacgaagccagcactcattccagctcaatcccgatgctggactgaagccgtatcaaatcaccctcataagtctgattccaacacgggaaagctggacaaagcattaatccattatagccatcggttcggcgataaattctggcttgttgataggactgggggatgctctctcacggtcagtcttctggttatgcaaagatactttcctgacctagacctcttagatcaggagtaatactgtcgcccaagctacaattcaaagtgctaattccagcagccagcctcgatcctgatctcctatacctttgtcggtttcatagtcttcctcgtcctctccgcactaggagaagtggcttccttctcacgagagccaatcaccctacatactcaagcaaaacgattctgcggtccgtcgttgggcttcacactgggatggatgtaagtcgcttcaatttggccttgacggcctggagctcacctggggcagatactggctcaagtatatgatggtcattatcaaccaaatcactgcaggtgtcttggtactgtccttttggactaatctcgggattgggcagaaggcggcgtatattacggtttttcttgctgtgatccttagcatgaattactggagtggccgcttcctcggtcgctatgaagtccttctctcgtcctttaagattctggtagttttgggtcttatgatgctgtcacttgttatcgcactcggaggtggtccgaaccataaaaagggctttcattactggagaatgcctggtgcgtttgccaacgaggaggatagatccgcgttaggagtgtttcgtgccattttcagaacgttccctccaaccacgctatcttacctgggaaccgaacttataggaatggccgtactgcacacgcaagattccaaaaaggctgcagctcgagcaattcagcagacattctatcgcatcttggcctttaaccttgtcgttgtcacgttgttgggaatggcgatcccttacgacgaagacatactagagttgtctatctacacctccaagcgcagagctatggcttttgttgtggctgttcaggtggcccatgttactgtgctaccggatatcctgaatgcttgtatccttatatttgtggtgtcgtcggcaagcagggccctttgtatggctaccaggattattcgcgagctctcccttgaggaaaatgcacctcatttccttcgtcgcgtcaacaaacgaggagtgcccgtctacgctctaggagtaagtttcgccccggttttgtcgggatttttgaatctcttcagtacttccgggcgcctctggacttatcttgtgaaccttgtgaccatgtttagcatactgacatgggtatcgattctcgtcgttcatatatcatttgtacattttcggagagtcaatcaaatacctcctgaaggtgtcccattcaaagcccccttgggtatcttagggtcctgggtcgcccttgtgctttgtatatccatacccatcatgcgagcaatcgaactgtctgatcataatttctacagccaaggtctggatgttggggctttcgtcacatcgttcctcggaattcccctatatcttggtctagtggtcggttataaggctgtatacaaacgcaagaggcaccgtgctcgcatgaaggcagaggcctccaccacaagagtgaggagcttggacactgagacagatggtgcagggctaagccaaacgatttcaagggaaaaggcgctatggaggagtcgaatcattccggtatggttgatatgaggcgacgtcactggcactctgatggcgatcgtgctcgtaaccctgcaggtctagcctcatcaatatgcccaagtatcgaataccggctacgtatggaacgaggcaacgcgcgatccaacaactcatgcaatattgacggccatacagtaatgtgggcgtgggatcctggaaaacagcacaccgatacgaaacattccatgaaggcgtcaatactcacagcctgtatagcatgaatatataactatgtcgaggaatcagagaggagctatcatagggaaagccttagcgacaaatgcacaatgcggtcttatagagcgcgcccactcacactgcttcatgttccccctgtgaatattaaatgttggcttgcacagttttaaagaccttgtactgatttttctaagcgggccccctcctttctccaaaatcgaatcccaaagcgactatcatgatgcgcagctcataactacgacgttgaaactgtctctacagtcatccgctgaagctcctagaagcaaaccaactccatggtgatcatgtctatcgttgaccgaaaacctctccaaactagacaagcatcctaacgcagcagcccccgcctattccgccatctatatccgacctgtgtgattcttagtcaagggaaaagaaaccaagggataaatggtcaacagtaaaacaactatgtacacctccatgagaaggcctcaacaccaatcctccctcgaccttcctagcccccgcgtctactcctccagcagcgtcagcaagtctaaccagtataataaccgtaatttctgcgaagaataaagccagcttgagttttcgacaatcgcgaatactgtggcgct

SEQ ID NO: 860 - DNA, 2390 bp, Emericella nidulans
atgtgtcgcgatcatccgtacagccctccagtcgaccgtggcccccgcctagccgggtcccatcacggacacacagtcgcagcgccggtgggtgttacatacccccggtcccagaggtaggaaaccacctgtccgccataaacgccacctccaaacgagcagaggtgccggaggagtcaattgtgatctctgagaaaggggagaggtcaatttggatgccggtgaaggcattgagggaggacgcgccgccgtgggcgcggtcgcgtgcgagaaaggggacattattttcattgcagtatgatacctatgcactatcaattatattacgaatcaaggaggagaaagagacgcacgattgtagagacatccgcctcctcgcccggctggatgacaagctggatgtgcggcgtggcaacagtattccaaggcttcgtcgcgttcacgtatcgggcatcgtctacaccgaaaataatagatctcggtgagaggatgctgttgagttcgcgctggatttcggcgacgctcaactgttggtgttgccgggggaagaggtcgggattgtcagcggctgacctggccacagcctgtgggccaactagggtgaggctgtatgccaggaacaggaagcctctcacctgcatcttgctgcttggttgatcttattagatcaagcagaggggcaattgatgcacgatcatgacctctgctgccgaacgctgctatatatctcccatatctctacgatgtactctcgggtttctcaccggcatcggcatgctatatcgatacctgattttgcggattacagaaaacagtagtccgtgagctatagaagatgcagcctcagtggatattaggaaaatcaagattcgtcgcgtggagggagggtcttttgctctgtcagctgatgtcagaactagtgaattagggctacgtacgggcctctaagaaggaaccagatacgtggcgaaggttcaacaagcctgcctgacaatcaattggtcttggctgctctttctcggtgatatgcaagtagcagtgcatgcaggtctgctgggcagggtaccgtgcttcactacgtacatgctaagaggtacgtaccctaatcaacccatgctagcgcaaaatgggagtatgacatttcacatccaaatacactgggcttgctctgttaatcgatctatctcgtgctatattgttcccaccgaagaaaaaccacggcaagcactggaccggatgcggagtatgtacctgtcccaaaactagtagccgatgcaatattgcttctgcaaaagcaaatcccgccgtgaatctctcaactacagaaaatatatactccgtcccggaagcccaaagattcgagcagccgagctgatcggtaatagagttggaccatgcctgcaattgcggtgtgcgaagcatatgctgtgtacggtaaggataaaccctaactgatgtgtatttcgttcattgccccagcctcaagacattgccattgccggtcaagtcgacaaatcagtctgcagccaaggagtggcacttccttcttttctgcttcctctcttttttccttcttcattctctcttctttcccccttttgcatcacagtatgtttttatatgtgataagtgcaatcaaacggagtcggtacggagcctttccgcccgcgcaggactaaattgtaaggtcgatcttgactagtatacggtagcccttaccgactggaatatatggcgacgatacgatagaataggaatacgagggctaatctcggcccacgggctccagattcagggctacaacaagggagaagaccaggtgactacaatacacctggactgcagtagtaagtaggacctgcagctggcggcttgcaagcgcggcctgccggaggaagggctcaaagattcataccgtttgatttcaagttcaaccatcagtggatataacgacgcgtgcaatggacattaactcatgatacgatgccacccagccagcctgggagaaagaaacccctaaactccgtgatcacatggaaacccgatcatcccagtccattagtcatgaaatcccgagtaaacctccgtagtcgtgcaaacattagctgttttaacgctcgtcaatctttgcgctccctttagcttccatttttttcatcgtcgctttcatcttcctcacccgtaatctctccccaccccgagctgcgacggctgattcgtcctgactgggtaggttgtggcccgacaccagaaatgctggcagcattactgtcctgacgcgcatgcgagtgtgctccgcttcggatacttgctccatcgccggtcgccgtgctttgcttggcgtaaagactgccgcgttcgccgctgggtgttacaccagatgacgagta

SEQ ID NO: 861 - DNA, 2105 bp, Emericella nidulans
tatcgcacgcgcgaacatattctggatcccatgtacgacctatgcgagtattgaacaagcttgcgtgaatatagcccaacttgttggaatgcagggattaaagccaggggaagcaaaagaccggatcaagtcttatcttacccagggaggtcccggcaaatggctcttaatattcgataatgcggatgatttggatatgtgggttggaggtagcacttgtgctgcaggcctagcggacctcatacctcagcgcgagcgaggccgtattctttttaatactcgcaatcgaaagctggcagtgaagctggcctcttcttttgtcattggggtcttagaacctgatacacagacgggcctgaaaattctggaaaaggcactgatcagaaaggatcttgttgacgaaagagacgaagccatcgctctcctcgaacagctgatgtttcttcctctggcaatcatccaagctgcggcatatattaactccaatgacattggattgtctaactccatcaccctttgcaggaacaggagccagatgtaatagatttactcggtgaagactttggagatgatgcgcggtatcaggagatccgaaacccagttgctaccacctggttgatctctttccagaagattcaggaatcaaatccactggcagctgagtacctgtcgttcatggcatgcttgaacccacgtgagattcctcagtccttgattccccctgccaaatcaagaaaagacaagctcgaagcaatcagccttcttaaagggtttgcatttgtcagtgagcaggttcaagaccatgctctcagtctccatcgcttggttacgcctgtctgctcggaactggttgaggcagcatcggcaatttcaccaacaaataaaaaaaacggcagatcaccttgatcgagtatttcctgacaacgactacgcccaccaaaagatttggagggattactaaccccatgcgatttcgcttctagacgaaaaggagttcaacgaaggactggtgaaatatgcgtacctagttcaaaaagttggaagatgtgtcggtgcagagggcgatataaacgatataaggaagcggctgccataaccgagagtcttttaagcaagcaaagagcaggagaagaagaagtagaagaagaagaagaagaagaagaagaagaagaagaagaagaagaagatgatgatgatgataatgatgcaaatacctcaactctaatcagtctaagcgacttggcaattacataccagcggcagggacgatggaaggaagcagaagagctaaatgtgcaggtctttgagctccgcaagaagtttcttggctcagagcatcctgacacactggttagcatggccatctgtcatcaacgtacgggtggcagtgacgatggaaggaggcagaagagctagaagtgcaggttcttgagatccgcaaacagatgcttggcccagagcatcctgatactctggcaagcatggccaatctagcatgcacgtatgggagccagggacaatggctagaagcagaagagctgcaagtgcgggtccttaagatgcgtaagcaggtgctttgtccgcagcatcctgacactctgcaaagcatgaacaacctagcgcatacctggcactccgaaagaaaagtccacgatgccctagctttgatggaacgttgcgtagaacttcgaatccgagtgctgggctattctcatcccgcttccgaatcctcgtctttctatctcagagattgaagagaagaggttactgactgacgagtgccctcgggaccccagtcaagcagaaagtgttcagcatgctcagttattaggaaatggaattctccagcagtgttgaccggacctcctgatgagaatggaaaatataacccctctcgccagactcgcgcactgtcagcaaacccaatacaacagttcctggatcgccgtcctcttttgactttcaggaacagttctccagaactgagagtttctgcagagtgagctccatgggctatatttttactgcttcagtgttgcaatgagcaaggctcgttcgatgtatgaagcatgattgttgttttcgaaagctacgctaatgatatc

SEQ ID NO: 862 - DNA, 3647 bp, Emericella nidulans
ccacgcattgggagctacatctcagctctgatggcatggctcgctcttaccttccacatcattgtgacttgtttcgttacgtatgtcgacacttgacaatgcacaatcgagtaccaggctaatttcatcacagcgctgtcttcgtgcagggacgcaacaagtttaacggaaacgaccagagtgcccgcctaggtgtaaaggcgttcgcgttcctgtggacctcggtcgcttgctggatgctggcatgcctcatgtattgcatgggcggaactgttggtcgaaaggatcgcggatatagtggccgtaagcaacgccgccgtggtttctttaccgcgcggcaacccagccaggagcgcaacaaggaaatcgctccctaaactgctgctgtcggctatacacggctcgccggctacctagtcgccttctattcgcatgctatacactcaagagtatgctgtaatatgtaaatgccgagcaattctcctggccggaaaaagtcttttcagactattctgaacctttcggtcgacatacatttcaacaaagtatcgcaacgaactcgccacgtcgaaacacgaccgacatacactctcgctgcatgcaatagtgcttttcagcgctttcgctctctactagtgctatcttagaatttgctgagctaaccgtaaccgtgaactctcgattcgtgagtcatattggatattcatggtgtcacgcacttacgactatctactactagttaccctaattttgctaatggaatatctgtaacatagtttgctagtacttgattgcctacaagttttcatcttacgtatttagaacgtcattaggagggtcgagtggaggacccaatatttgtacgcgtaggctatatcaaagccatctaattgttatgcgaagagcgtgcccatctatcaagcgttctattgtggttggacactatatacttttggaaagtcttcgttgatatactcatccatcgtcaaaagagtcattttcgtcgacagttcaatatcctgaagacctcgcgcaatcatgaacgtaaggaactgctggcgtatataggctcttcagagtaatcaaactattcgaaaaggatcattaagattctaagtaaaagaaaagtaacattcacgttcatggcgactcaacagcgccccggacggcgctttggccgccaacttctcgagctgtgatctgcagaccgaggtcggcgttaatgtggatcatcagctcaactttacccttggccttaacgcccttgacggcgagctcagcaatgggctgctcggttttccacacaatctcgcggatgtcttcttcttcttcatcggagtcgaagtcggagtcgtcttcatcgtcctcggctttggacttctcctccttgggcttgggctcgggcttagtaaccttgatctcacgggaaccttcgcagacacggatgaggacgtcgccgccctcggcgggaacactgtactgggccacacggcgggcgggaagggcggtctctgtgttaaggagaggcagaaactcgacagcatcaccggaagtgaactcgacaccaattgccttgctgaggtgaggtgtggcagtcaccataggatggatggactgctcgatatcttcggtttcaaactcctggatcagagaagcctgaatggcagcaccgcgggctgacagctcagatgggttgatggcggacgccagagtggacggggccaaaattcgggtcttctcggggaacagattgcgagcaagctgggcgatcttaggagtgtgggaaacaccaccggagaagataacctcgtcaatgtccagaacatcgagttcagccttcttgataacctgctcgatcaggccggtgaactgagcgaaaaccttgctagacaggagttcgtaacgagtgcgattgatggtagaaccatagtcaattccgtctgtaagagactcaatgctcaaggtggcattggtacccaggctcagggccttccttgtagcttcaccttccatcttcagcttggccagtccacgagcgttctcacgggggtcggtcttgtgcttcttgatgaattccttggcaaagtggtcaatgatgatctggtccagggtagagcctcccaattcgtagtcgtgagcagtggcaaggatggtgtacattccaccacggcaagcaatgacggcaacatcagatcgggtgccaccgaggtcggcgacgacgatgagcttatcagtgacaacagcctctggccgagcgtcgtaggcaagagcagcggcaacgggttcgtgaatgagctgcagaatgtcaagaccagcagccttggcggcagcggtcagggcctcacgctgagcatcgttgaagtcggtagggacggtgacaacggctgcgttgacctccctgccgaggaaatcagaggcagattgcttcagacggagaagatggcgggtggtgatctcagagacagtgacagtgttgggtgtctcgctctcagtgtcacggattgagaaagcaacagtcgagtcgctctgaatggggtgggcggagttatggcatggggtggggtctattgacttgaagctgcagtagtcctttagcaggtgcattcgcttccagttctagttttgagtgccgcaacttactccttgccaaggtagtctctgaagtatgcaacggtgttcgaggggttacggatgagctgagctttcgcttgggtaccgtgatattgctcgccaccgatgtatgagaggatagaagggatctgacggtctagaatatggtgagccttagccttcctcaagagcatgcggcggagcggcaggtatttatggaaatagggcaaacgaacctccttcttcgttggcaataacttcagccttgccttcctgtgagtaaagtcatgtttagcgaactccttcccaattgccaactagaaagcaccaggactgcgggctaacatacaggattgatacgggcaatagagctggaggaattgccaaaagaaataccgatagcaaatcgctcaccggtgccgttaatttcgtcgctcatcttcagggatatggaggataaagggtgtagaaagaacagtatggaggaggaagagagagtggaggggaaggacaaggcgaatcgtcaagccaatcttcaggcggaaaaaaagtttttgatttggcggaacttggaaagcgagaatctgtggctggtgcttatcgataataagtgtggcggtaccaggaacagatttcatgtaccaccttggtccgtcttaactactacagcaggtcgacgtatctatttgacacaatctggaaggagtctgtagctcgctcaactgagataatcgattgtctccagcttcgtgaacgcttaagctcaactaaccattgtcacgtgatatctgataagcagctttcttcgctttttcaaagaccggcccttctatatttctccttctgtcgcttgaattccattgcccacgtctgattgcatgaatcactatgtcttcgccattaatactccttccgggcgatgaggtgcttcggaatatctacccaacaactctgcaccgctacgactaggacagggcctacgtcttctctcacaaccgccaggaaccactccttcgagtcatgtcctcactgctaca

SEQ ID NO: 863 - DNA, 2200 bp, Emericella nidulans
aatagaagaggggagggaaacggagattgagggaaagaaataggggacgaagaataggaaggaggggcaaaagagagaggggaggtaaaataaagtgggcgtaggaaaagggtgacaagtggatgagtggataggcccctcggacaggtggcgggtagataacctagtcaggagccgaagaggggggtcccggaactcaaaatgtcaagttcggtgcaaaagcgccaagatcgtaggtagcgggtaaacgcaggatttacggtatggtgggacaaacgggagaagagagggggggtcaggattaagtcttttctaggcgggaggtatcggagggagttcaagcgtatgccaagatttgcggagcaccatggccaggcggtatctatgagcggaaaaggggtatagtaacgttgtcaagtgtgagcttggaaaatgcgcgcaggagcagcgagcgggggccgtacaagcaataatccgctgactgtaggcctgccaacggggccattgtggagcggtggagtaccttgaggggtcagggcactattggtaacctccagggtgtaggtgggtatactgtgtagccatgctgagacagggtgcaaagagaccgaaatgatacacgcgttcattcagaagcagcaggcgagcaggctaaagccgaacgggtgcatattaaccccatcggaccggacgcgtcgggcagccaactttataaatgaaggctggccaaacggcttaatggcttactcgtcagttgggcagcggccgtgggggaggttgcagcccccagtgctcacatcatccccaagatgcccgcgccaatccacctccatgatttcgcgcctgctccgtcattgacttgttcttgatcttaacgactacgagaccgtccgtcgaacatgataccgtgcttctccggcttcacaatttcacataagcatgatacttcacaattgcaatctaccagccaaggacgcttcattcttactaagctttggtcttctgctttccttcattttagtcaatggagctaacaactctcatcactatcatcactaaagacacatttttctattagcaatatatatgcgatacttaagcggcaacctctttctaccgttatgttgtattcaggatcgtcatcgttcttttgctctcgtaagttgatgctcaagtcaattcctttggctctcttttcttccagcttccctatctatcatccaaagcattcagaagaaatcaggtaggtcctccctaatcaattatcgtgaagcgattcattctctctacagtacagtatagtaatttaagatatcaatgtagcagtcttcgaaaacaaaaaagtcaaccggaggtctagtcgggtaagcagttcgccagttctgaagtacatagagcattagtcttataagttcaccttatactacccataatgtatacttgtaactatagcagacggagtccgttccgatatcgcagcatggaattcggcgttggtcgtcattttgacggttcactgggtctgaccttgtggcgaaagtcgaaggcaacaggatcaggacaatgagcatctctacttgagtcagatttttgaggtatacgtggaactcaggtatcccccgatgtatgtatgtgcaccgcgtatccgacggtaagcaataaaacaggagttttataagagcacataacgtagagcgtagaacagaacgcgggtagcaacacatgtgtccggatagcctgcaaccgggaaggcatgatggattgcaataatcaaacactaaagctgagtggtgactcgaagatggaagaataagagggggacgtagtcaggatgcgcatgcatagacagaccatatatgaaaaaattgaacgcatagaataggcaacgccatctcatcagacgcgatggatcagaatgaagcatcctaccgagtgaactgcggatgaagagacataatgatggggcgggaagagtatgggagactttcagcaaatgaagaactaacacaagtgacctgacaaccagtcttacgccaattgagaaacatcatgatagaacatgcatggtcgagaggagaccgaagagcagcactcataggagaatggaagtacgcgtgtagttctaagtggagaaataccggtaagaaatgtgcgatgagggtcgagacgtgagaggcacgttatatgatagcggtaagag

SEQ ID NO: 864 - DNA, 1126 bp, Emericella nidulans
aagggaccgtgcaacaataagagactcggatggtcaacaaataatgttagccagccatatcgacatacaattatgtattcattcactcggtgagtggattatgatgatacaaaaagtccgtacctattattatacatattaggaatctagcctactctatgtactagaaatagtcacatttcaccttccccacgtcgtgtgtacgagaaaagaatctttcaagccaataccatgaacctcagacctgcttatccaggtgggtttaagacgatcttgtctaacgagcatatgaagaagttctagggagactagctactgatccacgccgtaacgcgctgagcgccaaagcgacccataaactgcagccctgtgctgcccatggggaaatagctgacaatgtaccatagtagagcggcgagctgaaagatggacgagaggagggtgaggaaggtgttgtgaagctgcgaaaggagatatcatcagccccttccactgcattttgcaagtccgagaccgggttggctatgttttgatcatgggactttgctgcttttgtagattgagaaggaacatatgggacatgggatggtgtggagggctgggctgggcgggctggctggggcaagcctcacaagcccgtcagattgagatcctcgcgaaggtttcccggctgcttccggatgacaggctgcatcaggcgcataacgcgataagcaggatgatgtcatgagttgggttgcgcgatactcatctcatctagagcttggaagggcaatgccgacatgagaggagaggggatggtgcagtttgcaagtcaaggattatttcttgacggcaacggcgtgtacatgcagaaatgttgggcggcccggtccacggcattcataaagagggagcaagagacttaccccgatagcaaaatacagagtcatggcgatggacccgaaatatgcggccgtaaagggcagccgtgatcccgagatcagatgtctgacgtagatcatgggtcccatgaggacagcccatgatagcaagaaaagtaaagatcccacggaccacctatcggaccggagttagtggtattaccaggaacgctgtaacagggtagggcaatgtatgcggcaca

SEQ ID NO: 865 - DNA, 2383 bp, Emericella nidulans
  unsure (1)..(2383): unsure at all n locations
tctaacgagctcagctttcatgtgctgcgccacaaagagtttgatcaaagtatgaagtacgattgattgaatttccttctgaagcacagctaatgacatcgtttattattctgtccgacgcccaagggctttcccatagggtaggccaggagtcagggccacctgaccagcatcctccattaaccgacagtcctcaatagccaatacggcaacattcaatctacttacatattcaaccagatctgccggcagggttaaagttccatacacgaaatcccagttctttcagttttctcccaggagtctgccgtatcttcaagggtgaacgaaccacctgactcaccctgcttgtcggagcatgctgccctccagtacctgcccctagaagtcgaactcgtttatccatacttgaagccagataggcggctgtacgggccacccaatgagacgaagattcatcacttctcacactgctatgaacgcaataacaaggtcatgacaaagtcagtcaaaaagcagcggctgaacctaatggttccaccggcaaaatatctcccggaaaggagtgcctaattcttgattgcttatctgcagctattttggttatctgcacaaggttcaacttggatgttaaggcctgtcatggcgaccgcggagtgacacaaaagcccagactgctgcactatcagcggaatactagtagagtcgtcggctgaacactgctcccgcatatgcaaactttctacaggcaggaatcaagcagaatcaggcatctctttacccactgtgacaacacgctggttctaaagcctttacagcttccagttaaagcacctggtcttagctgagacggcaagccattcagaacatctaaacgaccattctggtgcttatattggaaattctaagcatagagaagagaataatgtacatgaagagatcgattgtgggatgtcttcgcgatcaaagcttaacttgatttggtcggtagtcagagatggcaaaagtcagctcattgcatacaccagtgtacgtaatgaacctggccaattacgcaaatactggttccaggcaccgtgtccaggatgagctctgtaatctatgctggctcatgatcatggcatgtagggccgtgacataagcaacttgtatggtgtcgtaatttgtctaaagagcttactgctctagagctaatactttaggacattgcctgagcttctaattactaaggcttcttggtgtgcagatatatattaagacgccctatataacgattcagctacagccccttttaatatactcaccgcttcattatttatcatcaatctcgagtccgctgtcagttacttgaaaacatttgcgagaaatacctactggcaggtactgtttcctctaggatcgttccataaatgccgacccaatgtctgtaatgctgcaaaacgaaacgaacgtacaaattttgtgagcgaggcaacggcaacggaaaagtgaagacccaaactggttccaacaagtgtggacactggtggggaactgacaatatgcaatacccttaagagacttgcaagtgctcggttgataaatggaccttttaaaaattttcgctggataatatctgcaaaagctagacctccagtagtgtatactcctttttccgcgtaccggatggtgctcttcgtgttgttatgatggtttatctaccctctaccatttcttaggagtcttttgattctgtggcgatgaacactgggagtatactctaagtcaaggtcgggttgcatccaatcaaacaattgtttgtatgatcttagaacacgtagcattgttcacagagacaataaatgctaatctttacttgctgtctggtctacgtccctttgccctaatctccatttatatccctgacttttccactttcaatcgaacctggatcgcaatttgtgagaccccaataacactgcttcttggagctccctagggggcggatcactacactctaattcgtggaagttttccaattcttctactttgttttgttttattttctcctccattccatcaattttctatttacttgagggggctatcgctaggaactacaacaccgcggaatctggtcgctgtgcaaagcctgcaattcgtacaatgcactatcacggccatgaagccactgtcgaatccggccgcaagcgaaaagcctataaaatagaaggaaccttaaaatatggtgtcaacgctgaagtacacattttgccgtggcaccatactgtctcctcgataagaagcctcgccgacttcttgtatacattataaaatagtgccggccgactctagcttcttagacccagttttctagaccnaataacggaaaaatcgtcttagc

SEQ ID NO: 866 - DNA, 2643 bp, Emericella nidulans
gagttggggtggatcttgtggataccaaaacctgcgagaggtacgcagtgattctctccctgcaccacacctattccaccccctcttttgtgtcttgattctcgcggcctagccgggattctgccgagcgacattccgcaatcctatgctttgcatgccgctgaccggttctgatttcttagttgcaccgcgagagtgtcctcgtcaagcccgtcaacaccccgatcacgccgctttgcagtaagtacacgctagcgacagctctgcatttagacttcacatagcttccttttctttgttacaattatcctcccattatatactggcttgctattgcaatggctgacagtgacgacaagcgagcctgacaacgctgacctgggagcacgtccgctcagcaggcagcttccgcgatgccatcaaccggtttgacgccttcgcccaggaacacctcttggataggaagctggaattcgcctttgtgaccttggattcgtgggatcttcgggttcagctgccccgagaggctcgagataaagcagttgtccttcccgcgtaccttcaacactcgcggacatttgaccttcgcaccgagtaccagagatggcaaacccaccaccccgaatctcttccctttggtcccagctctctctccaacatctgtgctgcgctcgaagtcgaacccgttcagtcctctgccccgatcaagcataaccttccattccacctgcaggctttggcgcccgcttccccccgtcgggccatggacgaggctgttacactggcccgagttctccgggggctgattaggaagtctcagcccgctcatgagcatccggagattcttactcggccaatggatgcgagagcggatgttcgtgctttcttggcagagcgtacacaggtgcttcatctgagtggtctgcctcacgatactactcagtcagaattggagagctggtttacccagtttggcggtcgcccgatcgctttctggactcttcgtactccggaccagcacaaaccgaccggtaccggattcgccgtcttttcatctcatgaagaggtaagtccaaccgtgtctttactcctctcgtctcacaaatctaacatgaaacaggctgcggagagcctctgcatgaacggacgtgccctcaatgagaaagccattgaggtttctccatcatctagccgtgttcttgaccgagcagcagagattctaaccccgttccccccgtcgaagaaccgccctcgacccggagactggacctgcccctcttgtgggttctccaactttcaacgccgtacagcgtgcttccgatgctctttccctgcgatagccgctaaccctgacccaatggcttacgggtacggctatgggcctccctcgatgatgccaccccacgttggcggccatggtcacggaatgggacactctcgtggcggtaatggtggagtggttccattccgtgcgggtgattggaagtgtggttctgagggttgcggttaccataacttcgccaagaacatcaactgtttgcgctgcggcgcccctcgatcaggagctgctgtcgttgccgactcggcgtttccctccccaatggaccctccgtcgaacttcggccacagctccatgagcagcaccccagcacctggcccatttgcttccaccggcgctgcatttggcggattcaaccagcctttcggagggcatcctgctacctatggactcccttccggccttggaagcgctcctggcgcgtatccacctatggggcagatgacccccggttatggttcaacaaactcctctcatgctgccgcctctttcgccaacccggcaacccaggcggctttcactggagcagaccacacctcctccactagcgcctcgaacggaaacttctatgggaacgatggctctaacgaccctttcgccttcctgtcctcgggcttaggtgggttgactgtatcggatgatgcccattctcgccgaaatggtgctggttccagcaaatcgcctgcataaaccatcgctttggcttgaatgaaggatgatactttttgtctgcactttcttgtttatttgtcaatatggagatgcggatatgtcggtgcacgtttattgatgcgtgtttgtctacgggttctgcagttctggtgcatcgggttgggaggagcaggcaggtagcgtgtcttcattttgcctcctttgtccctgtttttcttatccttttttcgtcagtcatctgtgcgcacttattcgactgtatttcggtatgttcttggtcttatggtttgaaagcgatgttccaaggtatagacgatggtcccggcaggtgggtgctggtggctatccctcgattctccggtttggcgcgatcatcgctgttttggctctttccgtcgacatccgctttacctatccatctcaggcttgagcttccgcacggacccccgagatttttactacataacgcgagccctgatgcggtcctctcgagcatgacattgcattctagatattggttttgtttttgcttttccgaactcatctctgcgctcttcggcaacaggactttttggagaattatggtattgatcacggatgggatacatggaacggactgttgggggtgttgg

SEQ ID NO: 867 - DNA, 1954 bp, Emericella nidulans
ggagagatggaattgtaggtaagagagggagaaatgtgagaggaataagtatgatagagagggatggatgtgagaatgaaatagatgagagagggaaatagtagaagtggtagggggtaaccaggaaagcctccccaggatgggttcttttttaattaggcaaatgctgagttattaagggggatatttcgtgcccccacggacctccaaggccggggccctatatctgcgaggggacccgattaaacgggctcactatgaaggggggttaaagtggactggagatttttccgtcacgccttgtaattcgtgggcagaagttcaggtggcaaaatccacggtgccagcttattggaacgctaccatgaatttacgcgcgctccgatattgcaggttagggtattagtaaccttcaggtaatcatattgctcataccgcactcgttctccgcttgctcggtcatttcgattctgtctggggatgtggtatcgtcctgttcatcagtgatgccccctggactgggaaaaacggcctgaaaaagtatccccctgtcattcggaaggcgaacggtttgaatgctctggtgagctgccagctcggcatgagccaaagccagagcacatgggccgcgggttccagcggtacgcgtcgtcgaaactggcgactgtaatgtggatgtactctttgaagcgccgcttgaaggctgtatgcgcctttgtcccccattatactatcgcctaatacctgctgacacggcaaattgcgttgcacaggaccattcccttggcaagatcactgcggtggcagtcaacccggggaacccggcagactcgcgcgcattacgggtgaacgcgccatcccttctgaccgttttatcaatgcttgtgatcatagtcaaatagagattctacagggcccatagggttaatatatacaaccacgtgccagtcctaaaccaaagacagaaatcttcttgttaaagtctctattaaagcctctattcaagcctgaaaccctattacaatcctattatttaaactgctgtaaatgattgtgttatccaagatagatagcataaactgggagggtttgctgctaagaggggaggataattataataaaagaaacctaacctgtcaggcattaaccccaaaccagataattaacacaccaagcatcaacaacctgataagggcaactaccctgccagtgcccaaccagcagtaacctgatggcagaccacatatagagttattaagattactagcaacctaggtctccaagcaattcattctgtttgccctgacctatcttcctctctgcacctcacttgtaaagtaactgctccattaaacagactaggcacctcgccagttgctgccccaggcgtccccacagctgcacgccttacccgttgcgagaggggcgacactccctcccagctccacgacctggcctacatgccgcatccgagaaggtctcgactgtactaagtcatcagcaggcaaccccggtacaagataattgaaacatacagtcgactctgaacagtatgggatatcttgacaaggacctggtctctgcggggcgggtgatggtagtcctctctttgaagagctcgagcaaccggccgtgagtatggtactgccaatacccagtaagtgatctgcgaagactggaaggaacggcggggttgaagagttggacggttggagagcggaatgagggctggttactggagatgcagccttggcaactagtatgactgcaatctgggttactggagctcgtctgcacatgagaggatctcttattgtctactctattctacagggatcttaggcaatgtctccagccttgccgcattggacctgcagccactccaaagcactccggtctgtaagcttcgactccatcaagtcatccaacaaagactcgccattgtcagtctcat

SEQ ID NO: 868 - DNA, 2295 bp, Emericella nidulans
cacttcgccaagatgcagaaatccagtgacacttgggaagacatcgtcaggcatcatgccatgcagcgccgacggcgctacgaggccggcgaaaagctggaggacttcttgtccgccctgatggaggataaagcgggacaccctctaggccttgaatggggcgaggtctgcgccgaaatcaacatcatgatgaacgccggctctgtgactaccgccatcgccatcaccaacgtaatgtatcagctcctccgcaacccgcagtgcctcgccaccctccgcgaagaaatcgattcggtctacgattcggaagacgaggtggtggcctcctacgataaggtcaagcacctcccgtatctccgggcctgccttgacgaatctctccgcattttcccacccacgtcccacggcctcccgcgcgagacaccccctgagggaatggagatcctaggccagtgggtgccgggcaaaacatccgtcagcatgtccgcgtacgtcgcccaccgggacgaaactgtctttccagaagcatacctgtacaagcctgagcggtggttgggcgaggaaggcaaggcgctgcaaccgtatttcgttgcgttcagcgcgggcgcgaggtcctgcattgggaggaatatctcgtacctagaacagacggttatccttgcgacgctggtaaggaggtatgagtttgcgttgccgagtaaagactgggaattgcagagggaggagacaatgaatctgatcctgggagggatgccggtgaaagtttggcggaggcaattggatggggatgcctagctgtcttgccttctctctccgtcaggggtttcttcgttagattagactttagcacttcgtttatgatgttttgatgagggatgattagcgtttctaattgaaatctaacgcatttttgttctgcactttgtactgcatattgttgttttgtcaactccctaggccatacaaagacaatctgcaatttgagcgtcttgatgatagtgcgtaatctctcatgaggtagtatgaagcccttatgaatccctcatggtagacctatgccagtgaggcaggatctcacttgcacattgtcccggctcaatatgtgtcaaataggtatacctcgcatcaccagcttcatagtcagcttaatccatgaaaagagaggcaatgagccatgaactacggttgtagtaacttaaggcaattgagtatgaggcgtgaggccctgaatatccgtgtcagtagccgtcaaggcccctggtgtttgatcctccaagcctccaacatccgacgtcacagatcccacccagcacccatcgagaacaacatgacaagaacctctggatccactgcaagccaatgagtccttgattctgggcgaacttagaggtatgcaagagccgatctcgtggcgaggactgcggactaaatttccctttacctcccccgcatacctacccccgcattctaaaggggaaacattccccttcttatacttcactcgatccagtacgcagagtcgcagcagacggtataaatatggctgtcaaacagccagatcaaggcagccagtacaggcaagcaagatggcctcccttctcactctccagacccaacccaacacaatcgactacatcgccctgaccttcctttcactcgtcgcaggcacatttctcacccggggcatcctctgggaccagccagacccctacagacatcttctttacgaacggcctcagctcaaacacggcattggtactaccgcaaacagtagacagcagacccggaacatcgcccgaaggttggaggagacgaactcgcccattgtcgtcttctggggctctcagtcagggacggcagagtcctttgcacacagacttgccagggaaatcaccctgcggtttggacaaaacacccttacagcagatctgagtgactatgaccccgcttcaattgcggagattccctcatccaagctagcgatcttcatcctctcgacgtacggcgaaggagaccccgccgataacacggttgagttctggaactggctgaatagtaacgaccggaacgcggagaagaagcagaagcagttttccgggttgcgatactttgcttttgggttgggaaactcgaactacaagttctataaccgggttattgatcgcgttgtgaaggtgcttggcgagcatggcgcgaacgcactgcttcctgtatcaagagcgaacgatgctactggctctactcaggaagacttcatatcatggaaagaaagactgtttgcattcttccgtggga

SEQ ID NO: 869 - DNA, 4644 bp, Emericella nidulans
ggatagcctcggcaatgatccaggctagaatccagaggcaaagagcaatgacaacccacgagccgatggcgacggcgtccggcttgtgcatgcggtctgtgccgcggaagatgcggatatagatgtatttggcggcaacatggccgtaaatgacacctgcaatgaggatctgaaagttgttagtcttgatgtaatcgggacatgtgggatgccgagggtcatacggtagggagggcaatgccataggcaactttgctgacgattggacttgcggatcccagagcgggcgaggtaacgtctgcgccaccgtagcggtagatcacgacggccgcgatgaggtagagagagatgtcaattccttgaaggaggcagaggcccttggggaagtcgcggggatctttgagttcagcagcgagaccgaaaaaagcagcgtgtccacctttaggatcattagctttcttccttttcttgaatggaggatgttgagatcgtacaaaaagcaaagacaatgttagtcacggcagtgaagccgtggtagaggtccgtgtcgacgacagctgcagtattgtttacccctggcttgctgataccgacgccaaccatgcagatcatgacggccgagaagatactgatgaacgctgtcccgacaaggtcagtaaggagataagattgaaggaggcgatgcacatacagactagcgagagccaggacatcttctccagagtgcgaggcaagcacaggatgaacgagacgatcatgcccacaacgccaaagacaattgagcacgtgccgtgctcagtgagggtattcatagcgacagtgaacgtcagcaaatggctcgccatgacgaagacgaagaacagcatctgcgcaacgcccatgaactcgcgaccccatttccctgccacgacctcaccggcgtctgccatgttcgtaacgtgcggaaaccgattcttgaactgtccaatgacgtaacccgtatatgtcgcaaaaagacccagcgcaacgagaataatgatggctctgtaaacagtctaatcagcgaacggttcttgtgatcattttgtaatccaataggagttttgggactaatctgagacatacgggacaaaacccaaacctgcaacagcggcaggcagcgacagaacaccaagggacactgtttcggccaccataagcagaccgcattgcctatgaagtaaagtcaaaatcgatcctctatctggtcaattagaaaatgttaaagacgttatcacgtaccaccacttcaaagtcttgtatttgacttcggcaaactcctcatcgccaaaggcatctgatgtgaacggcgattgcgtgtatggagggggcgagttctccgtcttcttcacgtcatctctggtgaaagaatcctcgtcggtagtcacgttcttctctgggcctgattcttcgtgtccatatgggaccgacgactcagcgttttgagccatgttgggacaacagcgtttgatgggaaaggatcggcaggcgtaaaggagtgtcaatcgaggaaggacgaatataggagaaggaacgatcgttgtcgtccaccggccggatatatgaagatggagagaaaaggatgactgatgccgatcgaagaagaaaaggcccagatcggagactaccgatgaagctcgacggcgttgatactgctctgagcagtggcagatgaaaggtcggtccgccaccggggcatctgcggaccagatcgagtggttctggtgggccaccaccgcgaatcgagagccgcgacgtaagagaaactatgagaagctggggaaattttcttcaaagcctccgatgccggggactcctggcaagtcatcagccgttcattattaatttcaagactggatctcagaaaagatcagattcatctcagatatcgtcggaagttgatatcttgtttctggaatagaggagctatcaatctgcgatcggcaacatgacgttcgcagaagtagaccgcattggtcgaagacgaacaagctcggaatttagattgtggcgtgcagccttaagagagctccaaggcctagaggccgcgctggaagtggccggaatcaggcgcctaactccggctgccttctggaatccttcgcaaaggtctccactattcggtatggagctgtgaaacagaacacgtactcgagtactgtgtagaatttatgaacattattattagtcatgactagtcatagcctgggagcataaataattaagctatactggccgcgttatcgagtccacttgagtcaattccaaaaaggaagtcggagcgagcggaggagtccgtttctgtcaaggacagaaactgcgagatgcggggttcaaggatgaaggatgcagtcgttggagacgcatcccacgccctgcaccccgtggtccaatgtgacactgctgacagttaaccgtgccactgtaacaagaccatgcatctacgcaagcatgggcctgagcatcagcagtaaccacatactgtctgttatctcccacacggcagatcatcggctattgttgtcgaggcccttggctgcttacccctcttaagatttctaatttgagctcgacatgaaacaatgcagtagtgcaaaactaccgcagagcaaaacactgcagctagaaatgataagagctgtcgtttcgtcactgacgtgaagggagatctcaactttcggtttctgattgttcgaagcagctggccatgactctagcggagcacgatgacctgtccccgcattcggaaggaacgactacgcccgacgagaacgagcccaattcaccggttgaagggacatacaatgatgcccgtgaagtgtatggcaagatagcgagcacgaacttttcaatcttgtgcgggggtttcaacggtatctcgttcttgatttatgatttatattactcttgtacttagctgatcgatgacgatatagacgccgcccttggtcctttaatcccttacattcagccgtggttccatgtcggtctgctcgaaatctcatacatctacctcgtcagcttcgccggcagtttcagcgcctcattcgcgaatatccacatctgttcgcatctaggaacgggagggacgctgcttcttggcattgccatacaatgcaccgggtttacattgatgttctgggccccctcgttcccgttcttcctagtggcgtttctcttcactggattcggatgcgggctcgccaatgcccaggcgaatagctttactgttacggtccgcaactcgcatcgttggttgggaattcttcatgcaatgtatgggatgggcacgatactggcccctctggttgcgaattcaattgcagcacatctatcaagatggcagatttactatctgatctcccttggccttggtgcgacaaatgctgcgtttgcagcttgggcgttccggcatggtttgttcaagccgaacagtgagggagccaaggaggctgcgggacgggagctgcgggagacattggcccatcggtcgctttggtttctcaccatgtttttcttcctatattccggggctgagataaccctcggcggtgagctacctagtttaaagggagccaaggatgcggctgacagttgatacaggatggctggtgcaatttttagtcggggtgcgtcatggtgaccctgaaaaggttggctacgttgcgtccgtcttctggtgcggcttcaccttcggccgtgttgcgctggcagacgtgacacatcggtttggcgagcgacgcatggtcttcatatacatcgccgtggcgctcgcattccagctcatgttctggctcatcccaaacattctgattaatgccatttcggtttgtttgttaggtaagcgagcgcgggtggtcgaacaccaatgcgtaacgagatatctgacctgtatataaggattcttcatcggcccgttctacccagtgggactctacgttctcacgcaggtggttccacaggagctccatctcggggcgataggtacgtgacaaacatccaccatcccaagtatcttcaaactatccagtctgacccgcgcgatagggtttgccgcaagctttggttcggttggctgtgctgcattcccgttcttgacaggagccatagcctctcgagcgggtgttgaagtgctgcagccaataatgataggtttactaattggcatagcattcttctgggctgtggttccgaagccaaagcgcatccggttgacttgataatgataagaaagcgacttctgggacattagcaaatttcgacttcgcactggctgccacatacacttacttgcatacgagtctggaccttccgcacttgaacatcttgctgagaatagataaagggtgagacctttttcaatgacatagttagcatatagcatgcaaagcatttgaggtattttggatagaaacagctatttcagagagaagattagagtcgtcaaagccttacacatgtatttcatggtatggcgttacgactaaggatgactgatacaatgatttcatcatgtaacggagaacagaacaaagtaaaatggaatgacaactcaccacaggattcaaaagttggaagagctcgtaaacaggcgctgatagctggactatcgcaaaagaatcggtg

SEQ ID NO: 870 - DNA, 4395 bp, Emericella nidulans
ctaagtcggtctaagtataactcggacaggcactaaaatgaatcgctagtatatacagttggcccgtagctttgttgaactaccgtaccgccggcataacacccgtagtcatgtaccgtaggatctcgttgatcggcaccagcggcaaagcgtgctcccctgctgcagcgccagcgttatcaggcgcaccatcaatcctccctccaaacccaacatccatctcttcgtcttcttcctcgctctcatcatcatcctctaaaaccctcttcaaccccaactccgcaacaacctgctgaatccccctctccttctcctccaacgtgaaattccctccccagttcctccttcttgcctctgagttcgcctcaacaggcgcccactcccacagcgccgcgagatcatcttcgctgagcctacctccagcgccggcgcccaccacgcccgcattcatcccagctgcagaagccgatggcaacgttgagaacatccccgtcgaccctgaggatccctgaatagcggaattatccgccttccgccctctgctcacccaatcctcgaccctgggatcaagtttcgtgcgcagaagctgttcgagcgtattcgcatgcgttttggtcgggaattccggcgctgggagggcagatatactccgtagaagctcgtggttctcagagaggtgcgtggagatggattggagattgttggagatgatgcttgcttgcgtttgaagagaggacctttgagcggtaattgttagtcaattgctagaaaaggattgaaagaagcagggcttaaatagaaaatacggaccatgttggtaaaggatcagattggtttaggcttgtaatcaaggagcccaaagagtgcgttagttggatgaggcgctggcgggattgttcgagggttttaaggtggtcaggggagagggtcgtcattttctagtcgcttggttcccagtcctcactaataggagtgacggtataagtttgaagtgtcgtagagggattaaatagtgtctggtttggctagatcgtgacgaggaagagaaggggagttgaaaacagccgcctggaattgaggtctgacacttgcacggcgacccaccacattcgtacctatgcgatacatagtggccccgatcatcttctcggtcacccggaatgccatgacatgtttacctgcaccatgatatatttagataaaagtatcttggtagcacctcttggaaggtgaatatactaataatattctcttggccgtgagttggaggtgcagtagcctgaaacacgccggcgcgtagtccgcctaggcgccagtgctgtggaatttatagaaggactcaccccggggtttctcttgctcgtctccagacaacatcaatctctatctaccattaaaaagcgtacaacttgcttcatacgttccatattaacaaattagtcttctttcaagggtatctattcaacattaaacagttggcagcaggcatgactttgatatacgtcaaaaagtgggatcagggtacgctcaagcacggtataatgatggggatggagatgaggatggggagggacatatccgggcccgacacgccatagagctatgcaattttaacaagaaaggcagttagaacctgactgggacgggctttgcactcaagagggagcaacaaggcacggtgacgacaggccgcaattactcctgcctccccttgccattattcggcggtgtctgctgaaaatacgtttgctgctgatacggctgcacttgtgcctgcggcaccttctcttcgggcgaatacgccgtcgacggggacgcaataaccggttccacgacctttgagtaaccaacctcctgagagcgcccatctttatcaataaagccgaagccgaagcccggagactgcgcatatccatgatgcggttgtggtgagtacacagtgggcccgtacataccctgcgcctgcgcggggtactccattgcccattgtggggtgctaattccagtgtcgttccagcgcgcgtgaaggtgtgcaggctggcgcaggcgacgggccttcttacgacgggagcggatgaagaagaaacaccctagcgcgaggatacagagcaggatcacgaagccaaggattggcatggcgattatgagggctagattggagttgtcgccgtcaccgtcgccggagatgaggtctgccgaggaagaagggaggagcgactcggagaagatgcggctgggtgtgatggggaattcttcttcagtgggtgtttcgaaatggcagttgtaacggagagattcgaggactgcattttgttggtgagttaaagatgtgggaatggggacaaaggtgccgacgtacagttggccaggtatacctggggcctcacttcatcggaggtcagattatagcacgcattacaatcggtgatctcgttatcggcgaacgaggcggtatcgcaccaggtctcgatattctcgccagaggggctgtccagttggtattcgactgatgattcgatgtctttgcacgcaactgggcaagagttggagctgttggtcaccttctccggatacccataaacgcatgacgagaaggcaaaacgaaggttgactgtcccggttagtatgactgtcagttgatccagaccatggaagagcacgtacaaagaccccattcaacatccgactgtcttgacgcatcgtctacaaaggtgctctgcagctggcatgcaatgcaaccctcgaacttcctccctgcctcggtattgttgtactcgctatcaaagcagacgatctcggacggcagtgtagcattggctgggctgcaagcactttcacacggtgagcctggcgttgtccgcagtgcagaagcgagtctgagaagaccgaatactgtccatctcgagatagtcctcttgctgaagcctgagggacccatcttgagctgaccagcgcagcacaaatcaaaccgcagcgaatctcaaacccagaagagccgcgcaatcgttggcagacctttctggcatcgaatccgaccttcccttacagaggagaaaaacaaggtaagcgagcgaagagcacttgatgtatcgtagaattataatagccttatgaggagataggcgaagtcttcgtcttaaggcaaggctccagtcgcacgatcagcgcccaaccgacatccgaactcgattcacttgctgcaactccaagcgaagtccaggttaccctggcagaaaccaaaattgataaaaggccgggtggtgcaatctgctccaaggcgcaagcttggtccaagacatgaccggtcagtggccgtcgttcgatcacagatgaacgctgggggcataaacaatagttacgcgcacactagcgcagccatcctgcccctcaccggggccagacatccggccagcagctaatcaagaaatgagacaccggcaggggaccgcagaggatgattggggtcgagtgtgacgggatgatgggggattgggcgtgggcgtgggcgggaatgtgatgtgacaagagatgcagcctggcttatgcgcgcttcggcaatctcattgggctacgctcgattccctaacacagtagtcggtgacaaggagcaagcgaaaacctggacttcgagtgccagtcaaaggattctaatctccagagcatattcacctgccaattgaattattggagggcagacgaccaggatttggtggccgactgtcagtaacggaagacccccgccgaagtcgtcacggaagacccggggccagagcaattattaagctggagtggactagcaataatgagtagatttatagatcaaaatacagggtttatttgcttgaatctggtcaggtctgacactccacatgcccgtacctgtcatccgtcttgccctcgtcccctgcttgtaccacccagtattcccaagtacagtcacaaacaaccacccaataaagcaaaacgccactatgcaggccgtatcttcgcgcgtggctaggaaatcaatagcgaaaaatcaaggtggatcgcaacacaaacaacgtggacgctgtccaacagcggatagttccatgactagggtctccaaaacactgaaaagcaaatatcaacaacaaataaagaaccccccctcttagccatacagatcgtcgtacgaagggaccagttcctgcgatgcagtgttcgggaccgcgtcacgaacctttagccccttctgaggcttcttgtcaggcagcagttgtagcggtgtatgttgcgcgagtcgaggatcgtcggcgctgaaactggttcgctgcgagctcgccgtcacaggcaccgagaagatcgggtctggagtcgtgctctggccgctatggcgccgcatccgggcactgacggctaatgccggcgata

SEQ ID NO: 871 - DNA, 2746 bp, Emericella nidulans
gttcagagttcctcgatctaaacgatgtcatagccggtgaagatccacgcagattattccaggatcaagcatgaccataatgacaacgggaaatcgcggtaatctactatagctggcttgtgaaggagctcagatatacaacagaccagggctgatgaagatcttacagattgatcataactgtctacaccatctaaatcccagatcacgttacgcgattgaagatggcaatgagcggctgagagcaatgaaatgatatccgcgacgaaggcaatgttcgcagagttcggtaatacaaactcggccaagcaggataatgtgccagatgtcgattcattctctgaggaatctaaaactggacacatcgccgtgcccttcgacaagcttcgtagacatcctgggataatgtcttttgtgcgtatgttcataatattcatggattgatgagtcagaagctgaaagctgaaaggctggagtagagatgggtcttggcgcgctaaccagattaagcggaggcggaggcggtggaaaatgttcaattgattcacacaaaccatcaacccgactcctatcgccagctaagctcaaccccctcagcattattcaatatggcggagtaagtcccatggttactgaatatgggtgatcgatcgcgtctaatatctgaacaggaaagaagtaacccccctcacggccgtcaaggtcgaggccctggtacgagaattccgtccaaattccccgccatcattgaagattttccgcgctgtgatatgaggataagaatgaagctcataccggaataggttgtgatgaaaatcatcaagcactgctcccaggttttcccgacgactgcgaccggttcgatcgttggcatggacgtggacggcgttctcgaaatcacaaacaccttccccttccctgtggtcgaagttcctccggagtcgcactttgacaatgccgctcccaacccggccgccgctgctccccgtgcgaaggccaacaccgtctaccaggctgagatgattcgtatgctccgggaagttaacgtcgatgccaacaatgtcggttggtacacgagcgccaacatgggcaacttcgtcaacatgaacgtcatcgagaaccagtttttctaccagaaggaaatgaacgagaggacagttgcgcttgtccacgaccccagccgcagcgctcaggggagcctgagcctgcgcgcgttccgtctttcccccaagttcatggccgccttcaaggacaacaaattcacttctgacgagtatgtttcacaactggcacggacgcgagtaaagctgactagcgtaggctgcaaaagtccaacctaaagtaccaggacatcttggtcgaactccccgtcgaaatccacaactcccacctgatcacctccttcatccaccagctccaaaaccagacccaggcgacccctgctgagattcccacctctctcgccaccctggagtcctctcccttcgccaagcagaccatcctggcgcctaacttcgacaacctctccctcagcatcgaccccttcctggagaagaactgcgatctcctccttgacagcattgagacccaccacacggagacgagcaacttccagtactaccagcgctctctcgctcgagagcaggccaagatcacagcctggcaggccaaacgcaaggccgagaacgctacacgcgcaacgcttaagcagccccctcttccggaggacgagtggcaacggctgttcaagctgccacaggagcccagccgccttgacagcatgctcaatagccgccaggtggagcagtacgcgcgccaaatcgacagcttcgtctcatccacgacgggtaagatgtttgccgtcaagggcaaccttctgcccagcgagatcgccaaatgatttactggatgtttatgaacggggatctgggattcatgcatgaccttacggcgtaagggagggaaaattcttgtactgactgttaatatgtcccttgtgattattccgtgacgggtagagctacggaatatgctagagatgctatctacatgacttgaatactcctaccactacactcgtaggtatacgccagagaagttctctttcactctcctcttccccagagtagcatcagccgctctggaccggaagccggtgttcaagcgccggccgacaggtcctacgagcgagagaggtctctgtagatgaccaaagataaattgaggcacccatggatagctcatcggcttgttcttgcctttaagtagaccaaccggaaggcaccagcttggtctatgatatgtctttaaaaaataaagtatttgtttcaattcagatcttgattcctagggctacagcgtaagaccctgactaagttcggcttcggacctctacgagtctccatcatccacgttcatttgtcctttcgtcagggaccctgagtatgtctacgctcatcattctcttattcagtctcgtgagctttataagatagctcatagtgcctcacaagttcgttagaacgttgcttgcgcaaaataactatccgtttttccatgcctgatgagcacaagctcagcgagacgctagccatattaccatgcaaatcaccgtacacctaatgttcggggtactgcacctgtgagtaccgtaccgaaaggcttggctttgacctcttcgcaagctttaccagtattcaggctggtccttataacgcttgcattcttcgcaatggtaatactttgg

SEQ ID NO: 872 - DNA, 1426 bp, Emericella nidulans
gccatgctgtcgacgagggattcgatggtttccgggcgctggagattatgtctatcctgaggctggatgataatgtcgcgacgccaggagttagggtctgaatttgagtctgcgagagggtacagcgcttgggatttcagcggtagatctttgtccgcgggcttcttgtccgcgttgcctgcggcgagcgtggagtcgggataccggtctagctcggagacgtgcggggtgtcgatgtcgaagtaggtaatttcgggggctaggccggtgcgggtggctagataggttgcccagcaagttttcatgagttctttggcgaggaggatttcttcgtccttacggcgagtccatgcggcggactttttggcttcagagagagggattccttctgtagccccgagagcaattgttccaggaaggaagcaggcgaggtggtccattttcggggttagagggccgtcaagaccggcctgtcgctcgcccaggacagtcaacttggcattcttggaaaatgtgatgaggtgtttgcgaattccgacgagggcctcgtcccacatgtccttgtatatttcttctgacgtctgaaggtattgcttaacaagatactctgaatgttattagcaccgatctacttcactgctttgacatcacgtaccataataagagtcgcctctgctaccgaggcgaatgttcgctcccctgaacgttcccgtatctggatagatatagatcgggagaaggccatcaggggcttgattggcgtcaaccacttgcattaccttctccacaacgcgccagtactcagcctcgcccgtcagtttggctaggtacttgaattccagttgtacggaggtggcctcagccgtagatgaggcgccgcggtctgaatgcgacgggataccagtcgatgtattgaggttcacactggcatacggaatacctgtttccgattcgaaagccccaagtagtctttccgcaaggtcggttgccttttcaatatagagatcctcccctggggaaccaacgtcgtcgtcgggaatgggggcaaggttggaatactccgtagagagataatgagcagagagcagaccaccgagcatgcgtattgtcgtttcaaaagtgctcacatcgtgatcctggtcatattgtagcgagttatgaatccatgtgcgcgcatgttgtacacgagatgtcaagttcatgatcatcaacgtgtccagtgcatccacaatctgccagcccattccaccctcgatcatctgtttgccctttttggtgaccggatgatactcgtcaaagccttccagcggtaaatgtcagtaaacaattgctctccaggcaggcacgtagagacataccccaggcatactgctcgtaaccatcccaactgacaatgaaaagattccggaccttctctcgttgtgct

SEQ ID NO: 873 - DNA, 4531 bp, Emericella nidulans
tgtggcgcgaccgagggtccgctgacagggaagatgcacttagcgaaggggcatggatcaaaatagattggatcatgagatgcatggtaactgaccaggacctgagaagagttgattgacggatctctcccggatggatcaagatcgagatcaatccgcaacattgcaacgatgcaacagtgcattctcccagagaccgggatactgcatgtggaaccgcgtacatgcttggtgcatgttaagtgtgaagctgcatatcaggtttcgtcatcgttcatcctcgacaactttcaatatggtcttgatcctggatacaagcgccatgaaaccttaccctgcagaataagatacgcatgtccccacaagtctgctccagggcctagacttcgaacttcttctccagatcctgctgcataaggctcggctgctggggtctgcttgaacttgcaaagcccgactccctgtggagcttcttatcgccatatccccatcggtgctcgatactgcacctgcaccccgtaccatatgcttccgacgatccagtgagccaatcagccagtcagccaccagcgggtctgcgtacttttcgagcgtccgcaacgaacggagacaaagacgggaaatgggggcaattacgcgtcgatggatttcagggagacttgcagacggggaagaagtaggaaccgccaccccgatcagggccgacgatggtactttgtatgtctccatagtggcactgggcaagatggtttacgccaactgtttgagacggacaaggatagcttcgctattgctttcgtcccctttcccttcttggatggttggactgattggatatagtagtcgacatactaaagcgctgtagacaatagctttgttcccaggtagttggtacaggaagatcactccatactgaagattaaccaaccataataccatcaataccatcaatataccaccggtcagcgatttgagaagagctcagtgcccattatatgggaggaacgcagcgtgagaacggcttgtctctgggaccatgtactccgtagacccaactgaacagcactaaggcagtcacttcggctccatccaaccccgttcctgaattgtcctaaatcaggagatcagcatggcgtcgagcaagcaattgaactcgggtcacccctgctagattatcattcttcactttgacaattggatgagaactaacactagccacgttgtcaagggcggcaatgattctctgacccaggtccgcgaagatagcatggaaccccgtccgacaaacctcaacatcctagcccctcatccactgcactcatctgccgcgaatgaaggttgcggtgggtaatcataatagtagctttaaggctgcagcgcggctgcagaagcgtcgtccacgcgaatggaccagcagcttcaaatggagccggaggttgcatccatatttggtcctgtctcttaccctgcagcgtctgtgtgtatgcagattctgagcggagggatcatcgtctttaactcccgcatatcgataaagtcgcgatgattctactcatcagaacgggtggagatttaacatcaaggacggaagtcactgcgcctaccctgaggccacacataacagaaccggcgacttgcatttgagggcttgagctggtactaattgtgaagctagagaagagcgtcgacgaagttactggcggttattgtcgcacttgtttttcctctttcttggaagcgagatctgcagatctagcgatgtggcgcgagtattgcgctaccgtacggtaactatcaattacccaaaatggcagatacccgcgcgagcatctcctccatgttcagtcactgttgatctcagcgcttctaggtgaattggcttttgtgcacgggcttgtatgctgttacccgtaggtgagcgttgcctccactaaccgaagggtctcaacgtctccgccgcctgtggccgtctgtcggttcgttatcggtaaactcagccagtaatcttggacttgactttgtgcggcattcaaacagtattcttacatatgatgccacccatgtagttcaaaaggaaatgtggatagttccgatacttttgcggcattaaccgctccggccgcctagtctccttagtcaatgagttggcaatttgttccatggctttgagatctcgcagcagttcgttggcaataattcggagttattacccgcatgaacctgcaaatcattgtcgcagttggtcaggtacgggccaatcccagccaacaaggatcgagaagctgtgggtgtggattgacttgaaccgtccttgcacccactttccaagtttcaacaaggcctgtgtggcaccataagcgtactaaacaatggcgtctccggaatgcatgatcctgtggaggcccggcccggcggtagacgattgagcgtgaaaggggttggatatatgttccggcttagggcaaggatggtgatcaatactctgtactccgtactggtttaactttgtttcctcggcaaaaagtacagcgccatggccctgggtccgtgtaggtttcgggaaatccaaatgctcggtcatggcactagataggctaagggtgaacagcccctgtgcgttcaaagtgagcttgctgatgccactgaggatgacgcaatccgcaaaagtccgtaaagcacttaaactcaaggtcgaacattgaggcttctcagccaatgtcgattcggactccagaacccggtatatgcaggacgtctcagctgcacgaaaggtccagagttttacttcctattccacgcgaaccttcaatagagacgtatgatccacgtttgagtttctgagttccattgagcgctcaggccgttggcagcctcacttccagtaatccccttgggatgtcgaatcctgaaaccgttgcactggcccaagccgccccatagggactcggcagaagcgagtctaacgacagggatcccacccgtccgtctggttctgggtccgtccgagcgccatccaggaggttcgggagctcccccagaaggccaaacatccatctttgctaagacgccagggctaaaaggataaatggctttgagaagcttcacggacagacaaactcaccttagcataaactctcctttccactcatctggcggaaagaaagaacaggtacctttggtaggcgtgtccgagcgcagcaatccccttcgatcacactctgtcgctgtcaagcgcgatttccgcgtagtcagccactaatttgcgatggccgaaatgaccaactcttaggatgcccagaccaaaagatgacacctgccatgattaattaccaggtctagaggtcaaccccagggtccagaccggcggcgctgcgagtttgacagtaggagggccgcagccacggccggaaggttggtcaatcattattcaagattgacgatttcccttatgacaggtgattgttggagacggcggcccggcctccccgcgacgctattccccaccgatcaatggagcttcgaagtgcgcctgccagtagaatcaaccatcgagactgacgcttaccctttgaggactgcaaagctccattcaaagatgtgaagaaagagattgcagccaaagtacagccttttgtcatcgcggggtcgatgcgcgttgctcggacagtctcacgaaccttggtgagttgctgacagcctgttgattcgattccattgtttggcgaacctcaagaaactctcagggtcttttggttaattcgcgctcacgacatatctctaggatccaagctcctgtcagcccgtcagggcactgaggcaggttttggagctatggtgccaacgttcagatctcacgggattggggccgggatctttttcctggcagccaactctgggataggaatctccttcgcttttctctgtcgtaaatcagaaaccgagctcgccaggatgacgcatacatcttcgcgaccgatcccgattctgttgaagcgcggtagcgcacatatcaaggcgtaggcagactgcttatgacgggctgccttagcttgtttgaaggccggacaaaacaggttgtcttattcaagtcttctaacctctcaactgcaccttactcatgtagagaaccagtgatcgctaagaatctgtgatgaggatctgtgtgtcaggtaaagcccctatgatctacgcttgcgcggaagaacgaaaatctccgcgggtgttccgtttactttatcggagtcacagtggagctctcgctgctcatcaaacggtatgtctccagagtcggggttggagatactctcaaagaaaacagtggtgtaaacgtcgactgagtctcgtggttgcaaccccctcgacatgcacagattctgatcccaggatgatgccccttgggcaccaattcgatagtctccaaataaccgaatgccagttgcccaacttttagccaaggcaccccactaagattttagacaggcaaatcagcagatcagccggtctaaacgaggccaattaggaacgcggattc

SEQ ID NO: 874 - DNA, 2711 bp, Emericella nidulans
gcttacaattgccccgtcgcacctgtgacgcattcccaacccattccaacatgccactttgaccataaggttaaacgaaggaatccagtcagagcggcgcacagcgttcaggtagtcgtcccgtaccacggagtgctaattccaccaatttcgacgcggcaggagacatcctccggataaatagcagcggttgctatcatcccacgcaagcacggttacattcagtatgtccactgggcctctgattcgttgccagcccattggcatggcttagcctctcagttgtccacgagtcattctgtgcaactgcaacggcagcgaccgttcgaacttcgagttgttcgagggcggcatcccaggtcactattagacctcgtcggccagtcagcactgcggcaatgcaaactccaggctgatttgagactgcacctctccaggcgcggttagcgattactccagcgtgttaaactgagaggagatggacggatttagtgcgtgatttaacaaagtctccgactgggcggcgctcttggcgggcgttcctaaatgtggagcaagcaagacagccatcgcgcgctgccacccggcggtaaccaccatcgacaaaggatgcctgtcatcttgtctccagtaagcttccagcctccatgggggaggagtcgtctcatgataccccaggtattctggcagagacgtcatacaccgaaccgcgcgggcctgacaggttgtatcgcactaggaaatccaacgccgaaccacgtggaattccagaaatgacatgaatgcgtcctagccaatcatacaatttattgcgatccagcgccaattgaccccaactttgtggcactagcgtcatttcgcttgtcactgggtttgtcagctctacgcgagatctggcggtgcggtcgccgcgctattgcaggtcgtggaatcagcctattcggaggcatgggtcagcctgaggcttgcacttcgtaacaagtttcaaccagcctcaaccagtcttaaccaggactcaacgcagtcgaatatttaggtatcattaggttatatagggaatctcgaagtggttaaattgtggaatctgaagcgagatcccatactactagtgcaatactgtatattgcacagctagacagataaacaacccgttgctccgtacggtttctgccgaaagagagtgtatttgactataaaactcaactcggaagcagagtatggggtaaacaaattgcaggatctgataggtcgacagtatcgacatcttatgcaccgacatggagaacctcgctccactgcgtcaattatgtgcaaccaaccagcaattattcatcctgcttactatgcatggcgtcagtgtaatcaggtttatcgacaacttcctcatggcttggttggagatcttctagaatagatcagatcaatcgccttattggaggttcaggtacggatccagacaaatcgcaggaacatctggcggtctcgcactggccgtatgggcccacaggtcgtttaggtatcaagagtcgaaaatcacgtaaataagcattttcggtgtatatactgtggggtaatttaccgatacatatcatccaagccggtttatctcggaataattggttttcgtctatccgtcacttgttcgagcttctactggggtgattcggagtgtgagatcatgcagtaagtcggactatttgaacttgacgtctgtactcaagtgagaatcaccccaatctgctacagcaatcagcgaggtgtaagatacatactgcttgatgataggagaaaaatatggttacataaatgtcctaaaagtacagtaaagatcgcaacagacggctggctacaaaagcaaaacacacaccctctttaatccgcgttcctcatcagaaaccccttcagaaagggtactcggtcaatgatctcaaatcccagactccgcccccacgcaacaggcccctggccgggcacgttataaagcttgtgcaggacatcgcaggtgccaccgatctttgcgttcgtggcgtaccgctcagccgtatatctctcgagcgtgaggatatcgcctatgtccatcccatgcgtcacagcgtactcgattgttctggagagggaggccacatcgcccaggccgaggtttaggccctggccggcaagagggtggatgacgtgcgcagcgtcgccgactagggctacgcgcggtgagatgtacgttgacgcatggcggaaacgtagcgggaatgaggcgacgctgccttcttgcacgcctgtgaccattggagggagatgagagggggatggagtgtgctgtaggcgccaagtgagttcgctctcgtgcaggtcttcgtcgaggttcgtgaccgacgaggacgaggggcgctccatgcgcatcatgtactgtaaatctggcatgcccaggcggaaggcggcgttgaccatggcaatgaaggctcccggcgatagggacttgaggtaagctgcgttttcgaccgtcgtggaccagacaagggtagcgttgttgtttgggagcgggagaagggcgattgggccaccgagggcaggcaggaagcgctggtatgctgtccgcgtgccgatggggaacggaggagggatatggtcggcgagggagagggttgcgacaatgccgtggcgctggtagtcccagccgtctgtggtgatgtcggcgtaccggcggacagggctgttac

SEQ ID NO: 875 - DNA, 4623 bp, Emericella nidulans
tcgagagttggtggcaatgccctcaggatttgcgatcgtgaccccggcctcacggggtttgggcttttttcttgcccagcacctgctcgcccacacgaacctaccagtggttgcaactgcacgggcagactgtcatggagtccgagaccggttacttaagaatctcaagcatggatcagacgcagataagaggctcagcgtattccaagttgatgttactggtatctttacaacatggctgcagcggtctgacccattgacccagctgatcgttgtcagatgaatcaagcatatccaaaatggcttcagaaatccgtgcactctacccggatactcttttacgtctggccatcacgcttcccggtgtgctccatgttgagaaatcaccggctcagattgatgttcataccgcgctggaaagtttcaaggtcaatgctttaggacaaatgctccttatgaagcatttatcgccatttctaccaggaaaatcatctccgccgtttgaagacacccaacagtcgtccaaggtaaacaggacgctgcgatatctgcccctacattcgacctatgcaatgatggcagcccgagtcgggtccatctctgataacgcctccggtggatggtactcgtaccgtgctagcaaggcggcagtttttcaattagcaaaaacattcgaccttcatctgcagtctcgaagcaaagagcgagctatggcgattgcgatgcacccaggaaccgttcagacagacttcacccggaattactggagtggaagagcaatgcttcagcccgaagaatcagccgcatcccttgtagaagtcctatgcacgttggggagtgacgcaaatgagggtcgcggtcggtgctgggattggaaaggccaggaggtcatgccataaacgattttgggaccataggtattgaaaggaccactggaatacagcctctgttgctacttcttcacctcgagggccaggttctaacagaggtgtagtgtgtagtcatactaaccagcacccaggcaggttgtgctcgagtataaaggccgccagcgttatggcgaataaatatagtgacacctatcctgctggactcaccaaatgctaaaagagatatccataattcgatttgtttcaagtcaaggtcccaaatatgatgcggttcttgctgaaagactgcttaatgaaagaaacatttatcgtgtacaccaggattagaatatgccctttgttgactgaattaaccaggtgttcaaaatacagactgaagtttaccaagcaagcttcaaaggacaaggcgagtatatatatatatatattgcgcgaatttgccggcatcagcagagcccaagtcttttttttttttttttgccctgcctcatcgacacagacgagcaaatcactgagcaatactaatcaacctacctcgctcaattatgcccaaaaaaagccaaaaacgcaaatacacagacatacaccaagatgatgatatgcaaagatgcaagcgctcactcaaacaactccagaggaatgactacatagcaagcatataccgcctaactgatgataatctgcgaaaacatcggcatcaagcctacggcctatatgtcaaacaaaagccaaaagggccccggtggaggccgtcgatgtcagcgcatgcagccacattcctcgctaaatgttcgccggcccagatagttgcgattcagaagttcgctagaaacggagggcccgattgctctgatattcgcggtgtatgttgatctcttctacctagttcggcttagttggagccaaacgcattctattcatgctatccgcgaaacgatatgctatgatggtttaggtgatggtcgctgatctctgtcttgctgattgaatatagtttccgccaccgacgcacttcacggcgtggtcggtgactccatttgcatgaaggggactaacaagacggaaggaattggatggtctggatatgtcctttatatggctctgaaagggctagaaagttaggcttagccgagacgggctagacatagagacaaagcccaggtgacttctgtcattcgctcttatctatagaaaatgatatagaaatcgatacctttcttgtagagcagggtgctcagattataatgaatcaaaagttatacaacaggtttgtgggtccttcccttcagtcaatcggttagggctagcaactcgtaccggagacttcctctataaatgctgctggtcctaaccctctctgtagtctctatagaatccataaagctctccgcagactggagacattgtagtatagctgatgtggatgcattcgtctgagactagcgaaatgcatgtaccatgagttcgcaaacctatagccctttatatcctaaaccactctagtggagacatttccgtggaatatagaaaagagatatataggggatatcggcagtaggaatgagaagaatacctgctctttatacctgtagtgctgggaaattgcgagaggcccaagtggattgtacggctggacaatggggaaaaagcacccgagggaaatctacttatcgaatatttactatggtatcgaacccgaataggattctagattcctgacgcctcggccgggcgatcgcaaaattgccaaatggttaagctgcgaagcagctggcagttagggttcagacccatatgttcacaatagccacactattgtttcggcttgtcgatcggtcagccatgaatcatctgcaagtcgtcgaaagatcgagcccagataaactccgtgaaatgacactgatagggtttatgattgtaccggctggtcgagaggtccggtaaaagcaggctgctgccataacagaagatggttggcttccatcaggcaggtcgtatcgacactattgtgcagaatacacagtgtaaagacgatcaagcagtttgtactgaggtattgagcgtaattcgtcttcaagtcggtcaattattttccatacgacgcctctttggatgttttagacccgtgtcactagctccgtcgatgcaaaaacgcagaattggagcattagaaaagggcaccaatccggtgaatgattgcaaaagcaataacttcatacagcacagagcttcgggcatcggttgccgagaagttccagtaatatgcaaaggtaccagagcacattcgaatcataggtacgcacggaacagagggagtctggtcggaattatccagtcagagtggcttttatgagcgcgaggcgtacagtcagacattgctcctttcccatcacatttgcgaaacgaatattcgacagtacgggttggcttaatcactggctccatgcggggatagatcggagtccgatgaaattcgacgttccttgaactgacgcatacatgccacggagtatcttgacatccaaataccggattgaccaagagtcgacgggatttctccgtgtccctttctcacccactgtccaccgcagcctgaagacttgttgccaagcggtacatcagctgcagtacactggtcgatgtatctttataggccacggctcctttcagacgcatctgcatcatggatacggatggtctgcttcctggtgtgcgtcttggccggattagcgtagactgtacatactccgttgtcgccgtactgtagcgggtcgccgaggaacccaactaggcgagttcgaaggcgaggaatacagtacaagattctctgtggtggcagcagcgatggggcgaaggttttttgttggtcaagttgtcaggaaagatgacattaggcatgcaaatgcaatatcataggctggagtatgtattatcaatgcgaggggcatttagtaaggcgtcggaaattgcaccgcggtatccagcacttactagttcctgaaaacagaaaagaaaagcttgtggctcgaaatggaatggccaaattttcgttgtgtgaatgcgaaaagcatgattggcaggcccacattgggatgccacttttctgccgttggatcaccgatttcgcttctcgtcgcggaggggtccatccataagttgctttccaccgacactgacagctcctgcttttaatactttccttttctccgttcgggattgagtctgcgctgtactatttttttttcaccctggaaagaatttgagtgcccttgcggtcttacaagctgtccatcttctgaagaactttttgttcctgtactccctcacttgcctctttctctatacaacttcattcagacagcacatttagcaacaatgagcggtcaaaacgaagatacccgcggtgagtggtatttgtgaatttggtcaattcagctgctgattggcttccagtcctgggttacgaccctcatgtttcgcctgagtttgttcagtccgagattccttctgtgagtcacacttctaggtgcgattgcaccaagcatttcaacggcacacactgcttcgtaagccgctaacaggattgaatagaacgagcactccattcctacggtccgctctggccgcaaccaggctgtcgaaattattgaacagcgcgatgaccgccttctagtggtcgttggcccttgctccatccacgatccctttagtagggttaattcggccgatctag

SEQ ID NO: 876 - DNA, 6835 bp, Emericella nidulans
tagactagaagaattcgctagagaattaaatcacagtgaccgtcgagcttcctatatgtgtcatggaccaacgttggtgccaaccttgattcgttattccagaagtcagcaacaattatacaagaactggcctgtacagggcttatcccagaccagagattcaatcagcagttggttcctagtggaccagctcgtcgcaattcgggcaatgctcgaatcaagacttcgggcgtactcgtcacagaaggaactagttcagagaaaactgataaactattattaaactctatattactataatcctataacgttgcaatattataatattataatgctgctaggccagcagcagctatctggcaagtgccaagataatatatttttagatatttttcataaattcattatatataaataaataagcaataatgctcagtagtctattagttatatctcctttttttttacttccaggtgtatagatcgaaaccaagcagggttaatctatattttatatattacatagatgttataggtttgtattacagacatcagaacccacgcagtgacccgcaaatccgcgcggactgaagattttgcaacctgcaccgcaccgctgcggtgcggattgacaattctacgcagggtcttggcgggtgaccacccacagggacctttctctgagagttactatattacagaactgcggggcttttgctgccattctcagataaggctttgtcatggtgctgttactaggttatatctatataactccacaaatgtatttaggaaagacatccccaatctggagatctccaaggtttagtcccgtattaaattcttcgtttccttatcattagctctacatgggactggtgtccttacctggctaacaggctgatctgccctgacaaagtagatccttaacaattagtgtctgcataagcattggcgagccggagcttgcaattccgatatcccaaataggaaagttctatatatgactagctgttatatacggtggaaactgataagaaaagctggtagtaatcctgatctttgctaggggcacacactgacagctgaggagcacatactgccctgggtcttgaagcaggcgagagccagtcagtaaaacacggaaaaatgccattgtagctgcggtagcattgcaactagggactaggcgccatgtcggccatccaataatgacagctgtacgtccctttccacatctcatcccaggcaccggtgctcgggatgagccctcacataacagtttcatatcacttttaggcgctaaatggtggctcacaggtttgagagttatgggtggaaatgcggccgcttcacagccccgattgcagttaatatcattgtcaatttcacaggtcatcatagttgcaactctgctcgtcttatcaacatgcagtgataggtcagaggatttgattggccattcggagtccggttacgcaccgctattcctataatggtaggtaacatcaggtgtcaggctccagccagtccagctgcatgttctgtctctctggcagataaaaaaaagggcttaactccttcacttccttccgctaatcaccgcatgtcgcaaatatgacttcgagctctctgccctgtctggctgctgccgacgctgcattcggaccccgtgtcagtgtcgcatgccgagcctttgacttcactgtctactttgaggatttgttcttcgcctgcctgcccgctgcgctattccttctatgctgtccagtttctgcatgcctgcagtggaaggagcctcgtcggattaagcgatcgaaactgctcatttggaagcttgtatgtcgcctttcccttcttcaggatatgaccaagtagacgactacctaatgacacttctgaacactgttctagatctccttggttgcgctttgggtgtgcgagacaagttttcttgtcgtgcggagactaggttacccagccctccgaaacaatgcttcgttggctgccgacatgctgggggtggtcgccatcgcaggtgctggaggattatcgtacatccaccattgtcattccattcgaccatccacgctgcttgcacttttcctttccgctagatctcttttgacaattgccagagtgagaacgctgtggcttatcggatcttcaaccaatgaggccatagttctcactctgggcttgggtttcaccatctgctcagtggttttcgaatccctgggtaaggaagcttccttggtttcgtcaacgctgaagcccgcgacacctgagcccttcagtggcttctggaaacaggcgagcttcgcatggctggcggggacgttccaccagggctactcaaacgtgtttaccgtcaccgatttgcctgaccttgatccgcaactaagtggtagagatgtcggaaggaagctacaggaggcctgggcccacaaaggtatacagggaactcaaagtcgccatatacgaaaagaaagatctgacgtatgattcaccgtacaattagaggataaatcggcaaaacacgcactgctccgttcctgtctgcgtgcctaccgcactccgtttaactcggcatttattccgcgtctgtgtctgtccgggtttacgttttgccaaccgtttcttgtcaatgcaacagtttcctgggttgggaatacctatgctccaatggactttggcagagccctgataggggcatttgccattgtttactgcggaatggccgtgcgtcgatactctatcatccctcctccctgcgacgcgtgaacagctactaatgtaatcagctgacggatacaggcgagcaatgcgctttacggatacttcacgttccgctttacgattcgcctccggggcggcttgatctcacttatccacggacaaacggtgcagaccaaagcggcacatctgggcggaaacacagccataaccctaatgggaaccgacgtcgaacggatcgcaagtggctttcgattaatccatgagatgtgggccagcatgatcgaaatcggcgtcgcgatttacctgctcgagagacaggtcggggtggcctgtatcgtccccgccctgattgttgttggtctgtacttcccattatcctacctaatttggcaaattttcgggattctgacccttgctggcagtctttgtcggtgccacagtcaagctctcagcagctagcagtacctcacagcgtgcttggattgagagagttgaggagcggcttcggatcacctcatattccctggagaggatcacagaggtcaagatgctgggattgtcagaaacaatctcgcgcgtaatccggggtcttcgcgcggctgaaatcgctgtatctgcagtgtttcgaaaactgctcattgtgcgagttattctctgttagtcgtccgagtcagtcaattcgtagatttttaaactgatcagatattgtattatgcagccaatgcaccgacaaatctggctcctatggcgacattcgtggtgtacgcaattattgctctagtgagggacgaccgatcaattctcgcggccacagcctttacttccatttccctcattagcctggtgacgaccccggtgttgactttcattcaagcactgccagcggttatacaatgcttgggatgctttgataggatccaggaatattgcaacgaggtgccggggcctcaacgtgccgatacctccgaccatcgacctttcccgggtgctgacggtgatacgccaatagctttggtgcaggttgctggttcctcgaagaatggaggtgccatacaggaaatggaaggccagagttttggatgggaccgatctgcacccgccgtactccgcaatattagcctccaggtacctcgagccgcgataactatgattattgggcctaccggaagcggaaaatcgaccttgatagggagcattctcggtgaaaccgttgctcttgggtgcccttatgaaggtagtcgatctggtgttgcatactgtggccaagagacgtggctgcgaagccaaacgatacgccagaacgttcttggtgagcttccaatggatcgacagtggtatagaacagtcatatcagcttgcgggttgcaaaaagatctcgctcaacttcctcagagtgacatgacaccccttgccggtaatgggaccacgttgagcgggggacagaaacaacgcgtcgtaagtggaaaaagaccgctacccttacggctgacttgctgagcgtcttatattaggcattagctagagctgtctactctcggcacaaaattgttttgctggacgatgtgtttagcggcattgatgctacgactgtggaacatattgccagacacctgtttggtcctggaggactgctacgcaagatgcacacaacagttgtgcttgccacccactcgagtacgttgcgtctcatagcgtcttgcccagccattgaccaaaaatggaattcgtaggattcgttctccaatacgccgataagatcgttgtgcttgccgatggccgcattgtcgaaaccgacactttgcagaacctcaaagccggcaacgcctttgttcaggatatggataatgctctaccaattccctctccgctagctatccaatatgggaaggagaccatttctccctttcgggatccagatgatgatgatgatgatgatgatgatgatgacgatagcgacgaggccgagtcatgcagtgaacaacaaagtcaaagtttgagtcgtcagcaaggagacctgtccatttatgcctactatgcttctgcctcggggaagattacagtcgctttgtgtttggggtgcgcactaatttgggccatctgcggcgagctcacaagtgagtctgaacctgatcgtgctgtacgatgtactagacaccctgctaacgaggaaaagctgtgtggctcgatatctggacgtcggctaatgcggagcatcccaactcgcggcttggcatgtacctgggtgtatatgtcttcttgggaattgccagtattttcttcgcgatcgccgtctcctggtacgattacgcctgtctaatgcagctgttccgaagaactaactcaccaatgacattgtgtaggcttctcatggtcaatatcgtgtcatcctcggcgctaaaattgcatgagagagtgctgaccagtacatttcgggcgccaatccattttttccaccaggttgatattgggagtatcacgaatcggtaaagagcatccctccccatccacccggtgcgggcgctgacaatgcccaatcaaaggttcagccaggatatggacctcattgatatgagcttgcctatagaagtcttcaacgtacttgcctgtaagtctgcttgaacatgggtttggcataccggcgagactaacatttatgctaatgttagggggctgcacatgcctcgtcaagctggttatcctgtgcgtcttcgctaaatacctgtccgttgccgtcccctttgcgggcgcggtggtgtattttacgcaaagattttacctccggacatcgcgccagttgcgattcctcgacatcgaagcgaaggcgccgttatacactcactttctcgagctcgtcaaaggggctgctacggtccgcgcgttcggttggcagcgcagctttgacgaggcctgtctctctcttcttgacgcctcgcagcgtccagtatacttgctgttgtgtgtgcagcaatgcctggggttctttttggacatgctcgtctccatattggctattatcctcattaccaccgttgtatttctccgcgaaaaattcgacccgggggatgtgggtgttgcactggttatggtaatgaccttcaataatacgttgatgcagctcgtcaaggactggacgaatatggagacatctattggtgccgtgtctcgcgtcaagggctacacgagcacgacggatccggaggaaaacactgcaaatgtgccgtctctgccgggggactggccggctgttgggagagtcgagctgtccgctgtagtagccagccacccgtgagtgtagcttacccagaagtgacgattctgaccgactaagatgacgttattaggagtcgatcggagcttgtcttgaaggaggtctcaatctcaatcaaggcgggtgagaaggttgcaatctgcaggccatctggaagtgggaagacatccctcatccttgccttgcttgggatggtcgaggtacaagagggtaccatcagcattgacgggatcaatattctggagcactcacgggctcaagtccgcaggaaattgaacgtcgtgacacaggaccccttcctgattgctgggagtgttcgcttcaacattgatcctttacagacagcgtccgatcagaaaattatcagcgcattgcagatccttggcctgtgggataggattgcacaggaaggtggcctggatggacgaatggaaccagacgcatggtcgcagggccagagacagcttctctgtctcgccagagcaatggtccaacagggcaaattattgatcctggacgaggcaatgagtaggtatgctatgttatatgccatcacaaacgcggacaatgcttacccagccttttttcccagtgtcgacaacgagactgaagacattatgcaagcagcaatcaacagcgagttctcatcgcatacagtcctcgctgtcatgcaccgcctgaggcatatttattgttatgaccgcgttgtccttctcgttgacggggttgtggtcgagttcgattcgcctacagcactacttactaaacagtcgcgctttaaagagctctacgagagtggaaagatgtaattatgttgactcctatata

SEQ ID NO: 877 - DNA, 1961 bp, Emericella nidulans
actgtagctcacgacacaatacaccaggctattggttccgggctcgtccgtccatgacgacgaccgttgaatccgtcgtacgtgttaagggacgtatttagatggatcttcctatctaggcgtgccgtacgtacaagaaggaatcggtaaagaagaaaggagaaagaaggattgttgttgtgaagtcttttaggtggctcaccgccttcaggacagcgcaggccttggccgagtcactaaggtctaaggttcttgtataggcaaaggacccataacagtacggggcaaaggctctgtcggcgagcctccccgtaccatgttatcggcaaatggccgacgttagccgctactaagacaactaagacaactttctgcttggcattggggaagtgactttgcatgtatactgcttgatggtgttctgggtcatcttgttgactctgaggcacacgtcgaccgtgatgatccgggttgacatacactgattcgcttgtctgctggagaagaaaaccaaaagcatgctcgttagttacgatcaggcgtacgcagataagccccttgaagacgccgcttcgcatcttggtgcgaggtcgtcgagggacgtacattcagggtcgtctttgcgatgcgacatagataagcacctgcccgactgatcgggtgtatcagtcgcttttcattgcttaatgccgcccggcatctgtggcgaccagaacactggcgccgcagcgttcagagccagctgcagaggagaccagaggggtagctggctgctatatccggctccgctgggctctggaggactttgggcagacagtggattaggaatgatcgcctcagcggtattccaaaagctctacaagttagtataatggtgccatgccgtggctcagtccacccaacaaaccaaccatcatggaagctgttatgaatgctcaaaggggaaagggtagaatgaagctgcatcaactacacgaacgtagcctactaaggataggatgccataagacgatcgattctctatcttgatgacgatagttctttcttcttcaatgtacgactcctcgagggatcaggccaggggccagagatcatgccatacagatcacgtggcacgtgacacgaggctcaacatgatatattcgtatcagaagcaaatgccgtgctacagatgacctcttgaacgaatttcttaatgctacaccgcccgaagctgtgaataatacgcatttgattaatttctagatattgtctacactataatatcgttcgcggtattgtctataccggcctgcgcagtctctcggacctagtgatgtatttttctcatagcttaatttggtacttgggatgtgtcctcagccgttctccatactgcagggacaggaaaatcatgcccatcataagcaaggatataccagccagaagcgtattcccccagccttggccaagagtactatacattcggggacccgccagtggaagaagcgcaccccccacactgcggaagaccgtattggcagcggtggcgctggcagcgtacatgggaaatgcgtcgatcaggtacgtcccaacgggggtgaaaaccgtgatcatgccaagcccgatgaaaaatgtgcccataacaggcacgaaccagaagaccctatctcagcggtccagccatatatgagtaagccgataggaatcatagatcccccaaagatcgtggggggcagacggtattcgggcttcatttctccgccttgggctgctcgcttaacgattgcatcggaaacaagccctaagatcaagaggccggcaaattgaccacagccacagccaagatatatcaggcccacattggtggcgatgccatagcgcgatgcaaagacgtcggttactgtcgtgaataagaggtagagcgttccatacgcgacagcggtcagcaatgagagtccgaaaaccaccggcgagaggct

SEQ ID NO: 878 - DNA, 2933 bp, Emericella nidulans
tgccagttgccgacgcgagtcaggaggatctggtgcggaagaaggagtcatttgagaatcggctcggcacgacgcattggccgaatgcgaatcacacgggatcgaacgttgcgacgagggatgggaaggagtgtccgtataaccgattcaagccggtaatggagccggtattgaacgagagggcattcaggttgacgggcattccgtaccttcgcagccaggcttaggtgttttagcatgcaatagcttcggctcatttatgtattatatgcacatcgttcaccccgatattttcgtaactcaagcatcgcgctggcacctccaaatcctggattataacccatcgagacagaaattcgtcgcaaccctgcccgacaagctggcctattgatccagccgggtgccggcactacagcctaggggagccgaggtgtaaggcgccttcgtctggcaggcctgattaagctaatagaattggaccaatgctaatacatttcacaaaaattggcctgatatgctcggggtcactgctaataatgctgttctcatttttcaatgtctgatgaccagatattcgactctcaccagtcattcggcgcctagccagggcccgaacatgcgtagcaagagcgcgaattttagtggtcctctatgtatttccgatggccagcgaaccagtcgttcccgcctttgcagttattgtttagagcagtggactttttatgcagctgtaggtactagctacccttggggtcacatggtcttaatgcctggctcacctgatgtgacttgcagtagataaggttgccactacaacctttcactgatcacgacacacacactagatgcgccagggcaggcagtactacccacccaacgcagtggttaaagcgacaagctgccttctctaccctcataggctgatcgctgcacgatgcacaacccctgtcggctagagctcccctcgctccccaggttcagccgaggtcggtccgtccgaaaggcggggaaaggtactccagattcgttgaacgctggcgctcccggtccgcttccttcgagcgcatccctagatttttatccaacgctgtctcaccattcagacgatctagattgtttgcttaacaacagtacactatacaatactacactacaccccgtgtggagacttccaagatgggtagcgcaaccatcaatcaaccggtcggtaatacggactatacgcagtcgaccgttgcgattattggggcggggatttcgggtttgtcgcctgtttggcatccttgatcctgacggtgctgtgttgctgatatctgacgccaggaatgtgcatggccattgaccttctccgtcgcaaccaccgcaactttgtcatcctagagaagggcagctcggtcgggggtacctggaacgataataaatatcctggctgtgcttgcgatggtacgccgtagcttgtcctatatctgatgattggtaataattggcttcgcagtctggagtgccctatacagctattcctttgagcagcggtctacttggacacgcgaatacccgggccaggaggaaattctgcactatctcaccggcattgctgggaagtacggtctctacccgcacatcagattcaattcgaccgtcgaggaggcgcgatgggacgacgaggcccggaaatggaagatcaaggtgtctgtgtccggcgcgaaagatgcccagttccaggagggatacgaactgtcggcaaatgtgctcatttcaggtgtcggacagctgaatcagccggcctggccaaatatcgacgggatgaatgaattcaaggggaagagtatgcattcggcgcgatgggactggacgtacgatttcaaggggaagaggatcgctgtgatcgggaacggtatgctcagtcgagtgggattttttgggtcaattattttggtagacagaatagatgctgattgaacttgacaggtgcgactgcgactcagatcgtaccagaagtcgcaaaaacagcgtcgcatctgacggtctaccagcggactccgcaatggatcatcccccgagacgacaagcctgtgcacccggcgcagaaagcattgctctctttcccgttcttccgaaactgcaagcgctcgttcatgatgctctaccgcgagatgagccacgacttcatcgtcaagtcggacgccaaaaactcgcaagaagtccgggagctctgcatcgggcatatcaagaagggccttccctcaaagccggaattgtgggatgttctcacacccagctatccacccggttgccgccggatcttggcctctgatgactactacccagcgctgggccgggagaacgtcaagctggacacgcgcaacatccagcgcatcaccgagacggggatccagaccgccgatggcgagacaactgactttgacctcatcgtatacgcaaccggtttccgcacggttgagttcctgcacccgatcaaagtgtacggcgcaggcggacgcgacctggccgagatctgggacggcggcgcgacggcctactacggcgtgacggtcgaggagatgccgaacttcgggctgctgtacggacccaacacgaacctgggccacaactcgatcattctgatgatcgaagcgcaaagccgctacctcgccgcactgatcgacccggtcatccgtgccaaagaggccggcgtatcactggcgatccagcccaagacagagatcgtccgggccttcaacgcggacatccagaaacgcctggggaagagcaacttcgccgacccggcgtgcaacagctggtacaaaacgccgacggccggatcacgaacaactggcccggcacggtggtcgagtaccagcaggcgtgtcgcgggtgcgatggacagactacattgtcgacgaggaaaccatgaagtttgtcggcaagaatga

SEQ ID NO: 879 - DNA, 3005 bp, Emericella nidulans
gaatatcttagtctggtacattaccctgcgactcctatcatgaattctctgaagtcaagattaagccatacttttttttttggcagtgatgcggtactaccgtatctcaaagtagtcgcactagccctaatagagactccgagcaccagagctcccctttaagagtcgaactccgggactaccacaaacaaaggaaattctttagagggttgtctgacgtgtatatctccagggttgtgagaatagcaatatatagctgcctggggaattccgtaggctcaaagcctgctagggaagatcggagtaaaatcatcggagtataaaacctcgtatcggagttcagtttcggagtcatcatcgaacctgacaaatgctgtacacaatctatttctaagctagaaaagcaatattatccaaacggtcgagtcttgtgtagtctctaccgaatgcgagtgcaaaagatggtttccacggccatctgagtgttcaatactcgcgcgaggatgtcattggcgtggtcgtaattgcgactaaagcctgactcattcgaaagccagaccagaccaggtcggtctggggaggcttttgaccacatcctccccaaaatgactctcttgactgcccaaagacaaacagggggggcagaaatttctcatagggcgcgtccaagcctctaatcttaggcagacccattatccatgatgaatacgaagccgaaaacggaggctgtagtggcctgagtcactcgctcgcacgcccttctcctcttatgccatcatcgccatgcagacagccccatgttggcggcctagcccagtggagggctgaaaaaatgacaccggactggcccgccatcaaggtgtgtggagaccatcctgccaaaggtcttattgctaagcttcaatccaagtcagtcaacatctggtatgcttggcaactccgacgaggattcggagtaaaggacgaggcaaggtcattgccaagatgactcgactagacctgaggatggatatataaggggatgaaatgctcgtctccatcctcatcatcatcaacatcgccagcaaaaacaacagcagctctgaacgcaacgttcctataccagattgagctcgatccaatctaaactctacatacaacacaatcctcaaggacagtctacaaacaacaagttgatcaagcatctcaggcacttcagaaactttaagactctgagcataccgattgcattcaaaatattcccaagaacccattgcgagcactcccagcccaaagattcaacaatgtcttccaccaacaagtcctctccaaagaccttcgacgacgcttcgtcgacctactctacagcctcgacttccaccgtcatgaaagagaaggaggaggccaagcacaagtggcagaacaagaacaagagcaacgccagcaacgccagcaacgccgactccaagaacaaggacgcagccctccattacgaggccatggctcattacctagctttccgataagtggccgccagccacttaaggcagcaatatacgtgcgcgcctattacgagcttgatcctagaacatggatcaagcaataacgcttatggatatgatgattaactccagttccatgtcgctatttttactttgattgttttcaacaagccgggattactggtcggtatcttatggagtctcggtgtctaatggatatttgtttattcagtataatgtgtaattagttatgcttcatagaattcatattttttcaccgcaatctatccttgacttacctatggtaccaggcaactacgtctctatccgtcaacccaaaccctatttacaataggagggagtttaaatacctgggtcttagtcatagtctaagcagggttgtatataaactctaatgttttctgttagggttatacaaagtgcaaactccacgtggataaatagacccataccaacgctatatataaacaaacccacgctacataagcacattgccctaaccactagactttatagcccaattcttagcacatattgctttgacaattctcattatattcttcatcaggtataatcattatcaaaacaaaacacgctgagaaaatgacgtgatgcaaatctcgaccatgaatgaggacacaggtgaggcggcgggtaaaatatgtcgggtgtctcgctaagttgcacgtgaccaaattaagagtcatctgagccacagtgtcatttacccgtcaattcagaatttcatctgcttaccgtacacattgaagctgcgatcatcaggcctgcaactagttttcaatcatttttgactggaaaaaaggttcctacaatgtctttgattggacagaacaaatggttcaaaaaatataaagaagaagtgaaaagtggcaagcttgacttgcctgctttggaattcgtgaggcttcattatcactacattattgattaactacttgctaagtccttactgcgtcaaggatgcgaatcagaatgttgtcatatactatggtgaagtcttctgtcgctacgaagattgtgtgaagaatcgcgtgggtattcaactattttctagctgtttgtcaactgttcattaactgttttacaactacttagtcgccattctctaccactaataatctccgaacccatctccgcgatcagcatgactgtaaattagaggagagcaaagggggtcgcaatgctcacaagacgattaatctgggcatacgtgaggatctccaactacctggcaactgctttctaactacttagaatggtacaagggcctcttctccgagcaagatgcacaccggccagttgcccttgaagatgaacatgaagccgttcagcagcaaattatcagcaatctacaaacccagtccaagtcagacctgtccgcggccctaccttccctgccccgaaagaaggatggaacagtaagatcaattacctgttagctactttatagctgcttgctaactactcaggttcatatttcta

SEQ ID NO: 880 - DNA, 1821 bp, Emericella nidulans
tcagcgtctatggccgatatcgaagcagaagtccccgaagccggtcacggtcacctcgacgaggacgctactcgcgggaccgttctcgctcgcaacggccgagccggtcatactcaccagttcctgcagctcctgctcctgctcagaaccacgcgtactcgcagcagcaacacgactcctacagtcaacgatcattcgctccacaacctcatcctcaagcgccacaaatccatcacgtaccgccgcagaacgcatttcctcctccaccaccgccaaactatcaaggcgcgtggccgccgcctcctccaccccaaatgcccaactttccgccaccatttccgcagatgccacacatgcagatgccaccaggtcagattccgcccccgccagggccgccggggtcatatggttttcctcctggcggaagaggctggcatcaacaacctcctccgccgccgccgtccggacggggctggcggtagctatgggtctactgtagtgtacgatagtcatgatattgataagctttcaactggacagtaaacaagccacaaacaagattaggctgacaatgatacaaatatatccacccagcttctgaaaaaaaaaaaaaaggctagcgagaccagaccagatccgaacagcctagtccagccgaatcacgcagccttaagccgaataaaagtaatcatcaagcatttaggtactccacctatttcgaaatactcccactgacaccccggaggagtagaatctatttcgaaggcgtgggcgttggaacggaactagactgcgcagccagataacttgcctcggccttgctcttttcaatcgcctccttcttgtcctggatagccttgtcgtaggggatacatccgctcttgaaaagggactgcgtaccgggctgtccatttaagttagtacggtcgcctctgagtaccgtcgagtagttctctcagtttgaaagaaaaactgcaccttttgtccatcaacattcccactgggagaacaacacatcactctgctcaaacaatcgatgttctcctcatcttcgcccatagctctacctgttcccagagtcgacattagctttcgttccatctagaagtttgggagaatagaaggatgaagatatgggaggatgggggcacatacactgaaagcctactatactactgatcttcacgccctggaaccacggtatcagaccgccgatcgcgtcctcaccgaccacgtcgtccgcaagactgtccacggatgtgcagcactggcgtgaattgtgggttggtgggcatgtagtcgggtcgagggaggaggcggcggaggaagcaatgagggttgcgatcgagtggactaatgactgcgaggccgttgcttgctcaggtttaagagatggaatcggtcgttctggttcctggatggaggggccgttggcgttagcgccagcgttaacgctggcgctggcaccggcgctggggctttgggggaaggctgacgggataggagaactgttgatctcgacagggttggcgaaggtcgaggttagaggaaaggcgacaaagacggcgagaaggccaggaagggtgctgaattggagttgcatttggccaatgtgtgttggatgaaagaagcaagaatgggttattgccaatatacagagaaaagagggagagatgaaaagagttatatgtgagaatatttcgttctgggggtatagtgagcagacgggtaccaatccagagcagagatggaaccaagaataaaggatagaggaagagacagagcctgggactaatcatgttgatatgggacaataacaga

SEQ ID NO: 881 - DNA, 2688 bp, Emericella nidulans
ctgaaaaaggaaccgacaggttgcattccaaaaacaatacctagcctagggtaagagaatcagaagcaatcttcaactgcggttacctgcgtctgtatggttgctggatacttttcggatgacatttgctacctggtgacagggaagatgggatatatcccttgaaggggatagatcattcttagaagcataagccttaagccacgaccagcaaattctgttgtgataccatgagcacgagcagttggggctttagttcaacgccagccccagaagtgctttctcactcggaataagctttaatctcgaatctctaatattctgagatgctggcttcattccggctctgagggaaatgctgatacccctgtaggaacagaagtgcatgcacaatgtgtactaatctgttgcatcggcggagtaagtggtggctctagcttagggctcagagtcaagcaagtcaacaacgctacagtaccagaccttatactcggacggggaccctgaggacaactggtgatactgagccgtgccatggtcatgataaaatcggtcataatgttgatatacacgtcatatacatctcgttcttttcaagggctatttttcggcatctgtacagatccttctagcacaccgacctctgctggatcaatctccttgattggcacatcatcccaggtagcgagaaccatttgctttccagctaagagctgattcacattcaacatagtgctgtacattaccccgtgactgaatggcccctgcctcaactcttcgttggaggactccattgcatcatcgggcccattgatatcagaaccctttgccgccggaccagcagatttatatccgcccgtcaaagatgggtacggcgcaaaacagcgcaagtatccggagccacacatccggcctagtgagacgtcaaactgcgcgccgatgtcgatctgctctgcaagtccggaggggttgactgagagggcggcaagtatgcgctgcgcaccgcgaaagctcacggcgtagacgatggagcagacaccatcggtgatgggacatgtcatgcgggcatcgtctggtcttgctagtggtggagggtcgcgccagtaaggcagaaaatggcccggtggcggaaccgtagggtcagcgggcgtgaggtagtatggacggtcggtgctgcactcgataccacagtgcccgagccagaggatgtcccaatcgtcgccgtagggtgagcttgagcttccagtggtttcatcggccgcaccttggagagcgcgtacggcgatcgcaaagctctgaagctgagatttgatggatacatcccaatctgcgtcgtcttccatgatgatcgcacttgcgaggcgttcttttaggatactatgctcccaattctcagtagatgatccaataatgtcaagaatggctgagtactcaccgttgcataacgttgaggtgcgaacgtcgagccgcgtactcaactggtctgtgatcgtaattccagttctagtttgggagatcagcacggctaccttagatatcttcattgcaactcacatagggataagttttggcatcaatttcttcaggcgttgtggcatcgataatctctatatggaaccctctgactgatgagcctaggatgatattgtcgcgcttatcaactctgcttggcaggctgatggcaaatatagcgtgagtctgtccagaattagcataggaatataagctccgtgagttaagatacccccaatgtctcgttcctgatcgcttcgaggtgcgagagcgtgccagaccctgcagctacctccgatctggacgagattggcggccataatgagaacgccaggacgccggcaacgatgacggcatacagagtcagtcgtgaaaacagttttcgatacgtaggactagccatttaacctagttgtggaagcacgatacatacaaggtgtgctctgcgctctgctgatatgtgtaggcatgtgtaggctacagctgagacgagctgtgggatttcgaggcaaggccccttcagacctcccacaaccaccgggagcggatgagagcccaaagtccacaagtatgcctagctgatccaagcgctagaccatctagtaagcgccggacaggatgcgatatgcagtactgatggcagaacggcaatgagagttgtgaggtggcatcagtatccacgaaaggaaagatagatagccacggcgaacatttcataagctctataacaataagtgaggacgaaaggaatgttgctaagccccttattctggttttcgcgctgttcttcatcgcactaaaggccagtgccgcagtcagcttgcattagtgcagagctctcgacaggcatggctgcaatcagtgtccacagggaatcgactatgtgggttcctctaattagcatatcttgctcttgttcgagatttgtttgtttcgtatctcatcctcatagtcttagtaaacgagggagttagaaaggcgcaacgtcagccatgggccagtttgactcattcaggccatgtccaccctaatctaattctcttttctctagcatgatacatgacggaagcaacaagccaaagcaactggagggaaaagaaggagaggaaacaagaaagaaaaagaggaaagaccgggttttggaatcgcagtcttacgacccattgcgctgcgcgc

SEQ ID NO: 882 - DNA, 1187 bp, Emericella nidulans
gattgaatttggcccggcgatagtttattagtcagaaattgagagagcgataaggaaaagattaaacaaaagattgaagtctgaatatgacaagccggaggaaaggaaaaagaagcgagagctggggaggggctgcgagcaacgtgctgaagcagcagcagcacagacgacgacggtcgaaaacaaatccacctgaaaaagcaaaactttaagctgcgtcaggaaggatgtgcagtgggcagttatgtaaaggagtggaaagctgggcgacccagccaagggagagcaatgaaacgcggttgaaaagagcacgagagggagctagctagctggtggttggaatttgctggctgcgcttaatcggttcgttccagcgatcggccgtgtcgatgtcatttcatcacgactccacgactccatcctccctttcaatcctcaatactactatctattgtaagtggcctccgaccctgcggatgttcctggctgttcctggctgttcctgaccctgaacagaagaattacaagcacagctctttgctgcattctcatctcaagcgtcatacatatcgccatgatacaaggatctcatcaaactctgcgcaaaaacgagatttcgagatcggaatcagagttgccaatagatcggtttagcgccaggctagtgctctagttgctgttattcggcatccatgtggcgagtctcgtcgggcagctgatatcatccaatggctcgaatcactgggcagctctttgcctcaactgtccctggtctgctctcgaccgttttgctgatgtttccactgctcatgcaaagattacagcattgcgttgcaccatttgattctggggccatctttcgatcgagtggacctggaacgacgtttcaagggggaaccgagtttgggtcacatgactcgaccgggctttgcccggcgatacgcccaaggtgcaaattacgtagttcttgactcgtcaagacccctggatgcagagtcgaggttaaatggatggctccagtcatacgcggtcgaagatcaagagctcgtggctgctcaatgctcaacattgagattgatttgatcatgcgagtctcagtcgtcatgataaacaatacatggtacggtataagacattcgattatcagcaaggttggaatcaagcttagagaagcaaagtgccgttct

SEQ ID NO: 883 - DNA, 6396 bp, Emericella nidulans
aaaggtcagtaatcacctttcatctatgcatcgaaaaaggaaagctcacggtggaatgagatagcctgtatatacgactagggcctgaatagcgacgcccgtgaggcgagtggcttggcctttgagtcagcatactcacatcatccacgtacaccgtaacctcaggcttctggggttgtacataccaacatctaaagacgctgaaaaagccccgatagttctaaagaatgaatacatggtcattgtaagaatgaagatgaacaagaagttgatgaagaactgagatgctgtcctctgtagattggccatgctactaccgttagcatagtacacattgacacaaagaggacgtacaagtatacgatcagctcgaacagcgtgacctggataaagattataggtacatcgaccactacttgggcgacagcgtaggcagaaggtcgatagaaggagctaaaatcgcagtcagcatgagaagtgtgagtgttgactttctggtccttacaaactcttatgcttcagcataacaggacggtgggtaaagacgtccgtcagttctgcgagagcgagcaaagcgttgaaaagcagcacaaagaacatcacgcctcctctagtgaaagtgccagcactatgtctgttagctctgatatgatatataagccttcagacttacctggtgttgggaagattgtagaacagacttccgatgatgagcgcctgaaaggtgagaatcgcccacttcccaatgagagttcccttgtcaccatacataatcttgaactgtctttccgtgagaatcataacttgatggtggaatggcacagtatagttcttcttcggcgcccgcctccgagcctcctcctgttcatcctcatgttccttgacttctctctcgaaatcctctatatccagcaagttctctctgtagtcttcgctgctacggtacgcacgttgaaaatcttccgctgagcggggaatacggtcctcccagcctttcttcacacgccgcgcattaggatcactgacggacgttaggaagtccggagttgtccatcggggtggacatttaaatccaaggtcttcaaagtaggcctttgcacgacctgcgggtccgaaatatgcgcacctcccatcctcgatcagcagaaccttgtcgaactgcttgtacaggttttctgaggcttgatagagagccacgagagtggaggcgtgcgccatgttggtcaaacttctaagactctgcacgtactctgaagctgtgcttgcgtcaagtcctttagtagaattatcccagcattgtacactagctttggtgaccagggcttctccaatcgagacacgctttttctcacctcctgatacaccccggacgatctctccaccgacctttgttccaagacagtgctcaatccagaatagcttggcaatcgtagacagaaaggtttcttgatattccttccggctctctccaggcagccgcgagtctttgtccggggttcgtgttttcagcgcgaacatcagagtctctcgcaccgaaagagtagcgtaatgaaggtcgtcttcggggttatacaagactgttcggtcagtatctgcattataaccaaaaaagactaaagcttaccctctgaacggtatttgtccgccatgatgtcggcatccgttcctccataatgtatctccccttcgacacttttatacccagacctctgattcccaatggtctttagaaaggtcgagcatccagaccctggccttccaagaaccaatagtagctcacctggccgcacgcagccctttgacaattacgccgctctactcatcatactataagaacacaccgtaaaatcatcaagaatagtcctcaacggcgcactgcccgcacttgtgccctttctacccctcgtaagaagccccttaatcaacctcggcagccccagaaagatatccgcgtttgtcggctggatggcagcgcccaacccaacgcccttgacagtcaagtttttccatacaacaccttgatgcctcgtctgctcttcgtctgaattggccttccgctcacggccgaacatccgcgagaccagcctggctacctcctcattatcttccgacccgccctggtatgtggagctcgttcgatgcgacagcgcgcgggtgatctcatcgtcagtgagcggcctgctgccagcggtacctctgcgggtgagcgtctgattgcgactgcgggtggactggtttgtctgtataggtgcgaacttctcgctgtcaggattggacgaggggatcgacgctgtatctgaggtggacctcgattctgcgggggagcgcaggtattgttcagctggagagttcgttagtgggccgccagtggaggggtccttttccatggcggcaggaggcattagaatgcaaacggtcaaattcaatactaaaacccgagagaaatggtctagagtaaaggacagagatcgatagatatatacaggtatgatatcacagaggacacagacaagaaaatcgcatgttaccagtatcttacgtccgggctgattcgaccggcctagaagaacgacttactcgcgggcttccatcataagtctgcatagacaccagttaacagccagcataaagatggacaacggaccaccgcggctccgaagctactgagagcttgttcggacggaagtcgagtgagcttccgaatgtggtcatcatgaagtcatcacaccacggctgctttgcgatgctgcgatctggcaatcactgcttcgcattctcgatctgatcgggctttgaggccctaaaacagggcgatgaggattggccaagacagattgtgcatattcaagcatatcaaagctgtcaatgttgagcataccctcactgtgatgatatgggccgcttctggagagcccctgggccggccgatgaattgatctgaatcaaatgcaggtatcataaggtttcaaaaatctgtaataactctagactcaggtcattcatcaagaattttggttttacatatatatatatacttcgcaactcagtgttgttgttctgggttcctttcgttcaggccagaatgcggatacattgcggagaaagtcctggtaagcttcatctataaagacaccttaccttgtacaagcgactcgtcgagaatcaaggaagtatctttattgtttcctttttttattttatctttatttttatcatttttgagcttcggatcaagttgaattagttaaattagcgtcgagctatgagagcgactgttatacctgcgatagtactccctcccagtatacacctcggcaaaccgatcgcatattatcttttcatcccactgccatcttaagtacgcgtgtccatggccctcactttatcctttgctcaatgctcctatctgtactccgtactcttcctatccataccctgaatccaccgtcagccctagagatggtagttggaaaatgcggaggctgggacccgcccaggtagcggacaaacagcttaagcccaatccagccaatcagagcccgagattcattgtatgtctcgaagcccagccaccccgccaaaacaactcttctatcacgccagttgcagcagggaggaaatacacatggctggccacaccgtggcctagcaccgttcgattcgggcccccttaaatctcagctaaatctcagccaggccgcatccacattcttctcttttctatcccctcccctcccttgtctctcctcccaagctatactccgtcttggtctaacccttcagtgtaccacggagatagttcgatttgatcattgtgtggagaagtccttgcgaggactgactcctacccctcctcagactagttcttggtaacatcctacctattcttatcatctttattcttattctatacggctcgattcgattcggtccccgtcccgaagacgacaacgaccgccatgcagcgaaacatgaccgtcgcggtcatcctgatcgtgctcttcatcattcttatcatcatcggattcatgatctgggcacaccagcaccaagtctcattctttgcgaggaggaaggccgttgatgaggagagcaccgagggcggttaatttctacacaccgtcgtatatcgtacgattttatcgacacttcatatcgttcacactacgttacgctacgttacgctacattacgctacattacgcttcgattaatgcttctagactacgcctaccgatccttcgtggttatactctataaacccactctgcacctatatattgatgcacaatttgtggctcttactctatatcgacatagcagcctaacgacccaacgacctcgcctctccgtgtcctctccaatggacttcaaccacgtttgcacatgcgattggcacctcgtgcacatacccaaaacgacttgcatatgattgatgacatgcatttgtctttcttgtttattgttcctgacttggtgactcgggttcgctctatatggcgttttgggtgtttgatctatcttgtgtttacgaaattactgcccagatcatgtgcgacgaaattagatgtaaaataccgtctcatggaatcgaatgagtttatgatacacgcacagtcattaattctcactcaacccagaatcttcaggcctcctctagtctttcctggcttcttgattccatcgtgcttcaccttagcgccctggttgccaccagaaccaccgcccttgccagcatttttcttattgttctttgtattggaaacgggccggacctcggtagttgcgcgtcggaggaggacaggatgcgatccaatatacttgccctgcatttctcttgcagctttgaagtagtcatcgccgtcgctgaaactaacgaacccgtaacctttgctcttctgcgtgcgtttgtcgcggataacgcgcgctttctgaacggatgtgtatttcgagaatgccttaaacaaagaatcatcggtgacctcgcccgcaaggttaccgacaaaaagacggaaatgggccggatcccactcgagcagggtcgggtcggtccaggtctggccaccgccagagcggacgacggtcttttgtgactcgactcctgcggcgggggttgtagaggtcggcgtagtaccggacgaggtatatacagtagttgcgccaggtgtgccggtactcccttctcgacgggcggcgcccttactcatggtagatgcatcatccttactggcataggcggtctgccattgcgcgatttgcgcttctgtctcggcgtcgaggccagagtttcgtccgcggctcgggtcgctgcccgacggcgcgaaggggttctgaatgtgagggaccgtaggaccgtatgtcgtacccgcattactgtactgcgcggcaccataatatgaagggcccgcttgatatgacggttgcggttgcgagtagtagttgccgtagctggtgcttgttggagtggaataaccgcttgacgcagtgggcgcagccgaaacgaccggactgctggtacggtagggctgttgagaggctacggaacgaggcgcaaacgccatagcagcgttgaagcccggccgcgagcccccgccatatccgctgttcgcatattgtgaatttgtgtttgctgattgaggtggtcgcggagggagcgacgaaggttggtgacctggaggtggcgggaaggacatgatgaacggagagttttatagaaggcgatagatgatgtgaacgccgcgtagacacgtaccttcagggcttgactgacgcagcagtcatacgccagacgtcacgcctgagaagtcccgaatccggattgaagaaagaggcggtttagaatctggggggcggaagaatagatgcaaaagcctgtaaaattcaatgagctatgtctaacgagccgacagccggtaggcagggtctctaagcaagaatttgcagcgaaatgttgttcagacgcttgggaaggcggaacaggtccagtcgagcttcaaagttgaatagagacgggctgggcagcggaaaacacgcacttggctttgtcgaatcccgtagaactagcaggcagcctagagcggaatgacacgtgaccgggttgttctagccacagtttggtgactaagccggttatcggagctcgaatcggcttagtctgcctagcgtggagggcacacgaggctgtgactgcacccccactctaaaccctttttggatggaatgcagtagccgggttcatcggcggttatcaagggattatttctccaggcatgtcctcggagacggattagagtgtaatccaggggttctccgcggcggattagtttaataaagtcataatttatccgtttccgcgttatcggacggctctggtgagcatagagcgcggtgaagcat

SEQ ID NO: 884 - DNA, 1346 bp, Emericella nidulans
tctcttgggttcgcgagccatgcccacctatcgggcctagatcaggtagatcccaccgcgagccccagacctcaacgatgtagcccctgcccttgccggcatcaccggcatccgctccagagcatccgctgtggccataattgggatcctctttccccagccgtacagtaaaccgcaccccccgcggcacaacacaaatctcgccgggctgaacaaacaacatccccagctctgtctggatatccaaacttcccaattgaggtacaattaggaagtccccgtccgtattgcagaaagctctatggtccatatccgcgttgatcatgaagacgtacagtgctaccccttcgcgcaagttcgggtcgccgctgccaccgagcgtatgcaagccgtcaacaaagtcaattttcccttccttagtaacatcgggcagagggaacggcgcccattcgccttgagaagggagtgtgcatagccgctggttcagggtgagaaggctattttcgatgtgggatttatgctcaatatccgtttcgtacccgtctataccacgccatcagcgcttaatcagctccaaacaagcgcgaagtcagagtgggagggcttaccatgcgcagcagccggtctaacacggtacatataagtgctatagttctctctcctcggcgccgtgaatgccgagtacgtgatcccctccgtatagagcccaaaccgcggctcctgcgggttattctgtcctgctgggagcgtgccgggaatcacttcagattgatgccggttgccaaagccgggtgcgtagctgtaggggtcgtttggccgagttggactgcgggtcatggtgtcggtgtagtggaagaccttgcgcaagtcagagatggggtgtcgggggatgggagagggctcgcttgaggttgacatggtggcggatgtagatggagtagagttggatctgattgactggttggaattaaagttgaggttgatgttcagttcagagtgagggaggttaccgtggctggagtgttatgtaaaagtgttcctggctcagtgtatggaagtagatataagatagagataagtgcctgttagaggtcatggaaagtcactgacctctctacaagcccaaattttatattcgctccctcattctccgcgctctgctgctaatttggatgtggagcatggcttctccattggatggtgcccatagagcttcaatctaaatggcattcaaccgccctccagaggcggatagcggagcctgtccatgtataataatacgtggattgatctcatgatgtaaagctcccctgaacctggaaggtgtttgcctcatataagagcta

SEQ ID NO: 885 - DNA, 1585 bp, Emericella nidulans
tccagcctcttccaaggctagcaaaagttcctgaggcgtgaggctgtcatacgtcccgaattcttcatcataaacaccagttcgagtaatcagatagtgatagtttatccatccgcttctgaaggtcaaatccggcccctatgcatcctgtttgtctctaacctgctcatttcaacatctaaaattgtgttagactgtctcaacaccaatgtcaaccaagtgttatagcgtaacttagtgccagccaccctttctacatatatctcacctcaaccttcacttgcctccgccccgactacgccttcgtcacttctcaacatcgatactggttgctatatacacattctgcctttgttacgtctacaagttgccatctttaatgccttcccttatttctgtaccccagtccaccggtctccatggcctcgctacgttacaatctcgtcgccacaagtacgccttccacattgcggtcgcccttctcaaccctcctctcttcaacaagtatacaaactaacgaagtccgcagaaagcttcgtgaaagcatcaggggcgttagtacgttaaccctgtcctcagcttgaacttctgacgaagctttctcccgtcaccttcaagagaaacgccgaagccccagcagagcagccagctaatacttctctattcacccagcacgcccagcgatccggtatgacgccagccctcggcagtgaggtagatcctaacgccagagatgtaacaagccgtctcgcacgtcgaggtggtgtgtacaggattaagaatgagatctacgatgagatcaggattgttttgaaggaaaggcttgcggaggtatgtatgcatatttttcttcttcacctgatctggggaagagtgcagtttgtgttggtgtggctagaggcttcgcatcctcttaggtgtagtcctctctcggtaaatatggctaacaagaataagacactgaagcaggtctgcctcgtcatggaatcgggaacgataccttcttctgaaagaaaggtaagtcggagctccacttccttggcctcgattgaaaactaaaggtgacattgttttctttatagcttgtcacgacacgagatgtgagttcctgatcgagcccctaacatctagctcgatacctttccagcttaattgggctctgtcggattgaacagacgctgatttgttactcgtaatatttctaaacaggtcgtctatgcattgaagagagtacgtattgtccttcttgctttgcacattcatgtgtttgctgtatgttttactgttactaccatcagatgctaacaacacatccctttggttaaagatgggtcaaacgatctatggattcgacagagtatttaggtcaccagaatcgcgctaggtctatcatagatctcgtatgtacagctattagttgcacagaattcaatgtatttgcagtaataggaagtttggtgaatgtgtttaaccgtagtactccgggaccggcgtgtgtctgtgtgctttcatcattcggctctatgggcaccagggcaacccagtgcgatatcaggcattgttcttcattaagcagggatctgct

SEQ ID NO: 886 - DNA, 6343 bp, Emericella nidulans
atccagcaaaaactcctcaacatcataacaccccgctcaatccttgttggccattctctaaactccgatcttaacgcgctcaaactcacccaccctttcatcgtcgacactgtatttctatatcctcatccgcgtggcccacccctccgcgcaagcctaaagtggctaacccagaaatatctgggcaaagaaattcagaaaggcacaacaggtcacgactctatcgaggacgcccgcgccgtcctcgaactcgtcaagcagaagtgcgaaaagggcgagcagtggggcacaagcgatgcttcaaatgagagtattttcaaacgcttgagccgccatagcgcaccgggtaaacccaatgtcgcagctggagggacaggtcgcactggcgccgtcgttgactggggcaatcctgagcgcggcctgggtgcacaagcgactgtcgcgatcggatgcagcgacgacgaagccgtggtgaaaggcatccaagccgccgtcaacggcgacgaaagcaagccgtctatccccggcggtggtgtagattttacttgggcacgaatgcgcgaactcgaaatctaccgtggctggtgcaaccgtattcccgatccgagcaacgcgaatacatccacattaattgcgttcgattcctcttcctcctcatcagagtcaagaacactaccaactgtcgtctcgcaaaccgtctcccgcatcaaagaggtgtacgatgccctcccagcatgcaccctgtttgtcgtgtactcgggcacaggagacccgagagaagtgagcagactgcaggcaatgcataagatctttcgcgacgagtatcagtccaaaaagccatgggatgaattgagtgttaaatggacagatacggaggagcaggcgctgaagaaggcctgtgaaagggcgagggagggatgtgcgttcatgtgtgttaagtaacgatggcatgtcatgtgcatctgccatggcctcgtactggaaggtcgattaggttaggtgctatctggttgctagattgcatagacatccacctgtatctactttgccctctctatggacacgttttttgggtagcagcataaacgagtacaaagcatataccagaacatggcgcgcaaagctagccaatatgtttcatcagtcgagtactataatacatcgtaaatagaagtaaatgtggataatatctcaaggctagaataggctatgccagggagggttggctaccgggcctcctccgtatccatagcttcttcgcgctgcatagccagtttgaccatgttatcacgcgcagcggcctgcgcctttcgcttttcgttcatttcggcttttgttctcttgccctcatcagctttaagtctggtaaattctagttcggcattttccttgcctagttgcacagctaattgcgtagatggctctgaggatgtggttgagtcttgctgtgatttgtctgcattttccgttgacaactggtttcttgtgctcagggacgctgcccgtgatcggctgcgtagtctgtgcgaacgggctgagaggtcttccataggtttttgctcgatattgggcgtagcttggggatttttgctgctgctgccttgttcgtctggaagtcttggtcctgggttctgcgttgagtctgcttggctgagcgattttcgggacggtcggccccttggccttttgttggaaaccgagacttcgcttgagagtcgaggccgtttcacagcaggttcgtcggaaggaagggactgtggcgtttggtatgtcgagttgtcaactccgatctgtaatcgaggagatgattcatgaactggttctctggtagtttcatggtctttcagcggaatcttcacagagggtatgctcgactctgtcagagagaacccggctaaattgtcttcgaggacgtcctcctcatcaaaagagtctgaggctggtctttcgcgaacaccattgtagtgctctgggaagggaaacggccgctttctgctaccctgaagaagtcctggggatctgacttctggaagaggtgcctcaacgactaaggaatgttgggtctgccttgccgtgtgctcttccacaaagcgattacggagctttaatgcctcaatctccagtttcaacttctcaatctcatccgccttcgattttagttccttcaacactgtggtgaccatgttgaaatctgtattcgccaagtcttgttcgtttaagaaacggtttggtccatttagctcaatgcgcatggcggtaaatgcattcttaagctcatgcatcgtatcgtgtaaagtactgactgagctggagatatggtcgaggctttgaccttgctgctggatatggtgttccacggagatttcgcggttgtcattcgagcccactgagattagaggtcctggacgagaagatggcccatccgccccgaaaccgattgctttgggtttggggaatagaagatcttcgagaacgccagccccttctttaaatacgggctcgaccgggcgcatagtgacgatttcgagcaaggagactttcggcagcttccagaaaatattcggactaaacaatcagcctcagcccatacagaaataacctcctgttactgcattctcaactcacccattgtccagagcgcatagagcgccgagtttctgatggcacaatttgcacccgatctcctgtacaatgcgtccacgtataaggctcaactcggacgactgaggtatctgcttcttttcggtagagattgagatccgctgaagttggcagctcaaccatccagagacaacggaatatgagttcgacagcttcacccattcgttctcaaggaccgccagagagctcagacatcgggagcactggcacaaaacggctgggcgagtaaatttggagaggtctatggcttcggagttcatgttgaagcaaaagaagatcgacgatgagttgcgcgtcacctattctcgaagacatgagaacactggcaggtaagatgtgaagattgccttcaattccacgagggagtctggactgctgactcagctccccacctttccggtttcgacctatcgataagcttagatgcttactggactgcttgtaactcattgtccacttcaagatgccgctaacctaaagaagtaatccttttgcctgacatcaaccaaagttagtattcctggccggtgtatttgatatacttcggcaattgccagtgggctttatagtttgcggagaagacagttgccatatgcttgatgatggttactacgtgtttcataagaaggggcaggcaataggcacaggctcataagcctacatcggagaacctccggcgttacgtcgcagattaagccgggattaccccacatcctgaggtgggtacggcctttttgtgttcaacggaacttcttgattcaacctacgatttcttccctttcccaaagagaaatacatcttaacctgaacacgaatgaaacggttcgtcaggcccgtgcttcaatcctcacgctttttcgagccagttgtctccccattacaagccaggcgtggattgcgactcgttacgaacatggcgacctcaaatgcggctaatggcaagcagacaacatggcatggggcgggcgcagccgagttcgatctgcgaagtgagttgcctgtaggattattcttttatgtatatctagtctaaacgcctcggaattaggtgatactatgaccaagcccacgccgtccatgcttgaagcgatctgtcagacaacactcctagacgatgttttcgaggaggaccccgtcacgaacgaactgcaaaactatgttgctaagcggaccaaccacgaggctgcgctattggttatgtcgggtacaatgggcaaccaggtcgccattcgcacacacctgaccgagcctccatactctgtcgtttgcgattaccgttcccacattatctgctatgaagcggggggtgtcagcgcatggactggggctacggtgatcccggtcattcccaagaataacacctatcttacactcgaggatgttcaaaagaaagtggtaatcagcaaagatgtccacacgtgccccacaaagttgatcagcctcgaaaacacattagacggaatgatcatgccgttagaggaagctcgcaggattacagaatgggcgcacgaaaatgggatcaaggtacacctcgacggtgctaggttgtgggaagccgttgtttccggggcaggcagcttgcccgaatacagcagcctcttcgacagtatcagtctatgcttttcgaaaggcttaggcgctcccattggtagcatcatagtcggctcggaacttttcataaagaaggcgcgttggttccgcaagtcaattggaggaggcgcccgccaaaccggtgtgctagctgcagccgcaagggttgcccttgatgagacttttgggttagatccctccggcaaggatgggaagctgcgagagacccatatcaaggcgaagcgcgtcgcggacatgtggacgaagcgtggaggaaaactagcctatccggtccaaactaatatggtatggttggatactgaggcatccggccttggaccgaatgacctagcagaaaccggaaaagagaaaggattgaagctcctgggccacaggattgttatccattatcgtaaggccctagctctcaaggttcaattcaagcaagctctaactccttgtagaggtatcagaagatgcaatcgaccgccttgagcaggtgtttgacttggtattgacaggccagcaccaacaaagtactgacaccagcaagccttatggtagccgataattctggtccgctctcactctctgaaaaacttagcaaagatgctgtgcaataaaatatcaatagtctaaagaaaaaaaatgtccctattactagaagtaggctgatttatcgctatcgctattattaagtgtacgaagcacacaatgcagtagccttgcgaaagtaaaaaagacatggaacgggaaaacctccctccgctcgagtcacaaacaaagaatgcacgatccatgggtgactcccgggctgagccttaaaagcccattatactaccaatgttattggttcgatcatatcattgttgcctcaggaaagtaattaatgcctgatttctgccttggacgttccccaagttcataaagctgagccatctcccgcaccttcgctgccgttcctcggacgacgagtcggcgattggaagacttgaaccggtggttacctagtctcttgttcgttcccattgttaaatccgcctgtttaacaaacccattatcgcgaacagcccaactggttgttttgaatggctgaggcggatttgtccactgtgtacgttcattttccaacttgttgatcacgcagcaacatacaagctaacgtgcaacgactcgctgcagacataatcgcttgcctccttaaatacctgcgtacaatctcctcgttgcttccttgtttattggcctctcgccgcaaccaaaaaaaatcctgttcctcttagctggtatcgccattgttggatgaatcgagagtacaaagcgccgttggatttcctggacaaagccacagtcatatccaactcggacattttgcctctacttttgacatactccgttttggtcgtgtgtcgtgttcttaatacactgattcagtttttcgacttacgtgaagactgccttcaaggaggatccagtttcgaggtcaacattcgaggttaatataccgccaacaattatccgttttgctttatattctcaaggtaaagtgaccgaccgttaggcatcagggcgttggtcgggatttgtatctagagccccaggactgatgcgtggtcagatattcgatatggaccacctctgaagcagcaacaacaggcttaactcagagcttcccatatgcaagaagctcttcgtcttggactattgcttaggtgtattttgtcctcttcgcaccaaaaacctcggcaggatggaggcaacccaagaatcaactcagccatacacggaccctcgacgcggcgggcttaatgcttctggattacttgaagaagacttgtcagacgtcatttgtatcctccaccctagctcccctcaggctctcgaggcggtggcggctacagctcgtgtcgcgccctggcatattttgcagagagacgatctggagtatgaagtccctagcactgcggccctagacattgcccttagactgtcttccaatgtgatggacccaagccggggattctcctttgggcgtaccatcggccgttccgatatcctcctctgtgcagacaatggatccaagcgtatctcc

SEQ ID NO: 887 - DNA, 3759 bp, Emericella nidulans
ggaacagcttcgtactggctctgctatggtgtcgagaagaattttgcgcctttgacgaagcagtggcggattccgagttggttggcagcttgtgccaagtgggctgatgttcatcggcctgtggttcctgaaggagtcgccccgctggttgatgaagcagggtcgccgcgaggaggcaacggcgtcgctcgctttcacgcggcgcgctgatccaaacagcgacgaggtgcagcaggaactggctgagatccgggcgtctatcgaagaggagctccgctccaccgagggcgtcacctggcgcgaggtcctgctgccggggaacaggttgcgattcctcaatgcattcttgatcatgttctggcagcagttctccggcacgaacagtatcgggtactacgcgccgcagctgttccagactatcggagtggcttccaccgacaccagtcttttcaccacgggtatctatggagtcgtcaaggtcgtttccacaggtcttttccttcttatcggaattgaccggttcggtcgtaagtggtctttggtcggtggaggttgggccatggccgtctttatgttcattctgggtgcagtcctggtttcatacccccctgtgaacactgacacaatctccaatgcaagcattgcaatgatcgtaatgatctacctttacgttatcaggtatgtgattatccttttccccctgaatcgtgatcagccctaagctaactatgacatagctactccgcctcctggggtcccatcccgtgggtatacatttcggaaatcttcccaacgcgcctgcgggcctatggtgtcggcatgggctcggccacccagtggctgttcaactttgttgtaacaaagttcaccccctctgccattagcaacattggctggcgcacgttcattatgtttggtgtcttctgctttgctatgggcttgtgggtgtgcatctttatcaaagagaccaagggaaagaggcttgaggatatggacgacatctttgggggaaagaccgtcgagcagatgcagaaagatatcgagcaggcagatgttgaggagcagacagaggtggaaaagacccagacaagacatgaagagcaggtggttcgttaactgacagcttgattgctcctatgatatggttaagagtccgccctctactgactgtggttgagtgtccttgcacttgctttatcccggttccgggagatctgccagatatggtgggctctctggcattgtgtccgtgatagatacagaaatagttacacaggtcagagaaggcatacgaattggccagagacggatagacaatgctatcaacctgatgctccactaaagaaaagttactgactgcgtgaacttgccgggctgatgcaattgcaggtgtagaggtgagaatcggccagatctggcgctggacaggagtagacggccgtaccggccacaagagaacctcagggtgtatttttgtgaaggctaaaagttgagatcgcccccgcacaaatgttccttgatgcggtgactcgtaatagaatggacccttccttattcgtagcaacggccaatggctgctgggttgttgggctcatccgacccattacagatacacaccatgtgcaaagagctttatttagttcacgcttgtaatcatactgaccagtcgcagctctcagaaagtagcgctgccaattcctcaagatactccttatcctcatcatcgaaacccgacggctcggcgcagtctatatcaataatcgcgaccgtctgcaatggtcagtgcccttcccaacggtatggaataaccaacttacctcgccgcccgccagaatcggcaccacaatttcacttcgactactcgcatcacaagcaatgtgcccggggaactccagcacatcgggaacaacgaccgtctcgcgcttcgccgccgccgccccgcacacgccgcgaccaaaccggatctcctggcaagctggacggccctggaagggaccgagccagagcgtttctttcacacgagcggcttctgtcgattcagctgtctctttggaagggaattgatcttggcggatgtagaaaccagcccaattcacggaggaggagggggccggaagcgcggcgtaggcgtgccagaggagggaggcgacattggagaagttgctgacaatgctaatcaatatcctgacttgaccatatagatagtccaagggaagggtgttttaactacagtccacgtacctgacccagttgcgctgtcctgtcacaaggcccttggcttgctgaatgacctgcgcataaatctcggctttagagccagatccgaagtaagaggagtctgcgtggggcttgggatgtcagcattgaagaccgtcacgtcggctcatgggctagtataccatgttcaattagcttgaccggtgaggatcgcagcttgtagaggatagaatcgcagtaaaaaattatggcgataagaaagtggggtgtactgtacggtgcggggagctttacagtacaagacaacaagagtatagacgtggacagcgagctacttacccgaccagacatcctctttcttaaatatttgcctggaatgttcttctcatactgagccgcaattccgccatttcaatcgaataagatcgatctccaaaatctatcctatcgtccctcgtcactcggctcgaactgcttatttgggttatcgcgataagataaacctgcagttggagctgttggagtcttggagctatttcacgctctatttaaacagcttgctaacattgctttcttcctagacagatttcgtcatccaaatcaatccccgtcgttgaaaatggacttcctcgccgtaggacttgtctccatcctctccccagtcctcgcaagggaaattacctttcctcccattgctgccatccaatcagaccaattcatcctcggtcagcatgagaagaatatcgacatcgtcagcggtagccaattttctggcttaaccacgttcgcccatatcccctatgttaactgtttcattgacagcgaagccgaatcaacaccgtatgatatcgccatgcttggggcaccattcgacacggtaagtcatggaaccggtaccgtccatgttgctgcggcctgcttacgtcggttgtgcagggagtcacggctcgcccgggcgcaagatacggacccggaggtatccgactcggctcgcgccgcatccaaggttggaacatctacactgggcagaacgtctttgagagttgggcaaagctcgtggattgtggggatgcgccgttaacgtggttggacaatacggttgcattgaagcagcttgatcttgcacataaggtactttcattttcactttctgtcttttccgggaatgcgaggctgaggttatggcaggtcatctcttcgcgtgcaacgaacagtacggagaatggccgcacaccgcgtattgttaccctgggaggggaccatacgacgacgttgtcggcattgaggtcgacgtataagcattttgggccggtgtcggtgatccactttgatagtcatattggtaagcttcttctgagtatggagcatccgttgctgattgtggtagatacgtgggaacctgaggtactaggtaagctatcttaactcgaaatggattgagcggcattgatagcgatatcaataaactaggcggcgggatctctaatatgcgtaggtgcgcattctattattcagcgctaaactcattgacagtgcgttcat

SEQ ID NO: 888 - DNA, 3699 bp, Emericella nidulans
aatagttataggaaaaagaatccaaaataacttagaaatcaaaaattcattacgacaaggacctaaagggtaccggcccgtttacatttaggagatcgaaaagaaaaattagtggatacatgtcaaaatatcttcaaacgggcctaaaatttaaaaacgcccaaaagttttggtggggcccccattgtaatcttgtagggggttttgggttccttaaaacgtcgccgggccaatccaattttgccagtttggggaaaaatttgtgggtaaaacggtggggcgtcttcccgtaagccgaaaaaatgctagagaatctgtgtattacaatggtcgaaatcttcagtgttcgggcaatgtcacaggcatgctgccctcctgcacctcccaagaccgccaaactatggctcgctgtgaatgttagagagagggtttgtatttatgagtgattcctaggttaatacgtaccgatatcatatcctttgccctccgtcaacgcccggattggccgacacatggcctcattggcaacattcaagaaaccgcaggccacctcttctggagtcagagctttgccggtatctctgttgatctccgctgtcaaagcgacgaacttcttcttcacaatgtccacatcgagcggctgatcctctgtctcgccgaaaatctttgggaacaagtctgggatcagccggcctaggaagaggtttgcatcagtcaccgttagagggccacccttgcgataacatgcagggccaggatgcgacgaggcgctttcaggaccgacgacaaagaggccgctccgccaaaataggatcgaaccgccgccggctgcgacggtgttgatatcgagctgaggactctgaatcgtgattccggcagtgttgctctcaaagacatgctcgaatgtgcccccgtaccgtgagacgtcagtggaagtgccacccatatcaaagcccacaaccggagtgccagagctggcatcgtacgaggtccgagcaaagccaacgactcctcctacgggcagttagcactgaacagcccagatgaatttgacgagtctcacctgctggtccactgaggatgccccttagcccactgaaccggtcatggctcacgagaccaccatcagactgcatgaagtcacagcacacgccgtccaggtttccgccttcaaagccctttgcgaacccggtcaaataggtcttgatctcaggcgtgaggtatgcgtccgccgacgaggaactcccccggggcaccatcttgatcatttttgcagcgacgccagaggagagggatacatgcttgaacccctcgtcaagcgctagcctctcgacccgattctcatggtgaggaaatacatgtgagtgggtgaagcagacggcgagggtatcgaacccctgcgcgcggagctctctcagtgtttgtcggacagtggtctcgtccagtggctttagaatacggatcatgtcgccacttgatgacttgacgagaacacccggtatctcctttctcgaggcaaagagacccgctgcatcttcgtcgaatccctcgatcgtgacacgttcgtcaacctcccttacctccgagtagagcacctctggcttgacgatattcaggtcgaacagccggggccgcgactggtacccaatctccaacaaatctcggaaccccttcgtgacgaggaaggcatgttttgtcccttttcgctcgaggagcgcgttcgtcgcgactgttgtacccatgcggatcgactctagctcgcctttcgggaggggaacgccgcgggggatctcttgaccgtagtagagcgagagaacccgtcgaatgccttgatcaggcagcgtcacgagctggtgagatggcggtttgggaccctcgagtgacataccttcagtcggggcatcggcgtaattagccggatccactgaaagcagcttcaaaacaacgtctggctgccctggtaagcttgcccagacatcggtgaatgtgccgccgcggtctgtgaatgtgagccttggtgtcttgttctctctaggatctggagtttggtggttcttaccaatcgcgatgcgaacaccgccgggggcgcgtaatggaacggtcatggtgatggacgagagagcggagttgatggaactgtatcttgttctttgcgggaattcaagcctactttataacctagtagcattacacccagtgcccctcaggagctggaattggaaggtcgatacggctggaactgggtcgaccatggtcatctgcatccatccatctccagtatcccaattgatgagtatacaaaggccggcccagcctggaacatgcctctcctctggatgcttcctccattctggcctggaaattgggaaggtcgatacggctttagcttcaatttagcttcaatcttgtcccgttagccaccaatgggctactgcatcgggcacctagcagtgggtcttccccagatcctttatcggagttggagtaagccacaaggctcctaagagtctgctgagggtaggtatgctatctagatacggggagacgccggttgagcagatgggtataaatgctggtgacggctcgatatccgtcgaggaaatcaattatccatcttcacttcattccacatggcagacctagcaaagacccttgctgttgaaacaccagacacagagaagcaagatgtctccacggcaatggacgaggctgcccagtacctggcccacagtcgcggcttcgagccgctgtctcaagaggaagagaagcagatgatacgcaagatggactggatccttctccccatggtacctctccaaaacctcttgatgtttcgctggaccccgcaccgctaatagacgcagctgttcatgaccgctactctgggagcagtagacaaggtcgccatcagcacggcggccatctacggcctaaaggacgaccttcatctcgtcggccagcagtactcgtgggctggttcgatcttgtcaattggagtgcgtcttaccctaggctgtccattcgctctacttttacagctggctaagaagagtaggcgattgtcggaatgtggccgtcaacgtatcttgtccaccgattaccgtcggcaaagtacctctctgcatgctcggccggatggtctatcctggcccttctcatgccggtctctcggaactggagtgggctgatggctctgcgattctttatgggtacttctctttcactcctccaagccacggagatgagatgacgagacgtcagatgctaatagtatccactgacaaggctgcctcgaagcgatcatcgtcccctccatctcgctcatcattgccggattctacacgaaatctgagcaaccaccgcgtaatgccctagtttttgcggctgcgagctcgatcatcaacggtttcctctcatgggctgttggacacattccgtccagtgcaccgctggcaatctggcaatacctgttcctaattaccggctccgtgtcaacgctctggtcaatcttcgtattcgtcttcctgcccgactcccccatgaacgcctttttcttgaacgagagagagcggtatcaccgccgtccagcgcctggcagagaacaagaccggcattaccaataggcaatggaaatgggatcaagcactcgaagtcattatcgaccccaagacatggatccttttttctttcaatatttcc

SEQ ID NO: 889 - DNA, 3224 bp, Emericella nidulans
gatctgatggagttaatgccaattttaaaagaaaattcaaggccaggagaaagagagaaaattgtatagaataaacctagcagaggggtcgagaatagggggtcataaaattggaagaaaagagatcaaaaagggatagatcttatggataaatccctagggtgagaaaaggaagcagtaatgtgcctttataaaaggttaaagagtggggtcatggaataaagatgtggtgttgctttctaaagaagagtgccagttgtcgccgtggggcgggcaggcctggcttcgagggggaaatgtctgaccctgttgctccggggggataggcgacgagagacgagccgtggggggttaaaagagttgcatttgtgcgatggggttcgacggggcggtctagggggggaggggtatgaaggcgtgagtttgatatcggtgtgctgtcccagtagttactattgtgggtgttgctgtcgactgcggacgaaggagggagcggaggaaccgtcgttggggtttgctcggttggatttggatctgagtctatgacagactgggcatgcgagttgagattctcggttgtccacgtcttcttcttcttttcttttgttgagagtttccgcgtttttgtgattccgttgctgcgttgtgatgctgatgttgcggcttgcgccgttgatttaagggggataagtgcgctcagtcgagtagagcggcggagagccatcttggcgaagctgatctgtcgaagatgcaaagattttgagttttgaactgcttgcacagttatcctggcctgcggaagttgtttgagtatgagagctcaaggttgccttagcaatcagaatccggggtgcggagtcagcggcttttcgctgtcatccttacgaaagcggactcgtattccttttgcaaatcgcaactctgaacgcttggtgcggtcgatgtatagagggcattgctgaccctgaagctcgatttaaagttggcggttgcggttgcatctaccagattcttgcctacccctactcttggatgcgggataaagggtccgcagtctcaattccaacggcttcttcgagctgcatccatctgatgcgccctttatccagggcccaggtatgtcattgtaaaacttcaagctatagagtgtctgcaagcaggataataaccttcagaatagtacggagtctcagagtaccttttgcctagtcgctgaaatcatactgctggccacgcacaagattggcgtaccaagtatggcaagtgaattgatatccaatggattatgaaacatgagaggccgtacaagtgccgtcacatactgtttcatgtgggaaagcttcgctctgtcacaaccaatcagtccctggtcggtgccagaatgtcagacaagtcccgtctttgtggaattgaaactgcacagatatgaagatctgtcacttgtcctcgtgctgaacaaagtatggattaagggaggttaaggaggtaacgcctcatagctctcatttgcttgatacaccgtacagatgttaacagtttgcggtccctaaacagtagcagaaggccgccgctccatggcaaaatgtctgacatacttgagtggttcaacgacaccagcctcaactgaaagcatgagaaatgcgcagccgacgcaggtagtgtcatcggtcaatgcttgacaaataataatccgcctcctgaggtagcaaacggcgcccgtagtttgttatgatctgggtgcagcgtctcgaatagacccgactgaaagtctagccccttggtcttatcagccaccactgagtattgactcgatacaagtggcaccagcaaacgtgttcttgaaatacgtatctagcaagcagaacgcttgcatcccacctcaggcgtctgacggagtcatgatatgggagatcaacaatcaaggatataaccctatgcaagctttgtttttggatgttgatctcgtcgaacaatctctatgggaagcctgataacctttcaggtagccaggaaattaggagtactaggctacttatatgatatgaaacacgcaagatcttcagacaataaagggccacaccctcgctgatcagtcctcgcgggaaagcataacctggaaacccaaggccaatattaattgcgatttgcgaattgcgacaaggatctgtggagttgttttgttatgctagactactagtaagtactctaaagactctgtcattgggtgacgagcaacgagttgtctcgtccgtagctccgcctgcaaaaacaatgcttccaactttcatagagttgtgtctggaatctcctagcgaaggacattgctcagacgcattctcctcgatggttggcagcgtgctctttgaccacagtgcgaggtcagaaggagagtcattgccagtccggcgatcaatatagcgagccttgatagactgaacgatcaactagggtccatagcgagtagcgacaagcttttggcttcgccaccctgcgagaatcatctactggaagcgtccattaggtttttcttgcttcagacttgttttccttttctgtaactctcttgtattgtacgtaaattaccggcattaacaaacggcttactggctcgcacgtgctacgtcttttgaattcgccacacactattcttagtgtccattcctaagatcgcctttactggatgaccactgcgaattcgacccgcctgtgcctggattttgttgataatttcttgatctggccaattgttgtttggttgctagcccatgacctcatgagcttcgggacgtgtgccaaacaagtgatggaccatggtaacaacacagtagttcctcgcatgttaagaccctgtggatatcttgcttgaaatgccaagtttgtccttgagaatctgaattccaagaaatggcataccggaaggcgaatggtgttcgatgctgggttcgagcatcggaagcgggttgccacaatcgaccaaactcgccgggcgacgcgtccacccgtcggacttatgatgttccgtgtctatagcagcattcttcgataatgttgacaccatatccggggaggaggaatggacataaatagaatatcagatattgcttcaagacggtctttgggatcgacaacggtctggaatctactcagagtacatcgcttgaagttggcaagtgtctcgcgcaatgagcctatctgtcccaccagttgaaggagcaattttatat

SEQ ID NO: 890 - DNA, 5353 bp, Emericella nidulans
accccggtcacgcagcctgtgccgcctccaatgagacatggcttctgcttttccgaggagcctgcgtataccgcgaactgctcatggtcgtattcgtgcgccaatcgggtgactttgcctgcatttccgcatgtgagcttcgtgccgacgatgttgggatgctgcgccagttccgacataatgttcgaattcaggtcgaccccgttacacatggcagggaactatcatacaactatattagcatcgtatagcaggtacagaagcttaaagcatacgctatagatcacgatcgggattggactattgtcggcgacgtcgcgatagaaatcgacaatcacctccttagtcacggctttgacccagtaggacgggggcagcaagaggccaaaatccgcccctgcttcgtgcgcctcctctgccagacgaatagattcgtttgtagactgccgctgatcccagccacaatcgggaactggggagcctcagatcactcgcagcgcggcgcgcaacgcggaccagctcttgcctttcacttgctggcagcagaactgcttcggctgtcgttccagccatcaccagaccgtctacacccccgcggattaggtagacaaaatacttgtatgaggcatcgtagtcgatctcctggcgtacggtaggcttataaagtgacaggacggggcagtatatgccggccggtaggggtttgcttttcgctgcgatcgtggacgtcattcttatctgctatattgtaattacgatatctttttccatttctttctatctacacttcttcttataatgtcagctacccaaagcccccttcccacgatttttggagaccttcggaggatggccgatcagcggagaacagtccgccactgcgtttataacagctacaattggttcgcagagtgaggggagatggagacaacatcgaactctgccagctgtgctgtactgcacgagtcatgcaaggatgggagcatggactgactccagctggtgaggcatcccctgtggggtagcgttgtggcagctttgtccgtctctgcccaccaagacagtgcttgaatggaatcagcaccccgaatatgcccaaacgaaagagggaaataccagcagtggaaaacggccaccatgaatcctcagcccaagaaccaaacaagagctacaatttggcggaggttttgccggggatcacacgcaaaatcactgcgtgtgctgcgtgtcgcaagaacaaggtacgggcgttgaacaagccctctcgagtatcattgagcccgtctaaccagatagatccgctgcgaaatgtctgacgagggccctccctgtgcccgatgccgtcgccgtgggttatcttgcgtgctgaaccgcagtctgcagtcgctgatcgaggatacgaagtaaatccatcctgtcaagaagagtcgtagagagaagactagcgctgacctagcggaaggaacatccagctcctgcaaaccgatgttgcacacctccatcacaccctcacccttctctgccagcatctcgggctcgagggccccagggcgctcgcctccgcgggcgatcagcgtgacggatcgtatcctcctgcggaaaatgagcagtctgagagtcatcaggaagaaggggaaggctgcgaggtgtcgcctcccgagtcaccatcggctgtgcaagcgcccatcgacacctttctcgatatcaccaaaacccggagcactcactccattgactcgcctccaagcgcgcgcgccggccggtcaggggcaaggtcggacctgatcagcaagggcattatcagcgctgctgtcgccgagcggctcgttcgcaattacttctccaggctagaccactatctgtacggcattggcggcgagtatcaggggctggaccagctgcagacaaacgcgcccagcctcctggccgccatctgcaccgtttctgccctacacaatcctcaagaccgcacggtctacgaggcctgcaaccgcgaattccggtcgttggtcgcgaagtccacctttgagaagcgtgacatcgactacattcgcgcgctgtgtatcagttctttctggctggccgacgcctctcgcattctctgcagtgatgcgatccgacgcgccgccgatatgcgaatgcatcgcagttttgatgccctgttcgaggacaggacaggcacaggggatgcgcctggcctgtcagtgacctctcccctatcgcagaatccagcctctgccaccgaccgcgtacggctgtggtatctgctcttcgtctgcgaccagcacctgtccatcctccacaatcgcgactcgcttctccgcagcgacaagggcattgcagtgggatgggagtcatacctgcaccgtgccgaaaccaccgagtctgacgtgcgcattctgtcccaggtttctcttctgcttatcatgggccaggtacgggacgccctaggttcagatagccagaccccgttgcccgctgctctggctagccaaattctcaactactcgcggcagctcgacaagtggtataccaaattctccagcctcttcgtcacgaacgccttcattggcgagttccccaagcgaggtctgcagctgcactatcagttcgggaagctatacttgggtcatcaagtgtttaaaggattgcatggccgccctattcctccgcactttttgactgctgcgactatggcgcatgacacggcagctgccatcttcgagatgatcctgggcgagcccgaacttcaagaaggacttgtcggcatgccgcattactttcatgtcatgatcgcatttgcaggccatctcctgcttgaaatttgccagaactactacgagcagcttgggatcaaagtgcaggatgacttccagctaatcaacagtgcacttaacttatttcgtaataccaaatgcattccccagcatcctctatggcgaatgacacctggtctgaacaggaagctccacgactgcgcagccagcattggcgcccctgttccggtgcctgctaccacagttccttatggatcgggcgggttgaatatgcaaccagtccagcatgagaccgtatattatcccccagtcccgactgcggcaccagcttcacaagcgttggatgagctcctcttcacggatttcgagggatttaattttccggacttgacgtccaacttcatgacgtagacttccagattcttcaacagaatcccaccgtatcagcttcggcaacaccgtaagactcttctcatacctgcgggctatcgtgaccgtgaatatcgtcgaccaggatcctgcaatttgctgaccggctggattaggttgctcgaatataatttctgacgtctctgtgtcgccgatctcaattcactaatggtaattgagcgtcagcgaaacgctcggcacctggaagatccacaagtttgagtatgggcatctgtgcatccatcctcttcgccagtctatgtatactcgtacaggccgagcacacttggtatcttcgcctgtatgtccgcgaagggtacgctgatctcaccctcgaggactttcacgctcgcacagcaaaagctggggtatccgcgagcgcaagctggcttcataggtaacgatctgtgtagtctatctgtccaacaacgaggttaccagccatttctgtgaaggcgggctggatttggagtattctgtgatgggttcaataataaagatgctagctaaaatggtagcagaaacgtaatatcagtgttcatagactcgaaacttgtaatagacagaatactcatgcctatacagtagaaaaccgcagacttcccgcgaaacagtcattgtcaagctggaaagcaccgcattcgagggatttctgcgggttgtctggaaaggagacagaaaccctctgtcccccagcggaagtcgcccgtgccggtatgcagagcataagctggatagcaatccgtcttgcattttcggagagaaacccggcacagaacgcccagtccaagatttctagctagtattgccccgtcagagccattcaactagatgtgagccaaaatagaagcacgctatgttgtctctttcgtgaaaagccggtcaactcgcacaaaatcttcccaaggcttgtcgcagacataccgcgggcgtatatctgcggacagagaatggtatggcagagagtatattgagtttcgacaaagtccagcagcgtcttccgcccgcgctacctggcaccaatctggcggctgagctcgtgaatacgccaggtctaccggtcctcgttgtgctggatgacgatcccacaggaacccagacatgtcatgccgttaacgtgctgacagtctgggacgaagagatcctcgtccatgagctttagacgtgcaatcgcggcttctttatacttactaactcacgcgctcttccgactacagaggcccggaaattgatcagacagatatgcactgccatcacgaaagcagctgcaagagctcaaaggccattcgagatcgtgttgcggggtgactcgacacttcgcggccacttccccgatgagctagaggcggcagaggagataattggagcggttgatagctggatcctggcgcctttctttcgtcagggagggcgtttcactattgacgatactcactatgtcttggaccctgttggaaatctagtaccggctgcgcagacaccgcttgctaaggacgctacttttggagacgcgaactcgaacctcaggaactacgtcgtggagaagtcggagggctcgattacggcgaacagagtgcaatatatctccttggaggatattcgcactggcgggcctcgagctgtggcggagaagctcatcgcttctcaaaaggggagtatcatcatcgtcaatgctgtggtcgatacggatatggaaatcttcgtgcttggtttgttagatggtacgtctaatttcttccttcatgatcaagcaagctgacttcactagcaaaatcgaagggaaaagcatacatctaccgaacaggtgctgcctttgtatcgacgagactgggaattacgcacattcctccattgacacccagatctctcggtctcagcacccacacctgtcaatcaggtggtttgattctcgcaggctcctatgtgtccaagtctaccgagcaactgcagtatctgattgacggacgagggtcagatctgcaggtgattaccctcagggttgaagatcttctgaaaagcgcccaggatgcggagcagatagctctggacgcaaaggacaaggccggaaatttcattctcgcagggcaggatgacctagtcatgacaagccgcaaccacataactagagttgccggggtatctacttt

SEQ ID NO: 891 - DNA, 2276 bp, Emericella nidulans
cagggctgagtgtacatacttcccaaaagggccagaatcccaaacaaaacaaaccaaggctggggataccgcagctgagtcagcccgaaggtggcacgtgcggggcctatattgaggactatacgccatgtagtatgcaactcttgtaccccagcatacagtcattttctggagattagaaaaatagaggatatcagatgctatgtcattaatatgttgacagaacaatgtctgccgtcaagagtgccgtgatctctccagcacaattcagcagcgcagtgtgtcttccccgctgtggagatcgatcggttcaattcccctttcggcctctcggtttccccctgactgagtttcgatcacattgttccggcaagacatgctttcaggctaagggctgataatcttcctatttcttcctgacgtcttatccgcaactcgctaaatggatcatctatcgcgtctgtctccgttggcccattgaatgagcatgccgctgctatgctcgccggctgcctggagcttgaactattctcccgcatctgcactcgacccttgtcctcaccgcagaaccctcacagaaaatgagcatcccactaccaattcggacgtcagatggaacgggcaacttgtcttccagcccgccaaaatccaacggacttcctcgcctctcgccctccccttccttcgtccagaaacattctcccaggagctctgatacttcaggtctccgccgctctgcgagccatcataatgctcggcaaactttcaagcaacggcgctgcaaatcgcagtacccccgtgactctcccgagcgccatgttgagttcatccttgtcgcctcgttccatatcgatcgcggcccgatcatggagcatcaatacccgggtcccattagtagtgatgaaggtatgttggcggaactgatgctgccggaccagacgcacgtccgcagccaggattggactatcttctttctgcataaggacactggtggggaggggtagaagaccgacttggcgggggagaataataagcggaagggaaagagaaatagagtgcggtcctcctcgggcgatgaagggaccagtgcggacacaaacaatgaatccgaggtcacggaggaagaggagagcagcgatgaggaagatggcggggaaggaccgccattgatgtatgtgctcaatttggtgaacacgaaacaagataacactgttaagcggtatgttccccgtcaacatgttctttagcgccacagttgcggctgacattgtggacagcggtgctgtagtaaaggccatggccatatgtacacgacattcatttcttcatatctataaagtaagcactccataagcgtctctgattgtcaactaaccaggggcagcctattttgcttttagccctggaggactatttcaagaacccgtacccagaaactcttgaaaccctctacaatgccgtgaacgccatggatctgtctccgatgccgaaactgaacctgcttgagcgccagatactgcaagctacgaacagcaaagacatgttcatcgagaagttcgagcagatggtccagcagcgcgcgattgaggacggcgagaacgacatcgatgaggataatccaccctccccgagaaggggcactgctccccgttacaccctaccccgagatacccacgagtttgagtctaagattatctataacgacattcccatccctgtaaaggtacccacggtgatctggcctgagatcgtgggcgacttttcgctcgtcaagctcatccagattttctctgcaccacatgctgcatcgcctcaaccgtttcctcttcatcctcacttgaccaccagtgggccacttacccacccaattatcgtcctcgtcaatgccatgctgacccagaaacgggtcgtcttcctcggccacaaccgaccgtccggagaggttgcagaagcagtgctagctgcctgtgcactagcatctggtggaatcctgcgtgggttcacccgtcatgcctttccctacacggatttaaccaagatcgacgatctactgcgcgtgccaggatttatcgcgggagtcacaaatcctacatttgctaatcaccccgagtggtgggatgtgctctgcgatctgcctacgggtcgaatcaagatcagtaaccacatagaaccggctccggtgactgacggccaactatacttccagcagcagagcccagttagcgcgtccggcccgaatgccgatcccacaggggacaacctgttcaggaggacct

SEQ ID NO: 892 - DNA, 3045 bp, Emericella nidulans
tacacatacgatttatgtgacactatagaatactaggatcttctattcatgacagcccatcgcctggtagtcgactaagtgtcctgggacatcattcgccgagatataagtgtgcttctggaaggacagcagtttccaacttctaacccgctatcattccagacctggatcaaactacaagcccaacggagccagaaccttgagggaatagttttcagatctgatctgccacctgctgactttaagtactggggcttgaacgatggcaatacctacgaggacgaaacggtcgaagaagtgatcttcaacagccacgacacgaatgcatactttagggacgcaaacagagccttacgtacagaacgtgtggagattcttcttgctgcactgttgaagtccttccagaaaactttcccaaatcgccgactcccagccgtttttgaaattaacgatggccgaaacgtaggtgatagtggacttgacttctcaaacacagttggcaacttcgaatgtatgacacctatacacatctttctcgatgagccacacaacggcttggatattgtaagacagactaaggacgcaagacgcagcgccttcggaagggttctatcggacggtcaacaagctttcactgaccgatgggttgaagtgctctttcaatattccgaaggactcgcaagcgaaactattttcgagacagtagatctcactggacctgggacatctccagttggcaagagtacccgtcgtggatgtgtgtttaatgtcaacgtcattgcgtaccccgataagttgcgtattcgcttcaagttcaatcgcaacatgaagtaccaggagaagatccgggattgggctgactcctatgccaatgccatcagtgcccttggtactgagttgtcaggagcgtcgccgactctaactgtgactgatttcccactgctgcatttaacatctgagagcctcagggttcttcaagatgaaattttgcctgacgccggcttgaactgctctgatgttgaagacatctacccatgttctccaatccaacaaggcatacttatcagccaagtgaaatcaccatccgaatattatatccagcaatcttttgagatcataccgaccacttcctctggcaaacttgaccatactcgtcttcttgctgcctggcaggtcttgataaaccgccaccccatgcttcgaacacgattcgtccgttcggcatccggatcaagcgagcgtttgtttgatcaggtggtcctcaagtcgtgcaaggccgaagctgagcatgtcgagtgcacagacgacgatcttttcagaaaccttgccgtcaaagctactctagatgaacgacatattgacaagcgcatcggtcataagcttacgatttattcgacctcttccaaccggacgttcggcaatatcattatcagccacgcactcgtagacgcctcatctctcatgatcatacaggccgagcttgcccaggcatatgatggcaagctggcgcctgacaccatcggcgctgcttatagcgaatatatttcgcatctgcagaagatacccgcggatcaggcgttggattactgggccaagcgccttgctgacgcagagccatgctaccttcgaggcatgacagaggatggaatgcagccagctactgctgatgactccacaccaaggaggcccatgcaaacagtatcaattgacatcaactgcattgaaaagctacatagcttcaccgaaacctatggtgtcacaattgccaacgtgttccagctcgtctgggccatggttttagcccagtacaccggctcgcctaatgtgtcctttggctatctatcaagtggtcgcgacgtccctgtcaaagatgttgagaccatggtaggccccctaattaacatgatggtcactcatatcaaactagacatggaggccagtgctcagaacacactcaagcaaatacaagagaacttctttgagagcttcaactaccagagagcacccttggttgagatttggcacgcccttcagctccagggcagaagcttgttcaacacagcgctttcctatcgccatattgtttcagcagaaaaacatcagctcagtctcgcgctagagcagatcaccggtgaggatcccacagagtatgatgtgacggtcagtgtgttcgcatcgccagaaaagatatccgcttctctgcagtactcgccagattttctttcctacgatagcgcgaacaggttgctcggctgtgtccggcagggaatccaatccctcgttactaacggagatacccatgtcggacagctaaacaccgtaacgccgaaggatatcctgcaagtccgtgcttggaatgacaagattcctgccgttgatggatattgtcttatccatgacttattcaatgaacagcggctactccgacctaacgcacaagccgtctgtgcctgggatggcgacttaacataccaacaactggacgagatgagcaatgcgctggctcaccacctagtgaccttgggaattggtcccgaagtaatggtagcgctgtgtctggataaatctaaattcgccatcattgctcagctcagtgtcctcaaggcagctggcgtcgttgtgtcaatcaatccaaagcacccaacgcagcgcctggaactcgtcctcaaagatataaacgcaaaggtgatgctgacgtcgcatcagtattcatctcagttcaggaaccttgtcccgcatattctgcacatggacgagacactattttctgccctttcttcacaaccccagcctccaagtacgaatgttacccccaacaacgctgccttcattatctacacaagtggcagtaccggtatgccaaaaggtgtcattttaacccatctttctctatgttccagcttccgcgctcatggcaagatttacgaaatgtctcccagtactcgttcactccaattcgctgcctacacgttcgatgccagcattagtgatatctggggcactatgtcgcatggggggtgcgtctgtgtcatatcagaagaggag

SEQ ID NO: 893 - DNA, 8213 bp, Emericella nidulans
tgccgccaatcaagcatatccgttgaatgagttgtttcgccgtcgcaacgcaggttgtgagcgcggctggaatctttaagcagatcctacggttagcacaactcaccgcgatcgcggttgcagatcttacttatgaggagagatggaaaaagtgccctggcctcctcgagggtaggccgtatacccgttcgcaagggcggcgtgcctattcatcgctgcagaccattcacccggtgccgccgtttaatccaaccccaaagcacctagttcgcggaaagtcgttcggtcgcaaagtgaggcgtgggaagttgtgggtttatgaacgttgtacttggacgagagaatacgccgggaagcgacgaattaaatagcgaaagctgctcccagggcgataccgaagtggcagaaagaagagaacgaatgactggcaggaaagtgaggcttttcatgtagtaatgatccaaaggatgacgagttggcgattctccgaggaccagaccggccggggcccggaagatccatcgggcgcgttcacctctccatgccgtttgcagccatcttaagtcccacacggccaagtttgttccacggttccccgatgtcttttgggttgtcaattgaattgattatatgcatctgtctattcactaaatacaaggctgtattaaagcatcaccttcagcgctaagcatatgagatcgcgaacttcaaagcatcggtaaaaccaaggctgccaaactccaagaatgcaagggaaagtctagaccaaagaaaaacaaaaccaaggcgaacgatctgaaacccgttatgcaatcagcaacttaagcgtgatactctggacgagggtgaccccattcccttaacaccgacctcgacttgttgcagcatcttcttcaggagtgcgtccatctccttggggtcccgcatcgcgggaatgacggatccggcttcgtactcgctgtccaagatataatatcgctctctgccccagttctccaccgtgtcgggctggaatgcgactttcgctatcaccttcgctggtacactagccttgttcatcgcggtcttggagaacactcgcaggaacggtcgaagtccagatcgtgtctggtgggccatcttcacagacaatggagctgcgttcaccaggtgactttcacctgtcatcactccagggtcgagagtgtatacgttgagggagatatttccggtctaggttcataccgtcagccaagatctttttaaggaaagcattatagcttaccaacaccaaactacgccgcagcgcgtacatggccgcactcataatgagcttactgcttccaaatctcttggttgcttctttcgcactcagcggcgttccaggacagacgctcagctcagggtctggattctcaaaataatcgagggtgcccttcgacatggacgaacatccgatattaatcacccgcgcgccaccattcggcgtgccatcaccggccctgaacgcctcaagcaagctcactgttaataagaaaggcgctatggcgtttgtctggtagaccggatcatggccatctcgtgttacctgatcgatggtgtatgacgacatagcagcgcagttgatcaacagagtcactggcggaatttctttgcttttcactctctcgaccgtaatctccgtgaagctgacgaccgaattgaagctcgccaggtccaccttgacaaattcgagggaccgcggcccgatcagtcggatctgctctctgacttttttggcgctctcggagcggatatcgcgcgcaaggagcagcagatgaacgtatggctgggttcttgcaatcgcaagagctacctctgacccaagcgacccgtttccccctgtgataatggcggtgccgaccagcggagtacccatcgtgaaacgaatgtattgaaggctgaagacctgacaaaaggataacaaaggagaacttttgcgtttgcggactagactgtttccagaatcaccatcagcactgggcaaagggatttggatgcgaagaaaaagtcactcacacgaaggacggtcagagaatcgaatccatcgaactctgcagggtctgagggtgttacccttagaaatacgaaaatgaaagagctccggctgaaaaggatcctaggaattgttggaaacgcccagctttgttccaagatgagccagggtaatctagatctcgaaagtgagactcggtcaatcgcgctggaccaagtggggtcgatcagtcggatggagtcttggacagcacagtggaaaattcagtgacaatctatatacaaccgacttggagcagtagaccgccaggagacgctagctgcgtaagtttccaatactgccgagcagccttgcccttttgaagcgaggaataatggggtaggctaggtgaggcgtctttcctgttcctacaggtatgatttcttttctgaactcctataattaaccccaaactaaagcaagacatgcgacggacgtgtcatcgtcgcactgctggattattctctctgcaggtttcgcttaaccctacgcaatgtaaatttattgtctgatctatttaatcattttgaccccgtcgcgactgccggctggttgccgagcgctatatcctagtttattattatactgctctactggtaaaggcccagagaaccgagcccttagtcctgtcgatcgaatactccagaatagacgcaaagagatccaagttccctatagcaccaaaacaacaaaaacgacttgcggagccgatcccaacattagaacaaaccgcgaacccatcaatgaacttaggaacctcgcctattcttgctcccaccgctcaagacccaaaggattactcttgacctgacgggtacatttcgctagatcgcgccatattgtctaataccatcgcccgtttcgccttaaggctcacgccgcaaactcagcctttcagccaagcgttcctcggtggccatcccgccgactcctccaccggtctagcgggagctggcagtctgagcgcaggctcgactctcgcgaagtctcgagtccacgatcctaaaatgcagattttcggccgtctgcgaactgagcggcaaactgggcgaggactgaacgcaaaaagagaaagtttgtacgtatcatcttcaatagactaactcaattgagcactgaagactgcagactgccacctgacgtccccgtccatattccatactctgtacaatcagccgtgtagatcaagcaaggtggcgaagatcctgtactcttgtctatacctcgtcttgtatattcccaatccccggcccgtcagactcggagaatatcaattttgaatttgtaagacgagtatgacagcataagcccacggtagaccctgcttcacggtgcaatattctccgactaaagacgccaaatccgtcatcatattttgatcgcgactgagctgacggctcagtccgccttttcagtacttctactgtatccagctgcacgtccactcacggactgcaggactaccaggctggtcctggtagtctgcagtggctgagggtaaatttctgcgctggggttgcagttacaacttacaaagacgctgtacatatgtacctaatacttacctagtcctggaagtattgtagtggtagtactaacgactggccatcgaggctcaagcgctgacccgcgtgtttccataggtatgtgttgtcgctttcgccatccaatgctccgttcagacgagtattttgccgaccaatacgattgtttaactaatccatcggtctgggggcggttgggctgcgaacgacctgccacggcaggcgttgctcgtgccccgcgaattctgttccaatgccctcacacgtgtctgcactctccatcgtctgaccgagtctgcatgaatatttgtttagacatttgttaatgggttacatttgatagccatcagctattcccggggtatctccggtggcgtgcttagcgctaacagtccaaattaggtaaggctgcagcctcgcgatgcatttcgtggagaggtagacatagagtatagtgacttgggcggtagtagatccctttcgagtagtgtgtaaagtgtcgcgaacccgtgacatcgagttcacgccgtgcttcgtaaacggttctacccaagtagatctagtaatatattcaacaagggcctgagaagtacgtagtcagatggttggcgcgttggtctcatctcattgtctgatcaaaatctacttcgtacatgactcgaagcaagtatgggtctcagggaaatcggtgacagtcacttgtcagactctgactcaaactgagattggttcatgttcaacggatgtatcctgcagatcaaggtacatctatcgatactacgtccacggtatacacatattagtcaacccgtcccagcactcaggagcccgaccggccaatgtgcaacctagcagcggtgacgccagcctgtgcgacgcgagccctaaaaacatacagacttggatcggtgtataacatgattggttgggtccctcgtttcatgttatcgcggatcatgcggcaatgtcaatcaggatctttacatgcttatctttctcgtcgacaagcgccttgaagcccttttcttcgacgtcctccatccggatcttgctagtgatcatgggacggggattgagtttgcctagagcgtgtaggagaccagtcagcatgttgccttctcaacggaactgagtaataagcaagacgagaaaggatgagtaacacaccgtctttgatggccccgatcacagcctcaaagtccccgtcgtcgcaaattgccgccccaataacatgcttctcataagaaaccacatcaaacgcatcgatcatgggctttttctcccagagcgacacaatcgtcgtcgtcccccggacccggattccattcatggctgtatcgaaccctgcctgtactcctgagcattcaaagctgatgtctgcgcctgcattatccgttaagctgcggacacgcgcaacgacatcgtccgtgagagggttgaaaacgtgtgtggcgccgagggtgagcgcatattcgcgtcgctgggtggagacctcggcgacgacgacggtttgcacgccccgggctttgaggacctgcacgactgcgaggcctatggggccgccgccgacgacgagcgcagtacgcgcagtttcgtgggggctgcgggctacggcatgccaggctactgttagaggctcgacgagcgctgggctctgctttagctaggtcagtgaaaagtgcacttggcggactcaccaccaagatccagggggacgctctcaggcaacagaatcgcatgcttggctggaacagtaacataatctgatagacctccggaattacctactcaggcaggataagttagttatcgactccagcccctgtagcacaacctctcaggctcactcactgcttgaacccaataaacccaaggctgcgacagcagttgggcctcccgtatacacaagaggcgcaggttccatccgataagtttggccggacagccactcgatctccaactttgaaccctgtaacaccttgccctacttcctcgatggtgccgctgaattcgtggcccagcgtaacggggagctgtgctcctgtgagggggtggggtgttgtcgggatggcgattgggccagagaggtattcgtgtagatctggtctgtgttaatcgagatctccatctgatgggtgcgttgagatgatgaggtctaagggtatgtacgaaccactgccgcatattccaacaaaggcagggcggatctggcagataaacagatgtcagcgtctgagccgccccggggaaattgaacctgaaacacagcaagcaggtgatacagactttaacctgcccttctgcacaagatggttcgtcaatctggtcgacgcggatgctggggcgcccgtggaaccgaaccgatctcatggggcactcgttgcagacaagaaaaggtggctatagctttactcaggctaagatggagcgcgcagagcacaagagtggggattgatattgacgcagatattaatgccactcatgaagtggaccatggccatccgccagaggctataggcgcttctcccgtgaagaagagcaggagagagccccacctttcaagtcaacggaatctttacggttcctcagattttcagtgctgcacctgattactgcgttatataaactcaggtgttggtatcgtggtgagcgggcaggttgattaggtaggtggaactgcggggcttgaagcacttctcgggcatactaaactactataaagtgccgatgggagatgtcttttgcgcaaccactgaattattagctccggtattatggcttatgtacagtccagtatagcaacacgaagctctatattgattaagtatccattaagatggctcaagagctaggagaaacgaacgagataattcgatcagacaggagacgcaacgccgatcgacgggccacgcaggtcaaagacaacatagaaggctttcaggaaagcatcgcctagaatttgcatgtcaagacccgagttggactggacacctccgtagcagactgcggaaatattagcgatatattaatctctagaaaaaagattgtcacataccagcttccccggtggtggtgttggtgccaacttccgagaaattaatcaaattaccaggtactgtcgccagatgctgagggccgatggcgatggagaggttgggcaactcggcgctgcaggggtagatgtagcctgaggcgctggttgcgtactgcgcgcctcgcacctgtgcatagtactcatctacgacggtctgctcgaggagcatgagcgaggttcccgtatcggcgattgtccaagttgcgtcgtcgtgcttcttcaacgtgccgtctccaacacggtagtatgaagactcgaatttccagaatccacccgaagaatcaacggttgcattgacgaggttgcctttgtacttggacttgtcgacagtgccaaactcgtactcgccgactccatcactcacaagagatgcgctgaggacaggctcgtccaggacgccggcgattgtttcaaaaaaggacttttgctgtgtgggcttgacggtgttgagtgagctgaaacccagtcccaccaggccgttgctgtgggtgtcttcgaggatagatgaggcaactgcagtaggaaggccaattgcttgacctgtcactgtgacccctcccacattgattgtatcagttccaacgggaccgtacgcatacgagtcgtctccgtaagtgatgttaaaggtcgaccctgtcattttcttgtacgtagtggactttgatgggtcaaaggccgtttgcccttcaatagagtctttggggagcagtgtgttcaccacccatctggaaacttgattagcactatcgagcgtggggaaagaaccgtagcacatacacatcagacgaacccgtgtcaaaggtgatggtgagttcctggccaccaatggtaataggcgaaacaaaagacgcatctccctcgacagatttggcactgacagcaccggtcaagtcgggctcagcgacttccgcgtcagtatcggccgcagcagcaaccttaacgctgggttcaaagtcatctaggtcgagtccgatgtccgcagcaacaatgccgtacttgacataggcctttcgtagagcagctggaccgtagatagtgttgctccggcggacagtctcaaccttgaaggatcggcgttcggcttgctttagagtgggagctgcgaccactccatagccgaaccccagagcgatcaacgcggatgggattatcctcatcgcgaatgaatgaaacgaatggacttcacggagcctttagatttggaaggcgggtgatattgattacggcaaagacaggacttgctccagagcaaagaaactgcaaattcaagagaaaagaatgtgtattggagccagtggtccagactgctctcctggtggtgtcgaaagaaagaaggaaagaaagaaagatggataggggacagtcttgaagattgttgcacctatagtcagaagaaaataacaaactggatcagcacatggtaaggctgggagtgcagggaatgggataaatagagagagagtagtttgggaagaaccgatgcattgtcaaaaagctctggtggagttgcatggcaagtgaa

SEQ ID NO: 894 - DNA, 8342 bp, Emericella nidulans
tggtgccttttcatattcgtagttcctgggatcggttttttctgcatatacgttaaacattttcagttctctcacaacacccccaataccttcaccattaggtaggtacaatctctacccttttctttagattttccaactcttctagccgtacaacccccagattttctgtcatttgtgttgactcctttttccccagcgcttaaattaccccgccattcctccacaatgggctcgactctcccctatctgaagaccaaccctcagatcattttcttctcagattttgatggcactattactatcgacgacagtaagtccatagcatctgcggttaccatgtcctgagcgctaatcgcgacaattgtaggcaatgactttatggtacagcgcttgatctctcccgcagcagtcagatactgatcaaaaccctctgccagaccgacaaccttggctttggccaggagaagcgccgccagcttaacaaggacgtacttgagaataaggttactttccggtaaatggtggcgtaacagtacactcgcacgagatgctaatagtttgcctcgatagtgattctttccgagaaatgctcgacagcgtccccaatgctttcgatgactgcctcgagatcctcaagaagaacatgcgcctggacccacatttcaaggaattctactactgggctaaggagaacaacgttcctattgtgattttgtcctccggaatgattcccgtgatccggacgttattggagacgctcctgggccacaacattgatgaccatctcacaattgtcgccaacgacgttgaaagtcgcgatggcagggacatcaacactccgggtgggtggcaaataaagtatcacgatgacacgtatgattggcgatcttcatgctctcgtgcagtatgctaacgttcaagctagccacttcggccatgataaatccttggagattaagccgtacgctgcggtgccgttcgacgagcgtccgaccctgctttacgccggcgacggtgtgtcggacttgtctgctgctagcgagacagatttgcttttcgcaaaagccggcaagggtatgtggctcaagttttcctcttcaaagattgcgacactgacttgtccagatttgatcacctactgtgagcgcgaaggaatgccatacacggtctttgaggattggtcatcgattcttgccacaacaaaggatatcctgagtggcaggatgaaggtaaagaaggaacagaaggagtaaagcgactgatctaaagatattagaagggagtatatagatctagagatagaactattgtcatataaaaaggcctcgtattcgtatttcggcagagttgccacgcatgtgaccgccttccagatcaacccctgccgtcttcacttcgagaaatgaacggccccttgagatggcctcctgcttggactgactttgggcgaacccctgaatgtgctttgtgttctcgagactcaactcgcatcatgctccagcgcccggctgttctacacatgtttagaacttgccaggggcgctatcgacgatcatgacacgccgttttgtatgacaccgtccgcttaagagccgctttccccaacttgtggagcggagctcagtgcacacatactgaccattttctctctctgcaggttcgcgcgggcgtgcagctcgccatttttgcttcgtttgctctacttcttattgtcactcttgataacagattccgtgttctcccagccgcaattcacggccatcttccctcccattatgcgggctttgttgtaacggacgtgaccgtagcgacgtgctcgatcttgaaccccttttcgagctgcaaatcttcggcaccatggtggactcaggtggagaaagacttgtacctgcggacgggttggacctccgcagcatacattcgattccagcggaagaaggaagaggagcttcttcctgcggataaggtcgttatcgacctgaagattagcagacttgcgccagaagtccaagatgatccgaaagaagataaagccgattgggaacagcgccccggcggcatatggttaaagaggacggcgaagcgacacgcgagcgattctcacagcgccattacatccgttgatgtccttttcggcgccgatgcggtcgatcctcgccccggttgggaagtcaaggacacacccatattgctagatagtcggacggagagcctggaagctcggatcacggttcggaggggagacccactgaaaatcaagaaaccggtaccaaggatcaacgagaatggtcgattcaagatcatgcagctggcggacctgcatctcagtactggtttaggacactgccgggaccctgtgcccccagagcttatccctggccagggatgtgaggcggatcctcgaacgctagactttatagagagacttcttgatgaggagcagccagatttggtcattctgagcggagaccaagtgaacggtgaaacgtccagagatgcacagagtcctctcttcaagtccgttaagttgttagtcgaccgcaagataccctacgccgctattttcggtaaccatgacgatgagggtaatctagatcgccatcaatccatggcaatcttggaagatttgccatactcactctcgtcggccggtccagaagatatagatggcgttggtaattatatcgtggaagtgctcggtcgtggaaataccgaccattccgctctaacgctctacctcctcgactcacattcatactcaccagatgaacgccagtttcggggttatgattggatcaagcccaaccagattcgctggtttaagaccacagcccaaggtctgaaagccaaacatcaacaatacgcatatatgcacatgaacatggcattcatccatattcctcttcctgagttcgctcaaagaggaaactacttccgcggaaattggtccgagccctccacagcgccagggtttaattccggattcaaggatgccctcgaagaagaagggattcttttcgtaggatgcggacagtaagtactatttactcttaacacaaggaagtatagtcgctaataaatcccgcagtgatcacgctaacgactactgcgccctcagcaaaaacgaggcccagaaaccgtcactctggatgtgttacggaggaggagccggttttgggggctatggcggctacggtggcttcatccgccgcgtgcggttctttgactttgatatgaaccctggtcgggttgttacatacaagcggttggagtatggtaatacggatgcgagaattgatgagatgatgattgtcgatgggggtatggtcaagggaccagattgattgaccatgaacttgaatttggtcccacatgtatgatgagacaggcctaggttgcataaaaatttcaccagtatgccatttgtaagatgtggcgcggtgcgcgtaatatggtcttgcatttcgaccagacaaagggcgtctctctatgaaggatttggagtatggaaatggtgaacctaagcgaaatgccttgatttcagttggttctcaaaaactagacaatctaggtagacgtaggcatcgcgcagcaatggtgggcagttaggctggaatctacacaaagccagaatagaccagcctatgactacacgaagcttcacattatcctgtccaaagtgataattatataaaagctattcagaggataagacttacagtccaccttcccaggtgttccagtatgttaatgtatgcagcaaagacagaacaccctgccgtttgctggataatagacctacatcgaagccagcagcatcttgccgaagcccattcatccagcgcaggtacaggttctcatctaaatagggccggagtcttcgagtatccatgacccaggatcactgtatttgagcttttcacccacaaacttggagccaataagaaggcgtaaagccaaactatagtcaatcacttttagctctcaaccaagaccgaggtaccgttcaacaacggtagcgtcctggtcggagaatgcgttgttggcatccggaccactatgcgcgatgttgagggtttgagccattaggacagggtctagagcctaggatgtcgaccaggcccgctttagaggtttgcccatgcagacgcattcctaaaggaagagttcgaactcggggttctgcacatgtatatttggattgaggaaggttcactgttgctggccgaagaatgcggcaaatatgagttgagaggatttctcaaacgatgacaaaacctcggagtggttttctggggtatttatggacaggatcctcagcctaccaccatttctcgaagaagactcgatcctttcgcccgtttaaaagttcagtgacgatgccgacaacctcgtccgtcatctgaggtggtccgcagacatagcatactgtgttatcaggagaatatttactgtctgttccggtgacagttctggcgagatcatctcggttgatgcggcgagtatgaatggctagatcttctggagattggcgcaggaatggagatgactggtcttggaggttactaagaaaaagatcaagggcaatacgcaagcgctggaactgagactgagagcggacgatctcccgcagacgccggaggaacaatatctggtcgagggctgtttctggtgttgtcgattctgggagcttggaagagtagagaatgtggatgttcagagagggatggtagacaccagtgctttcatcattgttgttcagatgagagagcatggagatgagaggactacagggtattagcaaggatactcgacacctctttcgtatgcagaagtagacttacttgatacctagcccaccagcaacgaagacaacattttgaagttcttcgagcttgacgccagcgggcggccatataaagctgccgccaactcggatgctcagctccttacccaaaatctcttccttgggccgccagagccatgcactagcgggattagacggagcactctgaacggccagctctacatatggctcacggccccgcggatcaatgggaggaggcagctcttcgtctgccgggacaagctcaggcgagggctcaagtgacgggagcacctgggcatctgcaggcgtggacgtgatactaaagcccccggcatttgggacggaaggtatatgaacatcgagccattgccctgggaagaacgtaaatggttctggtaacgtagcctgcagcatttttagtataagctatataacgatctggagctgttgagtcccatacatcatcagaattttcgagttgatcttgcgaattcgggtcttgtatactgggaggtagagcgagctgcaagagtcggactgtaggattggcctgttcaatgtgcgacagccggacaggatacaatctgttctgtcgaggctccgcagctgtgcgtacagtatgaggcactgaaagcttccttgatggagaactcatggtagtccgcggaagtagagaagtgatggggagagtatcgaggcgacgggtaagacagacgcggcgttggaagtatgaaatctgcatgcagagcaattaccagctgtgaatactttgaaatattattaaccaacattagatgatgagagaaatatggagttgaggttacttgacttgaactttgagtgacgtttagttgttgattacataatggcacatgacttgccgttacttttccgcatgaagctattcgtacacacaacacatcctcgagttccatctcgaattctatcatagcttcgcttaaaatgcaattgctatcacatgtcgttcaatcaatcgatttggcatggacggatgttagtgtgtgatattaatcgctatccctggcagcatgctaaggtagctgagattgcttattcttttgctgtctccacccagaatgacctgtagtcgagaccagacgtgagcatccgaggccaaatgaggccaataaagtcactggccgggcttgccagacgctatcgaagactccaccggcactgagcctgcagatcgccttgtccatcacacgggctactttagtgtgtgatgggccagcactgacattagtcctctgccgccccattggtgctcaaccctgagcttgcgtcggcgttggcgcttgcacgacaacccgcattggccagatgtatgctgggaaacatttcaccgcacgcctgtcagcgttcttgcctgccattgaagcgccgaagcttcccctctcctgatgttgggaatcggtggaggactcggtctcgaggagtctgactgcataattatgggcgcttccccgggatgattttcgaccttttctcttggtatttgtttcagcgtctcgtgtttcctaagagtctaaaaccgaccgataggcttccgatgcgactgcattgaatgtacagccagccggtctggcctcagtcaatttcgattccttctagaggcattcatacatagcctaacttctcggcgacctggctggaagccacaacctcgagcaccatgtatatcccaaagaaataccgcaatcacaatctgatctacattttgatggccgtggagctcgcgttcatcattcccatcctcacattcaccggcatcgccgcacacgatcggtatcggactaagttatggcaagacggctatgagaatggcttcaacagctctcctgacacggctgtctacgctgctgctaactatcgcccctacaacactccaaaagtctggtcctcgttgtatgtcctctccaatagctcatttattgatggagaagtaagctgataggcggcagcactacgaattggaaccttgtaatctctgtcttaagcacctttatcctaatcaccaaggttccgctccacattcttggcatcttataccccatagtcctgggcattgtccagaccggcctgatcgtcgtctattgcgtctccgccgcatggcaagccggcagcgatacctcggacccagaccaccgccagtccggggccccatggtacatcaccaagaactgcaatgtcgcccatgactcaggaaacgtcacatactgccagcaagccaaggcccttttcgcattcaccatcctcatcatgtaagtcccgacctcaagctccgtttttctttgtccgagctaacagatccaatagtgtcttgtacactgtcgaactaggcatcgccatccaaaactgcttcataaccgaagaagaacgggccgagcgtgacgaagagcgcgaagaaaaagaaacaatgaaagcatacgaggacatgatcctaaaatcccccacaatgattcctatgacccccagtgcgatcccaatgacaccaggccctggagggacagcgacggcgacagctcaattcccacgttcgccaatgcccgtggtgacgccgcgcagtctggcgtttaaccgactcgactcgaacgacgcgtctacgcccacgtctacggaccttcctcttcgagaacattttactgcgccaacgccccaggctgtttctgtcagccaagaagtcgaagccgagccgacaattcagcagccccagccgcagatatatttcccgccgccccctaagaaggcaaagaaatgagcagtcgcttgcacaagtgatctcgtttctacaaagtctcgcatcattatatgctcccgaacatccgcagaccggaaatcaacctgagcagcggggatgtcaatacttagggactaaaactgctaagcatctgtgacatcggaaatgagggagagatttctttttagacatattcgtcggattcgcttatgccgtctgcttgcgagtcgtcagataccaggagttacagtacttttactatgtttttcataatatcgccgttgcacatgattccataatgatataccaagcaaggcaactgacaaccaaccaaattatttgtgaatagttcgaaaaccaccttaataatacaggataagccgtaactagtagagtcttgacatcatgcgtatatagagctcgaggactgaaatattgcccggctaacaagtcatatcaagataatataagcacccgagatatggaagtagacgatattataccgtgtcattccgtgtcgtcttgtatcgtgcgcattcgtagttcctactgaaagatgggtaggaacggtatcgctagagtgtcatgataagagcgtcacccattgagcccattgtgacctcagagccagaagtcgaatgcgtccagtcaccccatagaccagattcgttggagggcctcataagcccgattcttgccgaatcttccccattttcgcccagcgttctcgcggaacttcagcgctctggt

SEQ ID NO: 895 - DNA, 3198 bp, Emericella nidulans
gtcatcgtcgatgtcgaagacgcatcacacaatcccgcagcaaaatcttcctcccagagacgtctcctaatcgtccctaacctatctatggcattgccaaggttgggagggagagtggctgctatctctctcttcaatcgtgccgctagcttgcagccccgtcccgaagtcgtgattccgacatgaagagggccatccgaataggtggaaagcaagctgaatgtgcaaagatctggagcatcagaaacattcactgggatcctgagccgccggcatagtttggatatatgagagcctgtggtttagattagacgactcgtgccttatatgctatggcgcggtacatactcaatgggtgatttccaccaagggtaacaaagaccatgtccacaacatgatccacctcttccctccctaaggtcgtcaaatcggcatcctcaaactccctctgaacccacttcgcattgccattttcaaaatgcgccgccaaagtatattgcagacttccaggatcgggcgagatgactactggtttggctcctgcttgcacgcttttggtgcaacgagctgcagcaagaggattcgccccaacaataagatgcacctgagattctgcatttatagaagcaagcagcggtatttgtgctgcgctttctgatgcatccttcatgatggagagctaccaccaaacgcaagttttggcggttctggtcaagggagtccaaaagaaaggtctgtcagagactaaaagtattgtgtgagtgcctgtaagaccggaattatttttctgccctcgtcgagcaagtgatgcagtatatggagtatatttaatactgcgacagtgctccgcggaaataagtcaaagccaattgggtgggaggcgatagagataacggcaaacccttttttgaggtcgtttccaattgtaattttctgctggcgaacggtcgataagcctatctcaagcgactagaagatccaatatgtcagaaaatcagagcaatattagatgactccattcactgtgggctttttgccctcgtccctgtagattttatacatcctgcctcccaaagcagttaaagcgatcacgccatcagcgatgcttatataattttaacgcctgagaaatcagacacaaacaaggccaaaatttccgcggaaggagcatgatacagcaaagacaatggagctcaaagcttgcacaccgtggagatatcgaacaacacgaaagatgagtgcttgaactttcccattggagtaggtcatcttctgcttagtgatctggctgcatattcagccatacagagtaaggatcatgattgcgctgaccgcacaagccatagcgataatcccatcaagatcacatagaataagtgtattagctagatatgaagcggctcaacggagacaggcattatggaggacgagattgatggaggagacgtttccccttattagtatatggactccggactggaatgaaatgtcacgtgataggaagctcggccagcttgactgacgccgcaagctccagatgcaatcatactccatcatcactctgaccttatcccccatcgcatcttctatatctcggcgagcctcggctgtcttcatattgctgataataacataccttttgtccgctcaattccggccgtcgattatatcacacaaacgcttttcaccatgtccggagtcttgaaaccggagaaggacttctccaaagatgctgacaagctgatccccgaagctgagcagcttgcaaaggtgcagactgctaacgcttgaaagtttgataaaataagtgctgactgctggtagacggatgtacaaggtgcgattgacaagctgctactgttggaaaaacaagcaagacaggtatggccaagtcctgtcgctgatgtgtcgcggcctagtactaatacccataacttcaatagtcatccgatttgcctaccacttctcgattactcgtaactatcgtcacaatcagcaagaacactggtgactggaacctgctcaatgaccaagtcctccttctttccaagaaacacggccagctcaagcaagctatttcgaggatggtgcagaccgtgatgagtttcttggacgagaccccgaatatggagaccaaactatcagttatccaaaccttgcggactgtcacggagggaaaggtcagtgcctaggcaaactttctatcgcacaagcatttaacataactctcagatctttgtcgaagtcgagagagctcgtgtcacacgcattctgtctcagatcaagaagtcccagggtgatctgaacgccgccgccgatattctttgcgaactccaagtcgagacatttggatcgatgacgagaagggagaagaccgaattcatcctagaacaagtcgcactctgcattgagcgtggcgattggacgcaagcgacagttcttagccggaagatcaataaacgatacttcgcccgaaagcccaagaagagcgctgaggagattgagaagctcaagaaggaggctgaggaaagagaaaagacccgcgcaccggacgaggctcctatggaagtggacgacgacgtcacggacctgaagcttcgttattacgaacagcagatcattcttgccaaccatgactacaaatacctggatgtttgcaaacactacagagaggtgcttgatacggattcggtacaagagaatcccgaacagctacgagcggtaagcttgctggccgccacaaagaagtccaacatgtcagaaactaattcatagtcaggtccttgcgcacattgtatactacatcgtactatcgccttacgacaacgagcaatctgatttactgcaccgcattcaacaggacactagactttccgctgttcctgttgaaatcttgtctggtgaagctctggtctgtcaccatacttatgcgctggcccattgtttcggagcaatttggtcctaatctgtgcaactctgatgttttcagccctaaacggagtcagtctgccgaaaaccgagccatacagaagatggcaagaccttggcaagcgtgtcattgaacataatgtgcgagtggtggcaaaatacaacactcgcattcagatgggccggttgactcagtgacagaaccttaccgagaaagaaacagagaagtacatcagtgacccgggcacgtcgtagacataaacgcaaggc

SEQ ID NO: 896 - DNA, 3955 bp, Emericella nidulans
accctgatgttgcattcttgccgccggcagaagatcagaaggctttgtgggagcacctcagcacgatcgatatcttctcaattggcagcattccttaccagcttgctggcgagaagggatctccggccgccggtatcgctgaggctctgcctctgctgttcactgctgtctccgaaggccgcctgactgttgaggacatcattgctcgtctgtacgagaaccccaagaagatttttgagctgcacgaccagtcggacagctcggttgaggtcgagatcgatcgtccttatctgttccagagcgcgcaggcctggtcgccgttcagtggcaagagcgtcaagggccttgttcagcgtgtcatcttccaagggaagacgtcttgtcttgacagcgaaatcactcctgatgctcctaaaggctcggatatgtctggtcacaggattgtgcctgcatctccatccctcaaggcgatgtctccacgggttgatggtgctctagaccgtaggcagtccatctccattgccggcactcctgcacggttgggacgcaagcctgtggatcacttccctgccgccactggagccgaacttggtccgcccctgtacacccctgtgcctcgggcctcttcgccgttgctacagatgctttctcggtccccctttaaacaaaagcacgtgctctctgtcaaccaattcaacagagctgaccttcacctgcttttcaccgtggcacaagaaatgcgactcggcgttcagcgcgagggcgtcctggacatcctgaagggccgtctcctgtgcactctcttctacgagccttccaccaggacttccgcctcgtttgacgctgcgatgcagagacttggaggacgaacgatcgccatctcaactgagcactcatctaccaagaagggcgagactctgcaggacaccctccgtacactcggctgctacggagatgccgttgtcttgcgccacccagagcccagcagcaccgaggttgctgccaagttctctcccgttcccgtcattaacggtggaaacggcagtgttgagcaccccactcaggcgttccttgaccttttcaccatccgtgaggaacttggaactgttggcggtctgaccatcaccttcaccggcgacttgaagtacggccgtcctgtccactcgctcatcaagttgctccaattctacgatgtccgcgttcaactcgttgcgcccaaggatctgtccttgcctgcggacatccgccagcaactgctcgcaaccggtcagctgctcacggagtctgaggagctgactcctgaaatcgtcgcccgctctgacgttctgtactccactcgtgtgcagaaggagcgcttcgccgaccttgagcagtatgaacgcctcaagaacagtttcatcatcgacaacgctctcctcaagcacgccaagagccatatggtcgtgatgcaccctctgcctaggaatgccgaagtttctgaagaggttgacttcgaccagcgggcagcctacttccgacaggtgagtctccaatcccgtggccctagtagtgagttcgacatgctaatgtggatgcagatgagatacggtctttactgccggatggccttgcttgcactgatcatggcgccttagacgtatgccttgggcgactcttatctatgtttctatagattcagcgagcaattcctgttttctccgcggcgacgactgtatttgttatgtttttttttgcttggtcgatgctatgtccaaaagttatgcagagttatataccttgtagcactggcgaggcagatataggcccgtcaggtagattagatgaatctccctttatgaactcgatgactcccgtcatgtttatggttatgttatgtgtgatgtatatgtggtatctgtatttggtgtcatgtgtggtttatgtgtggcgtatgtatggtgttctgcgtgttgtgtatggtttgggtgttttgttttcgtttcgtgtttttttttttcttcctttttttctttatctttttcctttatttttttaaccctttcctttttttctattctggtttgcatttgagcgcgggatatctggggttgggaatattggactgaatttgggtcgggatcttgcactgggacatggactgcttttggtgttgaagcgcatttggcaatagatggaatagactgggtttgggtggaattggtcaacaaggaacactaattgtacattattctcccaatattctccccttgaagaataatttaattcatgcataatcatgttcgtccctataaacataagaaatgaaaaagcacagaggtcgattgatttgtgtgcggcggctgatgttgattactggctgtgctttcgtaaacactctccagctcctacctacgctcatcgttcctttgagattcgcctacggtactttccagcgagtctgatcctatcctcttgaaatcagctcgctatttgctccaaggttactccgctcccaaatggaaaatgatcccaacagtttcgcgcggcggggtgacgactgaactgcaccgtccaacgagatgtggtctgagatcttgctttatgctgaattccttctaattaacttgggtatagttcagaataaggacttcttggctatggccagatgcaagattcaccccttggctagatcctacatcgctcaggcggttcggctggcgtacctgagctaacaacgcctcgcatctaccctggcatcgttcaaccaacaggaaccgaacgtgacgaagcccgacgcgaggaaaactagcctagaacagggacagaagaccgccatgaggattattgcgttcgatttccggcgaagtggaatgggtttaggatatattcatttcgaccaaaccgcacgtggtggcatttcgctagccgaacggcgcagtttgacgaatttaatctatttccacgactcaggcttgacgtctcccccaccgtcagcacctagcggccataatcttctttgctctaaatcagtccccgtcgttatcgtcgcgatgcacgatttcccagccggctagacgtgcggagggtcctcttgagtataaagggtcggttggagacgcgggattgccatccttcctcagctgatactccaatctcgctcgttcagaagagacagcaaaatgaaacagacgctcatctggctgataagtctagcttctacgggatatgctgcctcgtttgacccgttggaacatctgggtgctagttctccgtggtttgctggtattccgcccaaggccttatctagcccagcattcactgattgcgataggtccgaatgtgaacaaaatatcctctgatatccctgatggctgctcggtcgaccaagccgtttatgtcgttcgcacggtagcagatatcctgaccctggtgcctatgaggagtggcaggccttggcaaaaaccggtaatctttcccaaaagggtccaatttttaactaaactaacgtggatgtgtcggcagatccaatcggccactttccgttgcctctgggtctttgaagttcctccccgactggaagcctgttttgagtcacccagaagagcaaatcgctcaggtgtctataacaggctacaaggaattgtgagagctgtctaataccacagagaggcagctgtgctgactttttaaaaaggtataatcttggagccgatctgcgattccggtatccaacattctacaaagacaacactccgttcttgctttgggcaaaccagtaccaacggacagtcgattctgctaggtgagttatagctcagctccatgcgtggtcagatctgacaagaccaggctattcgtccgtggttacctagggcccaattcatcttatgccgacatttacgcgatcgatgcagacgccgtcggtgcagcaggtaactccctggcgacttcagatccctatagtagtcgtatatcg

SEQ ID NO: 897 - DNA, 2350 bp, Emericella nidulans
atcctacactaattaaccggcgattggttctgcagcgtgtccggcagatcctggagtatctcaagcagccaccctaccctgacattcacagaacagttcagatatttgtcaactacgctggtgctctcctcgcggaacaagacctatgtaacgaccatggtcaagcgattgccgctcaaccgtcaagaactccggaggtgaatagcacgcctaggtcggagttcaccaccagcattcctgagcaagctgctgagaacccaatgatacggatggataaggacacggatctgaccgctcctttgccatcggagtcgaggcctgaaccagttctgcctaggcttctgggattcgatatcccaaactggaatctaactgcaccgatcgccgactcgtttgacctgtttgaggaaggccaaacagacatctttgactttcttcctgacctatgccggacataacgctgttgatcacaatgacgaggaatagcacatggatatgtgttgcccattcttcccaatcaagtacacatctgaaagcgaagcgcagcggtctctcctgaaaacatggcccagaacccagaagaccaatagatcatcggtcacaggggctgcgaggtgcattacaactgcattacgttccagttctccaatagaatgcatacgtggtcgctgggcaaagtcggtttctgaggtgttgagaccgggccctggatcggctccgatcgggaccggcaccggcgccgactctagcgcaagaaaccgtgttatatgatcaatcctatttggagaacagttcaaacagggaacagaggcagcatatgcatgcgtctggacaggccgaatttgaattcatgagtcaactgcaatttggcgtcgaaataagagatttcgatgcttcgtatttaaatcaacccggacgggtgattatagcaattgtccgaccacaaccaaaagcactagcacgatggatgaaaagaaccacgttcctcagcctgagacgcacccgcgtgttccaccgtcaggtatgctactcagcctcggcccttacctatactaacatggccagggtcaaatgctccacagcctaggtgtaatactccacccacgccgccgtccactcctacgatagtaactttcgaggattgcccaaagaagaacccgtacaaatggcccttctcgaaaaaggtctatgtccttgtattcacattactatcggtcatgaatagcggtgtcgcctcgtcgctcccaagcaatgctgtgccttatatcatagatgatttcaagctgcagaatacaaacgagagcagtctaccaactggcatttttctgttgggatatgttgtcgggcctttaatatggagccccctaagtgaaaccatcggacgacgtcctgtcctgctgtatacgttcatattcttttttctattcacccttgcatgcgcccttgcccctaattggtcgtcacttttattctttcgtttcatgtgcgggagcatgggtgcggctccgagactgttatcggaggctcttatgcagatatattcgaggctaaagcaagggggagagcaatggcgttttatatggccgtaggtccctcaaccctaatagctcgctcgctgctgactgtgactaggtagcgagctttgggcctatcatagggcccattatatctggtttcgcatccgagcatggctggagatggagtttctgggcggatttgatatgcgctggcgtcaccctggttggattgatcttcttgccaggtacgttttctgaccacgccctgaaattataactgactggacactagaaacattcggcccggccatcttgaagcgtcacgctgcagaattgagcaaaatatctggcagggagatgtcggcccccgtatcgaagttcgataaagacctcaaaaccatcttcctccggccgatgtatatgttgatctttgagccaatcatattgttcacgtcgctatacgtcggcatagtctatgctcttgtatttttctacttccaggcctacccgatcatcttccccgaggtctacggctttaccatccaaacagcctctctcacgttccttccacgtatgctttaccaatactcctaagctcacccatactaacgtggactcttcagttggaatcggcgcggcctcgactgccctcgttgccataacctgggactccaagtattcgtccgccctactccgcagtaaacgcaaaatctggttcttccccctatccttcagtcccgaaacgcaccgtctaccaatatcctgtgttgggagcatcgcaacaacaaactcgcacttctggcttgcctggaccgccaatccaacaatccact

SEQ ID NO: 898 - DNA, 5725 bp, Emericella nidulans
gaggcagctttgcttgacgttcgagttgttgcagggaggtcgcgcaaacggaaaacgagaatgccgaccaagtgtttattgttgaccaggtaccggcctgtgtgccgttactaaagatgcttggtccgcggtggtttgcttcaaagggaaaacaacgcatcctcttttactgtcattttcccgaccaattacttgcgcggcgagatggtgggtctgctttactgcaattgttgaaggggctgtaccggtatccttttgactggtttgagggatgggcgatgagtgcgagtgaccgggttgttgcgaactccactttcacgaagagcgtggtgagaggtgtctttggggcagagaaattgggtgatgtacgggttgtctatccgtgtgttgatacagcggcgaaagagaagagtgagaaggatgtggggactatctgggaagggaagaagatactcctgagtgtgaatcggttcgagaagaagaaggatcttgcgctggcgataagggcatatcatgggcttggggaaaagaggaagggggtaagattggttattgctggtgcgtgtcttttatttatccccctgtgctgatctcctcgatttggtgctaatggtgacatggataggcggctatgaccctcgcataacagaaaatgtgcaataccacaaagaacttgatgccctcgcaacaagcctcggcttgcaaaccgccacatcgaagaccgtcccgtctgccctctccatcccctcctccatcgacgtcctctttcttccctcagtgtcctctgccttccgcgacagctcctggctaaatcctcgcttctcctctacaccccggtgaacgaacactttgggatcgttcccattgaggcaatgcgcgcggggattcccgtccttgcatcgaacacgggcggtccgcttgagacgatcgttgaagggaagacagggtggctccgtgacgtggatgacgtcccagcttggacaggtgtcattgagaaggtgttgtatcagttgggggcggacgagcttcggcagatgagtgtggcggcgaaggagcgcgtcgaggctgagttctcgctgcacgctatgggtgatagacttgagggggagattgggaagatgctgagtactgaacggagacagtttaatggcgcgcaacaagcattgttgcttttgggaatgctgggggtggtatttgcagtgcttgtagggttggttctggcgtgggtcggttttgtataataccctgcttagctattctatttctttctcttacggacaattagccatattgctggacaaatcatggttattatttgttgttaaaaagttgttaaaagggtctcctggttggtactaaccctgatagtcaatgatcaggtcctcggcgcttaaccgacagctgctgtccattcctcacgacgtggaaccaacaagaagcatgcaatgaaactgcgccgcataggaaatactattaggcgtagaatctccatcgctgaggcggctatgaagctattctcactggcctacttgataccaaggccgaccctgaaacacacgccatctagtctgatcatagataacttcatcagtctgcgcctcctcaccgtatcccaggtattatttctgagtccctcgcctctcttcttttagaatcgaggcttgaattgaaagggctgccccagcccagaggatatgaagaaatgctcctcaatgtcgctcgcgctcctatggaatcgaattctcatcttcatcctgctgcttagcacattacctcgcaatatactcgcaagagtcgacacatattcagactcaagttcatcggcaaagacatattttacaaatcccccgtctaaccccgacttggaggccatcccaaccttcgaactcggcagcgtccagaacatcgcctggacgacgaatctcgacttctacaacatcagcatctggcagcgcactactgggaatgtctccagtcatgaaggtgggaatgatggcgagagcgagagtttaaatatcaatatacaagggggtaatattttcggtacgtccaccactatgtacagaacagtgaaatgcagtctagacaaaacaactaattgtgggaaagcccaaaccactgcggacgaaagagtgaatacctttgcttgggtcgtacagacgtactcactcgacctggccctctcatccattttctacctttccattgagggagacgctacatcgacgtctagagacttcaatatcaccacctcgccatcatcttcatcatccaactcttctaataccgcatcctcagccccaaatccagcatcgacagaaacttcctcctccctaacctcaaccggcaaaatcgctcttgggctcggtgttggcgtaggcgcgccattaatcaccctcctcgcgatcctcgcgtacttccagtatcggagtgggagacgcgcgtatatgctaacagaatctcagtcccagctatactctcacccaccttctggacttggtctgggtctgggtctgagtggcatgggctacccatctccctcagccccagctccagctccagcaatagatcaacccgcagtgccctcgtcaataccaaccctatatcggaacccaaatctaaactcggtgcaatatcctgcagagttaatgccgaggttaacgagaccagttcaggtgcaaccttgggaaatcgatgcgaatccgcggttctattctcccactcctgctgcatctgcacctcaaccgccaccattaagtttttcaggtgaacgttcagttttagccatagatgagaatgggagtggacatgagaggtctatgtcgagatctaccacaaacagcaatagaaatagtacaaggtctgcatcaagttcaacgtcgaggtcggcttcctcgtcagctagggctcggtccatgtccaggaccaggggagctagagttggagttgggtctggagcaatagagataccggagttacctggagaaagctataatttcatttgaatctgaatgccgaataccgacactccatctatatgtatatattctctacttgtggaggtccggtctattggatattgctgcatgacatgggcggttccgactcacaatctgtatatagacatgcctgtacatcaacgtccaaagcgtaattttggtccatctatatccgtactgctgaagtacgtacttgatagccgcaaggatcatcttattgcatgaataccctttcccgataatctgttctagctaatgggttaacatgtctagaattcctttcattgccccgtttaggatccctaaaccttcaccaatgtcaggatcgtatgtaaatagagaaatagcatggttcttcttggtatataatcacggttgggaaagttatacctccccgttcgagcattgcaagcatcattctaacactgatactgtccggatacggtcgagggactggatctagcagtattggctgttttgcacactgctcctcgccttgaagcaactgaaacaaagcagccgttgagctcacggtctgaggacaacttgttcctctggcagatgtgctagggcagttgttggagcgaacatagcacgagaaatcaaagtacatggaacatctattcagaggacgactcgcaacctgctaagaagcaactagtattcctactgcctaaataatcagctgggtcgacagcaggtaggccagaaattagaaatgtcaaactcatgactgcagtcaatcctgtaatggcacccctgcagtcccagggcttaaggagcctagacgtcagtcacgtcgcgcacagcctccactctatagcaaagccaaggccaagtgctcattgcagccttacaaatgatagccctcttgcaggagctagtctcccaatcaaggtccgccgatggcacgtatttccgcgaacaagaatatcgaggcccatgtaaatcctccatctcttctacaaagatcctcctggacgccattaaagacgatgattaccggaaaactagctaagaatgtgaccgtcattcatgtattggtcaccctcacatcggtccaggaacagcagggccccatttgctagatcatgaatagtctagactttaaggatcgcaccaatagagagcatggactgcggccaatacagttagggctactactcggctgcgtggtcagaatttataagcatgctagagagcaaattggacaacagtagtctgcagctttcaattggtctactggatacgtatagtattcgccgatgtttacgaggagcactgtgcacagagaaaggtataaaggcgcgctggtctcgcgctctccatccacctccacgcccatctcacgctcatgaagcatcccaatcaagtctccagaatagccatcagtcgtcccagcaagatgaagttgaacctcaactccctcctcgccctcacccccctccttggtctcagccaagcagccgactgcattgtccccaaccaacaagtcttctcccaagcagcggtcgagatgatgtggtccatccgcgcctggctgtgtcccaacgcctggaatcagtggatcttcgcgtatccagatagtgcgtggtgcgacgcaggtggtggcatcgtcagcgcgttctacgggtcctgggaaatcctcggtatgcagagcgagcagcagtgctgggtgggcttttcatttcctgcatcgttttaggtgcattctgtcataatgaagctcgctaatgagggcaggatatcactgaggaaatcatcaaccaatgcatgtggtacggctttgcgaagcacaagctacaacggtggaacttggtcgtacggcgatatctgggccggcggctggttctgggcggataactcgcggagctgtgtgcatcctgtcaagagagatgcactgcctgttgcttccgttcctgttggggatatcaatgctgaaatgaacggtaccacccttgctgatgggatgagccaggtcggcagtcgactatggctggatttcagtccgacgaggtggttgttgttgagaaggaggagttttagttccaggaaagaataggcaggattgaaagcttccagaggattaagagaggcttggttggcccatgttgtgatagcagagtggctataatgagcgaggcatctgaagtcatagagaagcccgtgttgtcccatcttagcaacgataacgccggcgagagcgatctcccaattctagagcttgtctgaccaagaagtacactcccatggtcaagcactctagccttttttcattgccttgtatcagagccgtaggctttgcgattctgctcgtttcttttctattgctctcgtcaggatggtctgcgcatcgtcatcacacgtttggaaataacggtctaagcctgcgattattttcataagcctgattagacgagcaccaggagctttgtcttggatcgttgcagcaacgctgatgagttttcctcctataaacgatagctcattctttgcctatacatccagtacctgtcgctgagtggccaggtgatcataaacaaggctgtgcaccaaacagcaaaccgcctgtaagctcgtcttcgatgacttgtgacgtattacattcatcagactgggtcgcgcttttaagggcagacgcgttatatcaatcaagtggacacagctgccagctttaggaatttccaattgtctcatgctgtatgcttcggctgtcgaaaaataga

SEQ ID NO: 899 - DNA, 812 bp, Emericella nidulans
tcactgacgtcgacgctggcggagttactggatgcgcaatcccgaccaaccgtttaaggcgcctatgcatcaattaggcgcattgtcagtttcagcctcgactgagttggtgatttgtcccggccgataacgcaatgggaaagtgtttgtcaaaagcattagggtgagtcttggctacagctccttaggtgaggccgcaatgattgctcatatttgcgacatccaggcgattgcagtacacctgtgatttcatgttcattgcttaatagtttgctctgcatactgagagtcgagacatagtctgtacgatgttccatcctttgacgactccatcgcgtttataagcagatgcacaaaccggcgcccacgtagtatgtaagcaacgctaatttgggccgccgaaagtcgtgagttgcagatatgctaggctgtctataaagacatcgtctatttctgccaatgtctaaataatctgcttgatgtttgttgcagccctgaataataagtcatgaatgcctagtgacagcattggcttgactagttcgtcaagccgtggcttggtggagatttcaggccacagacgaagtgataggaactcgcctgtgcctcaacgcgcgatccctgcgcagcggcaggactagaggccaagaatatgaactgtcgaaccagtagcgggctaccactgttcgagtgtgagagacgtcgagtcagtcagtcaatggggtaaggatagtaaccagtttcataaccatcacaatgattaacctgtagagcagatacgcccattcatcttctgtatactctgatgactt

SEQ ID NO: 900 - DNA, 8926 bp, Emericella nidulans
gacattctccggtcgcaattcaaaggcattgacaataacgaaaataatcatgaatgggcttaaggcaactgaaaggttgattatcaatcgcgggctttctagacactttcaaccgtcgtaattttcggccactctgggcgtatggattggtaaactggttacagagccgatgtcgggggcttgaagtgtgactgcgcaagaggcgctcacaaagcacaatatgcactcagtataagcatctgtattgattgtaaaatgagatcaacagagaagaatccagagcttctgctaagaagtaagcactaccagtatggagcttgtttattgcggcagaatcgtgggaagtcagttcttattctgtgtataatccggatatccgctcgtaagtataatacacagctatagatggctttcaaagattcggccacggacggaagccacaaattcaactcctacaaagtgctcgatagggtaggaatcaacatgccaacgcatagtggctgcaatgccgacgagactgagggagtgactgatggtcacggtcctgacctcgaggcgaagccaccaagtaacgaaccttgaaatgcaggttccccacagtgggaaaattccgagggcgctcggcgggcgaaatttttcttcgttgccgctggcgcttggatggaggagtcatcatcgcctgtgtcttcattggagatcgtccgccgccctcgaaatccccgcccacttttcttccctcctaggcctatgactcttttctctgctttcctcaaccgcagagcatataaacacctgaatttgcccctgggcttgacggttagtatcctcaacttctgccattttccatcaaccttgttaagtctaacttgtcattcaattttagttcttattttcatatttgctcgcatcaaatatacaaacctaaccccaccaccattcacacacaatgtgccctggtgcagacaatgagcccaatgggcaaacaaacggcgtcaacggccagtctaatggtattactgtgaatatgcattatctacagattcaatgctaattttttttctttcaaggagaccacccacggtttcaccgcggttcagacccgccagaaccctcatccttcccgtaacccctacggtcacaatgtcggcgtgactgattttttgagcaatgtctcccgcttcaagatcatcgagagtactcttcgtgagggcgaacagttcgccaacgctttctttgatacccagaagaagattgaaattgccaaggcattggatgagtttggagtcgactacgtgagtcatccagtgtgtattggtttgatgccacttactgacggctgttcgctctagattgaacttactagcccttgtgcttctgaacagtcaaggcttgactgcgaagccatctgcaaacttggcttgaaggccaaggtaagttcccattggtaatgagtcggcgcatacactgtctaatgggccaaatagatcctcactcatattcgatgccacatggatgacgctcgggtcgctgtcgagactggtgttgacggagtgtaagaattcttccacgttttctagctgtctttagtactaatcaggtgtacagcgacgtcgtcattggaacttcctcgtatctccgcgagcactctcacggcaaggacatgacctacattaagaacaccgccatcgaagttattgaattcgtcaaatccaagggcatcgaaatccgattctccagcgaggactctttccgctccgacctcgtcgacctgctttccatctactcagccgtcgaccaagttggtgtgaaccgcgttggtattgcagacactgttggctgcgcttctcctcgccaggtgtacgagctcatccgtgttctgaggggagttgtgagctgtgacattgaaactcacttccacaacgacactggttgcgccattgccaatgcttactgtgctctcgaggctggtgctactcacattgatacctctgtccttggtattggtgagcgcaatggtattactcctcttggtggtctcatggctcgcatgatggtcgccgacccccagtacgtcaagagcaagtataagctggagaagcttaaggatattgaggaccttgtcgccgaggctgttgaggtcaacattcccttcaacaactacatcaccggtttctgtgccttcacccacaaggcgggtatccacgccaaggctatcctgaacaaccccagcacctacgagatcatcaaccccgctgatttcggcatgtcaagatatgtgcacttcgcgtctcgtctaacaggctggaacgctatcaagtcgcgtgctcaacagcttaacgtccacatgactgacgatcagtacaaggagtgcacggccaagatcaaggctcttgctgacatccgacctattgctattgatgatgcggatagcatcatccgtgcttattaccgcaaccttagctccggcgagaacaagcccctcatggatctgactgccgatgagcacgctcagttcctcgccaaggaaaaggagcttaccgagagtggcaccgctctttaagggcgttccgtttcctattttcaaaacgatctatgcatatttgctttgcgctatgagctattcctgttggaatatggtgaaatttttacatctatttatttcttttccctagagctttgatcatattccctgagcgactccttttacgaagtgagacgtcgatcttcctttgtcttgtcatgattggtgttttttatgtggtctgggatattttagtttaccttgggggttcctaaaagtgttatttctccctcagccatgagcacgaggtaagagtggtcggtgtttgcgagctttgatttttaagtaagccctgtatataagctgtctcggcgattacattaaatgaaagagtcaagaaacaaatacaatcatctacaaatcatttttggattaggcatggaccgttgaatcaatatacaatagtgatatgacttggcaaaaatttatactaagatatgacggataatcttcgacgcgggcgacgtcacgagattccctccagtcggacgaggtggcatgtggaacctacagccgaggtagtgtaagtgtgtgacggtacctttggcgcttcgagaagctctgctcttcaatcaaaattactccgcagacagcaactactatcattggggctaacagtcaccagtcacaatcgtccctggcgtgcttcccgcacttcgctcattctatttccttgactccgacatccgaatctctccacttcaccactttcatcgtcttattcttatcatcgaagatttcacctattccatccatactctttgtctttgctgagtgaggaggagtaattgaggatcaccggaggaagaatggcatcgtctgtcgtgccagtcgctttgcagaacaaactgcttggctatggcagagcccccagcgcccagctggctgttctgaacctggacctgtaagtacaggcttctctgcgccctgaggccctggatgtttgttatctaatatcgtttctatgcgcgtagtgttcgcaatattgtatttgctctattcttattccgctacgttcgaaaaacgttctactccctgcgaggctacggtttcttcggcagtattcacaatgtctacctagccattcgtttatttttatactctatctttttgcggtttcccggagtccgtggacaggtcgacaaacaagtgacggctgcgattgagggcctagaatcgaaactcgtggcaaacggccccggtgttacacgatacctgactctgcccaaggaaggatggacgcacgagcaggttcgtgcggaactagctaagcttgggaacatggagcataccagatgggaggatggtcgcgttagcggtgccgtgtaccatggtggaaaggacttgctcaaaatccaggccgaggcatttgagcaattcggcgtcgcaaatcctattcaccctgatgtttttcctggtgttcggaagatggaagccgaggtggttgcgatggtaaattatccttttcagatgattgaggactgcgtccaatgacttactgggcttggcttaggtccttgcaatgtttcacggcccttctgatggcgcgggggtgacgaccagcggtggtactgaatccatcctcatggcctgtttggccgcacgtaacaaggcgcgcgctgaaagaggcgtgacggaacctgaaatgtgagctctcgaatctttctcttttctggtattctgctgactcaaataaaggatcattcctgatacagctcatgctgcgtttattaaggcgtctagttactttggtatcaagctgcatcgtgttccttgcccagcgccagaccacaaggtcgacatcgccaaggtgcgccgactgatcaactccaacaccgttctgcttgttggctctgctccaaacttcccccatggtatagttgacgacattcccgctttatcacgactggccacacattataagattcctctgcacgttgattgctgcttgggttcatttgtcattgcgcttctgaagaaagctgggtttccgtcgccttacgaggaggaaggcggcttcgattttcgccaaccaggcgtgaccagcattagcgtcgacacccacaagtatggctttgcacctaagggtaactcagtccttctgtaccgcaacaagacgtaccgcagccaccaatacttcatctaccctgactggtctggtggtgtctatgcgtccccttcggttgctgggtcacggcctggtgcgttgattgcgggatgctgggctagtctcatgagcgtaggcgaatctggctatatcaagagttgtcttgatatagttaatgcggcgaagaagtttgagtcagctatcaatgaggacgcacgcctttcgccaaatctccaagtcgttggacaacctatggtcagcgttatagccttcgagagtaaaaatgatgccgttgacatttacgacattgccgatgacctttcggcaaagggttggcatctgaacgccttgcaatctcctccggcaatgcatgtcgctttcacaattccaacagctgctgctgttgatacgctcatttcagacttggttgcggtggtcgaaaaggaactggagaaggcggaagagcggaagcgacagggcaaatcttatgtcgtcaaacgcggtgatacatctgctctctatggcgtggctggaagtatgccggataaaagcatcgtcagtcgccttgcagaaggcttcctagacaccttgtacaaagcttagaaggatcctggatgattataaaaccgttgtctgttgatatgcgtgatcggatcagggccttgctggacttcacataagggtatacggtgttctggtgtttctattgatatcctgtggcctcggtggccttgaaagattattcttaccatgccgttagagaagacgaatgtcatcaaaatctgaatgttcgaggacctcataaatagtagacgatagacatatagtacagtgatatagtaacatcgctcaatgcaatcagagtagccggcatcaatgtcctcttatcccgccctctcctacatatggcgctgaaaattcttccagccagccaagatcatcgatggtcgcaacccaactccatggtacccaattgagaaaagacatcttaacatgcaaaaaaaaaaaaagaaaaccaaagacccaaacaaggcaagcgagaaatataggctgtctattctcccctcttctcagtcctctctatcgccgctgttctctcgacataataccctggatcaggctttcgctccagatgcagctcttgtttcgtcaaatttttatcaacttcctgcacctcaaccagttcctttactttcatgatctgaccggctaccgactgagagacggggtggaaaacggtggccatgcgcttctttagtccgagagccttgagcacgtctgttgttcggcgtgggagaccgatggcggagcggacgagggtgatgcgaaagtagctcatctcgaatttgttttctccctttggttgtagctggtcctgggttacggcgaggaatgaaacggtcgctcggcggttaagtccgcgcaatagaagatagtggaatctggctggaaatggtgtgcttatgagttggtcagatcgtgagcaagagcagcggtaattgcggagcgtaatcggtttctgtgcagcagggttgacagcagactgagcctaggatattggttctcgccgacaaactgttgagtgatgcgactgctgcccagaaattttgtcttttcctgttctggtcgagcttccaggcggaatgtcacgtgaaacggcatactgccggtcccagctcgcctggagacacgcagctcaagctagctaaaccctatcggaacgatgaattgatgcctatctgatctgattgaactttcttgccattctgctggtatagcacctaaccaagatggcgcaagggggaaatgccgacagagcggtggccatgccccggttagaggacctcctccgacacccggaggacctcgacaagatcaatggactgaaagccgaatacacacgcaagaaagctgcggtcgatgcgcagctccgtgagggtcttcgggatcagttagcatccgtacaacgaagcctcagcgccctcacggaaggccagcgccaggtatcaaagacgagggatgagctacagggtatcgacagactatgcgccgagtcgcagaacagcgttgatgacttctcgcgaattgaccagctcgctaaaatccagcgcaactttgaagctactctgatgatgaagaaaggactggagaactttagctctgatttagcggagattgaggagcttctgagggaggatgacgaggatcttgagaaccagcctaatctgctgcggacccatatgcggatatctcgattgcgggactttcgagatgaggccatggatcaagttcgcagggcgcaggacgcgagtaacgaggccaccctagaagaatatttccaagggctggatgccgtaatcgattggtttgatgaccatcttgggacgctgtgtatgaacctcattccgctcgtgcagagtgataaccccagcatggtggttcgacttgcggttgtggtggcgaacgaggagaagaatgatgagaccgttaaggccttgcaggaggcgcagaaggatcaccaggatttagctgggcggtttaagtcaatgaatgttggaccgaagaccgtaaggggatacaaggaaaaatttatacaagcgatcgagttctacgctcaaaatcagttcgaagacaccaaggagaaattcttggatgacccggaaggtctggagaagagtttccgatggttctttaacgacctcttcgtcgtgcagcagggcatgcagtcgttgatgccgaagaagtggaaaatcttcaagacctacactgatatctatcaccgcatgatgcacgatttcctgattgagatggtcaacgaccccgcattaccagctgacaacctgcttgcgatcctccactggagggaaaaatactacaagaagatgaagaagcttggctggcaggcgtctgaccttgagctagatattctggataaccgcgaacctgatctcattcggcggtggcagaatgtcattattaacgcggtagaagattggatggataagatcacggagacggacaggaaggcacttacggagaggatacctgactcacttgatactacagcagacggctacttccgcactcaaactcttccagatatgtggcgaatgctgcacgagcaggtcaccgtgtccagctcctcctcacgccccgacctcttggaaggtattatggatgcaatgttccgagtgctgaaggctcgccaaaatgcctggcagacccttctcgaggaagaatgcgctaaatacaaagcacccggcggtgaacaactagacgggttgcaactgctgcaagactggcttatagcagtagcgaatgaccagattgcctgcattgacgacaatgacgaaacgggacaatatgggcacttgacgcggttccgacgtgatatcgagcagtacgtcgacccgaaatacatggcgtcccgcgcaattcccgagattgatgctttacgagatggctacgtcgatttgagtacctactgtatttcgcaattcgtgaacgtaattttcgcagtcgacctgcagggcacgattcgcgatttttttacccagagatggtatggagatttcgccgtgaagcgaatcacttctacgttcgacgattacatggccgattactcgcctgtcctccacccctccctcacagacatcctcgtcgaagaactctccgacgaactcctagtccgctacctctcatcggtccgcaacaagggtgtaaaatttcgccgacaaactgacccctacaccgacaaattcaaggacgacgtcctcacagtctttgcatttttccagaaatacccggactcttttgcaggcaccatcaagcagaaatggcggcttgtcgactggttggtccggcttcttgaggcagagaaaggtcctgctgtggttaatgtctatgaagacttcaagaatgagtactgggacctgcagctctcgtgggttgaaacagtccttagggcacgggatgactttgagcggagtatgattactgccgtcaagactaacgcggctgaattgtctgttgaacggagaatggagactctaatgagtagagttcgctgaccttgcttgtttgtgccggtgggcctttgccgggcgtttggagttgttttgcttaacaccctggaccaataatttacaatgtctccgggctgttgacatgaaggcgggggttcccattcaattttatgtccccccccgctgtttataaaacccgtcagaaacggggat

SEQ ID NO: 901 - DNA, 1799 bp, Emericella nidulans
ccgggcctgtgtgacggtaggcagcgactgtggctgtactacaccacgggggctgactccgatgggactgacaggatcaagatccacgggacgcggttctaggagctctaggccctgtcgctcgattgcatcgatcgacgcccgagaatgttcttgctgaagaagtatatcgatgttagaggggcggcggcggagtgttatggtcgttcctgtacttgtttcggatcccgcaccggcgtgactgtggccgatgttcagtttatcggaaatcaagtggggtttgcgaatatgttgaggttggactgccgatagtgatggtgaatttggtgatgaggaaaacgtgtagctggtacttgtaatcgcggtcgtggagcttagtaggctggtcggagacgatggtgagcttggtgagtagtattcattatcgttggtgttatgattgttcgtattcacttgagtatgcggctggaaggaagtgtatacgagcgagaggctcggtgtcgaaggttgatttggacgcatctcaatatagaagaaatgaacctggtgctggtagcaccgcgcgttgtttaattgttttgtctgcgtggttaaacttgaacgagttgggttgtgcctctagtagatagatcacaatatatgttgctcagctcgtaatcctcgtatcgcagtcgctcaaagatcgatgccccgcatagactggagttttgtgccgacttcacgttccagctaagaggggaagaactccagacaacaaacgatatgcaggaaaggtcagaaggatggttgttgtgaaactcggagtataaagtcgacgcgggttgaaacaaggagccgtgtctgtcagattagcaaggatcaagaccaacgcttcgaggaggcgaccaacgtagcagattgaaggatcgaaaagacaggctggtaacgagtgaatgagcgagtgtaagactatttaagatcgcccagttgatggacaagggttgcgaaggcacggattaggtgtccatgacaggctcgattttcggcaaggcacgctcaatctagtagaaggtagtttcgcgccagggagcaagtaggaaaacgagattttatgacatgatgggagatgtcatttgctccttcgagaatgcaagctggtagtttatgaaaacagcgacggagtagagatcgagaagagaaattggaggttgagaagaagacgaagacgggttgcggattgggatcagcttccgcatacggtgctctgctcccaccttctaaggttcaaagttacctaccaatgatagaagcaaggggtgacaagagaagaaacatggaacttagcaaaagataaacaaactaggttgtctagataggactccagcacgccattgctatgcatccaaggcaaaatattcacaaacaacttgaagtctcaatgtgaaaaaataaacaaaatcaagaacatcaggtatttaggccaaccatagtctaaagtacatagaaagccgtatagagtataagagcatcaagttcacgagcatcagtagtcgagagttcgtcgtatcatcgctcgtttcgtctcacttcagcggcgctttatttatgtctcgtcccttggtcgttcccttggtcgtcgctgcgtgaaactgcgacggatactctcaccccacgcagaatcgcctagtgactgcatcacatcttgcactgccatcgcgctgtggtggcgcgagtgctcagaggtcgccgacgctccttctgagaaacttggcggatcctagtattctatagtgtcacctaaatcgtatggtatatcatag

SEQ ID NO: 902 - DNA, 3110 bp, Emericella nidulans
ggccaggtgtatgtggacggtgccacatgaacgctcagattggcctctgctctccgggcgaaattggtgccgatgtctgccatctgaacctgcacaagactttctgcattccccacggcggcggtggccccggtgttggtcctattggtgttgcagagcatcttcgtccctaccttccctctcaccccaacagcgaatacctgcagtccaaacgaactgagaaatcctcgccgccgatcagcgctgcgccttggggtagcgccagtatccttcctatcaccttcaactacattaacatgatgggctccaaaggcttgacccacgccactaagatcaccctcctcaacgctaactacatcctgtcacgcctcaaagaccactaccccatcctctacaccaacgacaacggccgctgtgcgcacgagttcatcctcgacgtccgcaagttcaaggacacctgcggtattgaagccattgatatcgccaagcgtctacaggactatggcttccacgccccgaccatgtcctggccggtggcaaacactctcatgatcgagcccacggagtcggagaacaaggccgagctcgaccgcttctgcgatgctctcatctcgatccgcaaggagatcgccgccgtggagagcggtgagcagccgcgtgatggcaacgtcctccgaatggcgcctcacacccagcgcgacctcttggcgacagagtgggatcgcccgtacacccgcgagcaggcggcctaccctcttccttaccttctcgagaagaagttctggccctccgtgacgcgagtcgatgatggtaagctttaaccccgaactttcccgcctggacatgctaactctgcttctagcccacggagaccagaatttgttctgtacatgcccgccggtggaggacagtgaataattatgatacccatgtagagttttgacgtttatacactttcaacatccggggtggctgttgtggcattgcgagattcaacatgactatgatagatggcgttggggttttttctagccttggatagctgtgaatatttataaaagttcaatatcctaaactgccagtaaactaccagctccgtacacgtgccatcggtcccttatcttatccttatcgttatcgatagagtagtatcggtgggcaccgctggagcgaatcagacgcaatcggaggcagccgtcgtctgccaggaacctcacgaagccaatgcggagttcgccatccgcgctgctccaccctctccgatataaaggcctcgaccttctctggtagcctggaaagtcaccgaagtgctgcccgaagccgcctaggtcctaggtgagttcaccccttgcggcgtcccatcgcacagcatgctgaccgcatgacgcagataagccacgcgctcacgcataaagtagcccagacctctgccaggatatggaatctaagatcactttgttttacggaacgtttgtggacctccctcgaaccaggtcaggcgagaagcatgagctcgcaatcagacatggtgcgatctgggtatcatcggctaccggccggatccagggattcgactggagtatcgcaaacgaggcagagctgcagtccttgctcaggaagaaaggctggaccggagtcccgataatacgcgcactagagcaagagaatgagttcttttttcccggtttcatcggtatgtcgatgtcatgtttcgcctacagtacgcaaggccatgctaaagaggaagacagatacacacattcacgcgcctcaataccccaattcaggccttttcggctcgtcaacccttctcgattggttggagacatatacatttcccctcgagagctctatgagcaaccttgataaagcccgcaccgcatacaacgccgtcatcttccgcactctcgccaacgggactacctgtgcctcctactatgcaaccatccatgtccccgccacaaacctgctagcgagtctctgccacacccgcgggcagcgagccctcatcgaccgcgtctgcatggataatccagccttttgtccggactactaccgtgatgaatccgcagaggcgtctattgagcttacaaaagagacgatagcacatatccattctcttccagatagtgataaggaaagtgagagactagtcaagccgattatcacaccacgcttcgccccaacctgttccacctcagcacttacctcgctcggccagctcgctgcatcccacactccacccctgcacatccaaacacacatctccgagaacccgaacgaagtcagtctcgtccagtccttgttcccagaacacccgtcctacgccgctgtctacgacgcgtgttcccttctaacccatcgcacgatcctcgcgcacgcggtccatctcacccagcccgaaaaagaactcattgcgtcgcgaaacgccaaaatcagccactgcccggcttctaactctgcccttggatctgggttagcgccagtaagggacctgattgataatggaatcaccgtaggcctgggtacggatgtttcgggcgggtatagcccaagtatccttgaggctgtgaggcaagcttgtctcgttagtaggctgctcaggcacagcacggcatcgacgtcgtcctcgggaaatagcacccaaaacgagacagaagggagggaggtcctctccgtcgaggaggcgctgtaccttgcaacgcgcggcggggccgcagttatcgacatgcccaatgagctaggaggattcgaggtgggaatgttctgggatgtgcagcttatccgacttggagcaacagtccaggaaacgccgcagactggttctcattccgactcccgctccgttgttgatatcttcggctgggagtcctgggctgagaaggttcataagtgggtttggaccgggaatgatcggaacgtgaggcgggtatgggtggggggtgcggttgttcatgatcttgatgatggtagctgcgttggtgaggagaccatgcttggacgctaaattggaaagagccttcagcgagattggacgcggtgggctgtcgcaagtgtcggggtggcaatactagggtttgctatagggaggagaagcctaggttcacgat

SEQ ID NO: 903 - DNA, 1407 bp, Emericella nidulans
gtaccagtatagtaatggctatcataattaattactaactatgctatgtctggtgttgtaagtattggtgcatcgtcactggcgtagggtatgctcacgaacccttataccgtcaccaatatatatttataatgattgcgtgctggctggagcacccgagtgttatgggtcctttgcctatacaaggaccttagaccttagtgacttcgccaaggcctgcgctgtcctgaaggcggtgagccacctacaagacttccttgcaacaacaatccttctttctcatttcttctttagcgattccttcttgtacgtacggcacgtctagataggaagatccatctaaatacgtcccttaacaccgagggtcgaaaaattacccacaacgatcctattcagatcgactcctttcgcactacatataagccagagacaactaattagacacagcgtctggaatgcagcaaaacattggcagatatgtgcataatgtgcctgatagtgcagggctgtcccctacttgttaggtctacaaagtctcgaccctctctccccgctgcagatatcactaactatatacagctagtacaccccacctggcagattgtggcttagatctgcgcccaagataataatcctaaaggcctcggaaccgtggacgagaagcggagccctggagaccggaggataattccgaggaagacaaatggtaccactacaggcacctaacttgatcccgtttccccttttcttgtttctaggtcgaccaaacaagaaatccgggacccgcgcgacctagatattggctgcagggttgaatttcacccatgcagcatgctaacaaagacgatgcgtagtctagacacgggccagggaatcccccgggtccagattgcttcttcaaagagtgaagagacaaactgtagagccaaaatgccaccacatgagacccagctcggccgaagaggggttgattcattggacggttaataaagccgacactagaaaatgactggaaaggccgaaaagtgggcagtggccgcgttgaggaactagactctggttcaacctgcggtgatctgctgtgcactctcggccgcgacggagtgcgatcgggagaaaagtcgctgccctggcacaattcgctcgacgaacgccttagatcagagctcaacctaagctatttatcaggccatccgttgccactacttctctagcctcccgggaaacacctttctctcgcaagacgcgacctagagagcgccgctttagccgtcattatcagcgggctgggttgcctactcgccgccccccagcaagagcatgttgtttgcgggacctgccttgagagcttctgtggcattatttcatcaccctattttggtgggaatcggacaccctggtcttctc

SEQ ID NO: 904 - DNA, 4793 bp, Emericella nidulans
tacagttttatcaggtttgcagctaggctaccatacgtcaagcagatgaaactattatatacgtttacaatatctgtatttagcagccaacgtaaacactactagaatcctaagagaaataaatatcctgtgcctcatgtaagaaccggggcagatatagaaatatacaacaatctgtagtgttatatcgagggaacccatgccgtatatgctatggtcatatgcacgtaatgaagatatattcaagacatatttggcgtgaccttcatacaaaccaaggcgcgggattgaggtctactcttaaaaagtaccatgaattttccttgtactggtagaactgtaacatcatttcccactatccagcaagacatttctataaatctgtagacaactctcaccaaaacacatgccaagatactggcttactatctcggtgagcagctctcagcatcttcaatacaaaacaaaacacaggccacagcgcagacaatccttcttaacagccaaattatgcttgacggaatgatcaggagcaatgcatgcgcggtagcaatagcctagcacgcgtctgattcttgtctccagggtataacgcagattacctcctttactcgtcactatccgatgaggactctgatcgcaaaaattgtaatagagtacacatggttcaataacaaccatgtattttgtttaaatactatataatcactatggcctgattgcatcaagaccagaaagaactcgaagagagtgtgtgaaatgcattctttgcgtgctgttcaaactattagtacagcaagcgtaattatcgacattcaacataccagaaatatactcatcacttccttcacctggcgacaagacggagaagtaggacatgctctgcgagggcttggaggtcgccttgcaggtgggaggagcagccaaaaagccaattggaatgcaagaaaatttcaagaagtatagcaaatatataaatatataatgagaaaaaaaaaaagaagtttaaaaacattaccattatacaggccactcctcgatttaatgacaggcaggcttcgcaagagcgcgaagcaatgtctagaaagggacaatatcgcaaccccgataacaaaatatttcaaagccagacacattgtagaagtattgggccagtcgccgttcttttggcttcgaaaaagtcacgaactgccggagggacccatttattgaaatatgctggccttgctgtcagtgctcataggagacctgtgctatgacagtgaggaagttcattagggcaagggaggtcgggaagagcactgctgtgtatgggttaactatatcttaaactgaagcagcgataaagaccatacagtagagcagatgaagcaaacaacaagatgatgatggagtcaaagaattagtgagcctaaattcgcagtaactaagaggactaatgggactggtgacgttacgaagatcgcagaagccgcaaaaatcgcagtcttcatataacacgagcagttcagaagaagcgcgcgacattgaaggggccatacgtttggtactattgtagggaaagcactcagcatttacgaggatactcgaaatgttgatgacatgccacagcggattaatggggatgtctgcaaagatacgccttcccaagcgctatatatggcggccaaaggcgcattgctcagttacgcagtatggcttccagtttttttcgaccagcaccatactatagaatgctcttgttcaattgctggaactaagcatctagaaaacctactggaatgactgcgaccagccaaggtattctccgtgaggagctcaattaatcacataccctccatccacaacaagcgcatgcccctgtacaaaggacgccctactcgaactcaagaacagtactgcatctgccacctccctaggatcgcccatcctacccattggcgcaatctgcaccgccggtgctaacgcctctttcgtctcgggatcccccgtcgtcatgttcgtgtcgatcacaccaggacaaacgcagttgactcgaatcaggtccttggagaagtcaatcgcgtcggcgcgcgtcaggcctattatggcggacttggaggcgcagtacgcggctgcatcacatcaagttaaacactgaaccgcgtctggaggaaatgttccgggcagataactgagtcagtattacgtaccggcaccagccctcgaaacaacccccagctgactcgcgatattcacaatagatccccgactcttctgtctccattctccgtcctcgataccatcagacagtggctcttggctgaccatcttcctcagtgccgcgcgcgagaccaaccacgtcccacgatagttcaccccgttgatgaaatcgaattgctcacagctgacctccgtcgagcgcaggaactccttctgcaggacccccgcgcaattaaccacgtagtctatccgcttgaatgcgctgaatacttggtcaatgaaactattcacaaaggactcgtcgctgatgtcgccagggtaggacatcacgttcggtttattggaggtcgccgcaaggatcttcatgtgtgtttcattcagacctgagccggggaggtcggtgattgcgatacgcgtgcacccggcagctgcaaatgctatggctgttgcggcgccgattcctggtgttgttaggaaagatatgaaattaagggttcataggcttgcctcctgctgcgccagtgacgacggcggtgccagggaatgcgtagaatgacggcgccatggcggtttgtttttgttccagcaatgattatttgtaaaaggaaacctgcagtggtgaatttgaagcgatgcctgatatttcgggaggagtcctcggatagataagatttgtgtagatgaggtcattgttgtttgccccgcagcttatcagtgaccccgcttgtacgttggagaagtgaaccgtttccagttggagacttccaatgttcgttatgcgttactccaagtgttgtttgggacactcaagttcgactgatatcaaccctataggcttattatacatatatgctctaaaatctatattgcgctcgattctatgcatctctctacccaacttctaaaccctatataggttcaatcgtctaatttttagcttccaaaaactccttgctgaacggataatcaatataacccgcctcctgcatgaacgcatagaagctgtcccggtcgtatttgttcagcggcagcccctctctaatcctgaacggcagatcagggttcgcaatgaaatgtctcccaaagacaacggcaatgtcgttatccttatattctgtaaaagcagcctccgcattcgccgggttataaccacccgcaacaagaacgggactcgtcttgccccagatctcaagtaggaactcgatcccctctgtcttgtcgcaatcgacgttgttgataacccgggattcgataacgtgcaggtatgccaacttgagctccttgagcttctcggcgaaatagctgaactgcggcactgggtccgccatcttcatgccctgccatgtattccatggactgagtctgaagcccacacggtctgcaccaacggcttcaacaagcgcccgggcgacttcgagaccaaaccgcgcacggttggggacgctccctccccaggcatcagtgcgtttgttcgtgacgtcctgcaagaactgatccaccaggtacccgttggcaccgtggacctcaaccccatcaaatccagccgcgatggcattcttagccgcggtcacaaatgtctggataagagcctggatgtcctcctcggtgagctcttttggaacaaccccgttctcagcatcgagggggatagcgctgggcgctgtgacttcatacccgccgtcggctcttagggtggctgggtctgctacccggcccacggcgacaaactggcagaagatgtagctgcccttggtgtggacggcgtcggtgactttcttccatgcggcgacttgctccgagttccagatccctggcgcgtgcgggtaaccgccgtgttgtggagagatgatggttgcttcacttattaggagtgtacctggcacagaggctcgttgctcgtagtatgttgttgccatggggagttgaacgtgctttgcgtctgcgcgaagccgggtgagcggagccatgacgacgcggtggttgagggttacattgccgatgcggaggggctggaagaggggcgattgtgaagccattgttggcgtggaagtagagaatcaaatatatagacaggattaaagtctgaaatgttcatgagtttatgggaggttagttgcgagaaagaaggcgagttcgccgagacgcagattttgcggtttcatgcagtatagagccttgaaggtaaggctttatacattgatttctaatccttgccatttttaaaaacattttcctggaataagcaaatttgattgggtgaaaccattaaggctcagagccttgcgtccaatagacaaaggttactggaaggtaatgtggggagacgggcccactgtctttcagagggtgagtgctctggcgtcaggccaggacagctatatcttgtttttattatcacagacgtgcagcggacgttgatgaagcatcaagcaaataatgtccttgtcggtgtaggcaggatgtgggtgctggtgattcttgccattcagtccttctgggcgccgagcgtatcaaggagaaatgttagacggagtagccatgatgttagcttcgcaactttcacgagaactggtcatcttcgttaatgatat

SEQ ID NO: 905 - DNA, 3436 bp, Emericella nidulans
ggttccaaacaggtgggcttcccccccaaatttttgttccacggtacacattccccaaaagatgggatgcgggtctggtgtcggcctcccattagtgcagtacggtttttatatgaagggaggtagtgagtcaagttcgggtggaggttctgacgaacatattacaccgccggaccctaatagccatagctttgacccgaaccaggtggccgaaggtggaggctcaggcggcgatggaggtggtggtgcggctgcaatcaccacgagcgagtggatttcttatgttttgatgattgttggatggttcatcctaatccgggctattagcgacttcctccgggctcgacgccatgagcaattggtcctgcaaagccctgagcgcgggctccctgttccggtcattgctgagaatgagaggtccgagacagtcgtctaagtcttcttattactgtatgcatcaatagaggagttctctgcttgacattctctattgttatttccatttttatattgacgttttaagcatggcaccacccacactcacataccttgtagctattttttctccgaagataccaattttgaagacatacgttggatttatttttgggcagcttcctggccgcaagggatgaagcgttgcgttgcctgtattcgccattccaggcaactctttttctcccatttgtccggtgtagtccttacgtatataatagcactgcacagccactcttcatcctctcaaatgtaccgaagaaccctctagtcagtagcttacttatgggcgtcacctcagcctcatctacttcgtcccaccgctggacttcctaagaatccgtctgggtaatcgcgatgcctaatggattacgtcttggcggactctccacagcgatccgtctgctccgttcgcgcccacgcctcattcgcggctgattgacttatttatctatttctagtctttttgcccacaagtctctgggtcatcgtctcggtatttggaaacccttagtctcgtcacggtacctagatttatggccaagatcgatgcggcggagggggagtccgcttcgtgtcccgcgccgctaaaccaagggccggtcgaggctcgctcgctgtcctccatcaccgcaatcgcatcaaatcctccaaactaccctcgcaatccggcacagaagaagctcgatccgttggtactgtatattgtgagggtgcctggaagtaaaggtatgttattttctctagttgttatgccggcgtcggcctagccatggtcctacctattcccgctcattgtttattctgcgtcattgtttttggcttttttgctaagatacggtttctaccatagacgtctttcttacacctcttaaaccacccacaaagtccagcgtctcggctgaagcgatcaatgcatccctctactacctccatgttgcgtcccccgacgatgagatcctcctccaagaatacgagcaggagcgcgaggagcgcgcgcggctacgcaaagaagggcttattgacgacgatccggacctgccgataccgccgcttgaagtcgcgcgcttgaataatgttcggcgtaaacctgttgctgttgctggcactggcggcggcgctgggatgaaggatacagaatccccactaccgcaccttcgtcgccagtgaagcggcgtcctctgccttcggaattgccagttcaggagggggaaaataaatcgtcgcttcttataggtgaggaggcgtcgcctgtgctgcccccgcggccgacctccttcaatgtgccaaaccaggctggagcagtagatcagatgtcgccagttctacctccgcgccccgtctctaacacgccccttccagcaaatggactagagtacccgccacccatgcccccacgcccatcgcctagtgttccagcgtgtgaggcatcttctgacaagcgtgcatcgccgaaaaagaataaccgctggagtgcgctgtctggatatatctctaatcatatccagcgcggtgacaggcatgaagcggcctccccacttcgtcacagctttgatgtctcccgcccgcagatgcgcccttcttcgtcgcatgatctatttgcgccgtattctccgccggggtacccttccagaagtcctgggcagtctcctactcggcgaccacgcgatagcgcttctccgctgcagcctcaaccaggctttcatatcaccctgatccgccgtgaccctagccacggaagccagtggaatgtggcaaccatgtccacgccttcggcagacagtactggcatagatattgatgtgtcgacaccagggtatagccggttcgcgggacaaaatgagcctttctcacttgattccctcggcttgaacttacccgctgaagctcgcaatctacttagccgacatccaaacattgtctcccagtccgattcgccagacaccacctcggctccacgcgatccgtcacaacctcgacgctttcatcgcaagcttcttgtgtcgagacctcacaacttggaagacgctcgcaactcgcgcgggtctctagacgtatctggagggcgcccctcaatggatagcatctccggtagttctatcaactcacaccaaccagcatcatctaagctcaagagcggctattatacgtttacatcaccctggaatggcacctgcacgttctcagccagcgtcaacggtcgaagtctgaaatgcaagcatatgatcccctctccggggcttcccaactctaatcacgataaccctgctgtgactgtggcagaactacgcttcaacacccctttccaaaccggtcatcttcagtaccctggatcttcacatgcctctccgtttctcctcagtcaaactactcttcttaaagatccctcagcaaatcccgacccctcggctccgtattatttcgatccttcatcaccgcccccttccaaacgcgccgctattgccaacctcatcaaccagagattgaaccgcaggctgtcaaatagcagctcaagtgacggagggggcaacgaagcgcctccaccactacccacccgtcctcctccaagcgatcaacgcatcgatctttcgcttgcgcgtgagaaagctggcggaggcatgcgtggcgacagtgctaaattgggtaagctcatcatcgaagatgagggtatcaaaatgcttgatttggtggttgccgcttccatggctgtctggtggagggggtattattactagtctgcctttcactatatctactaggaggcgccttggtttcttgtggcatttagcgatggtctttttacaatttttcggttttggatatatcatttgaatactcattacagcgatatagtgtgcgatatatggactatgcattatggacgggccttttgagttagacggtaatatacttctcgattttggatacctcaatgttggat

SEQ ID NO: 906 - DNA, 5342 bp, Emericella nidulans
atccaccatgcgaaggcggctccatagaactgcctcagtccacgatctctcctggatccaagattgagcaactcgcgtctagatgacgcaatcctgtgaggatatgtccctgaggtctcactcatttcgacttcattaaagaaaacgactctcgtctcttcaacttcacctccaaaatgcattccgccgaacacaacacctatcgctgcagcctcctccagagccacagcgcagcgcagctcatctacaacgtcacaaagacgctggctcgtcgagccaggatcctttttatcggctgcaagtcctcactgcctttgatccaccatctcgcgtccgccggtcacgaaatccacggcatcgacgagtccaaggatgccatcgctcttgctcgacgattcccgggagactaccacctgatcagcccggtgggatattatcctcccttcgaattcgatgcaatattcgccattcgctccctccatcatctgagccacgcccaggtcaaagaaatggtttctcatatggggaggtggttgaagaagggtggatcattgaccctggtgacgccattacctgttgacagttctggggccagcggttcagattccagcacggccaagtcttcattgacccgggacagttgggtgtccctctgcaggacagcaggcctttcgtccccggacagcgaagccataataccggtaccgctcaacgcgacggactcgtcgcagacccattgcttcatgagctttcataagatataacttgctctacaagtgtatttaaaacacgatcagtatcaatatattcatatataatatcatgacagggaaagaggggttccacaaaggcggctggcaagtctctttctataccttgaatttcgtgcttgatggctattagtcctgcctgactatgagagaagttttggctctcaagatatggcgatatcgagaacgtaattcaagtagcttagatatacactgctaattatctgatcaggtcttgttgtactaatggctattattcggataggcgaccatggctcaattaggcagtctgttatggtagcttgccgtggttgtagtcagcaaacttgagccttgtgccgataatacaagaacactcgttctcccctctacaaagcgtttgttgtgcctttctcaccaagagaaaaaccgcaaagattgacatcaaacttcaaatacccttcagtctctggccattctggacgcacattaatgttttctttctatctcaaagctcatcccatggcttggtcaagttatcaggctacgcacgtcgcttgattctcacgctcatggacctaattatctttcgtgagttcgattacctcgattgtgttgcccgtatgtaagcataaatactgatttcgacccgcaattgggcgacaaatatttaggtatcgaaagcatcagccactgcactaccaccgtagcactctgttgcccgtgcttgggcatcactcgtggtgaaagagtctcagaaacgctcagaccgcaaacgctctgccttacttaaaacagaggaagccctcccttctagctgccttacagacgcacaggagcactgccccagccaaggacatggacaagcccaggaacaggccagacgacaaacggatccggagctgcatccgcactcattgcttcaagctcaggccctaaccacgaaccccaatcaagcaatataacaaggctgccatctaacttctgacgcggtgctaacgcttgcatttctaccgctcccgcttttcttcagcagaacgccgcaggctttgcaccgttttttgaccaagatgcggacccatttggcttagtgcttgaagcgggcgtgcggggtcaggatggagccgggtggagtggtaatggaatgggagcgtcattctattaagggttcctcatacagcggaatgaccacctgccttcgcagtatctacttgagattacggcctgtgcctatggatggttcgggtatttgcatccggttgctaaacaagctgacgataatttgtacgtactgttgaaaaatatggatataccggtaaaccaactgaacttagcaccactacgcacgtaccacatggtgacaccttccatctgctcgagcaacaccactgggagcacagccttgcccgccccaggatgaccgacccttcttgatagacatactaccaacacacccacgaattagcatatagtcctattcctccctccttatcatccacttgaagcacagaaagcaggtgaaacgtaccacaaactcggagttctcacggtcagttgaatcaaaaaacgcatttgcgtggtcccgttcctcgccttcaccccggggccctggaggcagctgtctgccgattccgccagatatacaacatctgcaacgcgacgatgaggacgttgaagagtccatatagacagaagtgcgccgtgaagccttttgcgtaccgcggggcgtcgctagattggaagatgtggtttcacctgttatacctgcgctgacagacaggcggtagtgaaagagagtagctacggtatgtacctggggagcagtggcgttcccagcagcccaagcgataaaggtcatcgcaagcacagtcgacctcttggtctggccggcaacattgcgtgatatcagtgagaagaggaggttgccctctacgagaatgaactgcgtgcagtagaagacaatcaggaggcctactctagatgctgcggtaggagaaatggagtagatgacggcggtgccgacaatagctgggctattcccgtcaccagtcagaaatatagctggtgagtgggataaaaaggtggacgtacaaagtgcacagatgcattatcatcaccgtccggcgcgtccacgttgccagcgacgcaccacccaccatcacggcaatggtcaccccgccttgcgcgatattcaacaactgcgtctggagagtcgtaaatccaaaactcttgatgatgatattcgaaaacacacccatctaccgataaccagggtgctgctcagctggaggagcacgcataaccaaacaattgaatccatgagcgcctcgaccgcttgatagcgcttatactgcttgttctggattccagtgtcgttggcgcgcacccgctcgaccattagccgcttctcagcctcgctgaagcatttggctttcatcggcctgtcggggatgtaccagctcaggaagagaccccaggcacaggttgcggcgccaagaacaaggaagagcaatttccaggatatgacgtggccgatgtagtggctcgtaccccaggccaggataccgccgatctaagtggctggcttagttcggtagaaaagcgagagacgtggaagccgggggaggagagtaccattagttggacgccagtcactaggatgggttagtgaatccactgaaataaccagagccagaatcgggagcgttttcgagaacaaagaatcaacacctaccctcaacatcccatcgagaattcgacggttgatccgccagaagagacggcggttcgtcgccttgtcgatattgacaggatcaccagtcgcatgtgctgccgtctcaacatcagcagcctggagccccaggcctttttcagggacggggtcggtatgctctttgtgggtggaaccgggctgtgggtgtcaacggtgtcggccatcctgatgtcttgtcttgccagactattcagtggtttcccttaggtgagctctgggcactagacgatgatctaacgggttccttctcgtcgatcgacggcggaggactgccggcgactcgcccggtacgcggcatggtggccggtgattgtccccgggcccgctatatcaggcttactggcatggcagacaggctatactttatctcgcagtctaccacaacaaaagggttcttcttgttagatcgatattgctaggccatgtctccgagtgccctgcctccgaaacgggctctcgaagacccagcgggagaccagacgccaccgcgtgcccgtcctaaacatgcttcaaccatcagtccagtcgataccagtcccatttccattcctcagcatctccttgacttcctttactccgaatcgagcatctcaaagatctggcaagtggctcagaaggcgctcggcagtgtcgacccgccgctgctccaccctgaatacaccaacaaagacaaaacctacgtctaccgcgcgctcgacttctggacctccggcttcttgccgggctcgctgtacttgcttctcgagcggcagatccagtacccggcgttctaccgtactcccgccgggaaggccccctcggccccctcccgcaccgtctccagttgcagcacctgtgccgatggtggagcgccaacctgcaccagaacgctgctcgacgcgatacgcacgaactggggttcatgattgcgccctgggccattaaggcgtgggaactccaccgtgatccgcaggcatacagcagtcttgtcctggcggcgcactcgctcgcgtcgcgctttgatcggcgcgtacagtcgctccggtcatgggatgtctgctatacaaagcggtacactttcacggatccgaccaaggacttccttgtcatcattgataacatgctcaacctggatctactcttctgagttgcgcacgaaacgggggaccgctcgctgtccgagatcgccattgcacatgcgcggaagacgcaagctcaccatatccgtccagacaagagcaccatccatgtggtcaactataatgccgacgggactcccaggcaaagttcacgcatcaggggtaccgcgaccgaagctgctggagtcgcgggcagagctggggtctcctgggcttcagtagatggaccgttgggcccgggataccttctttctgccgacggttagagaccctgccgataacttatcgaggacctacctgcgatccaaggccctcctgggacctcaatgcccccggtgaagaggcctgtccgcgggttacgtccgcgaggatggtatgccgcctcgggctagttttgtgtgcaaggcccctcatgacaataatgacaggcctccccacaagccccgggtcctcccctttctcttccttccgctacccgaggatcagtgtccaactcctgactcattacagggaatcactttctttatgggggaccgttcttctatattcttagtctggccgcgctagtcaaaccgcacatgggtcttcaggtcctatctgctcacagggtctacagtgttccttctttcccacttcttcgcttcgtccttctctccttcgtctccctagtcctactctataacattcttctatctcagttcc

SEQ ID NO: 907 - DNA, 3743 bp, Emericella nidulans
aaaataatgcggtgccgacatacagtgaaaagtccagctttcatcagtaaccgattatcagcatagtcttcggtatggaatcaagactgtgaaagggtgggacgcccaaaaggcaacaaggtagtaaacagctcggcccttgacccggagcttcgcggaagctaaatgacgaaaagagtatcgcatgtcatgcttcgtctttcgcgaaacggtgttaataagcgatggattgacgtcgcaagtgcaaaggtcaatacaaggcgctctaatgtttgaatataatgtagctatgaaaatggttagttggggaactcataagtatcactgcgggttacccacatggcgtggatgataccagggatccaacccaagatcgtcaaacagatgttgatgaggaaatcagcaccgcatcctcgctcaaggaagactccaagagggggaagaatgaaggcgaagatgagtttgcaaatatcactaggagcaaaaatcggtcagtaaaggaggtttgcgactcaacaaaattcagccgcctgaagaaactgagaaaagctcgaacgacatcataacggcgacctgcggtcgggcgcggagaaaatcagggcgggttcggcaacttacgaggcagtgaaaggcattttgagctagttgatggtatgaaccagtagtaacggattgaagcgatagaagatgttttcaatcaacgattgttgggtgttgaggtagatgatcaggagagaataatgacggaaagatgaattgggcgggagcgacgagcggttccttaaataatgagtctttgagagctggtgctcagtcagctagctagagaatagcggcttgagcgataatcatttgcagcaatcattcctttcaaacgatgagcatcagcgtgaactggaaatgcaatgcctggtctcggcagagtttgctacgtcatactggcgccgctgtggctcatgactgtcgcgcattccctatgattggtcttttcctctctactactgagacgtggttgtcgatgtcattctaattttctggctgatctccatagtctgccgtttttactacgtaccccagccaggaactcgactgctgtaacttgaatttgtctagccgtccctatggttcatcttctatccagtaaaactataaattcgggactgcagatctcatttttgcagggcctaattctgctgcctagatgcggatgcactagtaaccgcctgactgaaatcaccagagtgacggtcgccaacgttcaaagtggagtgagcttggtctttagatagggaaagtctctgctcaaccctggcgtcagatgcttcggggctggtccggagcaccgccagccctacagccccatatccgtctatctcagccacgttctggatctcgaacgtcctaagacgaatgatatcatcgggcatgggttaattttagcaggctgcgcttcgatatgggtattgcactccagaccaccagtagattcaagcataaaagaaggtgcctagtgcaggtttcatggcagcggcaaggtttgtcttaataatatctactgtattgaggggaacatgagattgcctctactgtaattgtagtatcatttctatgggtatatgatgatgtaattttataaaatgccgatatcgacatacagagtatctcaaccaatcagaagctgaaagaaggtagatttatatttattgccagtgggcaaatgggctatgtaccaaattcacttcttttccaactagatggagacttcaggcaccaagtcgtaacataaagatgtacatgaagctccaatagcttgagttccgatgtgggtgttcctgaggcttggcggcgaagcggagcgaaaagctcaccaggcctttgacccaaaaattagccctcttcttcaacacgtaggcaactcccttttttttttgcggaacactataacgattactgttcttagagccaatgcttccatgtcggtagcacttggtttctccctgcgctgtatgccagcgcggctggctgccaggctagacctcgttcgtctggagttgggatggaatcgtggcactatctgttcacaagcgcattattctaggcgcagatgggctggaacaaagacgactcaagccacagatcggcgatcggcttgtacatggctaactacgacgcctgagcagctggtaatagttactaccaccgcaccttgatctttactgaacgttgaagtcctcagaagacattctttctagttttcctaccgaattatcccggtcaacactggattatatccctgttctcctctttacccccgctttcgcccaatggggcgatgcacaaggcacgttcttcgagcaatgtctcagcagattataccagaagacctcggaccgtctaccacaattgcctatccatgccgtttgtgccgtaattgatcgccttccacactatgcacgagagcataatgcgtttggtgaatctgaagggatatcaatcatactcgctagacgagatgatattcagggcaaagccgctacacctcgtcaaatccgcttggcggagactgaagaaccgacgctgctcttctcgtttcgggaagacatccgagaccagtccttacgccagcccgcccacgagattggactgcgactcgcaaatacaatcttcttaaatggaaaagaaaacacactatttgggacaaggtgcgcttatgatacttcttcaagaagactcaagctggagaaatcggtcgacctgtctacgtgctcggtcatgatgaggcccaacagtattcgcagctcactagatctcccactgtaccctgttggagagcgacgcaaggttatatctagcatgggaaacatcctccgtcaggtagcaaaacgtgccgacggcaaatcggacgaatcaatgccggcttcgtccgagttggagaaggtgcttcctaggtatatctcagaaaatgacattgccgatcgaagggtcactgtttgggctttgattgaaaaaacggagaaaagcccctacgcaaaatcaaaccattcgcaaagcagtcttgaagaggcaatccagaacggcgccaaacttcatcgtgttatgagcggcggaggaggatgggggaaaaaacagggccttctgtcacttgacccggaaatgagctttggagagcttcgtgaggaggacataaaacctctgcatcgactcctttcaatggatgaggtagactcagcatacgaggctgcccgccccccggagttgccgatgttcctgcaagatctgtcaaagctgtcgcaggccgcagagccgggagactacgttcagttttttgcctctgttgcagagcgggagctatactccaacagtagtattagcaagcgcgaattctcaggaaacgccgtttcatgctgcttcggcgtgatgtcggacgcagatatgttgtcgagccacacagtgggccataagaatttgacggttgtgccaaaccattttggcgcactctccgagaaagccatcacgtacctgcagcctctggctgaagccaagtcagatacgtttgagactcatactaaggtcgacgttcctggatcgcgtctcgctttgatactcgagtaaagccttgctgaaccaacttgatagcggtcagactatgtcatgcgtacgcgatagtgtattatagtattacaggatttcagactcaaataatctacgtacacattctatttaataggttgacctttacctac

SEQ ID NO: 908 - DNA, 3767 bp, Emericella nidulans
cttactcaggccttggcctcttcacgcaagcaccgctcgcaggtgcaggaaaaggtgattagtttcctcgttctctttcgtctggcattaagatcaacgtgaaccgtgaggtcgaagtacgaaatacagcattcttcacctgccgcgatatctcgtgtagctgttaggaccattcggctctgctcgtcagggccgtgtttaagctgtacaaagtctctgttagcaaccaatctgtcataagttctttctttttctgtgaaaagcttgaagttcgtctctgaaaggtaacggaaaactcacattcggcacgcaagaatgattacagagcgtcgcccgcggatagcaggcaagtccatactgagggccacgctgctggccctgcaggctgtccggcggtcccgtggcgccatgatacaggccaaatgagttcgattcttctttgcagattagtgaaagcagctcttcgtcgttggcgacacccgaaagccggtcatggagatatatctggattagatctttccagcgggcgatcctctcgtccggccaggcctcctgattgccgcgcatatccttcattgcttggaagccgcgcttgaacctgtcactccaaaggtacggacttgaatcctctccgattgtggatctgcgtattagatccgactcgatccggcggcccgcgagcatgcgcatgattacccataacatggcaagctcgtcttcgccttcttcctggcggatctggttgccgtgctccttcaaccaggcgcattcaaaatcatggtgtgcctggccagtagccttgcaatggtcatcgcaccagatcacgtcttggaaacaattgttcggacaacgaatacatgtggacgaatcgcgcggtatccgccaacggcagcgcagattgctgcagataagcgcatcattgcttgcaggcggaacagccgggacgagtgcgtagggtgcatcagccatgatcaccgtccctgccggtacaggcgcagtaacgcgcaccagtcttcccttttgcggatcgtaatcctgaactgctgagggatggatatacgtgtccgcatcctgcggatcaagaggatcgggtttcaccgcaacgaggagctgtcggtgttccatcattcccagatcaccagccctctggctgctgctgttactattgggtgccgtaattggcgagctctcgtagctctgcttgcatagccctgccctgcgaagaagcgcctccatctcgtgcatatcatacaattgcaccgcatagaacaagtcctggtgcaccgcggggccctggagatcgatcacgatctcccgattcgcgagacggcggccatcggctgacagctctctctcgcggagcacaacgagctgcttcccacgggcttcctggtccgagatgaaatgagtatcggggtcaagccattcccacccgctagacgtggagttctcgcgcatccaacctccgtcaacacagtcaagcacgaagacgcctcccggcttcaggactcggtacgtctcacgcagcatctgcaaatcgtcctcataggacccatggccgaatgaattgcccaacaggaccaccaggtcatactctccatctccagccggaatttggcgtgcatctcctacctggaattggatgttgcagctgcgatcctctgcgtcttggatttcttgtgcccgcttctgcgcaaggcttatcagatactcgctgtgatcgacccccgtaaattggacggatgagagtcgctttgctagattgattgtgtgccggccctgtccgcaacataggtctagcacgcgcaatggtgacgaggtggcaaggcgagggtagacaagcagattccgcacgcggggaatctggagtaagacccgacattctgcctctgtgatggcgggatcctcgacacagtctccgtctgcccagaggtagacgtagttatatgcttccttccaccaatctggcttgacgtggggaaagagagaggggacctgccccaggaccttagtagccatattttgagtagtgaagattggtggtcactgaaacaggttccaaccggcatggccatatataagagactgccttatgtagtgtaaccatggttgttgctatgtgtcacgcagtcataggcaagtagactgcttgtgcaggactttatagggaaaagcacggctcaagggttctaaatgacgtcgccaactgcagaatgtgtgacgggtgtcgaggatggaggatcgattaggtacggcagagagtcaccatgggtaaccagaccgatcaggtttcaaaatagcccttttaaacctcattgctcagcaaacatggaccgagatacaatataagtaactaatggctatttacaatagaattatcaatacaggttttagccctagcggtctgtaaatttatttgtccagctagttacacttatgttgtttctccaggcatgtggaggccatatatcatgttattcctttatattatatgtcttggaagacaactgtacagggaatagctcaacgaattgagtagctgcttatggtggcattggcgcttagcttggactgccccaaggtcctcacgagtggacgcacatatgctacaatacgcaataccacgatagtcggccggatcgatgtccatcagcagccaggctctatctctagcaccgccagagtggaaattgcttgagttcactgaagaagaccaatgattaatccccgccacgtgcgaatgccggccaatcataacccaggctaaaagagactaccttcaggcagtcgtccttaatcgttgccccatggggctgtttcgaggcgggaatgtataaataaggtgtcatcaggtagcccagcttctcacaatatcactgggtggtcgaaagaaatgagattaagagatgtatacaaaaatcatatcgccgctctccttgccacgacgtacaccctcgcctttgcgaaaccatcagtttatcttatccgacacggcgagaagcccgatgatggaagcactgcgctcagcgcgcagggcgaagattgagcgcagtgtctccgtcaggtctttggtttgtcgtcggactataacattgggtacatcatggccatgacacccaaggatcgtatgcacgcagctctgttctcagattagctggatctgacttgcccagatggaaaacgcaacaggccctacctgaccgttctccctttggcggaagacttgggtctagaagtcgacatctcgtgtgaccgtgacgacccagagtgtgtcaaagatggcgtggataactttgatggagacgggaacgttcttatctgctgggagcacgacgcactgacggacatcatcgaggagttgggggatgatgatgcgcctgagtatccggaagagggtaagaaggccctgtagtatgtctcgcaaagagggatgctcttggaatgcttatcggccaggtacgacctgatatggaccgatccttttccgtatgaagagatcaccgcggagacaagcgaggagtacccaaggttgggtaagatcgtttccgactctgatacgcggcactatagatcgccctttgtccgttgatgctccagacgaaattgggaaatgaccttttaagagtgtacgaagaagtcaattccaaagcaatagattggctataatctcagctaaacgctcgagctgttgtggactgactcctactaaatgtagaggagggagatgctactcaggccagaaccagggacaagccccgatggctcat

SEQ ID NO: 909 - DNA, 1775 bp, Emericella nidulans
cctattacatgttacatgttatgtttcatcccttattttgtcactcaagcgaaccagaattctccaatctggcgctgcagttacttattttcaatggcatgacgtgaataagacgatctctaaatcaatacttacgatggcgcagcagctataaactgacagtaccaggcaatgctacccagctgtataatgcctgaattcaaggtttcatttccgaaacaacttattatattggcttcttgatgtcaaacccaggatctatagctattacagttgaatacctgcccatttgtgtctatatcctgcacaaggcttcttagagctcttattaatccgagcaggatcacgcttgagactggcaatcactggcctgactggtcagttcaactaaggataagttactatatgtactacactagaaaggtcttgatatcaggaagccacactataaaaggcgctcacttaacccgtgctcatacgttaccctccttgcccagagcccattgttcaggagcccaaatgggatttagctggttttaggtggaaaaggcggagtatgcagaggcagagaatgaatactgatgcaatgtcaatttctagaatatcagcattcattcaatcgggcacgttttaagtagcatattgcattcatgatgacagtctatacggaacaaagagtagaaggcagatctgggtccaatcactacgccatggtcagctatctagtccatgaccaagtcctaatacagtaggcaggctacccatatctcgatggacatctctgaatcattcacgttccattatctaaagcataagtcggtaagacagacagaatggacacgaaactacatgagatggaagtacaaaaggcaagcagaagatcagatatacaaatacaagaatcccgaggctaaaagagagcccggaaaacaaagggaggagagagatagtcccgcagcagtatgcaaaaaggaagagccaacggacgacaacccggtcccgatccagcgccatcccattaccagtacaagcacgtttcttatatattgcgatggatttcgtgattttctgaaggaaacgtaacaatccgactccgtaattggcatgctctcactttgttgttagcttccactgccccaggcagctagatgcccacaaagcgactaaaatactgcggtgacaggcgtcatcgatcgatcgcaaatctaggatgatctctcaaggtagaaggttcgctctcgatcctttcgcactctgtgggtttgctcgagcgaagtttgtttacagggtaggctgggccttctgttcctcggtagaaggagcaccaggagcaagcatctgcaacgcaaatcaagtcagccagttgaaccactgactccggtcaaatataaccaaagtcataaccacgataatccaatttcttggcatctccgacgcgccaaaagaattttcaactcattaacgtcggccgctatatccgtcgataacagccggagcaaaacccaaagaaggaataaaagtgcgcatacctcgttagctcccttgatcattccctgctcacgctccatctggatatactgctcctcctcggcgtaggctaaggcccagggcacaccgagcaagaatgcgctagtggacaggatccagagcgccctgccgctgaataagatgctcccctttgcaagcgatgaaacgtagctgacaaaaaatgtgacctgcttgcgggcggagggaggaacaatgtctttcagggcggcaaggcgctcatacaggct

SEQ ID NO: 910 - DNA, 2683 bp, Emericella nidulans
atgctgactgacattctagcagctgtaaattctagctagaaaaggatggcggagatcgttttgacctcgataactaatttcaccgttgcttcgctcgaactagttttatttgtttatatgccattaaattatatattcgctatctcttcttctcaaaacaaatactagtctcatatccaagtcggagatatatataatctaacgaaacaatttattgacgaaggaaggttgtttcaagggctcaaggaaagactccgatatcttctaaacataacaccaacaaaatatataacgacgcccagccaagccatacgccacgtcctatggatcaaatgatcaacaccaagaatccaagacaccggtgtcgcgcgccaaggcgtagatctggtccaccacagctgtgacatccttggtcttgagtggcacacgatgctcaccttcccactcgactaatgacactgaatctgactgacaatagctacgcagtagcctacggtgcaagctcaaccctgggtcccgcaatccatggacatgtaatgtcggcagtcggagcatatgttctgtgctatcggttggtaactcgggctcactatccagcatggacggactagccgcatcgacgaggcccatggggatagaaccaggaccactactcgtttctggcagtagccacaccaatggccctctcccggccatcaataccgcgaaccggaaacgcggccgggtcgccgctctctcacctagccgctgctggatcgtctgttgcgcgtataagatgcttgctgcgactttggcgccctgactgaaaccaagtagcgctatccactcccccgtagcgccgcgcatatcgtcgtcgtacatggccgtggcgatggagaggttgatcttcttgacgacctcctgagcggaccggtccggatctgctgccgtgcaacgcagccaggccttgaaggggccatggtccttgtagacggatgttacgtctgagccgggctgggcagcaaagggtgcctcggcatagacgaagcgaaaggtggaccgaaggaaccgttcaaggacacggcactgcatgcggaagatgcgcgcattggtgccgccgccgtggaggcagaggatgcgagggaggtggagggtgtaatctgcctcttctccgctggggattcggatggtcatttcactggcggagcggttatgcactagatatgtggtatacgacgacagaatagagagacggacggcgatgaatcatcgtagagtattctgtacaggcctggctataactactctatgaacgcggtggaagttaatattagagcctagtcctaactcacgtccacatcaaagatccacaaacatcttggacgtgcttttaggccagtgactccagacaaggatgagatactccgctcggagattctcacttcagtagatttcagctcgtcttatcgcagttgggcttaatgaccaggcccctggtctagtgcattttatggtaggcaaggagcagagttggccggcacattttcatcatggggaagaccccgcttcgtaaaattaatatcacgagctgcgggtgggaagatggcgataatatagcgtgtaagataaggtgagacatcagcttgaaaatgaaaaagactaagaggaaaagaatatgaccattgtaaaaaacacaagagtagcctaaatccgagggcttcaggcggagctcggacatagaaattccatttggaaaatatcccgaatgtgattcagtgtacgattcgccgaggtcgacgctgccctaaagcgtctggccaaagcagaatataaccgctttcttacctgactcttcacctttatggtttactggtttcgtctttcatgaattctggtcgtttaatatcttgttcttctaacaccagattgtactcctcccaacgggccttacgacttctcaaaatacaccacggtcaacatgacagaacaacctccgcagaaccactcggtggacctcaaccagaatgaagacaacaatgagaatgactataggagctcctctgcgaccgatgctgaacgtccctgtgagccaaagatcgaagaatcaaccgcgaagccccccactggacctcctgcccctcctccgccccccaacggtggcctagtcgcgtggctacacgtcatcggtggctttatgctcttcttcaatacttggggaatcatgaatgctttcggggtctttcaaacatattatgaatcgggtgctctgttcgaaagatcgtcgtccgacatctcatggatcgggtctattcaggcgaccatgctattgctggtgggtttcttcacgggctcgatctacgaccgcggatacttgcgcgctcttctggttgtcggcagcttctgtattgttttcgggcacatgatgcttagtctctgcaaaacatacggccaagtgctcctcgcgcagggattctgcgtcgggataggtgctggctgcctcttcgttccctgcgtctctgtcctgcccacctatttcagctccaggctcggtacggccctggggctggccgtgtctggctcctctatgggtggtgtcatctacccaatcgtccttaacgagcttatcggtcccctcggttttggctggtccgtccgcgtcatcggcttcatcgcgctgggcactcttctggtccccatcgccgtc

SEQ ID NO: 911 - DNA, 3131 bp, Emericella nidulans
  unsure (1)..(3131): unsure at all n locations
agggccaaaaaaatggaacaccatgggggattaccgaacccatttaaaaaaaccatacccatttataagaaggtgggccacctattgccaaaaaaaagggtatacagggttggccctcgttctaaaaagaggggggtaaaaaatttaccgatgaccccacccaaaaataagactaacctaggcgggggggatcatttggagaaagtgaaagggtcttataacgggcactctttatagaattttggaattatcatgataggggactgcgcaatggagtgagtggggttgggatcccattgtgaaaaagagttttatattgttacacagggattgtcagaggacggacccctacggatgcttgaccaaaaaaaatgggatcaattggacctatatgtccatggtggaaaacagggatatcaataggaccagcacccttttcgacggcctttccctcgtcagcaatatagggttttgcttcaagacgtttgacatttgacaaaatgcgtcaagagagttcttcgagggccgcaccgttggcgttgaagtaagacgacatcttgctcttttttgcttggtcttttttttttctagagagtcgtcgtagtatagaaaggtagatttcgattgatgatgatgtttgacttgaggcaagtcaagaatgccatatatatcagagccattgtggcgatcagtgtgatttccgatctagggcaagctgaggctgttgacggattctggaatccgcagagaagagggaatccagtttccgagcggcgttaggccagcttgcccaatccagctcttttagtgtcattttatttcaagctaattagcggtaatagcataactcggaactcttccggttgatggaattacttgagctgtatcaacggagcattcgccgccatttaacccgatacccctcccccctcttctatgctgtccggggtatatcactccgctttcttctcctctctgttactcttcttcctcctttcctcattctctcacttctcctgtcaatccgtacatactataatcatccaccaaaatgtccctcgcagatactacctacaaactcaacaccggcgccgagatccccgcgcttggtctgggtaagtcccgtatacactcgacccattataacagctaatatttgcaggaacgtggcaatccgcgcccggtgaagtcagtgcagccgtctaccacgccctcaaagtaggctatcgtcatatcgacgcagcccaatgttacggcaacgagaccgaggtcggcgagggcatcaaacgcgccctctctgaaggcatcgtgaagcgctccgagattttcgtgaccacgaaactctggtgcacataccacacgcgtatacagcaagcactagatctctctctatcaaagctcggtctcgattacgtagacttgtacctagtccactggcctcttgccatgaaccccaacggcaaccacgacctcttccctaagcttccagacggcagccgcgatctggttcgcgaacacagccacgtaacgacgtggaagggaatggaagagctaatcacgaacaaccccgataaggtaaaggcgatcggagtctccaactactcgaagcggtatctcgagcagttgctcccgcaagccaagatcgtgccggccgtcaaccagatcgagaaccaccctgcactaccgcagcaggagatcgtggatctgtgtaaggagaaggggatcttgattacggcgtatagtcctcttggaagcacaggaagtccgctgttcaaggccgaagccattgtggccgttgcagagaggaggggcgttacgcccgcgtcggttctgttgagctggcattgtacgtatccctatcccataccgtactaacttcggacctgaacatatttgatgcgagtgagaaatgctaatgtgtgcttgtacagtggcccgcggctcctccgtcctcgccaaatcggttacaccttcgcgcattgaggagaacaggaagttggtgaagctggagcccgaggatgtcgagttaattggcaagtactcggcggaactggctgcgacaaacgggttccagcgatatgtgtacccgccgtttggggttgactttggattcccggataagtcgtgactacatgggtcgaagctgtgaataagattattatacccgtggggtgggatagattgtatataaaaggaactaaatgacttttcttttgttttggttttgttggaaatctgtgaatgaaatataccaattgggattgtacatgagaggaaagacaaaaggtatacatactctgtacatgatagcacctatcttctccagatgcattttcgcgtggtgtcatatcctatcaagcccattattatccaagggcatatcagggacctgtttcgggaacaatcaagacattgacaaagcaatcgagtcaaaatcatgtcaagatagctagaagtaaggacatggagttaatattgaaatccagcccactcacgctcaagcacaatctcaatctcgacttggccgctctcatcatcatcccatcttccactgccaccaaccaacttgctaataaaaaattcgcgatagcacagctccctcacatcatcaggcagatgcaccacgncgcggtcgccgtttcgaactcctttgaggcatccttagcagcttctttcgcctctttggccgccttccttgctttacctttgggtctgcccttcttcggactcgccccgcggtagtaggagcttggtgcttagagtcaccgcaccgacacctacgccctggtgccagaggacgagccagaccgtacagtgtcatgcttcccttcgagttgatgaaagaggggagcggcgttgttccgaacggctggcgccttcgggtctccgctcgagaacatcgnctggcaagggtcgtgtcatgacacgcgtcttgcaggatgaaaagacaactgagtcaggatatncaagccagggatgcgcagntaaatgactttgcgggcatcgcctagaggggaggatttttttctggaggggtgtgttttgggtatcactttctttctattttttatataactctttttttttctttattaaatttaacattatctatccttctattcaactttttt

SEQ ID NO: 912 - DNA, 3691 bp, Emericella nidulans
  unsure (1)..(3691): unsure at all n locations
accatatgttctccatcgcaagcgacctttcggatctcacggtcaaggccaagatcacggagacactctacactttgtagattagcattcgcaagaataccagatgaagaagaacaagcagaacagagcgcagagaagcgcaacataccgagagcagccatgttggtgatgtgtgctcgaggcgtgtcttccgtgccaggtgctgcactgatcatgattcctttgagtcctattctagagttagtgcttgattacatactgttaagtaagtgtagataagtgttaaatgagaaaagaaaatatggaagaaaggctctaactaccgtatgatgtgagaaaacaggccaaagaagctcctgctggacctgcaccggcaatcaggaattccgtctcgacaatgtcatctacactggcaccagacatggtattggtatctgggatggcttcagatgcatcagaatttgttagaaatgaggggtccatcgtgagctgcatgcgcaggtctttgcgtgtttagattcagtttacaaaaaaaacactgcagcagagaatggagaacaacgcacgtctttatccacatcgtcttagcccgaggctctctcatccagcccggcttctcttttctcctacggaatcgcatgattgggcctacttggacgatctgcattaatccgaccgaagaccctccggctgatcctcctagatgtaggcacacctggaacagcctggaaacgaatgagcgtaggacgatggataaggtcctcatttccttgatgttgaatagctttaaaaggccaacagatttcattgctggcacggcaaggtagttaattaacccttgacaagaccaaataataacacgcaccagaccagtctacacaacaaaatgacggcagcaacgaagccgatacgtctcgtccgcctcgcccacgtctgctacacacatgcagacctcacggcagcctcccggttcctcatagatttcggcttccaggagctgacccaaaccgtctcgccgagcaccggccagagaacaatctactaccgcggcaccaccacccagcagcccttcgtctactgcgcgcgtgaagggcccgaggacgcctttggcggcgccacgtttgtggtcgaatcacgagaagaccttgactatgcggcccagacgctaccggggtcggaggggattgtcgatctggaagcagaaggtgttcctggaggcggactctccctcacattccacgacccggttgatgggtttcctttccatctggtctggggacagcgaggacgagaagagcacggggagaatcaggggggaaacggcttgccggtgttgcagtataattttgtacgtgtctcaaatctcatacctctcttatctgccattcatcgctgcgtctggtcgacagaggcaggactgacaggatgcagcctacagagaagcaccgaccgggaaatagcactcagaggttcaaaccgggtacttactccctggcatcgcggcatcgcggcatcgcctactgtatacatactaaactgcaatcaggcccagctcccgtccacaaactcggccactttggcatgtgcgtgacggattttgcgcgcgcctacgagttctataccactcggttcaacttcaaggctagtgatgtaagtggcacatctgaaatgtgttttatatcactcactgggtgtgagaaatacgtgcatatgtgcaaactgacaaactatatatgaaataacagctcatccatgatgaagccggtaacgatgtgaccgcgttcctgcacttgagccgtggccgcgagctcgtagatcaccactgcttcttcattttcgaagggcccaagtggcatgtgcatcattcgtcatttgaaacacatgattttgatacccagttgctgggccatcattggttgagagagaagggatacacgaattgctggggagtggggaggcatatcatgggaagtcagatatttgattactggtcagtacactctttccctacttatcgtaataagggaattcttctagatattagaggtatgagccgacaaactgaccgatcttgtgccaggtttgatccgtcacgatttattctggagcattatgtggatggggatttggtggatgagacgtaccctactcatcgctcactcgcttcgccggataatttgcatgtttggggtgagtccctttattttcatgcccatacgagatactggctctggtgctgatttgtgtttctagggcctgatctgccagagggttttctagcttgaagcgccttagctaaaccgcacatgaatcctgggaaaaggacaggggtaaaggacagtgtcggataaagaggtatctttagtaactatagcccaataggaacacattactagccctatctatttaggttcttctcctcatgtaatgtttatgccaacacttcaaacacaccgagtaggggcattggatcaccacgaacaagataaccccctctttgctacaacaaatacatcaatcaaacacagctagaccactttgtagatccaactagaaagtttgattgaggagaggctgagcagactattacacctaggttcggtggaatagattgcaaatcagccatgccgagagagagttgccccgaagttgctccaggacactccggctggggtatggagtatggggaagctgggctgccccagactgtgtgtggatacttatatacaccttcccaaagggtgttcagcttctctgttgattccacttcatctgcaaactcatcttgactcagcagaatatgaactcactacctttgctgcttgctgctgcctctgtaggctttctgtatgtgattctcaccaaaggccggagagagaagggcctccctcctggtgcgtatatattcccttactcctgataatgttttcaggatttttatcattttcctaactgaatctccatcatactagggcctcctacgctaccattcttgggaaacctccaccaaattccggttaagggatcttatctcaagtatgcctatctgatttactttgctgaacttggtctctttgtgtgtaatcttcttctcgatattggcttacaaccttagattcacagaatgggcctcccagtacggcggcctgtactcgctcaaactgggcaccggaacagcgatcgtcatcaccgacccccgcctcgtcaaggaggtcattgaccgcaagagctccaaatacagcaaccggccagagtcattcgttgcgcataccattacaggcggctcacatctgcttgtgatgcagtacggccctctctggcgcacgatgcgcaagctggttcaccagcactttatggagacggcggtggagaagagccatatacatgttcaaaatgcaggggcggtgcagatgctgagagatttttgtgtgaggccggacctgcatatgctgcatccgaagaggtacagtaacagcattatcatgagtctaggtaggtcttccgttggtccagctggatcgagtggagctagggctaggtagactgacctgtggaaagtgtacggggtccgaacgccttcggttcatacggcccatatgacgcagttatatgagatgatggttcgtattctttctctacccaacnaaagcactcaagggatgccgactgaccgcgcgttcgttctcttgag

SEQ ID NO: 913 - DNA, 4176 bp, Emericella nidulans
ttacgatcctcacatgtttgatagaaacgacattcgatgccgacttggccgcgttcacgacgttgcgggccatgatgggctgaattctgcttgatgcgttagcatgactactggtgtgtgatcactgttgcagtccaggtatcagaaattgaaagcacttactttaccccgttgcactgctgggaataaaatgtatgttacctgagcgacggtacatcgacattgaggtagagacaaggagcagatatgtttctcggaataatgatattccgcttccgctaatcatattcgctgcaatggtaagctgttacgtagatacatggagtactctcaaggtattctctaagaacttgggacaagtaaggatatatatttattaaatcgtaaaccgagtccataaatatatatctgtgataggagcaaccaaggcaataaattaaatcagcttcctagttactacaatgacgacattctcgcctcgaagctcttccagtaggaatgacgccaaacatagatgcaaactgaaaataggtgttcgctcgcttatacagcgaactagttaggggctgcaattcgtcatatgcggatatcagatgcgccaacgacgaagaccgaatatgcataaaaccaacaccggaaaaacttcaggtctcggctatgctgccctggacctcttttggcatcgagagaaccaattgctgcacggcctccacagtagcgtctggaccacctggctggagaagaaggattttgcctgctttatctataacgcaaacacccctgatggttccacgaggcgacttcttgaacccaatggcgctaatcaaagttgacgctgtgtcgcagagtagggagtatggcagattttgccttgatttgaagttagtgttggcttttggcgaatctgccgataggccgtagatggccagcccggttgaggttaacttatcaaacccatcacgaaataggcaagcttgttttgtaccttgggtatgtcagcgtctggcttgtcaaacaggatgcagggagcgtttgattaaaccaaattgcagtcatcgataactgaccatcgagcgcacagagtagacttacagccgggggtcgaggccttggggtatgtaaacagcacaacgccagctttgctttcgtcaacaaggatcttaagggtagtctttctgccatcatttgtctcaaaatcaccaccaaagccattcaagttcaccacgtcgccaaccctcagtatactttcacaagttaaggcggttgtgtttccagatggctttaatgttgtggcgggcaccttggttttggtccgcttcgctgactgctctggaggtgctgctgtcgttttgcgctttcgcagttcaaccattttgggtttgtttgtggttggagaaagactaggtgcgattgccgaattagagattgtggaaatggtttcataaaggtatgagtgccctttttctttgtttatcgtacttggcagcatgtaagcgggagttttgctgtgcgtctcccaagaggattcgtgctttttatctaagtgcttaaagaggcatagtgtctaatcttgacaagggtgggagctctaggtcttgatctgcaatactcccagaagcgaactagcttcaataagaggaggcattatttgactgcagatggttcgaatttttgtgttcatagtgaataagatgaaaatcatatgtatgtgtgttggacatgctcgaaccatccttagtttatccaccacctccgaccgtaaattttgaaggaagcgtacatctagacagtaatattcatgaagaatatttgctaattaagctgatgatataacgtaaatcccgggcggtaggtgcgtcccgggcggaaggtagttttctcatccaccccactgctatacaaactttcgatttcaataacttgatcaattcttatccaaactaaataaactaaggatgattgggaacctgacagcttgttcttttatggccttgtactccacaatttgtacaccttgggggggcgtgcctaagtctctccgaagttggaagggtactggagcttgaaccccccccaccagcttgtaatttattatttcttgacgaaataaggtccctggcttctttaaatgagagtccatctgtaggagttattagacgcctagaacaactcttttttgctatattatctgctataaataagcagagatccttgttttcctgtaccagcaacccagtattgtaaatagccacctcacagccctttacaaattcatccagtgcctgttttgaggggcttaaaggactcctagagccctcttttagaagctttttgactgataaagcttttcaatatacctgacagactgtataaggcgtacagagttgagaagaggggattaaagcagtacctctgcttggggggggaataggagttaatagtcttaactgcagcttatccagtactgcagcaggtaagaaaggatataacctagttaccctaaatctgctttgaatattctctattataaagactttcttataggcttctgaataagcctttaagaaatcaagcttgttaatatagttatatcctaggcgtgccttctacttaatcagggatctgtatacctcttcaaggggctaaaacagcccacatccaggggttgcaggaggtgagataaataaggaggcatgcagacagggataatgttattatccttgtatatagtatcaaaggccggggtcaagtagcttctatagctgtctagaataggaagtatatactcccccctttgccacctctgtatagctggaataaagcatttttaaagccagcaaagcctaattatatctatagtctatctattattattaaccttaatcctccaggcatgtagaatagagagttccttaaactatccctctctatagtgctttcccttaaagataatagttgatagaactgaccatctagttgaattaatatatttaatagtagtaacctacttataatcccctggctgtataagccatagtttgcctggtatttctgctcaagatactacttttattattataattaggcccatagcaaagccagttttattaaagttgtagatattattatctgatatcccatactcaactttaatcctctatatcttattaaaaaataggtaaattatcttaggatctttacaaagtactctctgataattaatcttctgagcaaacctggttttgattttagggcacctttttataaactctattacccagttctttctaattagttaagataaggttgaggatttatctaggataagttgtgctatctcatgtatgcacaagggcctgggagctgctctataaatatcaagtaatactatctatcctatcaagacctcttcttaatatagggatagcctatactggtagttgtggagttctgcttgagattagcagccataaagtctccctcaaagtatattgggatgaattttatatgcacgcgctgcgggcgcaattttttgaaatttggtatttttaatgtcttgaatcgtgcattggatcctgccctcttgctcaatcaaatcttgctttgttttacgcgcttttggtggcatgatggttgttgaaagttgaggttgataaacgcgttggggtggacgagaaaactaccttccgcccgggacgcacctaccgcccgggatttacgttagtgattagttatgaattaagcactgtattagtcaagacatgtgctggatcagatgagcgctttgccacaattcggtttctgccggaaactcccgatgtcgaaggtggaactgtcgtccccggtcaaacctctggacctttctggagaacaggaaccgcaccactaaaatttctctttcattccatcgccacttttgactcatactttgcctttataaggggtaggtcccctctacaaaataactgcctgtgaagtctttcgctcttttgggtataaccaatattttgcattcactcagactgaaatatccggcccaacttcgtctgcctggggattcatcaggagctggttttttcgtcgaatataacgctccgtctttaagattacctaagttttagccccacgggtcattccgttctttgggccagtgtttgactggcttatagaaatgaa

SEQ ID NO: 914 - DNA, 2467 bp, Emericella nidulans
caaggccagtgcaaggtagtgatgagatgaaaggaactgataagaaatagcaacaagagacgtaacagaggcggtgctgtggtgcggtaaggctgttggggagtggtgatgattgtttgcggatgatgcaagacaacgcccagtcacccgacaaattgccaacaatctactagtacttgccagtttacgtttagactgccctatatcaggcaagtcaggcaagtcaggcatagaaaataaagaaaatatcctgatttctcatcttcgatatcatacccatctacttcgcttgcctgcagatatcgtgatcatcccaccgcctggagacatgtcatacagaccgcaagaggggcgatttctgggtcccgtctcgactccagtgccatgactgtggaacatcgagtttcaagtctcgagttcctgccaggaaggctggcccgggagctgactccgctacagtggactgtattgtaagaggcttctttctccttgctcctttgtggagcagttctgctgcagttcggcctgggaggctgaaacagcgacctatgcggacgcggaacgtcatctcgatatcagactgccaagtatcgatttcaacgatttcaaggctgagagtcttgaaaatcataagtctaattcattatactctgtagatagtctatggcgtgtctcgcttgctaatcatgatgcgaaatgcaaatgcgaatgcgaatgcaatggcaatgcgaaataacgattatgccatccgtccatccaaccatcatccatggatgggtgtcggtgggtgtcggtgggtgtcgtgtcagatcactctcccgccagagcctctcccacccaatccatctgcaccgcactcacccctcgcgcgtagctgcggttggtaaacacaaattcgttgtacaggatcgcctcgaccttcttcccgaagagaacactagatgggtggattgccactgtctggttccccaccaccgtgcggtagctaccgtcggggacaaggcgagcggtgtttgtagcgaaccctcgcaggaagctcttcaatatgaacacaggagacggttctcggatggacgaggagtctgagtcccgtgactcggtgggactcggaagcagtttggcctgtcggcattgagccgtcagttgcttgcggacgtcctaaggacccgaatattagccgtgagggttgcttagagacatggtatctaggtagggcagcaaacttaccatgacggactgcatcgcccgatgcgagaccagatgtcgctcagcccatgccttccggtcagtgttctccgatgcgtaggcccgtactgtcgctagcatcgtaagatggtcgccttctcgtctgtatagatcgcggcgagctgcctcggccgcttctttcttctcttctgacgtggtgtttagaaatatgttctccacactcagacacgatataatatcaataacgtcagtcagacaatccggtccaaagtcggacgcggcaagtaacacccggcctaacgtcggggtgagcggaagtttggcgatgtgcgacccggtctcactgatcttgccggtttcatcgagggcctcgatactcagtaattggaggagcgccttctctagagcttctcgtggaggccgtgtcaggaatgggaactcaatgacattgtcgacccctcgagccttcatgttgagtatcgcctggctgaggtcacaccgtagaatctccggcgtattgacctcatctagtgccaggtagtctttttctgtatatagtcggtagcactggccaggcgcttctcttccagcacgacccttgcgctggatagcagcggatttcgagataggcttaacaagcagcgagtccaatccaagccgggtccggaactgcttgatctttgcctttccacaatccacgacatagcgcacaccagatacagtcacagaagtttcagcaatattcgtagccaaaatgatcttgcgggtgcgtggcggcgcagggacaaagactcgctgctgagctgcttggggaagcgctgcaaaaagtgggagaacttgtatcttcggtaatgaagggtccatccctgtggcatactcgttgaccagattttccaacgcttcaaccgtctcctgtcccgtgaggaagaccagaatgtcgcctggaatcggttctttatagtggatctggaaaatgacctttagggcagcatcaacaaagtcatgcacgggttccggcgaatatatcgtcttgaccggaaactgacggcccttgatatgacacactgcgataccatctttctctgacttctcttccttctgcaattcccgagctttgtatccctccacaaaaaattcttgtagactctccatatcagccgtagcactcataaccacagccttgagcggcacacctccccttccctccctctttccagaaacaaggttcctcaagaaccccatgacaaggtcaacattgact

SEQ ID NO: 915 - DNA, 2448 bp, Emericella nidulans
tttttttttttttttttttttttgagggggagatggctcaggctgtctgacgtggaggataccgcgggcagatatcgtcaaagaaacgagcctgtgagaaccaggaagctagtttggctgcgccctttggtgtgccaagtaggtatggaatcatctccgaggggggtcctggagggcggggtaggcgtctcctagcaatgcagcaaaagaggaagtggattggggttttctttgagctgcagcagcagaggaggtaggcatcttcatagttaaactgttcataatatcttgcaaagtctccatgtcctgaacatgccgccaggatccgtgtaaaaaggggtcttgggagtctcagctctgcagggcactgggggaaggtggtaatctggagatcttgatgagactgtggggctgtagactgccagtagctttgtagagcagatattgtatttgcctttgccctgtgtttaagagaggcaaatgagtgtctgtgtgcagggggagggtccatagcagctcctttctttgcagcttgatcggctgtttcatttccttctatctgggcatggccgggcacccagcatactcgtacagagcctccattagtataggagaacctctctcgtgcgggccaggatgcagctagggattggaaggatctaaagacctcttgggatgagcctgtaaagggtgataggagtcaagtagccacctctagattatcaaggaagacccagagattagtggcaaagcaggctgtatatagcctgaaagctgctttagcccctgctaaagctgcttcggcttcggtattaaaaacctccttgttcgggcctagggagaaagaagactgaaagaatagctttccagactggtatagggcaaagccagagccggccatcccatttgctagttttgaactgtctgtaaaggcctttatatcagtctgagggagagaggcatagaagtcttggaagttactagcttgctccttgttagttgtaggggccctgatttgctttcaggcagctgcccttgtcttatatgggagccatggggcatattatagtaggtttagttgctctgactctggtagagctaatacacggcgtgcgaggcagctggttgggtgtcctctttaggtgatcctctctgctctcttgcagagtgggtaatataagtccagctggtagaggcatattattgctatagctgctaggtggtccagcttaatccttgctggtagaagtctggactcccggtaaagtgcaggaagtggtattgtttggtagacagggaggattgcccttgccccagataggattaccttggttatcttgtcaagaaggccttggacctggttggagatagacccacaggggctgatccaggagcagccaggctaccaggtttcagtgccatagtagactttttgtagagtacatgcagttatggcttgccgcattaggtaggggttaactccttgtattatatttccaaggctgtgtagggtattggcaatagtcagggcctttgaagccagctccttgacatggtatttaaagctgagctttttattgaagaggacccccagccagcaaaggtagggctgtgttgtgttctctgaaactataacctggtctgctaggactaatagtgtgcagctaggatcctggtccaccctgtatcaggagaagtatagtagcttatatttatctagggtaaaggtaatcccttgtatatagccccagtcaagggcttcctgcagggactctgacaggttttgggcatttatctctagggaaggggatgttgccaggaaggccccatcatctgcatacccaaatctggcctttggtctgcccagccagaacaggggggcaaggtaaagcataaacaggataggggatattagcaagccttgtagtaagctgcagagtactcttatatcaggccctagttcaccatccagtctaatttgaaccatgcactctgtgacaaaggaggctatccagcagactaggttgtctggccagccctgggtgcatagtctgtgtattagtctgccaggaaggaccctatcaaaggcccctttgacatcaaaagttaggagggaggctgtcttgccctggtttagtgcttgctccacattatagagtaggcaggtagtaaggttaacagcagattggacaggcagcgctccaaattgttggctagccaggactttgtagtagatagcaatccatgacatgttccgtgctatcaaacattcaaggcctttgccaaggactgagaggagggcaattggcctgtatgacctggggtttgtccagtctgacttgtttggcttttgaataatggccaggacagcatggtgaaagcaatatgggtgaaaactagttgttagcagccttggacagtgccagtaccctgtcttaattaaagcca

SEQ ID NO: 916 - DNA, 3839 bp, Emericella nidulans
tatacgtgtcacgacagaccaggggaatgcggttgcggtgggcacagagacgagcgagtgtgtcacttatgaagcggaaagtggatgggcagtcgttggggcttgggggagagctggtgatgaggttgatatgttgggggtagtttatggggctgtataaagggagaaatcagatgagataggttttggtagaagatgtctcggataagtggctatgaaggtagcttgaatagctcttatggctctgtatatgtgtatcctgtgtcccctacaaaccggtaattcaggcttaaaccaactccatccaatagccctgtacctgagctttccatgtagccgtctctagcggaggatatatgtacaatcccaccccgtcaggccagctgtcctaatcagaccttgataaaacgacagcaataatccagcagcaggcgtcttccactgttctgcctctggtctcgagcttcaagaattagtccaagaaatgtcttatgcaaacaaaagagcttattccgattcaatgccaattcaaaaacagccggatgtatgaagaatgtatgctctgctcccccgattaaagaactattcgagtcacaacacaacaccaatcactgttgcttcaccagccaccatccggccgctacaatgccactcccccaaagaacggtcaaaatccaactgcccacccggtctccggtcgtgatatgcggcagcgcatcgggcgtgtcatcgttatatgtgtccaaaaactgctccttcgcaccggggttcgtatcgatagtcttggccaccacgtcagtcaacagcatgaggttcgcggtgatcccgcccagcgccgcctgctgcacctccagcccctggatcccgtcccatgtttcctggtaccagcgtgagccacagaggttgctcttcccttccgatgatccgtcacaggagcgcccgatcgccagcgcggacccttgcagcttcggcgtgatcttctcacggagctcaggcaccataatggcagccatggccaaccacatcgagctccaccctttgaaattcagcatattcctatcgcacgtctgcagcggctcgcaggccacgtcggagaagatcgtgcccgggccaatcgcggtggtgtacttggttgggaagaaatgcttaaaaacatggtcgacgaggccctcagtgcggttgcgccacttcacatcttttgtagcattgtacatatatgctgcgcctgcaatgaacgtcccgtagttgtagctccactgcatgcggtccgcatccacgcaagtcgttggagccggaggttgagtcggcgacgaaccacgtattcgtgtcaatcagcggactggctgcggcccagtcccagatcttctctgcccagtcaaagtatgtctggttgttcgtgaaccgacccaatcgggcggccagctgaaacagcccgccattggagatcgagttgcggagcgtataccctgcttgccagggatgaatctgccaggtgatgccaccgtcgcacgcacgctcgtcccatcgattggcctgcatgttgaagacggcgcgcgctagcgaagtccaggtgggcttgttgctgacttcagggaagccggtttctgaggccgtgatggtagcaaggccccagaacatttggtcatcgttaccctgtagaaaatcagtatcgaatccaattcatgcgagaatcgtttagtcctgcgcataagacgcaaaagacgcaatgaaagagacaagcataccagccactgactgtaattcgagtcaaagtagtcgtagttccggcccgcctggaacatcaggtcatgcgagacgaccgagttgtgctcgttatacccagagacatgccagaactggatcatagtcatgaacatcgctcccgcgacataccaggtatcggtcagtttgccgggaatcccctcggtctggttggcaaggtagtattcccacatgggcccagtgatggtcttgccggcctccttgagggagtctagcgtgcgtcaatattcacagggcccatagttaaggttgggattccatccgcactaacctttggaagtcacctcgatagggatatccgctaggacgtgctggagctggccttgcagcagcaaggcggccccacccagggacagcaaagagccccagcgcattgtgtggtggcggcaccctgcaagttctagtatagtacaatatgtagcttagagtccggagtctgtctggagataaacggacagtcgggaagagcaccaatgcagacgcaggatgcggacggaggacgatggatgaagaaaagtcgcgcctgatcgggccaaggacccctaaacatagctgcaaatcacaccctgagataggttcttggcacgcttgccaaggcctgctcagccccgggtggctaactcaagccaatgggagaagcatatttaatagcacgccaagcctcatttccggatggggttagtaaggggcgtaagtgattgctgagtcagtggcccctggtacggttgcggaacaatgttactccaggtcacgggattcaatgcccaaggcagtaatcctgcacaatgtcgtcgtcgtcctacctttatcctccaagatctattatcttacgcgcaagacttctttcatgattctgtgacgtcaagctgcctcttctcggcctgatcgcgcactagtcatcgtttgttgtccaggtttgctctcgaccgggttcggaatgatctcctttgtttaggggatggattgtttggaattactacgagtggaatggactgcctagcctatcgtgccaaagcttacaacctggacagagtgattacagccatggaagtgggcggtaggacgatcgcgcgaccgctaacatctgcgattatctcttgtcttaaggttagatccgcggtagcttgatgggggatggcttaatgcgtgtaaccaacgcgatgttttggattcagccacggaccagcctcatgacagaaccgtgtcttaataaagactatcatgagcttggagtcgggaaagatcttttttcttgagctcttcggaaacagagagagtacattgaggatacgtggcgcgacttcctactggccaatatcacttttctggtgccttgtctggcccacgaggtaacaactacaaagagttcagagtccctagacgaggcagcagtaattcagccttcacgtctctttacatattcacctgttgtacaccgatcgagattcgtcatgtcggggtcaaacgtcggctgcgcgcagcagctttcacgccgactgctggacaatatccaatttcccaatgtcaactgttctctaggtctgaccggctgtcagtctagtcggcatcacaagttcgctaccgcaaattcccaatggctacgtgccatttttgtcgaacgctggctccattcttctcaggaactcgaatccctgtctcagatgacacgctcaacgctgctgacggcctcttagctcctcaacagattttccattgcgccaatcctgcctatcccaaacaggtggaggtggacaagtacactaaactaacacaaaaaccagtgtttatctaacttggccttatagtcaatcgtcctgataaagtgcctatactagggctttggcgacaattggacaatccagtgacgtatattctgttcaggcgtctgtaaaacccttcaggatcccatatatgccggaattagggacaacttggagccagcataaaagacgtcttggaggctctccacgcgcccggccgagcattggccaaacgacataacctttcttctccctcaacttcactagaaaatggccgcaactcggttggccctaaat

SEQ ID NO: 917 - DNA, 4427 bp, Emericella nidulans
gacagggtggtatcgtccaaccgaatccggcggattgacatcaatactcggtgttaaaccctccggcgattttcgttaaatatctcaagctgatacctgggaccaaggtactttccccagctcaaaggcctcttcagaccccgttcctaagatgcagcctggcctcagcttcctcgtgggcaactggccctccgtcgtagtcctcctaggatttgcctacttcctcacggtccgtaaaaccatcaatttatctatcaattcccaagaacatatctaactcatatgaacagttagcctatggggtccgcaagaaccctctctcctccctcccaggcccccagctgacaaaatggaccgatctgctgctgaagttctacaccgtcactgggcagcgtccgcgctacgtgcatgccctgcatcagaaatacggtaatatttcattcctcactttgagaagacaataagataattaacatgacaggccccgtcgtgcgcatttccccttccatcgtcgacatcagcgacgtttccgccagccgcgatatccaccgcattgcaagcccgtttctcaaggcccctttttacaagatgctcgtgcgcaaagatggtgagagtcttttctcaaccactgacccggtgtaccaccgtcggcaccggcgtctcctcttctcacccctctcagacacgaacctgcgcactgtcgagccactcgtgaaagcccggatccgactggccattagccggattcgagaagaggcgctctcccgcgcggtgttgcaaacatctacaagtggttcttcttcatggcaaccgatatcatcggcgaactgagcttcggtgactctttccgtatgctcgagatcggaaagaagaaccagtatatttcagacctggagacagtcgcgaaaatcggtggtatccgggctaatttcccctggattatctcaattggccagattctgccgctgagtatcttcagggaggtcgtcgtgagcacggaccggattctggagtatgcgaaccagtcggtggagcggtataagcggcatctggcaatgaatcccaatcagccgaagccgactctgttcaccaaactttatgatgcgtcgcttcacaaggaaggggatggggagtgccttagcgatcgcgagatcaggaatgacgcgcagagctttatcgtggctggaagtgacacgacggcgaatacgctgacgtacctcgtctggtctgttctcaaggacaggtccatccaggagaaacttgtggaagagctggatgtattggtcaagacgctgaacgtcgagcaagggatcaccgaggaagaactctctgacgtccacctccgagagctgcaatacatgaaccaggttatcaacgaggcactgcgactgtatcccgctgtaccgtcgggattgccgcgagttgtgcctgacaagggaagtactctcgctggacattggcttccgggtggtgcgacagtaacgacgcaattgtactcactccatcgggatgaggaggtctttgaggagccggaacggtacactatttctcctcctcttttgcagccagtggggcagtaagctgacaagggtagattcgacccctctcgctgggaaaatcctaccaaagccatgaaagacgcctacatgccgtttggggccgggtcgcgaagtacgtacttatcggagcccgattcttcttcggttttcttcttttcatttttacaccttctctgtttctttccctttactgaagcgctaatttgggagttgaaacagactgcattggactacatctggcaaagatggaactgcgtcttgcgacggcatacttcttccgctcgttcccgagggccaggatatcggctagagaagacatgaacgatggcgatatggagatgatgctgtacttcctgctctcgcctaaaggaaagagatgcttggtggaagtgaattagtctagtggctgcagttgcatgggggatagggcggtggtttaattagggctagatcgataggatgatatcattggccgatttccggcgtcttttggtgcacgttgcccaagaactgaggaagaatggtcaagcacatataatgaaagccgttatgatgcgcccttctgttctggcagctttctcctctggaatgagctttcattggcctttcgtggtcaaagccttcacgtggggttattcccgtacggaatctgacctgttatcaatctttcggttcattgagcccgcggccgcataattgagccgagcccgagtgcaagtgctagactagcaaggtatccctgtagaatggcgaggtatagaatggatagtatgacacgttacggtttactccttccgctgtcaccccaatgtctgactaactgtcagtatccgctaattatggagctgcctggagccgctgagtgagtctgtcaccagagtgatgacgacttatatccacaatttaatttgagctacggaatgtttctttgaacagttaggcctacaacccttctacttgacactgcgatctgagtccgacacttgctgagggggaattgcatggcatacatatgccactagagtctcatggatcatcatctcttcagaccgggcccgccccaatattcgcctaatttactggactcactaagtacaagaacccagaagctgtgagagccatgcctgagggattgaaggtcgaattgcgatggcttgggatcgcgttcggctttgattgagaactttaaagcggaaaaaaagtgactgtaagactgtgaattcagaagccaaattatatttaagatactgttcatgaatgcgacctgtccagtataatctcatctgtcccgcagacatactggtcttgtaatgctgttgaagtgtggcgttctcggcattcccccacttgtcctgtcaaggtcgtataatgaggaggattgctcgaatagcaaccttctacgggctgcgccttgaagaggaatcataactcatctttcctacttgtacttagcttgccgccgggcgctgccgaagagtccccgaggccagcagtcgttgccttgaggtgcgcaaactcaggagcatcctcacccaagccccaagcaaacacgccaccgagctttctcttctccaaaatagcaggaaactttcttttaatagcatttgctgtgtcccacgaccagaagatgttttcattcgagtcccagaagtaatagccgccgccaaaaggatcatattcaccacttattttggccttttcaaaactcgcagccagctcttggggaactcgatcattccatgaaaatgcgcctgcttgtccaagatccgcacccgtatccgggtcctccattaaaacagtcggacatccaattggctgttttgcgcactgttcgcctggcacggtcttgaaccatttaacatagtacgcgaggccgaggttgagcttttcaggcggcatgccggcctctatatatgcatctattgactccagggacagctgtacgccagtgtgatgtttcgttacagtgtctcgtctgttcatgaggtcgtatgtcatcacgttgaggaaatcaactgaggcgctgatagagggtatagtctcttttgtgaaagccaacatgtctcgtggaaggcctggaacggcggcggttatcagtttgtccgggatggctgctcgtatctctgccagaagttgggggtatgctgcggtttcccaaaatttctccgagttggggattcgtttgtagtcttcgccgttgcctctgtataattttagcgttaaatatcaagccgctctataacgggcgataggcaggaaaaacatacccaggatactcccagtcaatatctactcctgctgatcgtcagtaggcgaatacaccggtgatgaaactactcttaccatccgccccggtatcgtccaccatccgcctaatgttctccgcaaagagcttccggctctcgtccgtccgagcagccgtggaaaatccctgcgtgtcgccccatccaccgatggagatgaggattgatgttccgttcgagaattcggtacggacagcatcaactgtggtgaagagaggccagctcgaggttgagttcctattgaagattgacgattgcatgaaagcgagggcaacgtgcgtcacatctgagacgagggatggttcagggaccacgttgtgctgccttactctaggttagcttgagcagagcgcaggtatcagaatgatggccaactaaccctgtaagatacataatcagcttggtagcgtgtgtgccctgtgtaagggcgagaatgaatatagctagactcttaagcaacatcccgtgattatttgaccggttaactagatgttttctctgatggaaagagttttgaagagcgactttcgaaggtttaaatcaattgttgctgtgcgaaaaagtg

SEQ ID NO: 918 - DNA, 2380 bp, Emericella nidulans
  unsure (1)..(2380): unsure at all n locations
cccccggggtggttttccggcaagcaacgacttaagcccaataagcgcagtctcgatatccctcagagcgggcaaaaacaactgcgccgcccatctatttgacaagaaatcccctcttcccagcccgcgccacaaaagaagccagctcctgcaccggcgccggcacctcccactgcgccaatgggagctatgtctctggggccgaatcctgccaaacaatctagtatggggaagccagtaaaggaacagaaagagaagaagaagcnccgtttcttcagatgatatcattcatagcttcggcgtctcggtttacattttgcttcatcgcgctccgtgataccatttagggttgtttaagcaataaggcgccatgatattcaattaagtttttcttgatcttgagcaaactctttcgccctttcagccctctaattctcaaatatagtacatgggtatcatagaatatcataatcataataagaacgtcataaagtaaaaggatattagccggtgccaagatacctgagcacgtcgtcatcttggtaaaacaactctcgtagtctctcccccttcttctttacatccagatgctccttcctcacctgcttcgcattcaacttctgaaccttatccttagactttctctgtccagacaccgaagagggaagaacggctcccaatcccactgtgtcagcctttaatttccccttcaacggttcccggataccttctccagtagctcctagacccaaccggctatctggatcccagccgtaagactcgaggtaacgaagcccgcgacgggtacggtcaaggtgagatggtggatgtgaatgcgtgagacagacttggtgcgctaaagaagattcgtggggtttatcggcagctatggaggaagacagtgggagatggcatacttcacacgtctggcttgggtttggcggaggcgcggagtggctgcggccgtcggcagtgtctgcggcgggttgagtggcagtagatagagaatctgatgtcggagctgtagttgtagtggaagtggaagatgatgttgctgcctgctttggcatgacaatagagaggtatgtattcgctatgctagccccggtagcagctggtgtggcgggtgcggagttgagtgtcgagagctcagaggaacgcacgaacggcacacgcttacgcgtgatacctgcgccaaagactcgctgatcttcaagcgggaggaagtagtcttcgtcctcgtatggcatggctggcgttggtgaggagggggttgaggaaggcgagtccgtggtggtctatttcaggaagtggcgggagatcggccgctattttgacgttgttgcagagcttcccttccgcaccctcttgaccctcacacagcctgccacccggtcgagatgcccatcccaattatcaccacgggcatcgcggagggcttatctgccattccatattcgtatacggtcctcaaagtcacgccatggatcctcctcattgcagccctgaagtattacttcggcggtgcccgcaatggctccgagaggctgatgcactctaaggtcgtgatggtgacggtatgctactgctcattctatagtagctcaagcactaaactaacgttactaacttggtcagggaggcacctcgggaattggagccactgtcgtctacgaactcgcatcgcgcggcgcccaagttatccttcttacgcaacacgctcaatcggatatatttctcattgactacattgaagatctgagaaaagccacaggcaaccagcttatttatgcagagcaggtggatctctcttctctccattctatacggacctttgcgacgaagtggattgacaatgttcctccccgccgactggacatgctaatcctttgcgcgaacacggcaaaccccacggaaaagataacggtggatggaatagatgaggaatggcaggtcaattaccttgcaaacttccatctactcagcatcctcagcccagcgctccgagtccagccaccccaccgggatgtccgcgtgatcatgacaacgtgttcaagttacatcggtgcgccgaaactcgacttttcgcagctcgacgtgaataccatcccgatccacaaaaaaacggcgggtacaaaaccgctacgcactcaagcatcaaggaaggcagagcccaaacaaaagcgccaatcgcaaattcagaggaaacacatctatggccttagcaagctatccctcatgattttcgcgacgtccttccagaaacacctgaacgcctttaaacggcctgatggccaacccccttcactcgttgtgatcctcgtcgaccctggtctcactcggaccccgggcacccgccgctggctcactgggggctcgg

SEQ ID NO: 919 - DNA, 3524 bp, Emericella nidulans
gtagtcttgctttctggattctggattcgcagcatgcaaattccatcattgcaacctgaactaaactgggatcagggtatctgcactgatctgtctgcaagcaagatctctccattcctctatgggaaccagaagtacggagcagctaggtagaagtacccatgtgagagatcagacgctcagtctccttgttcccatcattagagctttgtccccctccaccagcaggaaaaagtactgcttgagccctcactcctgttcagttctctccagttcccaaccaggaggcccgcattcctaagttcattccggttgccgtgatacagacccagtaaaagccagagaacaggatctctgcaagccggcacttgcagaaatcccccgattccccttcaggctgccctggtgtttgctttcagctggatctgacctgtcgtaaaacttgtttccttatttctcgacgttgccaaccggcctaaactccctgatggaccagcaagtagaagaactacccgccaatggggcagtgcatccacgtacacagaacactgtgattatgcaactttgaatccttcgagatatcccaatcgtctggctctcaatcagctcttctgagatcgtccagtatgtctcggctaggaccatcgacacgtcgatttgtctcctcagcgatccccatgatgaagcagtattcggcgtcgagtcgaggcaggatgcacacaagttgacctcgagtcttgggcctcgaagaggtaagaggtgcatcgtccgcattctttatctgcaggagtctgtgactgggagcggttgtcgacatgcacggcccaccagttttccatgcaggctgatcctccggatgcataagatgcgatgacggatgttcgagctaaatgtacgtacttcttttttgcgttagtactcggccacctgaagtctgagtaaatggctcataaatttacttgagtattgattgctgctgcttctctatggcgaactctcatgcgttgctcacaaccagaattaggatgcctataatctgaaattgtgattgtgcgtacgaccagggtctggggtggtaagcgaggaactgttcgtgatggtgtaaccggcgaagacatttacaagcattcaaaacgccgattggccgttaacattatatcccagcaacatctggtccaattccactttagacactgtaatgtgcattgatcacactagatagttgcacaatcatgtataagtcatgaactcgtcgcatccactcggcgtcgcggtagaagctggtacctactgtaatcggactcgggttatgggaataaaataatacagctacaaattcatgaatcaggatcatataattgctagaattgctgaagcaaggtattgtctaatggaaggggattgggttgcattcaagtattcgttattaccaaaggaggttcatatacacgtatacatgtttatatatacacaaatatatatatacatatggatcgtcctataccctgtactctatcaagacgagcaattgttcagacaatcagctctagcacgaaaagtgctcgagtgcaactacgaaacctgattttacatctaaactaacaatatgctgtgatctatcgaatatccatagtcatgatctgactcccgtcactctccagagactttgaaccagatcggccagtagacctttctaagaccgatttacatagaaaacaggttttgctccaactctaaaatctgactaccagcaataaagcgtttctgcgtacagcttatttcgcaaattgcgaggcgttcattgtgatcactacttaatcaaaaccaccgtcgtcatgcatatagttcttacgcgcatttcccggatcaaagagcactagttcaggcagaacattcttcagccgcctgatacatatgtatctacatgcacctgctctagtctataggggaaagccctcagagcgggctctccacccgcggctgcacttcagacatccgctggctccacgtctcgggatgatgtgagggttcattcccgggagatccgccgaggcccatcgatctcaagctcacattcttgatatgcggtctcatgcgttagctgtgataactatgagcaagccgtgaggattggttgtgcggaagggcactgagttgccccgggggacgtgcaactcaaagctgcgtccctgggataattctaatagaacagtgacgatataatcgtcgagaaggaggcagcgtatccaggatagacgggtgctaccattcccacgcacaatgaggctgaggagcactgcgggaggtaaataaccgtactttggtggcgaggaccaatggctgagcgcaaggtgaaacatgctgcaaggtactgatcgatgtgtttaagacaggctgaggatcccgagcaacgatcccccttttgaatatatacttgttgatgcggatttgtaatgattatcgcaagcaatgatcgcaatccgacggcttcaatctccgtctggtggtcatgggcgacgaggctggtatagacccgcaccccttggtagaggcgagagaaggatattccgtattttgacgagagaggtaaaaccaagctgggtctcattctaattctcgttgagcatatattaattcgagattgtgcgcgattgctcctactatacggtgagtctagacccagaagcccacctgcgcagtagtgagtagtcgtaccctcaaggtctccccaagcccaaagtgtaggcactagcatataatccacaatcagtatggggcgtttgggtagaattataatgcgatggacaaacagcgttattccacccgactggatgccttgactgccagctcatcaggccgaatttgttgctgtatgtaccgacggggacatggttgttgagaggacatggaatatccctcccactatgattgtagagataccccgactctgccatgaataccagacatcatcgcctgatactcagactgttccgtgcgttcggcgactcgcttggagaggtaaggtagcccgttccttgctgggccctgtctgatcaaggcccaattcacagccccggttatataaagtaaatctgtaaagaatcattgaagaatcatccaggagctgaccaaaaactgcaaattgatcgattgattcgctcatcgaggtcaattctccaaacgcaagcctctccagctctcaatgagtaacactggaagaatcaatcgttacgatacgcagatcgaaccacatatatctcaataataattgggcagagtctccagcatccggcgcggcccaatattacgtgacggacgcgttaccgacttcctctcctccagcatctctccgccgttcctaccttctcccgtcactctttagcatcatcactaaaatcgcggtgagctcacaacttttcttcgcttctcgacagccattgagctcatccgctctgctctatgaccactgcgggccatctcgagtgctcgttgtggtctaggagcaagagctcatctttgtgccc

SEQ ID NO: 920 - DNA, 3095 bp, Emericella nidulans
aatctgtggcttccggttggctacttgtaaccaactgatggtcagatggatctgccgtctgttttgatttgaattttccctgctcattctgattctgtgagaggctgcattcattatcacatctcatacccggcgcctgcgacttcggtcacctctgcggtctggcggttagcggggtgcgtctgagactcgtcagtcagcattcgagtatgcgaactctgactttgctcacctaagagtttgcacgagatgccgaaatcctcctcgagtagagtttgcaaggcttgaaccttggtccttgaagcccgaaagtggctcagtagtgggatcgatagtctggttgttgaagattttctcctccaccttacctatggccgctggccttctccacctttcaggctttcaggcaccctcggctcggattctgtatcgtccggtaccgaagctagtcctagctagtcaaagctagtccaagctagtctcgtcaaggtttggcgcagcgcggttccgtgtaaagtacaaatttgaaatacgaatacgcagtactcgcagccggcacttccgctcagcccaggctcagaggctaagggtgttggcgcttcctcatcatcttcttctcgtcgaccttttcctctttctctccctatcggtgcttctctccaacctcattctcagtcgttcgcccatcaggtttatactccggctccgtggccatctgcctccctcacgacctcctcgttccaggttttcctctcgactgctgcgcccttgcacttcgccttgcatcagtgaaaccccctgcaacgtgacggctcaaagacatcctcgtttggccgctggagaccggagcgtgcgcttcgtttcgtcttcttcgaaccgatctcaatttccccgctcgggttgacgccgtcagcaccctgctcgttgcctaacggcttgttattcaagaccccttttctgccgcttccgcgaccgatttattcgtcgccttccaactcttgtacaatcggggggaaagaaagcagacggagttcgatctggaggaattatagctgagtcttgcccgcaagactcgccgcaaccatgaatcaaacacttcccacgtggaaggaccgcacgcagaaccagtttggaaagcttcagatccaggttccatggcggtccatccaactgctcgtcccgcatcgcatgcggcggaagttaaggtccaaattgcgcagtagagcgtctcctacctcgtcaatagcctctttacagacgtcgttatcgcctgcagacacactacgatcgctccaaagccaccgatggacggtttacgacttccaatatctgcttctgttgatcgtgggcatcttctctttgaccgttatcgagtcgcccgggcctttgggcaaaacggccattttctccatgctcctattctctctcctgatccctatgacccgccagttcttcctcccgtttctgccgattgccggatggcttctgtttttctacgcctgccagtgagttaaaaacaacccgctaccagaccccgtgcagcagttactcacatatgcaggttcatcccaagcgattggcgccctgcgatttgggttcgtgtcttgcctgcactggagaatattctctacggcgcaaacatcagcaacatcctatccgctcaccagaacgttgtgcttgacgtgctggcgtggctaccctacggtatctgccactatggcgctccgtttgtgtgctcgttgatcatgttcatcttcggtccgcccggcactgttccccttttcgcgcgcactttcggctatatcagtatgactgcggttactattcagctgtttttcccttgctctccaccttggtatgagaatcgctatggtctagctccggcagactactccatccaaggtgatcccgcagggcttgcccgcattgacaagcttttcggcatcgacctttacacgtctggtttccatcagtcgcctgttgtgttcggcgcttttccgtcgctgcatgctgccgactcaaccctggccgcacttttcatgagtcatgttttcccccgcatgaagcccgtcttcgtgacctatactctatggatgtggtgggcaacaatgtacctctcacatcactatgcggtcgatttggttgcgggtggtctcctggccgccattgctttctacttcgccaagacccgattccttccccgtgtccagctcgacaagaccttccgttgggactacgactatgtggaattcggcgagtctgccctggagtatgggtatggtgcagctggctatgatggagacttcaatctcgacagcgatgaatggactgttggttcttcatcctccgtctcctcaggctccttgagtcccgttgacgatcattactcatgggaaaccgaggcactgacctccccacatactgatattgagtccggcaggcatactttcagcccttgagtagccacaaaccaaactcgatacctgcatatagcgatctcgctcctcctccactgcatctatttacgagacggcgttagaacatttcacgacattctggctttattgcatcgagcacatttcgacacatatatctttaataccctttcttcggtgtcccagatcatcggttcgaccttaatgtacctcggtccgaatccgcctgggatactgtttctctttccgccgcacttcactgtacattgcttgacattgcgaaaccgggttgggctcgaacgtgggatgggttatcgctcatcgctacacgccgttgctccatcataatgttaatggacacaatggggctacgcatcctggtgtttagtcctggaagaccatccgataacccccgtcggtaacactcgcttgtctcgtgtccacccagacactacttcaattctcacttctatcgtccgctattaccttgacctggtcgaacccatccttattattcgtttcgactatgctatatatttatttttaccattcgtgtcgatcgctcatactcttggcgcttgggactggaagcatttatattggaaaaaatcacggaatggggcgccttttcttcttgcacttcactcgctgtgcatagac

SEQ ID NO: 921 - DNA, 1246 bp, Emericella nidulans
gtctcaccaacaacattcaatggcctattccacactcttggtacatgaggtatagagttcaagctcatgctggcggtttgttaatcgtatctcgctttgccatgcgaatgactgtcgggattaagcaactgcggccgcaatcgaggatctgacggccaaatgatgagcatttctagcataagagttgggcaaaaaaactgcttacctggtgatatatggtttgagaatatgaacggttcgatggcggattattttatgccttgcgggctatgtaggtctgtaaaccgagccctagcctaaggtctgcccagatggggtaatatacagtagtattgtggagcaaaaagaatgattcgatacgctgttatctcattattaaacaatgtacgaaggtaaccccttagttctcagtccttatttttcagctctgaatgatggggttgtagaaccggattcggttgtcggggtcatatctctccttcaacacccttagcctctccaatctccacgcctcatgcccgtacttctcctctactggttcgaatccattcgcgtagttaacatacgcgtgagccttccttccaggctgtccctcattccacatatcgcggacctcgtccgcccactcccacgcctacctttgcaactcgctgtccgtattatccagcgcaataccaatattaatcagcataagatggcggtccgatcgaaaaggatacgccgagtcatctgggtcaaacgcttccacacctgcagtgctgtacccatcgtgctcaatgacaccaccccttgccagggcccgattgctgccaattcgccgtcgaaaactctcgaagattctacgctccgcagtaacattatacacctgaagtcctgccgttgctgagacaatcctgtacccatgctgacagacaacactctctgagtcaaggccctgcgtagctgcgatctccgggtagggcaggtcccctgactcctcaaacagcgcggggatcgcgttaaatggtgccaggagaggcgctgcagcttccgcagagccgtgataggcgaaataccaccggataagggggttctgggcgtcaatagtctcgttcatgaagaaactgccccagttttgcgccatattcaccggcgtagacccaaacccgttcttatgcagggcattcaatgctctaaatagaacctccagctgctcgccagcccagacatagttgtggtagtgcatgtctccgggccgcgtagatat

SEQ ID NO: 922 - DNA, 6528 bp, Emericella nidulans
cctttgggaaattcccttgttatttcggttcaaagcttttgccacacccaaagccttttgtgttcgggaagtggggtataattgtcaagtttctttgcgcccactttggcggggacaaactcattccgacgcggtatgccgagggcaaggaaggacagatcggtggggagaccgaggagtggctgcggtatcgctattacatgcatttctcggagggcagcttgatgccttttctggtgttcaagttggtcactgatagtgagttcttcgagtgtttttttttgtgttggcattggctaaagatcggttctagctatgaaatctccccctggtctcccattcttcctgagacccatccctcgtatagtggccggacaggttgaacaacaattcgtcaacccaaaccttgagcgcacacttgactttcttgaagaccagcttaagtccgcgcctggtggtgggccgtttttctgcggtagcaaggttacggctgccgatatcatgatgagcttccccttggttgcggccaacatgagaatgccgttgaaagagaagtacccgcgcatggcggcctttgtcgaagccattgaaaaagaagacggatacaaacgtgccattgagaagatcaaagaggtagatgggaagttcgaggcttccctttaactcttttaagttttctttccggcttactcgcttaatgtttgttgacgcagctgtatataccaggctaccactgctatatcatatactaccttgtacctaatacaagacactaccgccaatccatcaatactaaattctaacgggctcctttccttccggcgcgaccagatgtccttccctaactagcgaattgccacaatgcctgccctcaatccaatcctccatgttactcaacactgtccccgcaatctccgtcagcgcctccctcgtgaagaaagcctgatgtccgcaaacaagcacattcggaaacgtcatcaaccgcatcaacgtatcatcatggatgatctccgccgaatggtcgttatagaaatacgccccctcctcttcatatacgtccagcgcaagcccacccaactgtccactcttcaatgcctctatcgcagccttggtattgaccagcggaccgcgtgaggtattcaccaacaaagcgccccgcttcatataacccaaattctcagcatcaatgatatgccgcgtccctgccgtaagcggacaatgcaaactaacaacatcgctttccgccagcaaagtcctcaactccacaatttcacccccatactcattcttaaactcttccgccggaaccgccggcttcggatccgccgctagcaacctacacccgaaaccccttacaatccgcgcaagcgccaatccaattctccccacgcccacaatccctactgtcttcccgtggagtgtcatcccaaggaaaccctcgagattgaaattcccctcgcgcacccggttatatgccttatggatgttcctgttaagtgtttgtagcagcgtgatcgtgaattcggcgactgcttcagggctataagagggtacgttcgcgacgaacaggccgagttcttcggctaccacgaggtcgacgttattaaagcccgcacagcggaggaggattgcgcgtgtgccgccttcgtgtaaggtgcggagaacggggccatcgagagtgtcgttcacgaaggcacagactgccgcgtgggatgcggcgaggggtgcggtttcgaggctgagcgggaaggcatggtaggctatgcttacggtatttgatagcgttggatgggcttttagggtggtgtcaaggtagcttctgtcgtaggattttgtactgaagacggcgagctgaaagggaggggatgacattttttgaaattatctaacagaaggtggctaaccaatagagctgatgtcgatagttctttgcgtaatatggggtgacgaagtctgatattgaggggttgaggatgttgaggggtaaaatatggggtgatgtctgccaaggtgttccagattcccatatgccgtgggtatatggttcgattagtatagcacagccctctctgactttcgaggtggtgcaaatgcggtctgtaaactcgactcgaaagttagtaaggtctagttgaaggtcactttgataatagtcttagggttccctatcctgcctattcgcattttgagtacaccataccagcaacatgacagcttgcaagtcgtgaatgaaatatattcccgccttttagtgcaagggctcagatgcagaaccagcggacgcattgtcctgaattacacaatacagcccagctgtgaataaaacacgcccctgacgctggtaggacgacatagctgccgaagcaatgtctgttcatatttgcacacgaaatcaagcgaccaggttcttgcgggttagatgaagatcacaatgattcgaacacttcctcttgcgggaagagtacacactgcgtctaccaccgaaggaaacacaagcaagagcaatctaaaccatgctctgtagatcatcgagctacttgaggggctatccaatcggcgtctcatccgaaccagatggtcacgatgggttggtggctgccgaggctaccgaggctagctgagttatgttatcgccactgctgttttgcccctacggcgaagctagctccctcggagtgccccggtggctaccgcaagtaggcagcaaacaaatccccaatgatcgccacagtgcatacgaatacagcgatagtatgtgtgtcgtggccacagacgagtacgagaatgctgtgctcccccagctgtgagggtctgggaccctgaggtgatgaggcttcgcgtgagtgttgaaaatccgtctgatactcttatgcacgtagtatacggtatactccgatcaaacatcaaggtgcatgccaggccaggtctcaggtttataagtggccaaacggcgcatcgatattagcccctggcatgagccgcataatcagacgtagaagatcatgtacccggaatacaagcttgtttgaccgcggagatacccccaggccaggatttggaatgagacattgtttgtggaggatccctggcgtacgtataccgtacagctatcaaatcatcaaatgtttcagactcgcaatctgtgaggcggtccatgaacgacttgtggagtggtgtgtcctaagttcgagacctgttcctcgaatctcaacatacggaacacgaatccgaaacccggcatgggcgcttccacagccactgcagctgtaaaaacgccaccgacataaagcgcctagtaagcagacgcatcaccgaggattgtcagtagtaacgtcccaagcaggttctgaacctgagctaacactaggtggtgccgtatggcgttcgacggctcgtgaggcgaagtggatgtagttgcgttcgccttgtttagcccatctgatttccgggaggcgtaaggcatctgccggcacttagaaagctggtatggagaagccaggggttctctggggcttggcggcggctcggtgaacgaggctgccaaacccgctacgataggcacggctgcatctgcaaaacatcgtcgggcatcaggaggtggcaactactcacgcttccgaaataacggtcgagggtccctttggcccatgtccattgctgttgggccgagtggccgaggttcctatcgagatcgaggccgtgataacacctagtttaactagtctgataagatcgctcggtgaaagctcggtggcaccgggccactcgggagcgttgagctgataggtcgctagaatattcgaccgggcttccataccccattgttctccgttgctaggctgtcgctaggctcattcgggagaacccagaattcttgttactaatcagccacgaaaaagcttcggcaattatccgtgcatcggcaatggtcagattgccggcgaatcagcgagctgcgataaggcgttcaacgaccaatgcgaaggcaagatgaatcgaatccgtcagcttggaaacggccgtgctctggactgattgggtgggccatttgggaaggcccacggatgcttgagagtaacctcagacggctggcagcctcctcggtagtattgaagattcagtggtgcaccagactcaaactacccagacagactatccagaggaagccggtccccagagtctagcgagtctagcaagggaggtgccgttgctgaccacccgcggaggtcgagcgtctctgcaggtctccggattattgctggtgaacggacccttgtgatgcacctagtgcacctgcaccctgcaaagatgttgtcccgaggatgcttgatgaacggctgaacgcttccgtcgtggagggaagccagaacgggcgggtgtgggccgggaacggactggtcgcgtgtcgagcaactgggtggagcggtcaactgcaaccgcactgccaatgaggaccggccggattcttctgacgctggtgcttggcctagtagcagcaccaaatccaaccgaaccaaccgccaaccgctttcggtgcgagcaatggatacggggagaaatatggagattggagattgcctgaaagggaaagtcatcgtgctgtttgcctcgacagtggtacagtggtatcggcgtactactacctttgaagatcccgatcaagatactcagctgctcagtgcttgccactggaatgccagccatgtgtgccatgccagccgtctcagacatgtccagcctgatgtccaggtttcccgggtcgcaagtcgcgagggggacaactcaaacgcgttgaggatccatggtctgtcccagggagtgaccgggtgagcgaccgggaggatggtcgaggatggtcgaaaaggcggtctggagtggcagggatgttgccaagttggatcgtgagtgatgctgtcatgatgagtcggacacggagcaaaggatcaggaagggaatgaggatggctatccctgcatgaacggtcctgatcgtgtaactggtgttacagacagtcagacagcatccatgacggtctaggagcgagatttccgtcctggaaacaggtcaagtgctcaatactgagtgaggctggactggctggtctgttagactggttggaccggttcggtactggtttgattaccggtaagggaaatgagctgccgagcacgatcaccgtacggtaaatattacggagtatactacggagtactcttcagtactgtgaggagacattctggccgctggcgcctcctgttcgtgcagccaaccagctcatgattttaccggcagaacaccgctgtttgctcaataatgtccatcaatacgcataatacggaggtcgccaggattcatcttcaggacataaccttcattaaccttcattattgtgagacgtctactgctgggatacaaattccagcgatctcaagtagagtagtggttaatatccgaaattccccctgctggctgctgcagtccaaagagcggtccgggtccacctcgggcctttcttattattagtcgagtctcattcgtaacagtatactcagagccatccatcggccattgcccggccaccaccagcagccattcccatctccatctctttccgtctccgttcgagcgactcccacttgggcgattatcgtcggctccatctcctagcgcacatcgtatctccatcccatgctccaggctccaccggcgcatggcaaactcgcccttttattaatgtgcatggattcctcttacattcgtctgcatgccagtgactgagatctgctcaagtctccctcgcatcacattgactacattactacattactacatttatcacttatcacatctgccgtgcccctatcgtactctatcgtcgtcctccaccctgctcctattgctccagtcagtcccacgcggctcctaactcaaacgaagcgcactctctgggtctcttggggctcgtttctggctcatttctggctcctttggcttttatcgtccttggatcgtccttggatctctcaactcattgcctccgtcactggaactttattgcgttgcttgcctctggtgttgccactgcgatgtgtttatgcctacatcacctacaccacatcgacctctagctctgttcgccgcctccgtctccccttaatagttaatcttcccacactttgtctccatcgcatccttcctccaactgggtcgtgttatactgtacttatttgtacttattatccggtctctcctctcatccgcattctcgcaaccacatcactctccgttcgccaatcaatctccgctccagaccgatatggcaacccacgttatgaccgccaccactactgctcctatcaaccaaatctccgtctaccagcatccgtctcccgtgcactcgggcgccagcactcccgccaacaactcgcccacctcgcctcgtctacagtacctccctctccagacccgccagctgcgtcctcccaaggcgccactgtatgttcccgctgctctgcggccgaccgagcg

SEQ ID NO: 923 - DNA, 4932 bp, Emericella nidulans
tcataccagacaataaaacatgaagccatagtcagagagaagagggcggagaacagatcggaggagaatagacacaactcgtgtagacataatgggctgggttactaatacttcatcttcccgacaagtccaaatgtgtacgccgcttcggcttcacctttcatctgaatcatgtaaacacgagaacttccaatggtgacaccacccttttcagtaacagggggcccgtcttcgtcctcctcacgtacagaaacggcaatacctgttcttgcgacgcgctcgaagcagctctcatccaagcaaacgtcaaggaggacttcgccgcgtgttttcccgcggatgatgatgcgtttcttgttgcgctgctccatgacccgttgcggcgaggcagcgccggaggatggcgggctgatcgcgtctgtgcttgcttctgggttctcatcaggcgtagttgttgcggtgtctgcttggtggtgttcagccgatgagcgtcgtgagggtgcgggcatgatcgtcagccgggcggcacccatatcgcgccatttggactgggtttcgcgggcgtagaggcggatcttcgcgtttgagaggccaattccgtcgacacccttgatggctgctgcgatgcggccgatgccaccgctgttgaatccaccggaggcggcggaactagaatataagcttccctcggcgtccttcttgcgtgaactgacggaggaccgggagatgctgaacatcttgcttcccgcaccgaagcgttttagagcggagaaagcgctgctcatggtgcctacgctactttcagagttgtctgcgagggagcgcggagaggcagaggcacggtagctctttctgcggcggggccagccaaagaagccggagctcttagtcgcacgctctaatggagctggaatgtcgtccaacggtcctcgagcgttttgtagagcgatgtatgtcgggttgttagtgcgggcttggttgatcaggccatatagaacctcacattcctccgcgttcctggagcggaacatgatattattgctccagctgactctggaccgcggggttggaggagagcgaatgctaatatcgatggctgtaccacggcgtatagggaccagcggcgtcaattcgagagcaataatcgggcgaacattattcggtgcgttatcgccatttgcaagcgggtcatccttcatttcataggcttcaacaagcccagggctgataatgaccttgcattcatctgggaagatgctttcccaagagcccttatccgaccaagcaaaaacagtggcgaaagcagaagacgacttgcttggctgggatgggacggatcgataaccggcctgacttgtcgaattcgtcaacgatagagtactcaggtccgattcttgctcctcaagccgggagacccctcgagaggtccttgaccgtactctagaggggatttcgtcctctgagtcctcatctgaactgtccgtaacgctatccgaatcagaatacatgtcatagcggcgcacggtagaggtatcagagtcagagtaagaatcggacgcggtggaaggttcatattcgtgtttcagaggtgaagaaccccgccgtctcattcgtccagcagttggactcagaatcggggtgcctggcaggctagagccggtggaactgggcgagcgcgaatggggagtaggcggtggaggcccatctccgtttgacgcgtcagattcggagccggaacaagaatgcctcttgctctttgttggagtttcgggaagaaggttgtagtatatatcatactcttcttctggctcgggatctggtatgtatgaagtactactaccttggcggagcttgggaatagaaggcagatccgctgaaggcactgaggaaactcgcggactctccgtcgattccgctctagtgggggtctttggggtggcttgtttctgatggtgcgatggaggttgctccgcgcgtttgatttcttcccgattccgtgacggagtcgaaggagacgcacccgtaggcgagagagggctctgggggccgagttcaccatatttagatattctctttgcgccggagcgcttgagaccttgaggggacttatcatcactagtaacaagctttcgcgggtccctggaatgaagaatcgattgggtatttgcgaaaggcttagatgactctttctctgtgagatcacagtctgattggcgtgtaatatcagtatgtgatgagacctgagattcggtagctgcgaacgaatcaatggcgctgggatctgaccatgattccttagcagtccaggagcgtcgcgatgcatgggaggacgttggtttctctccaatgggaatggcaacgttcgttgggcttggaggagttcgctgagccaaagagacttcatttggcgaagacaccgtttgcgcgcgttgtcgttgccttgcgcgttcaataaagctctgagaccgggagatagcaggtggaataggtgttctaccaagcatttgaatccattccatgcctacatcttcctcatcgatttcgagcgataagagttcttgaaagcgccgttcccgtccaggcgggctgcgaatcataaccacaatctctccctttttatctccattgcgcgcagaaacgcatccgatatctatgggagggaagagcaaccaacggtctgcatggtcaacttcgcatataagcaaatctccaccaggaccatgctcagcagcgttatcacgaaacagaatctcagaacgacagtcgataacctggccacttgaatggtagagtgacaggttgaagaaatcgcgggcacgaactctgcgagtcttgtcgatggtgacacccgtcaacgctcccaaggtctcaggatcacgagcgcgacttgggtcaatagcggcagcgactcgtcctcaagcctagccctttcttctcgcgcacgtcgacgagcctctactacaaggttttgatagttcgtagatatctcttcggctttgggggacggctctagcatgttgatgcctttgaaagtctttgcgaggtatttcaagcgtaccagcggccgcttcagcaaataggcaacatcaaccttctgtccgtctccatccacaatgtcaccattctcatctctagacatgccgtcatcgagactcttagtatcggcgtcctttacctcttccccttcttctagcggggctagattaaccaccacatctttgaaccctaatctccaagccttgaggtattcgcggtaaaccttctgtgctccctgtgcccattgaagtaaggcatctgcagcatcaagtggaatacgcttgtgtaacagtttcagtcgttcaatggcaacacccatgttcacaattggcttggtgaaagtgagctcatcctgagggttcgcagaagggcgaaagaggccagcagcaatggccgagtcagagcgagaaagaacacatgtcagaagaaccgggatcactccgcccacaagggtcttgagctcgcgcatatactttgcttcatccagggatagttctttcagaatatcggcgactgtgggttttctatctttgctgctccggagactcctcgcagaccggagactcctgcttcttgtggttgatgttgaaagaacagacatcaagtcgtcatgcgttgtaagtttcttcatttgcgaggaaacgatagctagcgaatctggatccaccttgtctctttcctcacttgcgaaagtagtttgagaaggagtcctttttttctcggtaccttcggacgtttttgctgacccgtcccaggttccctgtcgtttttgaaccagcgattcagaggtgtccttgcttggaatttcagactcaaatggttgggttccagcaccagatgctctttctttatcatcgagcttgcggctaccatctttgctggtgccagagggtgacctgccctgcttcttttcgctagttttcctctcgctagatttccttgtccggagagacggcgaaggatctctctgcaaccccttggtagtatgtttatcatctctcgaccctggtcgctcgccgctagacgtagtctctccactctttactcgccgcttggaagttttctgcgggagatcgctgcctcccgaaggttcaggactagacaatcgagtttggtctccttctgttggctcgtccacaatttcaatgtgtttcttccttctagtcttcagcggcgcgggtatttcgacatccgaattcttatcgtccaagaatgggtcaggcgtgttggacagccatgcttcaattttggcacctcgattcggagccggatgcttgggtggctccggccttggctctggtttactaaacatcttcctcgattcgtctacaatctgtccaagaatgccacccttgggtggctttgctggagcatgtttcgaagtatgaggtgcgccgcgtgcacgtcgcctcgataattcagaaaagtctgcctcactggcagcccattcagagtcgtagtcgagggttgattcctttttttttggactttgcgcgggttctgaaattgtgctggaccgcttcttatcagctgttgaagggcgtgatgacggcttggacgaattattatgtgacgcatgctccttctccagcttctcgataatggaatcaatatcgccggacgcatgcgatttccgtctctctcgaagtgcccgtggcgaaaccgcaccgtctttaatgtcgtctcgtcgctttcgtggagacaaccgcggagacagtagaggcggctctttatcgtctccttttgctgatcgcgctggacgtaatggttcgtttgtggtgtactccgggactatacgcccacgtctcggtggtggaggtttggctttgggagcctgcgttgacgatcgattcagcttccagtgttcatcactaaccaaccgtgttcgcgaggtac

SEQ ID NO: 924 - DNA, 3259 bp, Emericella nidulans
caccgtacttaggacattcgtccttgatggccttctagttcgtgtacgcgaaggtagtccgggagatcacgacgccgccaaagactccctgggcatctgttagccgagcacctctggcatcgctatcgatgccttacctgatcataaccatacagcgccatgttagcaccgcatccgacaaccagaatgtcaaccatcttccgtgaagggcctttgaaggcttgaaagtctgaagaacatgggttgtctcttgaacaaccaagaggtaaaacgcagtgactcggccgtagggtactaggacatcctggtacggcatattcaagatttatatataaaagatgtactccactacagcctcaaagtggctcagtagatgcggtctccggattgagggacttgccatgcgttcaatttttaccttacggggaatgaaaaggtggcatgcttctggtgccttcaagttacgatggtacgtagagtacccacatctacctattttcccattcaaggtaaacacagcatgagctcgagacggacagaaagtaagatcgtccagccaccgaaacgagtagtgcagtttccggtcggtcattggacgatcaatggattctctgtgatgatacctgaatcatgaagtggcacggccctccaatgattcgcggaggatgacacaaaacggattttaggattttggtcttctccgtcaaataggatcctgatattgcgtactcgaaatgagcactggaaacggctaagtcttcagtcacaggatacactcggataaagggtaatgtagtatcgaaaggcagaaggcagagatccctccaccacaactctcttcaaagaaactttccataacaagcacagacgtgctgatttgtgataatggacggctccgatctcccctcacaaatgaaagcgctaggcaggttgactcggacagactcgatgctgagtgattaaagacgttgacctgagacagaatattccgcgcctaggaatccccgcgtagttgacaagcgtctgcctgccataagggaacacgagctgctggtacttttctagcttagtcggaataaaatcgaatttgaactgacgtccctgtagataaaggtgaaagcgcggcgtctgcgggactgacttgcatatccacgagggggagttcggtgcgcaggtaacagccaaagtactactttccacttcccgagtaacttctgatgttccaggacacgaaactgtgggtgtggctgcagcaatcggttcgaaagtggaagggttctccgtaggagatcgagtggtggcagacaactcggagctatgcgagagtgcttctactgtcgccgaggagctgagcttttctgcgagaactttatcgcgcacggggttatgggcgaaggggggttcgccgaatatgccgcctacccagcaaggagagtgtttcccataaaggtcatctcggacgtggacgcaaccttgatcgaacctgcagtctgcgccccgaagccatccagcaattgcgctaatagtcatctctaaagaggctattaatgccatatgctttgatagcggagacgatgatgcgcctgagaaatgagacaaacttcttgaggccagccatataagcgtcctccccatctcttcgagtcactgctgacatcttcgactgccgggtggtccagataaaccatctcagcgacgggcgtggatgagattcgagtaggcgacatccgcatatggggtaagggcctcgtcgattgccatgggcttcttgcggctccttgatctggcctgaggtgttgctttcatttcatgcttctgcatcttcaacatcgaacagctaaagactgcagaagcaatcaaagggggatcacggcctagactgctcaccgatgccgccgagaagcctcaggttccgcggcgtatccatcccgattaatgacgcgccacaggtttacgccgcagctggtatgatgattcagtaacggctcgtgctgccctccacagattccgtggtaaatgccctctgagtctcatgcccataatctctgaactcattttcctgaataaattttgacgccttcgcctcagcagagaagaaggatggtggctttattcgcaacctcaaactcgacgaggggctcggaagctccgatctagtcgcgggactaaaggtgctcagcattagtggtggcgagagcttcaagggggggctttcctgttgggaagtggaactcgaccagtaggtgatgccatagactctgctcaactcttgtgtgaactaataaatcaagtaaattgacggtaaagagaaggaagagagttggactgaaggaagcttgaaagacagcaagatctcaatcttgagaagagctccgttagcaccacctcttaactggaccctccacagcgggtactcgttcagaagaaaaatttcgccttctctaccaaagcagaagttcgcaacgcccccgtctaccaatatccggcctagaagctcccccaggggatcaacattgccgccgtcaccgcaaccgctatatacattaccgtctagatcgcacttgatcccctctggtttcccgctatcggccattgctaatagacgccggatggctaggaggggctaggcgaggcgagttatatggtcggacgccgctctgattggttgatagcgctgtccagggatgctgtgccaaaggcggtaccgtacggatatacatcgtcgacacgcgtgcataatccggggctgtataacaatgaataccaactgtatcgggtacgcataccacttgcttatcccagctggagcatcttgcattgggcctgcctaagccaacttgcattgggcagatgctgcctggtttaggggccaaagctttaacccggttccgttgctggggcggccaccggttcccctactaatccaatggtggggatttggacacgatctcccatggtcggacgatactttatttatgggtcaggcgcgggcttcaaattcccttaaacggtgttttttttgggtaggtgtaacataccctggcctaaaaaatcttgccttcggacgggtgttgaaggccccttttcttggatgggggggtccgtggcaccttcccaccggggtgagaccttgctggctttttttggggcgggcctaagtgttcggcccctcgttttggccgtaatattctttgtgggggttttcctatttgtgtcgtgctctttatcctgtctatattctcttgtcattttgcctttt

SEQ ID NO: 925 - DNA, 7044 bp, Emericella nidulans
cggatattaaatcgcgacgtgaaaaagtctcgggctcttttgtgcgccggttgtttcttagatgccacccaaaaatcccaaaaaaacttggtgacggtaatattcgccatccttccgtcggtccggcatggtcaccccattctggcttctttgttcccaaggtagtaaagcaatacgccaagaaaccagccaatttagaccggccaaccctatcggtggtgtggcccacaagcgaaggtgtcagggcaagggtacaggggaatattgtcctcgatgctgatcgagtcaaaagtgaatcggcgagaaatattgggcgtttcgtcacctggattgggaaagaggtcgaaaccggccagtctgaagtaattgtacgcttaccggaatacgaaaatgcccttgttggatctgcatccttgccttccatcaaggttagcattcgcaacggccatgtgaatcaccttgacttcgaagccgatttgattgctggcgacattgagggcttgcgctccgtcgccgtcgactggctggaagggagactggaccgtctattacttcatggaagtgtcattctccatatcaaatcaggcctgctgagcctgggagagcagactctagatgacaccgtagtgtttgaaggtaggttcagtcgagatgaaaccctgtacttgctgatacaattgccaggagatgacttcccgtctttaccggctgttgatatcacgaatctcaacgtacacgacgtagactcgcccgatgaccacggtgcaatggcagttgatgtttcggtctctgcttcactgggttctccgttcgccctgcgcattccaccacttggcttcaaggccatggttgccaactgctcgccacgtgatccttatatctccgtggcagacgtcgtaacacaggagattgcaatcatccctgatcgaagcatcgaggtcgaggtttttggtatcatccgaggcctttccgatgagcttacagcgaactgtcccggtgaaaagaggtcgcctctcgatactcttctcacgagctacatccatggttctcaaaccattatttacgttcgcggagcggacgtgccatccttgggcgctccaagatggatgaccgacatccttaaaacggtgacggtaccgctgtcatttacaggacacgctctggataaccttgtcaagaatttcaccatgaccaatgttcacttcacgctcccaaaccctatggcagagccggatactcctgaatctcgacctacagtttctgctctggtgaaagtgctgattagcgtaccggaacaggtgaaattcgatctaaatattccgcggatccgagctaaagccgatgtcttctatcacgcgaagaaattaggattcctcgatttgaaggaatggcagcctgcaaactcgacactcattgggaaccccgacaatacgacggcgttgcaagtggaatttcccatggataaagcaccgctcgaagtgactgatgaggatgttttgaccgacgtactttcaagcttgatttttgaagggaaacccgtgggacttaccgttgccgcaaatgtggatgcagaaatatctacggtccttgggaagtttgccgtccgcggtataccagctgacggcaaattgactgtaaagcgtaggttacatcatgtattacgtgctctttctctaaccctcatatagcgcctttcagcggttcacatggcctcgcaccacaagtcgaatctctcgaactggggtctacgacggagacctcgcttcttgtggaaactatactgaatttcacgaatccgactcagtactcagcattggtgccattgctcgacctactcttggtctacaatgacaccaaggttggccatctgacggcgagagatgttactatagaaccaggtacaaataccggtgttaatgtgaatatgcaatggagtcctctcgatctcggcggaccgtcggctgttcttgctggtcaagacctgatttcgcggtttgtctcaggcaagctcatcttgactcaggcagccactaagcaacctccactgactcatgttccaggcttgaatacttcagtaacgataaagacgcacgaaggaactatcccagctttaccgaggcttggacaggctctgtctagggtaggcttcgaagtacaaatccctaacttatctcatagtggaggtcccgacaaggatccagaccaacctggccaggacaacggccaccagaacttcatacaggacgctacggtattaactaccttcctggatactgtttctcacgttgtccatgctatttgatgtaaaacgtatatatgttggacatcgtcttttgtccgcagtatagattttcttttcccaatcgcatatcggccatctaatagaataaaaccagataactaacttccgagtgctcccagctgcacctctggtcatcaacagccgagttcgcgctttcctcgcctctaaaccatacaatcctggaagtcacttcaatagaagcacaggctttctatgaacatgaccacgaagtcggcgccatcaactattatactcctttctcaatccttcccggcctctcccattcgccgcggcttcctgttgaccttaatctgggtggaatcggctacgatgctgttaagagggctgttggtggtacacttgacttggatactatggcgaaagttggcgttcggattgagaattatattaatacagtgaattactgtgggaaagggattaaggcgaaggttaagctgtgatttcttgctttaacgaggaagacaaagatttgaaatccccggcattcttgactttggtgtttcgttgcgcgggcattggtattacctataggcagaatggaaatttgggttgcccccggcatacccagacacgagtagagcgtagacctgattaagtattcattatcgccgaaaatctactatgggtttggcactttatttcgagaatgatctattcatcaaaaagaagcacagattgctgttcggtgaataaaatagcgaaaggaaaaaaaagccaccaaatagcagaagccgaaggaaagtcaaatggttccagtccaatgcctttagaaaaatttgaatcatcatagaaacaaacacgcgaatgagcccagttatttccattagccctagtttctccgtgacgccgttccccaactccccgaatgtaaggtcgtgcaagtttgcggtgtggtggttgtactgaagcataggcggatatggtacatgctttgtggaaagtgagagaggacgggggttggcataagacgaggtcgatagtgttagtgctggtgctgttgctgatgctgttgtgcagacatagattcatcgtacttcgctcgtttcggatcattcaatccaggtgcgggagtacatccgttcccaccgggcaacgtttcgttggtaacgtcgttcagaggtggtcgtttcccgttcatatttggtgccattcggttggcggcggcggtgttgttttgtgcagcagctttagggtcaacattcggccgtgttagaggacggtaagaggataccgatggacctctgttcatgggaccgccgaccacactgccgctgggggcgccgatctttcgatgcatttctgcggagggattgatgaagtcgcgtgtttggttggataatggtgaggcgctaccggctagcattggttttgagatgggtatgctcttggtgtggtcgacgccggccgtcttgcggatagaagggctctccgcgtgcggattgaaggctggggctacggtggcggcgctatgtggattttcacgtagcatgtcggctccgcgggcggagagaaatcccacgactggaggcccttgaccatttatgcctggggtagccgggacggccgtattttgcggtgctgggtttggttgttttgcaccatgttcctgtttgatgggtacctgtgcgccagcatcagagcctgtggccatgccattactagcgcgttggcccagtggtattgatcttccattttgtagtcctccatttgaaccggggagcggaacggattgtctttgatttgtatattgattttgggcgggtggagggaacggtcggttgtttagggcctggttaggaatctgcctgcccgctggggcaaggttcatgggtctttctggtttagacggagtgacaacatgttgattgccacttgcttgtgctccaagagcatgttttgggagatttagatgagcattaggtctcccaacaggggttggcggttggtgccttttttgagtgtcttctgctactatcccatccgggtactcaccctcaccgacattgaaatcagcctcatcaaaaacatcacctgatccgatcagcgacctagggtaaaatgagctgtacattgcatcaacttactaccgaattccgcgtccatatcagcggcactattggtcgaagtgttccttcccgctattgacggattggggggcagatcgtcgtcttccagagacggcttcactcgcattggttctttttttatgggagcaaagtcgggatggcgatgcagatcgcctacatccaattttgactgcgggtatgtcagtgtcatgaactaaggccaaggaacgaggccacttactggtaccgtcttcagtttcgaaaccttggaaatgtagtccttgtcgtatatacagttgcccaaaacattgccgaagttccgcagagcgcgtttcagagcgtcagttgttgcctctttcttagccttctcgaaagctgcggccttgcccttgcaattctcaatatgtccgtatccaagatcctgatacccccagcccatcaacgtcgtgtcgaatatcgtagttcggctagggattccgacatacctcgtggtaagctccatctttcaaagtcactctcactattaccgataggcccaggctcacttttccagtattcggagactcgtcaacctaagtcagtatattcattagcaacgcatctctctgcgagtagtcataatatgcgagcttcatgatatatggaaccacacttacgaagtcaatctggatgttctgaattgaactcgaccacccattgaatccaaatacctcgttggcaagattaatgcatttatcggcagcaaggtagtgtaccttaaggccggccgccccaggtcgcgaagagatgtactctggtcctaatttcttctcgaggcgtgcttgaagggcagcagcttcctcgggtgtatattgattcaatcgtgatggggcttcctcaaacgggtttctggcgatgactcctgttgcatctggcattgtgatgcttgccgggccgcctcgatgttggtcgccaacgctgagacgcggtacgcgttagtttacgtagcctgtcggagtttggtcgagaagtgatggtggactcacgctggcatgattaagtttatgaatagattactctatgagttactctatgagagctatcataaggagttgatgttctaactcatgtggggtcgctcaggcttaggctgaagcccatcgtggaaacgcgtcaggatgccctgctatgccgcgaagtcacgtgaagagtcacccatgtcttccctgaaatgcgtacatcttacgagtagaatttctgtgtttgttatctcgctctcgacagtagtcatgtccaatcattatagctattcatcttaaaatatcttgcattaatcataatattgtttcagctagatcagtttctcggttctaattctcgagctgagccttgccttattcgacgacaaggctcgcactaggtacgagtccaagatccttgagtgactcgccaaagaactcagaattgaacaccttccttggaaagttctggcgaaagctgttgacgtcaattccgtcctctgtcttgagagccgataccacttcaaggagtgttgtctctactggcaatgttttcataacattccccttcggtgtctggaaccggaggcgggtttctgtgtaagcagaagctggtttagaagcgacaggtccggatgtcgtagctgcaggcgtagcggccggttgaacagggggtgcaagcccagcacgttcagccttttcacgttcagctctcagtcgacgctccgccttatccgcttcgattctggccttgacctggcgtttggcttcaatgtcatctaatttctcctgcttcttccttgccgcttcctttaatctctgctttctctcgagttcctctttagcatcctgagactctttagtggcctttctccggatttcctggagcaatgacaactattagcaaaggtcgataatcacaaccgtagcctccgcgtacctcatttcgcttcttgtcaattttgtcttgctctgattgtacggcgcgcttagctgccagcttctccctgagttcctgtagcctgactttcttttcctcctccgtcagcggggcaatctcttccgttgactcggagaaatcaacatgctgggttttggaagcatggaactcggcttgtgcatggcttcggaacttcctcccacattcattgcaggtcaagctccgtgcttcctccccgggtttgagtgcaggcgccccttcttcatcttcctcatcagctcccgcgtttgccgacttaatctcctcgagtgacttgtcttggttttcttcgagccattcgagggctccttgcactgcatttatggagaatgaaaattagtatgtagctttgggacgagggtcaagaggaaacgcacgtccgctacttttcttcactgctagttcagcgcgctctctatcaaagcccatttcaatgagctgatcaatatctgatgtagtcatctgaaatgtggaaattgtctgtttcgaatgtgatttttctgaagtgattgctggttgcggtggtgttttggtgagtatgagcagatgcgcagtgttgtgttggtgagaagaccgtggctcgttcgtaggagaaacgtatcggtgcggcggaagcccaactgcgggatgacccgctcgatctatggcccaggccatgacccatctatttacgagtcc

SEQ ID NO: 926 - DNA, 5246 bp, Emericella nidulans
agattcatatattcatttctatctatgttgcgtagacttagccgaattactccaaacagacaatctagtgataaagcgcagaacgaaatcgctaaattgattcaatcttgggccgcacctgtagatggctaaggtcatgtgctccctggaaagtctcggtgatctcgtcaagacaaccagcagccgccgcgaagaaacccaggaaactcttgctgggcgtgatgacgcggctcaggtactccgggtggaactggacaccaacataccaccggtggtccttaagctcaatgacctccatccgcttgccggtctcgtccttgccaataaacgacaggccagccgcctcgagtttctccacgagatcggggttgacctcgtagcggtggcggtggcgctcccagatctccttcttgttgccgtagagcttgcggaattttgaccactcggtgccctcctggaagatggtagggcgctttccaagacgcatcgtgccacccatcttggtcttgtcaatttccggcatgtagacgatggccggctgctcacattcctcgttgaactcggcactgtcggccttggtcataccgcagacgttgcgggcgtactcaatgacggcgacctgcagacccaagcagattccgaggaaagggacgttctttgtacgcgcccattcggcacacttgaccatgccttcagtaccgcgctggccaaaaccaccctaattaatgttagttatcatcgatgctgatcaaccatgtgtgacttaccggaacaagaatgccgtccgcggtggaaacggcgtgccaagctttgtaatactcggcaggatttatagactggtggtcctcttccagatgagacgactccacccagatgaggttaagtttcttctggcagtgcatagaggcgtgttccaacgcttttgttacactcagatatgagtcatgcagacttgtgtacttgccaacaagcacgatcgagaccgtgtcaaagacatggtcttggctcatggccaaaccgtgccatttgtgccacatggacttgccgagctccacgtacttgggctcaatgtgcaagttccgaatttcaagaagatccttgatggtgttgaggaacccttggttttccagaaggataggcacctggtaagtagagggcacgttgtggacaccgacaacttgatcacgctccacctgacaggtaccggcgatcttgcggatggtcatctcctcaaggggagtctcgcaacggcaggcgatcaggtctggcctgagaccaccacttcgcacatcgctaatcgctcgttgtgtcggcttcgtcttctgctctgagccaattaaaggcacgtagctgacgtggatctgaaggaagttggcctttccaacgcggcgttgaagttggctcattgcctcaacgaagggtgcgctctcgatatctccgactgtgcgatattagtggcgtccctcatgattggtctcagatcacttcccagttcctcccaactgcacgcaagaaggccttagttagtcaacgcttagtcatggcttcgtcgtagcttacctcgactatattcgtcagcaagcgatactcgcaaattgtgggaaatacatactgatgcagacgtcgggctctcgtcctgactcatcaataggaacccgagcaactcgttcaacccactgccattgttaacctcgcccgatataccgatgaacggaaactgacattttgaatctcatttgtaagatgcggcacgatttgcactagccgggtcagctccgtcagccacaaacacgccgaaccacgtacccgtctttcccaagtagtcaccccggcgctccttctcaatcacatgttggtaaatcttgccggtagtgatattgttgtcccgcccgagtgtgacaccaaggtaccgctcgtagttccccaagtccaagtcggcttcacctccatcgtccaagacgaagcattctccgtgcctttgatcgtcagttacgcagtcggtatgggatgacggggacgtactccaagggctaaagaacaatcattcatgatcagcagcgcctcaagtcacacgcgagatgggtacgtacgttcataagcccagcatcgggattcaagtagggatcaatcttgatgctcgagacggacaaaccagcagttttcagcagcagcccggtactgcttgcgataataccctttccgacaccggatataacgccaccggaaaccagaacatacttcatcttggcgaatggaagactcaatggcggcctgcctggcgaataccagggaggtagcaagagataaaaaaaaaatcgatacgcggggcgtgataaccacggatttgctcaccgcctgtaaacagcggcagaacttttttgttttcaagtggggagctgccgctctggtaatggtgcctgaggctctcatcagatcacttcacctcaaattcagtatttggccctgttagtttatcagtgaaatttcttagaagaaaacagtcttatgcatttggactccagcccaggcattcattataaaccataatggacaatggcatgtcttgaaactcttggatggtcggccgcgccgctaatagatatttgcaactgctctagcaaatatggtccgcattgattcccggctacatagagcttcaagcttactgacgagggacatagcagtacaatgatttatagaaatacaatgatttgtgatcattataagcgacccaatatattgatgcgctgactccgcaactcatcaaaaataacattgcgctggcggtaaactggaaagcataatctatcaacagagcgcgaaggaaacttagcctaagccttcatcagctacagtgactaaatggctgataagatccttgcaaaaaactgtcagagtcatgctttcaatttgaagaacaactgcttatcaataaggcaggaacatgactcactgctggcaattcactagactcgtgacctaggaaccatcgctcctccctgatgaggcattaaggggagggaccgtgtccaataaagcaattatagaatgagctcaaatcatccctagatacggataaaccttaaattctctgctgtttaatctgttcttgacctccctccgccgattctaattctgaagttgcccaaccaccatttacaatgtcgagagcattttcgaccactgcccgacggctgaaggaactcaaatgacaaccgtcgatgccacctgggttgagcgtaccacagaaaaagcagtagatgaggctcctggactcgccggcaaagttgacagcggaaaggtccagtaagtccatcctctacttctcataatattcaaagcccatctacaaaaatagcggagaccctcatccaacgcctaaaaccggggacccatttcctgcgtcgatctctcttggcataaatgacattgagggacagaaccgtgttgtactcgcatgtttatcccgacggtattgtcaagttttcgaagacatatggcgaggtcaaagtcgacgccgacccgaacgctccgaaggaggacagtgcttcgaagtaattgtcaaatgagctgttttattctcacgtcaatccggaacaagcacatgtttgccgggcgggaaggaacagattaatgtggaaagggacggacaattgtcattattggatggccgacatggcctatctatatctagcttacgatggactaggcgagctcgacccaggggcaggtagcatcggatagcagtatgccccgccaatcaatgtgtcgcacgggacgttctgtggactatcgggaggtggccagccaggtacgggcgctgaagtaggtcatgtgacaatatctgcaacggaatcattaaatcgaaggtctaaatatcctatctgcagtctgcatagagatttatagctattatgagaacagcttctgtctgtatgaaatagtagcaatcgttaatatggcttattgttctctagatattggacagcacacttcgttgacagcaatgatttagagcagtgtatgaatatataaagtttcagtcgcatcctaagccgatgtcagctctcagaactggaaccccatttgggtttctcataccagattagattagtccaaacatcgccaagacatgccaatgctctataaagactccggctacctcatcacccagaacggcagcgtttcgtctcttccctttgctacttcaactcatccgcaaatataaacccagtcttctttcagggtactcttaccacagatatatctggctgtcatcctctttctggtgagcttaaccagcagacctttagcagagctcatcatccccttttttccgcgagctccactgaagcagccaaagccgttcgtccttacgcttgacgcgcttcctattcatcttgatgatcggtttgcggccaaagaatcgtatgataaagcggacgttcttccttcactccaaaccttttcaatttccgtctcagtttgcttctccagttccccagcacgaagttattaacaaaaaggcctgtccgggttacaacccgagaacatgtctaccctgctaagccaggagagatacttgccaatcactatcaactattggtgaagattggttggggaacacgttcaaccgtatggctggcgaagcatttaaaaaggtaggcatgatctctatcatgctccctgcgattataaccacccgctaacagacggatattttatttagatacatcaggcaacccgaccgttttgtagcactaaaaataataaataaccgcagctctctcgatgcttatcatgagcgcgatatcgaagaacatatatcccgacaaagccccatacaccacggccgtggtatcatccgaacctgcctggatagcttcgaggtgactggtccagatgggagtcatctatgtctagcatatgaaccaatgcgggagcccctttggatacttcggaaacgtttcgttgactggaggctccccctttcaatcgcaaaggcataccttctcattcttcttgcaggtcttgactatctccactcagaatgcagggttgtacatactggcgagtattttgtcctcagttctccacttaacatcatcactcctatgcggattactgatacttttttccagttagacttgaagctcgacaatattttgataacgttcgcgaaccaagacattctcctcaactttgtcaaggaacagaccaccaatatgcctatgcaatgcaagact

SEQ ID NO: 927 - DNA, 828 bp, Emericella nidulans
ccagttcataggacatttcagaagaaaattgaagcgttcaagtggaaaagagaagacgtagtgtatgacatttatataacaagttttgcagcaataagtctcgttgaaattagtacgtagtattttgacaaaatgagagatctactctgagtctattgagatttcaagcatggctatcattcatttaaacgtataatgccaacgacgctcaatcacaactatgaacaccgtcagttccagccttagcagattaggaatatgcaacggaccacattgagcccgaaatagagccctgattccgaaggcccgagagcaagcgaaagaaaaggacgaaagatgttgacccgcaacattcgtcgaatcgaaacataacaaactgcacaccgaaaagcaagagggatatcaaggtgccgaaagcaaatggcgaataagctgagtggagacttggaagttgcgattgtatttgcgtggatgtagtcgaatttatgagttcaccttgtcctcggccaacctaggaagtagagggttggtggttatctcgaactcccagacgacccactccctcttcgcgagtgttggggacaagcgtatcccacgagcacagtcttttcctgcgtcttgtggccgcgctggccatatgcggtacaagggtcgatagcgtgttggtggtagaggcagccgcagacagagtagcgttcgatgagttggtagcacattcttggttgtttgaagcgttgcagtgacgataacggagaaggcggagagggaagtggtggtggtggtggtggtggtagtagtacgaggtggcttccatgatgtagccggagt

SEQ ID NO: 928 - DNA, 7337 bp, Emericella nidulans
atccttgcgagggggatccttgagggtgttctttagcagcgggcaaggcccattggttcgttgttagtttacggcgcgggcacaaataatactgaatgatgatttttttctacacccctgcggccaatccaccgggagcttattgcaagcaggttgcgacacgcgatgacctagacgagtcctcagccgtgcgaaaccttaacggaaccgggcccactgccacagctttatacttgtcccgctacggtggtacaggtagcctctctgttccaatttctcagagaattcaattcactgagcggcatacatccgcgcgaacaacgagatggtatggctctccgttcttctcgcatgaattactggatgaagcgtcatcacaatgccttaaagctagtgaatccttgctggttcgaatcaccaattaccgattacatggttcaccacgtgtttcatatcgatctcggatcgccctcgatgaccgatcagcagatatttctatttccatgacaggtagaaaccaaaaaagatatggctgcgggctgcgtttcgcgatggtttgtttctatgctgttgcgcagagctttgcaatactgattaattgaattgcgactgtcgcgctacataccacgctcgtgcttcttgctggatccatagttaagctccataacagatattgatatcaaacaggggagaggcttgtttgagccaacgtggcactcataatgatcgacgatgaaaggtaaatatcgcgatacgcttcacagaatcaagatactcagttcgcagtatactgtttcggcagccaaagctcatactccttcccagcacaagcctggtcactcccacaaacatcctcatcgaacgccgcataagtatagaacacctccttcttcctcactagatcctctccgcccacattggctggctccgacttgattggatatccccggtacgcaataacacttcccggaaagctcgacgtaatcgccgccgtattcgtgaacaaacccgcagacgtatggtcactatgatctccactcccatacggatgcacataatccaatgaattcagactatccggcacaaaggagtcaataatctgccgtaacgtctcaacaagctcgcctcgcgagtacgtcgtcccagacgcatcgaccgtgcggatccgcgcaatcgcccccttccacaatttctctaggctttcctgccccgtcgcggggaatccattcccatccatgctcccgtcgggaatatgcatgaacgcaagactcacttctggcttgggccgcagtgtatacaccgggatatccttgccggcaacccccgcgtcgctctcgtcccagatgctctcgacacctgccatttgcgcgtatgctgttagaagcccagcctgtcgcagcgtccagtactcgtatggctggcctgcgtcgcctgaggttaggtacacagtgcgcacgttgaatccggacgagatgtcattttggatatctgggttcaaaaagaggaggtcgtcgtccgggtgtgcgactatgtttagggtatttgcgctgaaggctggagtgagcagcgtcagagcgccgagaagggtgggtagtgggagtgggaatttcatatttcggtataggtcaatgccaaggatgttatcttggatgaaatggaggaacagtggaccgcggagggagcgagcgacgagatatgaggagtgatttatgaaaatgaactcgtagctatatgtgtggtcctggtcagtgatctgtttgtttactgctacgccagcctgatttgtactggcacattcttcagaattgccgctgcattccaagccactgtcgtgctgagcagctataccactcatgattcaagcaacaccatattccaaagccgtatatacacactcgttacaattactagaacatatctgaaaaacagtgaatgagaaactgtacctcagtccaagggtagtaaagactagggctgttataccatcccgtaccctgagcctgataaatacgtccgttgacagtcacatgaagccgctaagcattataaagaataccgcatccctttcgtagattgtgctgatcaaactcaactctcttccactggaatgctacaaccaaggactaaggcgcgtccaagcatgtcaactgatgtcagggacttgactagattcgagcaggatactgatgttattggactaattcagcagataaaggtcggcttacatattaggagcgctgtatgaatgttcgaggcaaggatcattgtttacgcgggcctgagatgtctgattcgtctactctgcctatatctgcctgcgagtattgaatggaagtcttgtcatgtttctcttgatttatcggcagctgtgactgacaggtatttcgttacgtctgattctcaatatactattccatgccattgaaaacatccctataactgccatgctgatggtagtagtagtcagtctactcactgctgagcaaatggacgaacgcctccaaagcgatgaacaggatagtgacctcaggacgtgaccagaccatgaggaaatacacaggttatcaatgtggccagagttagtgagaataagctacactcactagtcatgtctgcggcggccagcgatcaagcctgagttgcaggtatcttggataagaaatattactcttcatgatatgttgcttgtcaaagccccatgccggcttcattgctggcgaaaattcaaacccttgcatgaccgggcaactgaacataagatgcactcttccagttccttcgtcttccttcacgaattcgacaagaggtaaaagtactgatgagatggtgtatttgacgaacaagaggcgcggcatgcactgggctgcgtacccgagagaaacgaatagtttattgatgtgctcgaagtacatttcgcgatatccggcagagccgtcaaccatgctatcctctgcagtgatcccaaatagaataaacataaaccctaaatgagacggacaaggactagcttacccgtgccttcaacgagacaattgtcgtcggaaagtatatgggtaagacagggccagacagggcgatcccttttgggcctgtaattcttatcgagcgggcaccaaaaatcaacaggtatagtcacattgtacagtttgatcgcgtggaggtgagtggtgatgcgtaacagcttgcaagagaagggatcctcctcaggggtgaaccaatcgaggacgtacggattactgacgcctatgactcgcatgctgaaattctcgatggtggcaggcaagccgtccaagcattcagctatgactatatcctgttaacagtcgcatcatgcaccccatgcaagctgaatattacctttgcgtcgccttatcacgggagcctgacggccggtaagcttaaatgcatccgaatccatcactagcgaacgcagattcgcacaggattgggcaatatggaacggtgtcgcttcccaaatacgttgaaacacctgtccgtgttcgctgtagtggaaagcgatttcagccacacaatggacagtaggaaaagtgaccaagtcagccgtagttgacgggttcgccatggatgccagtcgtggtgcgcctgtgtagctatacgccaaagcaatatcaagctcgatcttgtaccaaggctcccagaaccgcaatgtttgaaagagtccagcgactgctttcctgaaacctgcatcagtgggattctgcgcagggtcctgagctcgcgacgcggtctcgcccggtcctctgggaaactgggtagcctggtaatgaaagactagcttgcgaaccatggcccttcgtctcacattattgagacccccaacaaagtgtttgaatctgactaccgagaaagcgcgaggtggtgtaggggcttcgttgtatacttgaatcgtgttgtagatcaaaggctcgagcagcttttgccaacggcggcacacaagggcataattgcaaagcgatctaccgtcttctcgaaggtatccgaagatgtgcagtaataagtcaggcgtaaggctgctaatatggtcattgctgacgcacagttctagattctggatcaacgattgcggcggagacaggttaagatgatccattatgtaagaatgtaatagataggagaggaagaagagagcgagaagtaaacatcttgcttgatagagtccaagtaatgcgaaggaaggtgcatttcagcatcgacaacattgatcacgcacttgcctcactcctgtccagcacgaattgggcttgatgagcgtaagtctcgctcaatggctaagcatttgaggaaccagaatgaacaagcttgtactgagcttagtcgtgtatatgtagaaggaaaactaaatcttcactgttgcattgatagtttagaatctcacccactgttggcttactatgaccccatcgaggacatcgtagacgcagagatgctcaagacattggtgtcaaatctgcaactgacactgtcgactctgcaatccgcagtcctgctatagcctttgcagtaattcttcctagatcccgcaagcttccactattcagtatctgcactacgccaatatcaaccccgattttccgttggaaccagttgcgcatcttgattgcgagcagggagtccactcctagggatggcagtggaacatccagatccaagttggaccgatcacgctgcatatagctgaagagagtcttaccaatctctgtactcaggaggtcaatcgactcgggtttgtcaaggatatcaggttcccccttgagttgctcaagaaagcatacgagaatctgatcatcggcagtatcagtggtcttttcagatgcgcttttggcagccgactggttcaggttgtgatagagggccatgcgcggatcccgcctccaggacgttcgattgttggagaatccagcggcgctgtactacgcaaaccgatgagcaactgactttcattgacatatgtgggctgggcaggtccgttcctggttgtcgttccaaccggtgaggatttgtcaatcgctaattgaaccgcatcatggagatcgcgttcttgaagagtatacgtcgacgtagcgacgaagtggtcgatggcatgtgtctgctcgctaacatatcccacatcttccataacaccaatattgattgcagagcaaggcaagccaagtgagtgccggtactgcacaaacgcatcgaggaaagcgtttccagctgcgtagttggcatacccagtttgcccaatgaggccagacaatgagctgaagagaaggaaatagtctgtcttgcggctgtatttgagcagggtgttgtgcaggttccaggttccttgacactttggtgcaaatgctgcttgccattgagcgaaggacatagtggcgaaagaggtcacttcgagcgccatagaagcttgcattacaccggcgatgggaatattctcatcgaggcctttgatgagcatgtcgacatcttcagggttactgatatcacctgagacaaggtcgaggcggcagccttgagcgcgaagctccaagacgaagtcatcattttctttactggctgcagagggtgaaaagaaaacaaaatgacgtgcaccatgagaagccatccatgagctgaccgagcgaccaagcccaccgagtccgccaacaatcaagtgtatggcgtcgttacggaaggacggttctctgcggctaaagcaagcaggcagcgaagacgactcttcaggcatgataatagcggcttttccagtcttaccctctttcatagacttgaatgcatcttgtgccttttcagctgggaactcctgtagctgcaacggagtcagttcgcccaaagcgtaatggtgcatgcaccgacgaagcaatctagcatctattagcagataatttgattgcttggggaccaaaatcctcacccttgaattgtctccggtcgttttgcagcaacctgggacagattgaccgcacagaaagaacggtttccctcaaaggcttccattggtagctgcttgttgaactcgccttgtggcaagtctaccaggacgccaaattcggcgacgcactgccacgaggcgtggaatagattgtcagaaagagtatttagtacgacatcaactccaaggcccgcggtcggaaccatgagatcacgaacaaaggtgctattcctggaggaaaagatacgctctttgggtatccccagctgtagcagataatcttcatctgcccttttcgcgacagtgcaatagaactagatcgtcagtaagcccgacatggcattcgaagggaacttaccttggctccaatcatgcgacaaatttgaatagcagccgttccgatctcactgcaggcatgatgaatgaggacagactattagtttcgattagcacagtttgacgggcgaagaaaagatgaagaatgacatacatcgccatacttcaagcgggctacatcgatcagcgcgtaaaatgccgttgcgaaggcgaagggtatcgtagctgcctcagtccagctcaaattacgggccatgcgcgcacagagcctctcactcgtgacaaacttcgtcgccatgactccagagttaggtgatagcaccattactcgatcaccggcgcgcaggttcttgactccaggaccaacgcgctgaaccgtcccagcacattcactgcccagagcagcatcaagggtgccattgactaccaggagatccttcaaattcatgccaacagcccgcgtctccaccaggacccagtcctcaacaggtgcggatatctccagtgacatgcgttcccaggtgagagtttcaatatttcggggactggttcgaagcaccgctgccgtttggtcagaggccgccctatccaaaagctcctcactcacaattgccggataatatttaccaaccatcagggtgccgtacgcgtgagtgtattccaagacgggatcaagcgaggaggtggtctcaagacgtaggacacgttcggtcacctcagcaatggcgtcaattgcctttacatccaaggtatccacctccagcgtagccactgtaagtccaagctccctgcgagcagtcctcaagagcccaagtgtcgccgcgtaccgtgggtctgaacatgccacctgggatgttctagttacccacagcattgtcttttggtcaagagatgtgatcagatcccgcaaattcaggtattctgtctcattcattgcgtgtagttgtggtccgttcagttccagtaatgatataaccatttgagtgctgggcaactcctccccaagatgacgggtatcagttacgaaaatcccgagtatggggggtagggcgatgacaggagt

SEQ ID NO: 929 - DNA, 2348 bp, Emericella nidulans
  unsure (1)..(2348): unsure at all n locations
ccggttatgtgtctagtgtaccatcatattgaccggggtccacgtcggcttgtgtaccggcagtctgattgaaggccaaaatttacatgcagaggccggagatcgggatgatcgagtctaagatggcaaagtgctgtacgtacaacgaagaaagaaagataggcgggattgaaggctgatcgtaatccctgtgagtgcgagctggggcctacccagcggtcacaatttcagggactcgggacgggctcaggctcagtcggatggccgcagagcgagactgccgtcgtcgtcaggggaggccaaagtggactaagcagagattatgattggatattctccacgcgattgacaacgagtttgcgtggagtctgaagccagcgctaggcatcacggaaggaaaaaggaatgcagatcagaggggcattgatgaattgtttcgagccaagcttctatcgtatataagaaaacaacggttgtttggtgatagatacatatagatacatcatgacgctgtacatgtagatgcaattgtacttcgcaggccacctgctaaagtgtaaacatagcattaaggaatgtactccattaaggggatatcaataaacacatcgaaaagaataatacaggtaaatccacaacaagccagacatcgatcggtcgctctgctggtgtatgtgccaggggacggactttgacatgctcgaccggtgccacagaaagattagaattatgaattagacaggtactgcaggtgatgccatcgcaatcgtctcgttagatggtgagcttctaccccgcgcctagaagtcggtagggcaggcctcgatgccaacggtcttggtgacagtgacggtcttgataccgccgcagccagcgcaagagctgctggagggggagacttcggtagggatagcaggcacggaggtggtctgggagacagtgtaggaagtcacgctgtcggaggtgatagtctcacagggggtctcgctgggagcagcaggggtctcagtgggctggacgttggtgggaacagcgggggtctcagtgccagcgggaacggaggcagtctcggagacagtgtaggaggtcacgctctcggaggtgatagtctcgcagggggtctcgctgggagcagcaggagtctcagtgccagcggggacggaggcagtctcagagacagtgtaggaagtcacgctgtcggaggtgatagtctcgcaaggggtctcgctgggagcagcaggggtctcagtgggctggatcgtggtgggagcagcgggagtctcggtgccagcgggaacagaggcagtctcggagacagtgtaggaggtcacgctgtcagaggtgagggtctcgcagggagtttcagtggactcggcggggttctcagtggggtgaacatcggtgggaacagcaggagtctcagtgccagcgggaacggaggcagactcagaaacagtgtaggaggtcacgctctcggaggtgatggtgtcacagggggtctcagaaggagaggcggagttctcggtgtcggtaggggagacgtcagtaggggcagcgggagttccagcagggatggaaggagtctcagtgggctgagcaccagtgggaatgacagggaggaggggggtctcagaagcggggaggcgncnggtgctgctgggaacgctaggaccgtgggtaacctgaagaaccgcccgcagcacttctggcagccagtgagccagccgatgaggatgatctggatagagtcgtcgatttcaatgccgacaccacccaccgatgagggcagcgagctgggcacgagcctcaagagagagcgagagaacaccttcaccaccgaggatgaaagagagaagaccgtgaagatgagtgccgagcagcgagtcgatggtaccagtgaggaaaccagtgagctcgctaatgatgttcgtggaaacgctgagggagaggtcggtctcagcggagacgccaaaggagagccagaaggcgaggagacccttgagttcggcactgagagagcacttgctgctggcgagccagagagagagctcaacacgcttgtcaaggtcgatgtcgacggcaaggccacccttggcgcagatcttaagaatgtccagaatagcaacatcgatttccaagcccacgtcggtctggaggaaagcctcgagctgagcctgggcaccggcaacgagagcgccattgacgccaacaagggcctcgagagatttaccaaggccgatcgtggcaataccaccaacgggaaggttgccgatgctgacaacgtcaccgccgaccttaccctcaatccagaggagaagagtcttcttgagactaacagctagagtgca

SEQ ID NO: 930 - DNA, 5754 bp, Emericella nidulans
ggtcgtttttgttgaaagatcaccgtcaactcctccagtgtacgcttacttgtctccacaaataggaaatagattatcaacacttcaaacgtgcaccagaatataaagaggaaataatacttccacccaatccgcgtgaaggcgattcctgtcacaaaggtgttatagaaggaggcgatgttgatgaaaaactacctcctttgttagccatggccatcatggcacaaatacttgacgtggatgaaaacagaaccggataaagagaaagggtgcgtacgttattcattcccataccctttgcccggctctcataccgcagacactccacagggtacatcgcctgattcggcgtccacccggccgaatacacgaacccaaagatgaaaatcatcgcgatctgcgcgcgccgcgtgacgctgctctttgcgacgactccgccgccgtctccggcaacttggacgtttgtcgcgttcagcgcggtgatgatcacgaagaggaagacaatgatcgatgttgatacgaggagctgtggacgacgcccgacgcggtcggtgatcagggcgccaaagattgcgccggtgaattgtacgatattctgcagaccttgcagcaggagccgtgtgtggtttgaggatatgcctgcgcccgcgagcatttgcgggtagtagtaggagaccgggccattgccagaccattggccgaagaaggctgaagatcactcattagcataccacttcctcggtatatgtctgaagcgaaggattgggagaagtacccatgaacacaacgagcatagaccggtaccgcgtctctcgactatcaaaaagctcccggtagtcccaccaccgcttgtcagcaccgacgttggagatatcctcgagcatctcgcggtactcaagctgcacgaggggcgagtttcggtcaccctcaccatgatattcggcgagcacgcggatcgcagcctcgtgtctgtcgcaggagataagccagcgggggctctatggcattcgagtccagtgattagatgctcttcattctaactcgacagacccagggtaaaggaagggacaatatacctcgggtatcgtaaaacagagcagcaagacgagcccggaaaacaccatctgcaaccagaccgggatgcgccaactctgtgtcccgtcaatcgtgctggtgcgccaggggatgaacgtccctgggatcccgccgccaaaccacagcacattgtacaagcccgtcattgcgccgcggtacgccgggtgcgccatttccgatacatatgcgggccctgctgtggcagaggttgcgacgccaaaaccgagcaggaaccggccggccatgaatccgccgaggttgtggcatgttgcttgcacgatggtgccggctatgatccagagggcgccgatagccatgcccatgcggcgacctgctcagtcagtactcaacaagccaggctccggcaggatggggagggttgagggatgaggtcacgtacctcgaaaatccgtaaacgggccggcaaagaacgaaccaacgatattcccgattgtgtagatggcatacacgatgcctgtcgtcgaggttccctcttccagatcgaaaccaaagtactcgcggtactgtctgtagctgtttatcgaccccatgagcgaaccgttgtagccatttatacacgagttgagcatcgccacgccgatacaccagtagagctaataaatctacgtcagaccctctttatccatggatgaccagctcggctgagctagaagcgtacctttagcatcctcttggtgagaagccgcggcttcacacggagtgtagccatgtggagcgctgcattgttgacactgaagacgcccttatcggcgtctctggagatggtcgtctcgaatccatacgtgcgtctctccatgccgacctatcgaccgaccataccagctgggtttgaatctgcttcccggagtgaataattgcagggctgaaagcagcggaaatcagggaacaggaggggtctggggtgggaccgggagaaggcgattgaccggatatatagggcagactaaaggataaaagagaactcatgattacagaccagccggcagaaatcgccacgagtctgggaggattgcacctcgcataggctgcaaggattcgtctccgagcagaacagggactagactcgaccaggaacccaaaacaagagaacacggcggagggaggtatcctgcccaaacaggtttcagggcctcgcgtgcatggagaccgcgggagaaacgcctagatggaaggctctgtgcctgaacgcctctccgtcgctaaacgggtatgcctggcgtttatatcgggctaggggagcaaccaccacgcagtggctgaattctgtccaaatgcttactgtatggtacgacaggatagaactgaatgagaaactatcgtgtatagttaaaagtgcctgtggcagcgccgtctgtaccacagactccagtgatgtgcgagacgcgggtgacagacgcagcgtggagcgagcggacagatgtcaatgatgccttaattcggaaaaaatccttttactccggccacaggacgaggctgtctaggagactaagacctgatcttagtgcaatcgtggcttggccattgctcggattggatgttcctggcaggattgtttcggccatgtgtgacagccctgcaccagtgcctcgctcattttactaatagatgggcgtctcttaaggcttgttgcaattgctccggtccctgacgccagggctagtttcaaatttgggggctgaggcgttggcatggccgacgttctggccgagggtggagccgttagggcttattggaagacgacgcagctgagcgtgagccagtctatggtgttgcgatcggaaatgagatctcatctggctgaattggactcttagacctttagtgagaacgagattcgccctaattcaaaccggaggcccgcctcgtattatcccatacaactgctgtacactaactcatctctaaccgatcatctaactccatgagggccctctctgtccattgacaacaaacaaggtaaaaatataccttctccactcggtcaatcggtcagacccggctcatcgtgattaatattcccccaatcccagcgtaccccctgcaaacccaacctcacatcccggcaaacgacgaactaagccaattagcctcgctatctgaccctcccttccaacttgttcgaaggacacaacatgctactcccatgagcatgggtcacccatcatacggccgcctgagggctgtacagagtcgggaaagaccatctcagagacaggcgtatgcgtcgtcggttcgtccctcccgcgcaggatctggcggtgcacagttgccacgctggcgacctggccttcgtcgtaatcgttgaagatgttgatctctcaaaagtatgctcaagggtgtgtggtagtgaagaaggtgaagtcacccgcatagtggccgtccgcgagacgctcgttcattcgcgcagaggaattgagagtgcacggagaggtgaatggcgcggatctccctccgggcggaggtctggtccgatgacttttaggcttgggtgtggaggtaatggtgggaagtaggtgtcggcaattccgttgttggagagatcgcgcctctcatcggccattgctccgtagaaagaattgggggaatgcgggggtgaccagaaagatgaccagaaagatgggaccagagattgtacctggggctgctgcttgggcattcctagggctgcctgggccgtcaaagagatggtaagagtataaaatttgggaatatcaggaagacatgagccttctctttgatcagaagggtaattggacaaccacatcggtgctatgccctgttatcgtgcttgagcgcgtcgcagcgtgggtggtgcgaacagttgtcctatgaaacgataaaaaaatcaaataaaatcaaacaaaggtcaattaaaaaagattagattaattgttaattgagattaatcttaaagcataagaatagtaagaaataataatcacaaataaaaatttgcgctgtcttatatttcctgagtttcaataggatcacagcaagtcagcctataaccgcagaattttactagattgacggccctgtgaaggatgactggtgttgatgggaatcgactatttctttgggctggccaacaaaaggtacagatactggtggttttggacttttctgtcacccagtaatcaatcgtctctggaataaacagcgtgaaccgcaaagagactgtatgcccgcaaataagtggcttacaccctgcgctctgcaatgcaagatttcagtagcaagggtctagatgttagaggcgcagcgggcccagcactcaatgttggatactagattgtcccggctggagaatgacagaattaccttgcaaattcttctagtcaaggtagacgcgagtcctgcctttcatgtggccgaggttttagatgctcatgcgcaccgactcgtgatgataggccaaagtccccagaccgagggctgcgtctatatgatacttgacgatatatatctgccaaatctcgacttcgcaaggtagtaccaactcctgatgaggtgctacggtttgtgcgccttccatgtatctcgtctgtatgtcaccaaagtatgctgtggagttactgcgctacagctgtaatcaactggcaaggaagaccctcgctgtaaaagcgcgggcaagaccgtatattagcaacgacgaaacatcaaagcgttaaggacggcgtcaatcccaaagtcagccagttcgatgcctcgcctaagaacacccgccgcgccttggacgactgcatcgcccagcccaagggccgcaagaagagttgacatattgagttggggtgctgcaatctaacgtccggctcgagctcacccttggcatgatcgacaaggattatgtgcaggcgggtaagatcagggtaattgcgctgtccgaggtgcgcgccaattcgtctacgaggccgtcaagtataccaagctcactgccgtcgaggccgagctttctatgtaggtttctcttcttcgaaatttcattctcgtccatttgtccgcgattgattccagtggctcaggtttacccccgatatcctggataatggtgttgcagccgcttgcgcgcagtacaggatcccaaccgtcgcctactcgcccatcggacgaggtacgttgacgggccagctgaaacactttgacctgcctatggactcggtactggtacagttttattttccgcgctttcagcaggtgaacttgaaagaacctcggcttttgagcaacgtcgaggagattgccgcgcgcaaaggctgcaccccccgcagctggccatcaattggacaatcacactgttgcggcggctgaaaacgagaactgtcccaatcaccagattgtcgacgcctgagcgggcggaggaaaacagcaagattatggaggtttaagacgaggagctggatcagattaatgctgtcgtggtgagcttcacaccagctgtagagcgagatcccccgatcttccagaccaacacctagccatgcagtaatgcgcattcattgtttcccacagaatcacagcggtctatactgtcacccgcccttagactattcagagtttggcagcgctcctaagagtcggcatatagcccctctggacagttactttggtaaccttcgtgcgaagcagtcaaaaaaaaat

SEQ ID NO: 931 - DNA, 3623 bp, Emericella nidulans
cacatagaacccgctggacaggaggaggaagcttgggttcgacatccatatctgtctcaaggccgtgaagagagtcttgaacctcggggttgtccgaacggaggggcttctcaaagagcttctggatagccggaacgcgggcagcgacccagtcgtccggctttgaagcaagtatgatgcgaataacctgcaaagcgttcactatcggcgtcacatacttctcaatgggcctatctccacggtcttgtgtgagaattggctcgatgactttctggtagagctcaatgttcagatcaccccagtaagccggcgacatcagattacggagtaatcccacagctttcttttgcatctcgctcgtgtgaacagggccttgctgctttgaggacggaagttcgcggaaccgggcggccggcacctggaacctatcgctcgacgtggtgatgaaggtaataaggtactttgtcaaagccgcacgtaggtcaggaggaaccatgtattcggagcgctcacgagacccgggaggtgcaatagccggcgagggggaagaagttccttgagcgtcatcaagcttgcgtttctttgagttcggcgactcagtcagaccattctgggtaagaccagaactgttctttactcgcttttcttcccaggtccaaatcaaactgatcaggttaagcgcaagcatcttgctatcgtgcgacgggctgctcgcaggagaggcaattttgatcaaagaagggacgataagaggcacgaagtgctctcgggactcataaaacaggtcgacttggcgcacgaggaactggaagatactcatgacctgctgcagattcgcggtctcctcggcaagaatacgacggggccacttagcccacagcgggtaccgtgagtcttgggattgggcgttgtttgctgctgcaagtatcctggtaggtagaacaggggcaagaacatccagcgcctgggtcacaagagctttgccctcgttttggtgagctcgcaggagtgccacatacacctgcacaacaatcttcatgggagtctcataatgcgcgatgaaataactgatgaggacataggcaccgtacttgttgatgatgtcttctaggcgaatgtagttccaagcaaacttgatgatgtccttccgcgaatcctgcacagtggcgtggtgatacttgatcaacaacgcagacagttgcagaagctccatacgagaatggtcgacgcccgcttggctggactcctcactcagatctgcgacctgtggcttccataagcggttctggataaattcggtcatactcttatccatcaattttggaccatcaggagaactgttccatgtcaattggacatccattgcgaagattgggttgaccagatggcggaatgcgtaggtcttcattttctgggaacatgagcgctgaccataaagatcaaggcatcgcataatcacagaacgccgatagtcaatagactcgttggttatgatatgacgatagatgaacttcgggaaagcaatactccgcttgagatcgcctgcggacaacccatcaacaacctcgaataggaaatcgagatcctgcattgactcggacaggtaagcggtgacgatatccataacctggtcttctgcttgctcgacccgcaaacgctcgctcgggagaagcttgtcaccacgcagcttccgctggagatctcgcgcagacgctaggactttagttctcaggtccgcatgagacaccagccagtttcgggttgaagggtaagaggatatggcatgcactgcgtagataccattgatagcggcagtattcttgccgtctgtctgctcctgtccgaaagcagcgttcatgaagccatccgtgtctgcaactactgcggagcgaagcgcgtcactttccgaatcagcaagtacctggccaaagaatcgtccaaaccgctcatctctgaacctagcgtaaaagaaggcgagggtttccttggcatatcgattgagatacttgaccatcggcttttggaaagggctgctcgaagtcctgcgaagtttatcctccaagtccaataccttgttcacaagatgttccatgaaagatgtagcagccggagggaggaggtggaaaatgttaaatattgcagctacgatcttcataggagggctttgctcaacaaggctaaaggaaactttttgaaggatcgcatcatcggcaataaccttcatgtggtccagtaaacgagctcctatctcaactttgaagtagttggtaagcaaggtcagaagcctagccaatccgtcaagaccagcgacactcagccgcttcggatcttgcaggttcatgagaattgggcgcaacccgttctgaagcaaatctttgggcagcttgttagtttgagttaggacgtctctcaaacccgcattggccgcgtcaatcacatcaggagaccgcacataaagtgacttgaaaaaaacggagatgatgcgagcacgactcgtattctgaggagtgttcgcaaattctgggaagctcatagccatagacaaaagccgaaggcaagcaacacgtaagttcacaatcatctcggcgtttttgaactcgttcggtttactcgctagattgtcatcatctgcatcagccaaggcgagagattcgagcattaggcggttgagcgggtcgttgaaggtgacaatgtcattgcgcaggcttaggcagaaggtaatggcgtcgataaacccaatctgcgttgggaacggcaaggcgcggaggggcttgttgaagattgattgcaaaaggcgatccttcactggtaatataagttcatgaacctcgcagctcagaacttcagcaatggtggagaagctacgtcgagaagcctcgcgaacatgtttgttcatatgcgagagctcatagacgaagaagccgcatagcgagtagagacggctcttttcattcttaagatcctctttggtcatgttcttacagcaccttcgcaggatcaagtctagggtgtcctgggctctcacgcgtgtgctggctggaaggtctggcggggtatccttgatgacatatgtcaacgccctcacgaattcagcttgtttttcgtaaagccaggaatcaccgaggtccagctcagtggcatatagatgaataccacggctccctcctgctttggtgaaccattcttcgctatggcagctgtgacagaatactcgaccaaggtgctggaaaaagggcagcttcgtcacacgttctggggatccgaatattgtgacagcagcatctttaagaacctgtagagcaaccttggcggcatcacggacgtcgacattgtctgaagataacgattcaacaacggcttcagcgagaatacgtgagtcaaggtacactgagccttcgccacaggaaacatcaaacggctttcgcgtatgtctagcttgcgcaagggaccgtccaacttccaccatagcaaagtgcttgcatacgtcggctacaaaggcagtagcaatttgcttgagagcgggcaatgtggtcgcaaagatggaagccttgagaagctttttcatagtcccttcctgagcaagcttcttaggaatccagcgcgtccgctctactttcaagaat

SEQ ID NO: 932 - DNA, 2738 bp, Emericella nidulans
acccatcttcggatcgctgccgagggggacccgttgacacattgctgtgtgtaggctgaagtggttgtttgtaaggggattcggctggctcgctctgaccctcttcctcgtgtgcgctgtcagaaggggggggaggaggaataggcatggcaccaggcgtttcaccttcgttcagtgacaacgttcggaaaatcgcattcaaattttcgctacctccactgtcactgcgatacccagatgctcgacgcgatggttgtcgactaagcccactctggttcaaattaaagtaggacggctgaggcatgctgcctgctacatctggcgtgatcaacggagtggaccctggtgagccacttccctgaaagtcgaacgaagcagatcgagacgaagctattgaggtggctcgaggaaatgatccttgctttaggatgtctcctgattgttcgttcatgctcttcagaacgcgcttttgacgaccaactaaccccatacgagacagaccaaaatctgtcaacttcagatgacccttttggtcaatgagtaggttgtcaggtttgaggtcgcgatgcacaatgcctcgactgtggagatgctcaacgcctaagacaacttcggcaatatacttttttgtccaatcctcaggcaagccaccgaggatcttaacaagtgaagcacagtcgcctccattgagatactccatgaccaggtaaaggtagtctttactggagaacgtccagtaaagcttcgcaacgaagtcactttccccttgccacatcatgatcgctcgctcggctttaacattggtgacctggttcttggcaaccatatcagcctttttgagcactttaatcgcatagtactccccagtcgtcttcttcttggacagataaacactgccaaatgcacccttacttatgggcttgatgatttcaaagtctttgatggatggaggtgacgggcgtggttggggttggcttgcagtcgttaaatgaggtgaaacaggcggcctgggcaaatcagaggatgtcgttgacgattgacggcggtgatgtcgataatgatgaagagccaactcgcctagattggatgagggcgatacgattggggatgataaactctcagccccagtggaaagacgcggcttaggcatacgcagcggcgaatgaggtccagacactctagctggcgaatgttgtcgccgtggcgagctggacaggcccggaagcaccaggcttctgcgcttacgctccagactccgatccgatgacggggagtcagtccgcatagccccagttatagaagacgagacaatgctgctatcactttgatcgcctgaatcgatatcagccaaagacaaaccacgccgcgacggctgagaagtccccagcaggttcgcgacactcttgtgtgagcgaggagtgggacattccataggactagatggaccagttgaaacagcagcagatgaagatttcccctcagaggaatgacccgactggaagcgatccgttgcattacgcatcgacatcgtcaaagcagacactggcggaggtagctcaggctcatgaccagcattttgcaccaatatagacgctgaggaggcagatgggtcggaggttgtctcatctgatggcgtctcatcttcagaggagctagaatcactcagctgcccggcagcgatacgctcggcctttctcagtgccgcagtaatgcattcttccaccagcacggtatactcaatgcgaatcctttccgcgtattcaacaattcggcgatgacggataaccgcatcaacctttgatctcgcgacttgctctgtgtccgtacacagcgcagcaagaccttgttcctgttccaaagtattagagcttggtgaatgccattgaagcacctgagaaatacgagactccgattgtggtgacatggttcggaattcgtcgccgttgtcgcctcgcgactctctaagaactggcatgttgatttctagagctgtatcgcagagatcgagtatcaactcaacaactcgagctagcggtcgtcgaactgcaaaagaacgggcacgtatatgaccagacccggagactgactggtctctggacctaggaggagttgcgggagcggagctagtcgtagacgtagatcctgaggagggcgccgaagcgacgggcgagggtccgatgggcagacctttatattctggttgaggcaaatgaggggagctaccatcgcgagaacttattggtctaccctgccttgcctctaacgcgtctagcactctcacgatagcatgccggtgctcattgaggttctcttgggcgatctgaacgtccatctctgcttgatgttcttgcaggcaaagatccgagtgcttctcgaaccaccaaggagttatttgacgctcacaaatgcgacataagacaggttcgggtgcagggtgtttggattgatctggttcatttgcagccgcctccgctagaaccgtcaggtagtttgctagaacttcagctccaacgcccaaagactctaccaaggatgatggcaagtcgatagtaacttctcgtggttttgaatatggccgcaacatccacatagtctattgcagttcatgtcagtccatgtaggctttccgaggacaagacggagacttacgtgagcgaccccttagactgtacggtcataaaccataataccctgcccttcgaggttcagaatagctgggccatcctcctccatctccg

SEQ ID NO: 933 - DNA, 2479 bp, Emericella nidulans
aaaaccaatatccccccccccccccagcatcctaatagaggcaaaccggtgctctgtcaagattatatcagcatatgctaaaaggcgcttgaacctacaaagccctaatatcagaccctatataaaagaaagctgctcccgcgagcacaagctgccctggtaggtacttggccaactcatcgccgcctgtacaggccacagagactttacagcataccaccagtgcttcaaccactcagactacctagagagctgctcttgtggtaggaccaagaccccagtatacttcttcttctacccatacaccagaaagcactggaaagatagatagagatatataagggacagcctgttaaaaataatagactagctcttaagtacagctgctggggctgaagaatttagtcatattatacaagaatcatccttcttcaaggatatatgcctgaactaggcccgccggagtgcttgatagtgcaacagtccacacatctacctggataaagggtccggcccctctccctaatctataggtagtcgaaacaggcatctgccctcgaagacctggccagggcagcactgggtgcttcttctgcttatttccaatatatattatccatagttgctgcttcaaacctgtatctagctagttcctaggcagttctgtttaggtagcacgtccagatgccccctgggaggccgcagatcacgtgggccccgtgatccgccgagtgacgttaaataataaaaacaaaacaaaacaaacaagaccaaagactgtaggatggggtaatgaatagacggagaagatatagtttattctatttttccatcccaaggcgccttttgaacagagccctacctagcggtatttgaggaaatggcatctttgtcacgtccttggcttgagaggccataatagtcccttcctattatgaatttttttgttgaattgtcacgacatgttgtgaagaagtcctgaggacactaaataggtcaggtttatgcatatattgagaatatatccaggtaataaacttcactgacaatgcctaaagctgctttgagctcgtgagtcctaccatacctgaacagcttgaagcaatagaccgaagagtagatgacactatccctttgagtgcgctgttgttatctttggaaccgactttcactattaaaagattcaagctgcagtctgcgaaatgttgacagatccgctgccagacttgagcaagacacaggtctttacagtcatgggtcccgcgacaaagcagggaaaaagtaccaacataggacaaaaactgaccggctgggtttctggaatgtataaggagggttacccaaggcttcgactaatttatgtacatccaaccaatgttataaactccgaaagaacagtaacggctatattggcggctagtcaagatgggggttgaattggatttgtactgcatgctgagttgtcatgagtaggctactgcaagggctgtcagtctgtgatgatcagaccctagatccacctacggcagggatcatgagagatgcactgtctcacatacgcaggaattgcccttcaagaagagactgcggcaggaggatgtacaggagaggtgtaaaagaacttttgggaaatgaggacttcgaaagtatgagattcgcgctaccgtccaagcttagactgtcgattattacttttctggtgccggatcatgcctataggccggcgggagaataccttggagggctgctttaatctgaagagcaagtatgcgtgagtaccaccagtgctgctgtgtataacctcccatgatccagatgctctcaacgtgcgaatgccgcttccacatgccacgtatttcaccctcctcatccacaccccaggtcgtgtccaagtgcgaggcaatgcctcctggagtcaaaacatgtgcccttccagtctgatcatcaatcttcgtgttagccacagtcacgtctgacttgccacccagaatttcagtggcagtcgtcaccacattcgaatcagcaaagccagtacaccatatgatcgcatccgtgtcgagacaagtgctctcccgaaaactgaagtccagtttccgtatagctgacaggctccgcaccagccttgatactgaccttcccttcctcaatcagctttgttccgtcaacatctatgtaatgaccgcccgcacgctcgagcaggttatggatcaaggcacacgttggttctcgactgttgagaacaggggcccggctgccttgactgcggcgtatcgttccagttcagccgatgcgagcgcggaaaacaatccacgacacaactgtccgtccacaaatgttggcagtgagaggaagagattatcggctgcatcgactccgtatcataagtgcccaggctggcctggtgatagacgtattcaagaggcacgatatatgtgggcgatcgtgcaaccattgttgcgttaaggccagcgctgtggcc

SEQ ID NO: 934 - DNA, 1743 bp, Emericella nidulans
aaggcccagaagaaagactctcccaataaaatccccacaaccactccaacgacctccccgtggcgccgcgcagaaccgtcaaactcggcaactcgcgatgcgtcgcctcatgtcgcaattccacaaatgacgcgggcaggccaagctctagagcgcgcgagaacatgcttcgccgcgccccgagtatgctgtccactaagccggtcacgaatctgcgaaccgctttagcacttaccactgactgccagggaggaggcacttaccgacaaaacgccgctgcgtacgtcgcccgaatcgcaaagagcgagttcttggacgcatcgtcgtgcagaattgcgtctgtaaggagggctgttgcttcaacaggatgtgggaggttgccgcggagtttccacgcggatacctggaagtaataagcttacgttcactcactcgaagactgatttccatctctcggtcccaataaattgaagcataggggaaagaagtcagtgaacatactgttgcgcatgcctgcgagcgcagatccggcccatcatattccgggggagggtagaactgttttcgcacggcgaggaggtccgagtgcctcttccatggggtgaaaatcacttttgccatcttaattattatacgttcccttgagtatatggttcaaactcctgatctataagggcgcttgctggattttttatatgtgcggatgattgttcttccgtcccgagcattcgtcgctagcgcgtttcaggtattgacttgctgaggtttcttagtttatgtaattcgtctcgttgttgcgtcaatcctacggagtggctggattgattgttattgatgttcatttctcgttctttagactcctatgagtacatatcatgatgacgcctcgctcagtgtccttaacccatatgctatgctatgcaaacgctatcccgaaaaaactccgtgccatgcgatcaaaagaaatcaaatccatccgtatccgtaattcatgcatgatgtggtgggaaaattgaaggatggtcgggccatggtaggctgctcagaaccattgtcggattcgaagaaaaatgtcttgttgaccatgctttcagcttgcttatttgcttgcgccgactgctgttgattatcagattcagaatctggctcttgctggtcttcctcttcttcctcttcgtcatccttttcagcagacggtgtgaacgtctcttccaacttcagccccttgccattcataccgtacaccaatccgtcggtagatgtatcgggttcgctgtagaggcccattccaaccagttcatcccccggctccggcttctccagcacgggaactgattctgcatcatcgccgaacttctggatcggcaggaagtcgggcgtggccggcccgggcgatgacacacttccatagttagaggctggagcccccattgatgggagatcctggttgatagatgtcatgtccagaggccagtcattcaaaggctgcgcaaacgagggtacgcccatttcagatccgtcccaaaacgtcccgtcaacttgaggttggttcatatgcaagtaaggctcctgcggcagttgagggaaagcaaggtcctgttgcatgttggagacatcggcagcgggaaaaggttgcaacatagtctcatcaaaggcgcccgtcatggtttgagacggttgggtcacctgcgtgaccgggagattgtacgagtcaaactggtcgttggatagaactgcgctggt

SEQ ID NO: 935 - DNA, 3491 bp, Emericella nidulans
ggcctaataagcctacggggtgttatcgggcattcccctttttctgtgacttccaaagggaatgggcagacacatgtccaattcaacaccaagggatacatgaacatggagcactgaaggcccaaagttgatgccccatccgattccgaacaagatgtgttcggctctcaggaagatgagagcacctggtgggaagagacctttgggtggaaactcagattcgaagcccaggggtccgaaaagtgtggggtggacattagcttcccaggctacactcatgtgttcggtatccccgagcatgcagactctctgtccctgagggagacgcggtaagctgctcggcttctatttcataagctacccaaactaatcataagtagtggaggcccgggtaaccacgaagaaccctatcgcctgtataactctgatgtgttcgaatacgagcttaacagtcctatgactctatacggtgcaattccgttaatgcaagcccaccgtaaggactccactgttggtgtcttctggctcaacgctgccgaaacctggattgacattgtgaaatcaaaaaccgacacgcacagccattggttttccgaagctggacagctcgacgtatttgtctttctagggcctacccctggcgagataagcaagaagtatggcgagttgactggttacactcaactaccccagcagtttgctattgcttatcaccaatgccgctggaactatgtcactgatgaagatgtgaaggaagtcgaccgcaattttgacaagtaccaaatcccctatgatatcatttggctcgatatcgagtatctcgacgaccgaaagtacttcacttgggatcctctaaccttccctgatcccatcagtatggagaaacagcttgacgagtcggagcgcaagcttgtagtgatcattgatccacatatcaagaagcaagacaagttcgaaatatccaaagagctgaacagcaaaggtttagctaccctgaacaaggacggtaatgtctacgaaggatggtgctggccaggggcttccaactggatcgattgcttcaaccctgcagctatcaaatggtgggtcggcctcttcaagtatgataggttcaagggaacccttcctaatgtgttcatctggaacgatatgaacgagccctctgtgttcaatggtccagaaaccacgatgccgaaggacaacttgcaccacggtaattgggagcaccgtgatgttcacaatgtcaatggtataacctttgtcaacgccacataccaggctatgctggagcgcaagaaaggcgaaatccgacggcctttcatcttgacccgatcgttctacgcgggcgcccagcgcatgtccgctatgtggaccggagataaccaagccacctgggagcacttagcaatctccctaccgatggttctcaataatggaatctacggattcccgttcgctggggccgacgttgggggattctttcacaacccaagcaaggagcttctgactcggtggtatcagaccggcatctggtatccgtttttccgcgctcatgcccacattgacactcgccgtcgtgagccgtacctgatccaggagccattccggtcgatcattacgcaggctatccggctgcgctaccagcttcttcccgcctggtacactgctttccatgaagcttcggttaacggaacaccgatcgtgagaccgcaattttacgttcatccaacagatgaggcgggtttcaccattgacgaccaaatctacctcggctccaccggtattctcgcaaagccagtggtcactgagggcgccacgagtgtggacatatacatcgcggacgacgagaagtactacgactacttcgattacactgtgtaccagggagctggaaagagacattcagttccggcgcctatggaaaaggtacctgtgctaatgcaaggaggtcatattattccacgcaaagaccgaccacgtcgtagcagcggactcatgaagtacgatccttatacgctcgtggtggttctcgacaagaacggacaggcggaaggcacattgtacgttgacgatggtgagacctttgactaccagcgtgggggacacattcaccgccgcttccacttccaagactcctcactcgtttcggaggatatcgcaactcacgggcctcagacggctgcgtacctcaagaccatggccagcgtcagtgttgagaggattgtggtgattgaccctcccaaggaattgcaggataggagcacggtcactgtgattgaagatggagcaaagacatcctcttcagcacaactggagtatcatgctcaggaaggcggcaaagctccgtatgcggtagtgaagaaccccagagtgggtattagcaagacctggcggatcgaattttaagctccagcacttggctcagcacttggctagatagagcactagatggaaatatgcattttacatacaaccttgcaggctatcacaatatttgatccctttttttaaggctgcgagactagttggcgatcgatgcactaatcgggcaaagcttgagcttgttttgttgaggccccgtaggaagctgactcagctatatataaaaaaagaaagcaactgaaatccgcttgcgggagatctcagtaagctcaagaaaacttgagactcgagttgactactctatgattgttgttttagaccttcgtatcttacgttaaatgtgcttttttcctcgtgctctgccccgcgatccgtcctccgcgtctgcaacttccaatccttggcctcctgaaccccatatttcgaaattccatcaacgactacgctatgtatattgtctcacagctccttgaatatggagctccaatcttgtacgttcattcctctggaaagtttcattcaaactatgcggaaaaagaggctagatgttgacacttgcgcgcaaatagcatcgttacgtcgcccgtgacttcctatgcggaccagatcctgagcatacaccgaaatcgaagtccgctggcttctcgcttgacattccactgattatgctggtggcatcgattttgaagtgcgactcgttcgccgcaatactgagcaatgctgacagtcagccacagagtctttttctggttcggcgactattactctctcgctctcctggcgcaggccatcttgacgattggagtccaagccatactgctaaaagttgccctggacaatcgaccggcgcccgggcaaagaagcggaatcgagcatattccgttcaccggcgcggatgataaggggttcgcgaggccgtacgagttctggcagtggaagaacccgcggccgtatgttctactcattgctttatagctcggcttaatgagactaacggcttgctttgattgcagatattggttgttcctggcctatttcaccggtgtcctttccttcatccacatcttcctgacgcccatctcgagctcccccacttacatcagcttcct

SEQ ID NO: 936 - DNA, 2835 bp, Emericella nidulans
gagcttggggggcatcgactgcagttggagggcaactacttccagcctacgatcatctctgggatgtcggcctatatgttgacaacccaggaggaaatattcgggcccctccttggtctgtaccggtttgaaactgaagaggaggctgtccgcatggcaaacgatacgagcatggggcttgcctcgtactttttcaccagggatgttagtcggacgtggcgactgctagagaatctggaagcgggcatgatcggaatgaacactggtaagtgatacacaaattcatgtctattatctcttgaacgcgcaacttatgagattccaggcaattcgtcagcggcggagtcaccgtttggtggcatcaaagcgtcaggatacggcaaagaagccggcaaagatgtggctattgaagagtatctcattgccaaaacaggaacattgacagttggagctgtctccaagctctagataggcagagataagtagatagtgaacatagttgaaatcccaataagaacacaatctatgacaaactcctggagcatctgataccaacaggtagtggtgaagccctgatcacattctgggctatacgcagactatgtggcatgtcaagcactccaactcagtcaatgtttcattgatccagttaaaatatttctgctattcccttttgagctcgcgggtgccttcccagtcttgcgagcgccgatcactgcttctgactctcattctccacagcgacttaatgctcctatcaaaagtttctctttacccaacagatagggaggcagacatcccgatatcgatcgagtattgcattggacatctgctaataatgtacacaataacgaaaggttatgctactgaatccgaaatagccgatcacgctcatcaaacaggcagaattcgtacccccatggctgccaaagcctctctccagtccattgactcatctggatctgcatctagactgctccagaccctatggactgtagcatgctgcttactatagtttcccatcccgtacaccaggactcggctccaccaaccatcccactgtcgacgctgttcgccgacagcctcacaggacgccacgaacgctggccacgagattggcgcgggcagcgcgccgttcttcccaaatgtgatcttgagatcttctgcctcattcaaggctgcaaggacctcttgctgctcccgatggagacggcttcgtgcacattgctggatcgaccggtagtagtagattcgcgctgctccttggaacgctttagcctgtgcccgcgcaatgtctatcatgtatggttctgcttcggtcgaatccatttccgcaaaggattctgaatttatagtgtacgagcacagctcgtctcccagcgtctcgcacgattgcagaagactgtccggatatggacgaccctgctcacgggtatacgcaagatactgggcaggcggtagatgcggaagattgccccagctatcgatgttgtaatgccatatataaattctatactgggctctagggtgtcgaagtcggctccccggggaacatggtcgtaccctggccaggccctccgttcaggatgtacgcgtgtcgtacgcccaaaaagatgaagcattttacagatattgttgagcagactcgtctcacggctgacaagcagggagtagtgcctcgacgctagcagtttgattcctgcctccaggtgaatccagtggtcgtccatgccgccgtccattatctaacccgcagtcagtagagacgccaccaccaagtgaatacagactcacatccgccgatactagagacagtatagctgtcattaggtctctgtagggggtcgattttgttgcgagtgcactttgtaaggcgatcagcgaccgctgcttgtgatgacaagccagttgctcaagggcttcttgctctccttgcattctctgcagattggccgccgcagtggatagaagactatggaacgcagcgatactggcagattggagctgactgcgacgtccggaccgttctagttgcgacgagccgtggagcgcaaggggtaggtatactgtcttgaaaggatttcgggggtgggacactggctgcatcaaatggacaacatgctgcatataatggtccatcaacattgtcgccgtcgtattttcaatcatagttgatgctaggtcgcaatcaagagatatcactccccggtttccagctacagggccctgaggggaacgatcattgccttccaacctgggtagatcggagctggaaacaacgcggccaggggttgatagtataccatgagtatccgaagggggaggtgaggaagagacgaagggctgatgggaacgaaattcgcggctatcagcgacaagactccggttggcaaattgaagcgcgcctgagaaacgggaggtcagagtctgctctaacggtattatccaggttccgtcccaggagtcaatatcatccacgggtattgaggtttccgtcgatcgatacggcaaacctgatgttccatcgggcaggggatgagttggcaactcttctaccgaactggaagaactctgggctgctgcctgctgacagtctgtattactatctgcagtagacccatcggtgctgtgcggaggagtactatgagcatggctcatggagtcggtaaaaatgtcctcgacgtattcgtcggctgggagcaggctctggctttcctccggtgtgtccgaacagatcgcagaagggggttgagatgtaaagaccgaaaaaggaacaatactgttggtcgtggatttctcgatggtttctagggctggtgccacttggatcagtca

SEQ ID NO: 937 - DNA, 2175 bp, Emericella nidulans
cccacaaagatcgcttggacggacggatttctgtttagataatcttcaaacccggacttgagcgtcgtgttcgcattctttgtatatcgcgccaaatcaaggtggtaaatctgctttgaccagttcacgaactcttccatttcggtgaatggatctgcttcagcaacgtacatagcggggatcaagggccttttggcctcgtcgatcgggagttttgtgtgcagtgctgcgagaaagaggattaggagcacgagacagtctttcccaccattataggagagcgcaatctcgtcgagagcgtattgcgttagggcgtcggagattatttgtagtgagatgcgggtttgatgctgcacgcgcgcgaggagggaattaggttcgtgactctcgctgagaaataggctgatgagggtgtggcaggcggttatgacggatgtgagggaggacgcgtgctgcgaaggtattgatcgtgggatgtgggaagtaggtagtggtcgatgcggttggggttggggttgtggttgagggtctacggtggacattgttcggactgttgtagtaggctctgtggaggtggaatgaaaactgtagtttttgaaagggctagtgacgaatttcaggagaccgccagccgaaagtatatatatcgatgtcaattgagcggacctcaggaataataatatttatgaagagtgtgggagggatgatcgggctcggagttggagagaggactagggaattggaatgttctggtacgccccgcggcccccgcagtccgagcttgcctgcttatcagttgttacttcgcagtctatgttatttactccgtttactgacattcatactccatgaatttcgcattggtttgtctccagacagtatttaaagctattctagattgaacaagcagaggtagtgggggaaggtcgctttcctcataccttttgttctgcgaacagcgcagatctccctccaccgaaggaccgaggctcaaaagactaacagttcaaagacctttcagcttgtgagatgaggccgagagtcggataatggcttatggcttgacttgaaagaagcgccgaatctgaggtctggcactgtctacctgccacattcagtgcgagataacagaataagatggtcgctggtcagatgcaggttgagatgcaaaatattagaacaccgcttcgtaaccgggacgatcttcaagtactaccgagctgtggtaggagtgatgctgttttgatattgaggaaggtgccctacaggagtcaccgcgcctgggagggatgcagagcccccagtctccatgcgtaacgtacatcaccctaataccttcatctttttcttcttcttctcaccatctttcttttgccccttctgccaatcgcgccagctcccaatacgctgttcgcgagtatcctcccaggcctgctgctgttcccgtttccgttttcgctcctcaatttcctgctcttcctttcgcctctctcgtccctcttcttgtagcttcgccttggcctgtcttcgtctccgcgcttcctcctccagcaacacctgaacagtcttttgccgccactccttcttgaattcttctgtctttaattccggtgagtccagtgtatatttgtgctcgcgaataaggagtcgccgcgcatccgcgatgcattcgtctaggtagttgcgttgtttctcgtccatgagcgccgattgcgctttctttaggcgatcgaaggcatctggggcgccggggtttttcgtcttatccgggtggatgagtagtgatttctttcggtattggagtttaatatccttttctgttactccgggttgtagatcgaggacggcgtagctggtgtcgtatgccattagtttcctggtatgctagataagccaatgggaggccttacgcatccagaacaaatgcttttcgaatgcggtcaatttcagcatcctgcgagcgtcggcggtcagcgaagttaaaacaatgtgagatatgatactgaccttggtgaaatcggaggcctctcgctccagggcctctagcgcatcttgttcgtcggacattgcgaacgtgattaatgctcagaaacaggttttgtggaagatttcgatgtagtgtggcgctagaggataaattatatagcaaagacaaaatgtttcgttagctcgtca

SEQ ID NO: 938 - DNA, 5201 bp, Emericella nidulans
  unsure (1)..(5201): unsure at all n locations
gaccagccggttattgaaacgacaccagagcaaataacaacacaccagcgcaccagcaacccttgtttgaatgttttaagaaactatggcgggaaccattctacccgctcgtctcccggtccccactctgtgatccagtctattctccccttaccggcattcccgcggccttatacaactgatcaataacctccatctgtaccacactttcctcattcccaacccaaaccggcggattgcccccacggaccttctccacgaacgcttccaattgccaccgatacgtgctccggccgctcttccctcctttcccaccaacactcacttcatgggaaccccagacgggacctcccgcatactgccgatacgtactaactctccccgtcagtttctccttgacactgatatagtggtaaagatgcggcatcattgcgttgtagaagtagataattgccttctccgtctcaacctcgatgctcgggtattcccagaaccgtgggatgatacctagcgtccaggaccgcgccatgtccgtatagatctggctctggacgtcgccgccgccgacattggacgaggcttcgaaggtgagatatgcgtacatggcctcgtcgacgcggggatcatggttgtatggcttcatagctacgctgtggatatgctttgggtgagatgtttccagtgcgtaccgcgtaaatgacagcgcataggtcatgtccattgctgatccaccagctagatcatattgccatcggatatcgccttctggcacacctggtgatgcagtcatgagcgccttggtgcgcagaacccgtccatactctcctgattcgaggagagcgcggaatcggtgtgcggcagggtggaattgccaatggaactaagcaatctaatcagtcgttattctatcaaaaagcgaacggggaaggatatcatagtaccgcctcctcaacaactacccccttctcctttgccagttcgacaactttcctcgcctcctcgccattactcataaacggcttctcacagaggacatgcttgcctgcgttgattgctttcgtggtccactcgaagtgctgcccgtttggcgtagagatgtaaaccacgtcgatctcgggatcgtccaaaagagcttggtacgacccataagcctgcttaaagtggtatttcttcgcctgggactgtgaagtgctttggttgcgagaggcgatgccgtacagtgttatgtgcgggtgcgtttcgacggggtgaattactagcatttgttagttcatcacagcagagtgaaagcggagggagggacgattactggctgccgcattgatctgagcagacgacaagacgcctagtttgagggcgtcggcggacttcctgggctgggagtagaggaaggagttgagatactggtgggcaaaggttgcggtttggaggacgagggccatttttttctctcctcggttgggattttctccaatctgtgtatacgagtacggttgctgtacctaagtacgacgaaatctgtccctagcagaaatcaatctgtttttcgagctggacgttaacgttggtgctaacgtgatgccattcaaaaacatacgacttaaatatacggcacaaacgttggtacggtcgcccagacatgttcaacactgagggaccgcgagtctagtttgacgtcaagcttggtaagtcccgcttactatccctgcgctcagccaaacgtgatgatgtggtaatggtgggtacaagataagtcctccctccgggacacccaagcctctctacttgggtgctgtggatcgattactgggtcaagactaactacgcatgctccagattccgagcagagccccgggggtttatgcaaatgtgtacaattgcttattctattactggaccctcaatagtttcgtatcatacaaagagcacgtgctcagttttgcggcctctgcggcgaaaccgtccccttgaatttggccgactctgtctcgccttcgcccgttatactcttgccgggctcgttgatatatgggttgctcgtatccttgttgctcagaccttcctgcttcgacgacatgctgttccctccagcaggagcctttcggctcgctggctggtccttctcagagggggttgggtgggtatctccgcgacccgcgaagagataatacgcggcagggatgccgagggcggcggtaatgatcatcctagatagtgtaaatgcaagagttggtatgatgcgggcagtgctggtacataccatgtcgagttgttgccgccctgttgcggcgcaggctctgaggcgtatgtacggcgggtgacttgggggcgtgtggtcttgatagcccgcgagaggcggaggggggtgcgtgtaaaggacattgtgcgatgagtgattcaaaaatggtcaaggagtattaggcgttaattgaagtgaagagtttgtatataaagctcaattgatgttcagaatttttctttagtcttgtcaagagaaaaaataagtgttgagagacggggaacagtatatagctctagctatggcatgaccaggaatgatgtcatagttggagcggtcatgatgtatgcgcagagtatcgagttctccacacattcaatattacgaggattagtaacagatgcagaatatgctcgtgaaacattattcagtaattcaatatcccaataagtacaattcatttattcctgcggcatctcgcccaatttctcttgcgcctgctttttcccctgcttcgagatggagtcgttatgcatcgccctgcacaatcagtcagacaccgcgaatagaaatagtatagattaaagcaatgaaacatacgctttgtagcccccggctacgcggtttggggacttgttgcgagcgccctgggctgtcaaaatgtcttcatgaggctggtcgccgccaagctcgttgtctaggaccgattgagcgtgctccttggcttcgttagagacgcggggattatttagggtgctgatcgtgctcggtcagcatggtctgattattttgacagagctaggagcaagcttacgccttgtagcctctcatctggttgatccgctcgtcggccattttgtaatgtactaaaaagtggtgctaaatatagagatggtttggtatttggtactgtataaattgagtgtatggcgttgcatatattatctatttttccattaaggacggcggttatatacaattgaccttgccggttactgtacgcttgaggcttctacgtcgtcatgcagtcagtttcacgtcagttccatacttttattgtggactgcaaacacctcgaactcccagcgctgtccctagtgcggcgtactgtcaagggtttagagtggcaccacgcaatgctgcgtgacgtcatccccgcatcatctccgcaccgagaacatcgctcacgttgacaggtcaggacaagaatattctaggttgacaggataacgggcatgataacagatacgataatggtgaagaataatctgagtccctgacatcaatcagtctgctttccacgtaacattattatatgacctggcaacaaccggcgtaaggagatcttccagaaccagccaacctgacaaagtgacactcataacctctgaagacgacagttcaaatcacaaattcaaatcatagcttaaatcccgtagtctgatcgtcctctctctcacctgaccgattatctccaagctataccgtctcatacccacacttccaaaaaccgaagctgaagatggctgacaagaagcgccagcatgcttattatctctaaccggctccccctctcacttcaaaaggtggacggcaagtacgagtcaacgctctccagtggcggcctcgtcaccgcactctcaggcgttagcaagtctaccaacgtgcactggttcgactggccgggctcgaacatcgaggatcccgaggagcgcaagaccgccaacgaggcattggccgagaacaacgcggttgggatctttttagatgaagcgctggcacacagccattataatgtgttttcaagtgtgttttctccctcacactcctccagttctggggaaatgagcagaaatgttaacctgtctagacgggatcgcctggccgatcctccactaccaatccggtgtcgacttcaacgaggacgcatggaaatcatacaagaaagtcaacgaaatcttcgccgactctgtcgccgagtcggcgtccgatggcgatttgatctggatacatgattatcacctccttttgcttccagcgtacttgcgcgaccggctcgagaagcagggcaaaaagtgccccatcggattcacgctgcacacgccgttcccagcagaggacttctggcgcgcgctgccagtgcagaaggagttgctagctggtgtgctagcctgcgacctcatcggcttccacacggacgagtataagcggaattttatcgagtgctgttcgcgcgggttggacgtcagcgtcaaggatgacagtattgtttaccagggccacacagcgcgtacgggcacgttcgtcgtcggcgtcgacccggccaagttcacggatgggctgcagactaccgaggtgaagaaccgcatcaaggaacttgaggatgagtacaagcataagaccgtgatcctgggcgtggatcgactcgattacacgaaaggccttgtgcagaagctgcagggatacgactacttcctacggcagcacccagagctcaagaacaaggtgaggctcatccaggtggccattccgagccgcgaggatgtaaaagaataccaggagttggagagggagctgagtatgcttgtgggcaagattaatggagaacactgtacgtaccgaacctttcctttccctcagaccgtccttcgctgcttgccggagatggtgtactgacagtgatagcgacgcccgacggcaccccaattatctacctgcaccactccgtccccttcactgacctgacggcactctaccgcatcgcggacatctgcctcatcacctctcgacgcgacgggatgaacctggtcgcagcggaatacgttgcctgccagaaagaccggtttggcgtcctcgtgctgtcggaacttgcaggcgcggcctccttcatgagcaagggaagcatcaccttcaacncgtctagtgcgcagcagcttgcagacgcggttacaaggagcgacat

SEQ ID NO: 939 - DNA, 1441 bp, Emericella nidulans
ccagtcggctctccagacgcgggcacattctggcgagtcgtcgccgagcataaggtgaatgtcctgttcaccgcgcccacggcgctcgcgccatctgcatagaagactcagcagctaatcacttgagagagtcgctggggacaataacctccggcacttgcgagccctcttcctcgcaggagaacgcagcgagcccagcattgtgcgcgcgtaccaagaccttctaaccaagcatgccgctcggggggccctagtcgtagacaattggtggtcgtccgagtctgggtctccaatctcgggattggcgttacggagcgccgtgggacgagtaccgccacgatcagacgagtacgatgttgcgcctctggcgatccgaccagggtcggctggtttaccgatgccgggcttcgatgtgcgggttgtagatgacgagggcaatgaagtcgcgcagggaacgatggggaacatcgtcatggcgacgccgctggcgcccacggcgttcacgcgcctcttcaacgacgacgagagattctataagggctacctcaaacggtttggcggacgttggttagataccggggatgcaggcatgatcgatcaagatgggtacatccatgtaatgtcgcggtctgacgatatcatcaatgtcgcggcgcatagattcagcacaggtattcaccccagcttcaaccgacttcaatataccacagggactaacaggtcaaggctcgatcgaacaagcaatcctctcgcacccggcaatcggcgaagccagcgttgtcggcatccctgacgcactcaaaggccatctccctttcgcattcataacgttaaagcaaagtgggggtaacagccctgcgcgcccgagtgctgaactcttcaactcagtcaaccgtcttgtgcgcgagcagatcggcgccattgcgtcgctgggcgggatgatccagggtcagggaatgattccgaagacgaggagcgggaaaacgctcaggcgggtgttgcgggagctggtggagaatggagcgcgaggggagttcgagaaagaggttgcggtgccgccgacggtggaggatcggggggttgtggaggttgcgagagagaaggttagggagtattttgaatcccagagtggaagccccaaggcgaagctctaaatgtctagactactatatacaagcttcaaactcgtagaccgatcgactgttatctagaagaaatgacttttcctttacttcagtggtggtagtagcgtcagacattaatgtacccagatagcttatacacaatgaaacaaacagccaagtcaagagaggtcatgaagtacaagaaataggtatgtaagtataagcaattcgaagataaagaagtaaggtatctgtcgtattcatcgaccaaacgaatcaatcgggcaaactcaaaacactcgccaaatcaaccgcaa

SEQ ID NO: 940 - DNA, 7585 bp, Emericella nidulans
cagttagcggaggattcagtttgggtcatgatcgaagcagtcttaccatctcgagccactgcttcatgggagcagcacgcttgaggtacttagcggtggtgtcgatgttgtagtcgacaggctcctcagacagatcaatcatgtgggaagagaagaggggctcgccgtgctgcttgaagtaagcctcgtcggcgtcgaggagaccatcgagccaggggaggagcttcttggcgcagtggtcggtgtggagaacgacggggatgccgtagctgggggcaatgctgcggatgtagtgagcagcggcgataccaccggcaatggaagcggcctggccatcgttgctaacgccctacgcgagttagatcggactcggttcccagaagtttttaaaacataccttgccggcgaagaaagcagcaccaccctgggaaacctggaggataacggggcagttctggtcgcgagcagcctcgagacaggcaacgacggtggaagaggaggtgacgttctgtactgtggtcagaatcaagatatctaagcaattgggcgatcaagaacacgtacaatggcggggatagcgaagttgtgctcctgagcgtactcgaagagacggagaacgtcatcaccgacgatgacaccggtcttgcgggacagcttctcgaggacacccattgtgaattagaaggtagtgggaagtgattaggaagtggtttgaatgtagttgtgagagatggaagaaaagaggaagaagaaaggaggctggaaaggagttagaaataagaaagtctgagctccaggcctttaccgaacgacgaatacggcggttaagtaaggaatgaggggcaaagaactcaccgggcagtggggaaatgatgtatgagtgatgttacgactaatactggcacgatgtgaaaggaacagaatcaaagtccagaggggatggaggccttattaatatgtgccattgacccgactcccctcctgttttcgtctctgcccgctccgttctcgacggttctcgtgcttgttcttccaagttggctgccgatccagctgttgctctggtggggtttgctgggcgactatgacgctttccgttgcctcaggccagagctcccgaaactccccgccatcacatgacatcatgcacccgccgtgtcaacgacagtccaaactacaaacacttcgcactgaaggcagactatgatcttctctgttagaaacgcatcaggagcttcccgagttctacgttggtggatgtctcgctatcagttctgggtcgttgccgagcaagacatggtacgaagagctcggctgagctctaaaacgttaacccattccgtttttctttcgtgcttcgtcggaaaaatagcggggtcatctttccgccattcatgcgtttcggagcacagctggtgctaaacacgttgcagatatcggagttggctgagattattcacagcccctgggaaggcaggaatcccaggtcgatatcagagcgttcgatggcggcttttaattgatatagctccgataaccggctgtccgtttgtcgtagatcggagagaacgccttgttccacggcccagtgtccgctcagtttgagcatcggtcatgtgttcattatagtgggtaggaaaaatgggctggatcgatgagctaacctcaaacgaagtccactactgaggttatgtctcctgcatgactactctgacctcggtctatgtcaacggagttgactcagtcaaatctgcaggagaggatccccgcccaatctggggtaccagatcaagcatttgcactgccgtcaaggcaacatatcatggcaatcacctagggtcagcagcagggaactgagatcccagccgccgtcttaaccggctctccgtccgaactctgctataagagccatacaatggtgacacataggtgttcggcgtccttccggcatcctataaaccttccttggatcctatcaaattgggtcttctacctgatcgattgatatcttctgctacgcaaagtatatacaccattgctcctcttatccattgaaatacagagcatgccagaaataacggagacggacgatgactcaggtatattagcggatcaatactctccatcccagtacggctttgaacattccggctgtcgattatcagtcaaagcaatttgaagcccctactatcatgtcccatgtgctactctgttcgccgacctggacgtttcagtcatcagatcttcagacctcgtcgggcaaataggtgacttgatctggcaaatgaatgaatctaagagaaccatagagtcccgtaaagcatttccttcaaccactccacatattatgattttgttggttgtaataataacaatgttggcgatgacgcaaaccgggacaatagtctcacaatactggcatcaccttggaccaacctggcggctcttgcgtgagatcagctatgcctacagttatgcagacgtctattgatgaccttgatgctgagctttgtgattccggccattggccgttctgtccgagattgactataacattggcctcgataagcttgcccattcacagagactggtctggatttagcagatcttggtacatcctcggatacgggactcactatgtcaatgtctaggacggcgatgaccacgactattcgtaatgaagcaatatgctgccctacaaatggccggacgcggcttagacagatacaactgcatgtaaagcgcgttcagtgcttgctcctcgaggggcttctacagcttcttacaaagatcttcccacaaaatgttgcccgatatgtgagacaagcctgtctaactggtgattcttcatgcttgtgctatgcgctctacgtacttcaccaaaatcacaacgtaccacgagagatatgttcgagaccgacacggctgcgtgtaaattagcggtttcggcttcgtgtgtgctttggttcgttcctgttacgagagttaggctcttgttagaggcttagaatatgtgtgcacttaaaggaagtccaggcaatttaatttctatgcttcatggtagcgttttccttattttcctaggttgttttaagagctaaatagccactagctacgaaagcaggacgaaagttgagttgtacccaatctcggtgtacagtacaggtagattggaagagatcaaatatatttagtgacgtcgtaactgctgcgagtgactgaaggcagcactgcgttacatgtagcagaagtgttcttttctcacggtttcttaaacccatttccctctgcaagatttctgcaaggttctccgactcttattcgtttctttatacatcatggactaggccctatggcataaagccgattggatgttttatcggagcctattaccaatcattcctgatataatatatttaacaagatatacattaagaggtatttctgttaatatacgatatccatatatacaggcgtctagtctatcaatacagctccttaatatgaacaaacaagccagaccgacctaaaacaccagccatatgcaattatatacagcgaatttgccaacttgttccaacccacttaaagcctaatcagactgaacaagcaggattgtgaagaagcgtcccgcggcagcctctacaaccctgaggccctccattggaatctccatcgggtcattgatggggtgtttagtctcgtccggatgaatttcgtagtgatcattcgacccccaaccaagcgctttcccgccgttagtaacggcaatcgtatgtgtccaacccgcagaaaccatcttgatccctttatcatgggcattgatgcctgggacaaacgttggcactttcatgatggccggtatctgtgtaccttcatcacgaccagctactttgttgaagtcgggttcatcagacatagcggtgtcaggaatacttcgtacgccatcttgaaaagatccccagctcagacactgcccgccggccgtaagagcaacactgaaatcgacgccgccggtgggaaaatggactcgctgccctcttaggctagccacagtactgggtttgtcgacctttaagtcgcgtctcagcacagatgctgctgggggcacgaacgccgtctgagcgaacttgttataaccccatgcaaggaaatcaccgctttccttaatcacgaaggagtggaatttgcctgagccgatagtgcttacgttgtcgggatttttcagcgcgcgggagctgtttccagggaagtcacaaaggagggggttgaggcagttggcgatattggcagctgtgcgcccgagttggcctcttttgtaggcaccccaggacctgaccacgtctctgactttggtgcgctgccagtggaagagcccttcagcagctattgtgtccttgcgttttcggaccctcgatcctttcattttagacgctgagctactagctctattgccgccaataagtatggagatttgggcgagaacgtgatcagagcccgcggcgagacgtttgacattctggagttcctgtatatgcaatggggtgcgttggcatttgcactgatggcggaagccgagtggctcacaatgttgttcgccgttctcatcctcgtaaatctcctgtaagagtcagttgatcagccttatgcatatcttatgtagacgctgtcgccgtaccgagaaagttccccagccataaacatcaccgaacatcgtaaggacgaaacatgcgctccttgttgcaacgacctgtgcaaatattgtgtaatcgggtaaattgacttcactaaaatccacctcccctggcatctgagctgtcatggagttcgtaagccttcccagctggccatggctattatctccccaggtgtagattttgttgtcgtgagtgagagcaatgcagtgctcgccaccagccgctacctgtaccacatccggtagctgtgtgttcttggtaggctgcttgtactgaaccggagtaccattgcccataccgagctggccgtttccgttttctccgagcacatatactgagcacttcctggaagggacgctgttctccactaaggaagttgctgtaggagatggccgtcagctttttccaaacgcagtaagtgggaatggatggaaggatagggattacatacaagcatatctgttgaaaccagacgcagctggagtgcctggttttgccctctttgcattcgttccagcatctgatggacttgctgctctcttttcacccaatccaggtgcgcctacctctgtatttgagaaccaatagtgcggttcctaagcacccttttttgtgcagttagagcattggacgaagaaggagacttgcgtttcctgccgcctgagcctcttgagggccttttttgggcatcataaccgccgccgtaattattcctgtcatcgtcgctgaagtcatcttcctctcctgcctcattcacatactccccgtcctccacttgacctcttttcctccgacgcttagatgctctgggtccagagttagataaagacgcatcgggaactgtcaggttcccaaatttaccataagctatacgactcctaggtcgggtaaccgccggccgagacggagttggagggggtggaggggcaattgaccaacgagatgtcgaagctacagctgtagggcgactctcagcagagtctaacggggttgaaggatcaggagagatcgttgaatttccaggaaccggtagttcaggatcctctttaggggttggagggtcaggagacacttcaggagtatgattcccgaatgctagaagaattggagtttcaggaaactctaccggagtcggtggatcaggagatactgttaattctcgggaaatcggtatttcgagatcctctctcggagttggaggatcaggagaaacctctggagtttgacctctaaaatccagaactaccggactctcaggatactctaccggagtcggagggtctggagacatttccgggaatctatctgatgtgaggattaaagcaaggtacttgactcagggcttgcttacctgtcccgatcattatctctctcctgggaatatccaagggagttatcagggccgccaccagcagaactaccgccctcaggataaccctctccaagtataccaccaggaccaccctccagacgatcagtcgtaactccgtcttgtcgtttctcacgttcttccccaacatcctcctcagtatcctcggtggtaggttcctggatgctgtatgaccctagaagatccgtagtaacagggaaatgcgagaacgcgcccctcaacagatcgccggcgccccgtaactttgaatgatgcgtagtaaaaaggggcttagaatacacatgtttgagccgctccgttggctatcattgccattgttgccgtttttcttacccctattggctttgccccaggcgatatctcccttattgctacggctgccgttatagcgttttgtccccggacgacggccggatggttttgttggaccgctggctctggccgtagcgctatctgagcgtctgtttaaccggtcattgttggcactagtgcagtgtctattaggatcagtagggattctagggaggcgagtattaggactgcaggggaaatacaacccgtcagagctattagggcggtcgtggtcatggtcgtggtcgacctcgatagacggaatcagccggtctgcgtcgtgaaacagtaatgctgtgtcgtttccttgagcgctgagcggctgttcgttttcatctccccagactggcgcaaacctggagttaacactttacctcagcgcagcagagaagcaatcactcaccttgtagagcctggtcctgtagaggcctagatagaccataaacagtcggcagcggcataattgacggccccggggcttctataagaaatctatcaaaggcgtttgggatcctggagttcagcatgttgaactctggtggtccattaactcccgctgtccttatatgtcggtcccccaccttttcttcttgctcttcttgtcctcctcgatcttcatctgctcccccgtcttcatcatctcgcggcactacaagcggttggtccagaccgttcgatagtgaaattggcgcacaatccgaagaagcagcgtctgccaaaggttggtactcttcatgttttgtttgctttggcgggtttgaggtgtatactggcaatgtcgctgaccacctgcagttagcaacagatccgcttggactgggaaggcccacacctgcagatcgaagtccaccatcagacgataaccagctagatttggggttcgcaagtgaagggcttgcaattgggacctcgccgtcctcaatttccaggagtgggatgtctagactgtagaaatgggaagttgtggtttttggcagctgacctgccgtattcgactcggcagaggctcgcttctctcccgcctcacccgcttcgtcttcgtcatcttctgttcctctttctattccagtctcgtcaacttccaattcttctgctaccgtgctctccgtgtaatatcccattcatggggctgcaaaattccaggcag

SEQ ID NO: 941 - DNA, 3757 bp, Emericella nidulans
tggtagaacaacgtatgacctattttcaccaacgaccaagctgttggtgaaaccaactgcttctgcagtccgtactcggtgtacattctttcgtaagccacttggttcgcgtgccacctgctgtctatatttgtccactgatcgtcaacagtttcgctggcttcaagcccaaagtatctgcagatagagggccacttggcactccacgacccaggcatgtctgtgtctgctatattgaatacttcgccgtgtgactcgtccgacttgacaagggaaaggtatagcttaacccttcagtggctcgcgaatcgaacactttacgatgtagcctcgaagatattgtgatgggctcaagttaaatggaacgaatttgccatctcaagccccttttgcgctgtaagggacaaaatgccggaagagcaaggggctagagaaacccaaggaggtaggattctgcacttttacggatatacctacagagacagcacgcacatgtccactgttaggttttgatcggccagaaatcaatcgactattgtcaggttaacatttcagtctaaaaaagcatcatcagtccaccagcagttaattttacattagagccatgtcaatccgagaaagactgcttgcaactgtttcgaaatacattgccgcgtacaacgagttcgatccaagtgctatgaagaccgttcgcacaccaacctgccttactcatggagttgcaccgacctgcaagtttactcagagtatggaggaacacacgagacatatgatgttatcgcgaggagtgtttcgatcagtcaatgccagcattgtggacgacaacattacggttgttgatgaggtgtcaagacaagttgtcgtgaaggtgaaaatcaggtgtgaaacgacggttggaccctacgagaacgaagcaatgtttataatggctatgaatgaggagggagctctggtggatgagatctttcagttcttggacacagcccgttttcgccagttccagggacgcctcgaggaggctcaataatctaggaattgatgataaatgggcaattatgaaatgtattgtgctcggagagaaacactgatattgtctgcacgcctttccaaaataagtcttagcaagattccaaagtctatgatcaaatcattccaattacagacagctgctatgagggaagggtgtttagtcccagatagtcaagttgtcttgccttcgcctgactgagatcctcaaagttgagtcgggaaatagaaagtttcccgaagaaatcactgtagaaatttcctcatcagggattttcacatcatactttaacagaatatgacatagtatgattttgattttcgtggctgcaaagaatcggcctgggcatgaatgctttcccagtccgaaccccatgtgatctggtgtgggcgaaacgagatgtgctgcgtgatcgcccgagtcgcgacgacgtacaaatctataggggtcccattctagcgggttgggatagacagctgggtcccatattcgtgtattgacgacgttaattgtctcgccctttgagatcacagttccgtcatgtaatgttatctgttcagtaacgtagcgacccataccgactgtgttgcggtgacattagggttagctcaacatgattcataaatgaagcaacgacacctacaaacaacgacaggtttgacacgctgtgtttccttcaggacgctgtccaaaagtttaaggttgtacatggcagacttctcccatccatctgcccgcagaaccctgaccatctcctcccgaagatcttcttggagtttctgcgaatcgcggaaacgacagatatcagtcagagtcttaattatgaggtcggatgtagtatcaattgccgctgcagcgagggaaagctgtgccagcacggggttgtatttccgatcacctgcaatttcttcaagccaatctagaaagttctgcttgttttgatgcgcagagtatccctctgaaagtatggggtagagcattagtgccgcttctcggatatggcgtcgtagtttaccgcaagaaggcaggaaatacgtagcaatgggacgcagagcctctggccacttgcaaagatctagatccgccacgaacatatcagagctgtagttggtgacaatgctaagccatttctgatcacggccgagttcctcgccgacgaacatgactgccgacactcgagagacaagcgaggctatggtgaaatttagatctaactcatgccaacctgggaacaccagattagtgtggcaccttgcaagactgcatggtcacgtacaattactattcccccattgtgattcgagaatcagtgcagtttcagcagagatgggtttcatcaaggccccttgaaggccaaaaaacgtaagctagtaacccttatagacagctggctcttaccgatggacctggtcagtctaagccggatagcatctttcattacttgctgtggccgcaagacctcaaagcctgatacgtgagcgtggaactcctttgctataaagacatccgcattgcaggccggatggcttttaacctcattggcatattcgggcccaaggattatcttgggccctttttgagaaaccacgcgaaatacacgcgcctgcggtttattttagtctccaacccagaatcaaacaattacacacgtaacaactgaccatctgaagcccattcaagataatgccccgtccatcgacagaaaagcgccgccttgcctggtactgtcctatctcaaaccgcctgcgtccgttcacggttgggatatcgcatttagctggtgccagcagcttaaatatcacaaagacagcagacatcatccacatgatatagaggccgagttcatggttaggtagagttgagaaggggtgcattgcgctatcgatgggaagtcgcaacatggtcgcgcgtgatgtttcaacaagctctcgtccgacgaactaagatgtgtcgagtatgttctatacagactcgccaagtaacaaggcgattttctgtccaagctggcctttaccactcgtgctacgtggaccgctgcccctacatacttgaagcatgggcttgggaggaccgagggcagagatgttgaaaataatcattcctcaactttcgtgttttgcaactcattgggcatagctgcagctacggaggaatgtgtgaaagttggacaggaactcttccttgaactaggttcgggacgaggttctcttacatagtctgtctatcagtcaacccgaccaacttggacacccatcctccgaccatcaagatttgttgaaaataaatccctatttgatcgcccatcaaatgccaccctcccctgatttcgaagccttctcattgacccctatcgatcaggcgaatggccaagtttttttcttctataacatatcgtatcgggtgcggaatgaagcttctgcccttcaaaccatccataacgctatcgatgtccttcttgaaaaggtgccgtttttgaacggggagatcgcgtttcctgccccagttcctgacgcgaacaatgtccttatagtccgaccacccagggccaagtctgaagatcaagttccactggtccaggtaaagcgccattccaattgtgccctgccggtcaagaaactagaacagtctccatttaacgtaccatcgagtcttcccgttaatggtctcttcaatccactcgccgcatacccaactcctaatcgaccaacacctgtcattcgttttcagatt

SEQ ID NO: 942 - DNA, 5437 bp, Emericella nidulans
tggatcatgggcaaggatgacatggtacgttttctgacaccgattgataaggccgacggtactaatcctagtagacgctcagcttcgacgctttccaggtgattctactttttgtctcggtgctcttggtaaactatctcatcgccgatgggaagtcgcattggcttgagggtgttttgttaatgatgatgtacatcattatttcggtcgccgcctggtaagtgcagtcccatttcagtccgattctgtctaacgttattgtgcaggttctatggatgagacagccgctcgtttctgatatatcatatcaccggctcggccatttacttcatgcatatacaattgatacctcttatcactcctaatattatatgtttaccttcttttctctctcgagtacctagaccctagtctccgggctgtcaaccgaatgacatatgtcagcatgttcgagtggagctgacggggttagtgttacctcgtcctggagctcgaaccatcgggtaaatattcaggacccggacggagggaatgccgcattgctttagttctagcacccacggaacaaactcggtcctctaccttcgttctcgctttcgctacatgaatcattctagacgaggtggcggtggtcggccaacctagcgtccagctccggctttttattatttccttatgaagtcgattgaaaatccgcgaatcaaatcccgagtcgaatgggatggctcgggcggcaaatgaaagactcgagcctcgacgcaacaaactagcgctagactgctcaagacggaatttccggggttcgttggatggaatttggagaaagctctcaagctccgttccagctccagtccgtttctggcatcccgtcggccctgctctccgtcccggcattatcaggcaaaatccagggggacaccggtgctgatgttggatgggataccctccaatgagtgtgacgggtttaaagcttgctaagtctgagccgtagttgcacgtatttcagccgcctccgtacgcgggtttctcaagaggatatctcctccgtagattacctaggtaaatggctatcgccgagcgtcaaaccccgtgacttggcgctttccctacactggtaggtccttattacctagacccagggccgtagaactccgtaggtacccatatgccggggccccggtccaggtgggtagttggtcactggccagcccactacaccctccccggtggctgggaccagtcagcctcgacacgagcatcaccatcaacatcagcaacttccccatcttcgcatccgcgtcaacaccacatgaagaggctcgattcagattcgcttactttacgtgtcacctgaagaactacgcccgtgctcatggcgccgcgttgctttatctgacaaccccattctgacacctaaccttgatccccccgtcgccggttggacgacctgtcatgcctgcgactgcaaacctactactagccaacctaaagcataccccgcctcaagcttataggccagaaattccggggtgacgggtcgggtgaccactgagcgtcgccgggtcgtgatgtacgaggcctaagtggtaggtggccagtaccgtggatggccgtgaagagggactcgtcagatccccatgcccttgatctcccgaggccattctgcggctggctgggcggtcggtacgcaccgtactccgtcgtctcgtggttctgctgggattgtcatcctggagcataacagggcctactaagagtccaaggaggtccaagaacgcatgcacgaaacctcgggatgcaggggcacgtagcctcgcaccctttaccggaatcacattctcttcggctggtctggtcggaagttgaaagtacagccggcgcgtccaggactgcccaatacggttgtaccaggattgtgccgcacggcagatctcttactacaggtggtatatttatttacgcgactgtgccagtgccactggcacagtctggccagtcctggccagtccctaccaggactgggctctgtgctctgtgctatgccggcacggctacctacagttgccgacgagaatgctgtcttacctgtcgtcagttcccaatcccttcattcctgcccttgactccgtctggctccccaccacacgcgcggccccaggatttcgagccagaaatcgaccagggcaagaatctgagccagcggttatatttaccccgttcagcatcggcgaatctccggaaaagcccgggcggctgtctccattttctccatttttcccacggaggtatctggcgagtgtaacggttgacgggtttgcacggagctggcgcggtgatgttacctgagtgtgggaaatcgggtacactgatccctgcggctgtcctatcgcagcgcagcaataagactctgcctcaagccagatggccgctgagacttgcggggtgcctcgggaccggttaaatgcgcggggaacttccgttgccggcctgctggcaattccgatcagtcggtcacgctcggcttgtgggtaagctttgtctggagtcatgggacctgaggtttcttccagcgcttggcggatgtttcattatttgcataattctcgcttggatcagttattttaatggcttgttcagtgtatccagtttagattgagtgttgagtccactattaaataaatcgttatatcagtattaatcaatatttaatccagtcaattcaatgataaattctgcgttaattcagcgtcaattcagggctaaatgacggtgaccagtcccttattacctttaccttattaccgtttaccagtcttaagtcggccgcggtcgggaaccaatcctggccagctgccttctgcccgctacggggtcttgccggctctggctgcgaatgcctgagtgcctgattctttttatgccggatgttatgcctgaggccgtccgatcatcttccccgcggggagtctgcatgacctccacagcagtcggtgtatggggtctggctagtcttaagagtgctgactattagggttgatgtacttttttttccctgcaactgaaagatgatcgctgagatttcattatcccacatggatttcatttcataacgagattatagtatctgtcggagtcgcacttggcccagttatgtaatgggtcaagtgacgttccacacgggctgctgctaaccggcttcggtccgtgtcggcgctctttatacagtgccagggcggcccctcgtggcagaatgctggctgaacgctgctgagacggctcgtcgtcgtgttgaccggccgctggacatgtccagtagtcctaccgacaacgtcggctggtgtctggccatttcactctctttcagagtgcgcgccggaagacaggaagcagaaatcacattctcggcactcggaaaggggctccaccttggggcctgcacgctccggccgctcggtctggcttcgcctgtgctcgactggctcgtcgtccagtcgtcctcgttagttcatctccggactctctctgtcgggcctctccgcaatttctccagcctgcccaggctttagtccactgcttccatcagccattttcgcttccgttcgttctttattattcgccctcccctacccttcttcgtctcgctcttctcttccccctctcttttgcgtcgtccccccccccgtcccttactccagacgcgtgcctgactggagcccccgacgctgggcctcgactgactcgcctcccccacactccgcgctcaacttccacactaggtattccaccccatcgatttcttagcttcttagcccatttcccatcccaattgtcaattcgtattttctatttttcattttcgattcctattctttttcctatcccaatttgcatttccataccccgtcttcaattgactgccgttccccggctgcgtttccttcaccggttttgcttcaccggactgggtggtttcccgcgtcgcttttcgtggtcgtttttcgtggtctcttttcgttgtttgctttcgatccctgccctcctgctgtccttgtgcacggctcgggttaggagacggaaaaagcaacgggccagcaaacccacaacgccgtcgatgaatgtttcgttcgttctgctgaattccgttgacgtcgtactgaccgaccgtcgaacagtccgtggcccggccttgaaagacctggaagggcttggaacttcgcgttgaaattcgcgttgaaattcaggttgaatacatttcctgcgttgccctgcccggtgcaatcccccattcctgccacccagaccagcccgaccagaccagaccgtccgactcgctcgcaccggcggaatcccgggaattttgtcggagaaatacagtgcatactggaagcgcagcggcctgctagggagtcaaaggagccacccgcgttgcgaccgctgtcgccggccctgcactctcccgtcgtcccggccgtctatcgtgctcgcttgccgtcctgccgtctcgcttttgctgtgtccttgcctctacgtttctgggtgagacgggcccgtcccgtctgagcaaccgtctaaaatcatgcggtcaagcatcgcctgcgcgcgctgccgccgaagtaaaatcaagtgcgttaactccgggatcgacactacctgtcgcgcctgcgagtcttccggtcgagaatgtgtttatccgacgcctgctatcggcgtcggcggtgccaaacgagatcttgccgccctcgccgatggcgaggaccgcaatggcgattgggacagccccaagcgccagcgtcccgcaaggccgtcgggccctcgtccgcggccaaggatgcttccagggcctctctcgatgccctggactcgtccatcttgaccctcaaggtctgggaggctgtcctcgatcttttccagtcgcactatgcgactcttctccccttcctccatcccgcgtctttcatgagccagattaggcagctttctgggagccagtcttcaccatcggcgcctacaaatgcatccatctctaatccccaagaccctcctcgagatcaggcgccgaagccgtcggcgcctcctgacccgctgatccctctcggcgttctcgctcttactgcccgtttccaccctcaactcgtcgcctaccattcacccgcctcaccagggcacccaacaaatccgctcgctgcttcggagttctatgcgacggcgctgcgcagccgactagccggcgtagatggtgccagtctcgccgtgcccgaccttacccgggtccaggcgctgctcatgctcgccttgcatgaatggggcatgtgcgcggcaaaagtgcctggctgtatgttggaatggccattcgcctgtcccaagccatggggctgccgtttgagctggaaaacgacgtggtctctcgtgacgtaccgcgctcgccagccctgaaaat

SEQ ID NO: 943 - DNA, 3465 bp, Emericella nidulans
tatctgattgtggggcgtgttccctacggtaggtcgaagtatgaagcttatctatgttgtcgatgtaggacacaaattggtgatttgggctaacaaagccaccacaattcccgcagaagcggacaccgtcagactccgtttgcacgcgtgtagggagagcataatgagaaggtcgagataagagccaacatgcaggagaagcagtcgcacgacgccgataatggggagcggacggaattaagtaattccgatgatttgtttaggatggccttgaaaggtggtcatttcagatcagagcatcctctcctcatagcttggctgagggcgcatattctcttctcagtaatggcccggtgctgagactctttacttttattgtctgatttctttctgtctccatcccttctgttatggcggatcaacactactatcagtcccccgctccgggagtcgctcctggtgaagacccctccgatccgaatcgaattccccagcaaactccttatccaagccaataccctgctggatatactccgggccctcctccgccgcagaccactgcttactatggagctggcttccggcaatcagcaatggcccgcctccgcatacggatcccccccgcctgtaccacagcaacccgtgccagcttcgtcccagttcgcatacaataccagtccgcaaccggctttgggatcaccggctgacccgtcaatggctggcttgacgtcgcagatgagtgggttgggtataatgggagaaggagccgctcggagttcgaagaaaaagcaccgccatgcacaccacaacattggggcagcaccggcagtgcagcaactgccaaccggtccagaagacgctctgccacagccttcatcccagtttttaaataccgggctgaaccaagcccctcgcgctgtatccccggctctgagtgcttcaggaggtatcccgcaaccaacatttggagccgcacctgaagcagctcatgggacagttcctactcaaggaaggattgacccggagcagattccaagtataccacgatcacgcgatatcccggcgcaatactactttagtcatgtctatcctacaatggaacgccatttacctccacccgcggcagttccctttgtggctcacgaccagggtaactcgtctccgaaatatgcccgcctgactctaaataacatcccctcttcctccgacttcctttcgtctaccggacttcctctgggaatgatcctgcaaccgttggctcgcctcgaccccggggaacaaccgatccccgtactcgattttggagatgcgggccctcctcggtgccgccgctgccggacatatatcaacccattcatgtcattccgatcgggaggaaacaagtttgtttgcaatatgtgtactttccctaatgacgttcctcctgaatacttcgctccgatcgatgtttcaggggctcgtatcgaccggatgcaacgccccgagctcatgcagggaacagttgagttcctggtgcccaaggattactggaacaaggagcctgtcggtctccgtacgttgttcctgatcgatgtcagtcaggagtcgatcaagagggggttcctgaagggcgtgtgcaagggtattatgaaggctctttacgaagaagaaccatcagataacacagatgaaactacgccaacgcgcaagttacctgagggctcgaagattggaattgtcacttatgaccgggaaatacagttctacaacctgagtgtacgttcctatcctggataccacgtggagacgcgctgacagcgactaggcggaacttcaacaggcacagatgatggtgatgacggatctgcaagacccgttcgtccccctcagcgacggactgttcgtcgatccgtacgagtcaaagtaagatgtttacgttccctttcggattcacttgctaactctgcaaaggcatgttattacctctcttttagaccaagtcccaagtattttctcccgtgtcaaggtcccagagacggctcttttccctgccctaagcgcacgactttccgctttacaggctactggtggtaaaatcattggggccatcagcacgctaccaacctggggacctggggctctaacgcttcgcgatgatcctaaggcgcatgggacagatgcggaaaggaagctgttcacaacagacaatactgcctggcgggaaatcgcaggcaagttggccgaggctggtgttggtgttgacatgtttgtagcggcccctagtggaacatatatggacgttgctactattggtatgcactactttgccccgtcgatgaatgtgctaacctccataggccacgtgcctgaagtaacgggcggtgaaacgttcttctatcccaacttccacgcgcctagggatattcggaaactttctgaagaagtggcgcatgccgtttcgcgagaaaagggttatcaggcattgatgaaagtccgctgttccaatgggttgcaggtttcggcgtatcacgggaactttgtgcagcacacattcggcgcggatctcgaaatcggcgcaattgatgccgacaaagcgattgcagttcttttcagctatgacggcaagcttgacgcgaagctggatgcacacttccaagctgcgttactttatacgtcggcgaacggacagcgtcgggtacgttgtatcaacatagtggcggcggtcaacgatggcggactggagaccatgaagtttatcgaccaggatgccgtcgtgagcataatcgctaaagaaggtatgctttatcttttgttaaatggagctggtagctgacaggagtagccgctgccaagacgctggacaagaacctcaaggatatccgagcgagcattacagagaagactgtggatatctttagcggataccgtaaggtgttttctggatcgcatcctcctggccagcttgtattgccggagaatctcaaagagttctccatgttcatcctaggcctgatcaagtcacgggcctttaaaggtatagttcactaatgattcgagagaaatttgactaacttcttgtacaggcggccaggaatcatcagaccgacggatccacgacatccggatgctacggtcaataggctgtactgaattatcactgtacttgtacccaagaatcattcctatccataacatgcagccagaggacggattcccgaatgagcaaggccagctacaagttccgccttcccttcgggctagtttctccaagatcgaagaaggcggacgatatttggtcgacgacgggcaacagtgtcttctatggattcacgcacaagtatctcctaatcttttggaggacctcttcggtcccgggcagacatctttgcaagagctcagcccgcaaacttcgtccattccagtgctggagacacatctcaatgcgcaggtccgcaatctgcttcaatacttctctaccattcgagg

SEQ ID NO: 944 - DNA, 1599 bp, Emericella nidulans
atcttgtgccgtcgaggcccgtctggccctggattggagctgccgctcaacatagaaggccgagtgcagagcccattgcgtcatgggactctgtgatggacagccaatggtgagttgtgccctagggtacccactgtcgatcgttttcgtattagaagctccaggctcatgctgggatatgtaggaggtaagtacgacgatgtagtgcgtacacagtactctgagtatattttcgtcttctaccgactttctttccctctctctgagctggtttgaactggtctgagctgagagggcctgaatatttatcccgccttgctccacaaatcctcccccggatggcagctgtcttgagtgctgcagccacctcgctgtcttcaccagttctggcatggggccacgccgggtgctcgccgggccctcgtcgcagactcgcacgtcatgcgagaccagttggcggcgcgtaccgcctcactgcgaagaccgacgggttccttatgacggtgaaagacgcgcattcatcctacaggagccgagtgcatatcacttggagtagccttggagtaaccggggaagatcattccgtctcccgtaaatcaaatattagtcaatgcaggtttgctgcggttccgcgcggagcgatggcgtcccgccgggtctcaaggccttggtcactgttcatgttcatcaacgcactttccactatcgttggattctattcatgctttgcccgtcactcttcgatcctctatgtaacccttgacatccacgtgattttaatttttgattttttatttcccgtttgtgtctgcatccactcgggctgctatacacttccagactaggagtatacaaatacctcaacctggacagagcacccggtcgcccactacatgcaattaagcttatatttaagcattgacttcttcgggcgcttgtcacggtggcctccatacagaaacaagaaccactctgggtccactagccaggcagcagggttccgggagcaatgtcggacgctagtttcgcttaggatagggcgagtggcaaatctggtcgccaatcatgggcccggttcgcgtttagtctgaagtactgaaacgcgcaagagtcgagggacggaaacgggctctaggaccgttagataggctaccgtattccataggtagatagggagctgtttgggaatttagggtccctttgctgctcgtacccataatgtgctagcaggaacgtgtctattgctggtggtattgcgctgatcccaagggacaagtataggcaaccctccgggagtaggtacgagcaagtctctacggcaaagatgcaagccgacccaagcccgaatccttactgccagagaccagacactgctgacagcgggcattggtcctcagctggggaatggtattacctagcttggcacacctgagcataccgtaggccaatgaaacggtatgtcatctgcctagagtggcttgagagggcagctcgcagtggtctgatggcgaggtaacgcgggcaacatagttgaatcaggcctagtctggacccagagacgttttgcaaagacaggaaaagcaaagacggtgtagccat

SEQ ID NO: 945 - DNA, 1975 bp, Emericella nidulans
  unsure (1)..(1975): unsure at all n locations
acatatctcacgatcaagacccttccagcgaaaatcttgcccctgatgagtactggacgcttctggaggtgcatcagctggaaatgaggacgctgtcatccacgggtcattcgactctatatcatctgggaacgcgctgaacgggatagcactctgcgggaatgtgtgagaatgcgctgcaaatgtgcctgcgtgaaaagagccaacagaggtgtcaagctgcggtctcttaagggccctttcgctcgagttgtctttctcctctgccctctttctcccccgttttggtttccactgaggaacaagagctcgcaaggcgagatcctcctccaaaggaactccatcacggctatcgctgacaacagcgttgctggccggaagttgggtgtagtatgaatgcggatggccgaggcagtattcaaaaaatgcatccacgtgcatcgcgcgcatccaacgctagggaatgattagttactggaatcaaaatatgcgcgacgtccacatactttaagacgcactgcgtattgttgaaccttctgagtgctttgtttcttctccatatcgggcggctccacccctaactcaattgccagctggatccacgttttcaactctttgctatctagcttttttatcagctcccatagcgtaaatatgctaaagctcttcccgtcgctgcggggaggagacctaaaagtcttgcgtaactcggtcgaatcggcggagaggggcacgttggggttgcaaaagaagatgaaaaggacataggcatcgtcaatgttttcatccgtgatgtcgcgagaaggcagggaacggacctccgcccggtctatttgatcgcccatgggtttctggcgcgagttatcaaatactggaggagacatcgacggtcctgatcgcactgttggtcctggtggaatagccgagcgcgcgacagtaggcgacgattgtagactacggggagttgctttgcgctggaccgggggagacttggagatggccatctgggaactggcactgccaatggatgaggcgctctgcaatccaggctccagggaagcagggtacctggcatattgctggattaccatggcggtcccgcctaggtcattccgttcaggctgactggccatggttggataagcgccctgcatcgcgaacgacgatttcgcgacagacgagcaagctgtcggaaattgatagttgagggccgagcgtgtatatgcttcatagaatttaaatcagggcgcatgaggagcttcgggtagacgatctcgaaaatgatctacggcaaagcgctagtatcaggttgtggccgagtgctggcagccagggaccagcctggactaggcgcatgagatgatgatgttgggagatatatagacaagaacgaggatcatgcagatgacttaagttgtcaagttgatcatcacaaaggcccaaggggtagcagtccgccatggccctggacagcagatggggaagaggggaacggaagagggttgctgtatactgccggtttatctgcctgtgcgaaaggctacttgtactattaggcttgtgcttagagctattattattatcaaggctctgggcctcatatcttactaggccatccatgggcgtacaagcctactagcctggtcacttgtcttttctgcacttaccccttggttccttttcactttttgctgcggaaaggggatggttaccataccccggataatctcctttcgcccggttacttactgattcatccatttgctttccgaccttaacggaattgcactnnaaggtttgctttctcgttgtattttaatttactctttttattttgaacttttctttttgactgagttgacattactcttttttcttatttttatctatttctaaattgttctttatttaattgttttggttctgttccgtttgtttatctttttattatatccttatttttacttcatttttt

SEQ ID NO: 946 - DNA, 4486 bp, Emericella nidulans
gcgggtacggcaacccatgacgcctgcacagcaaggactcatgcacactgcctcgctgcttctggctcactgccggcagcagtggcggtacagctgacgtctgcgggagcgcaggtgccaggtgcaagacggttcagccgtgccttctcgatacggaaagaatggacctgttcacgtgaggtgtaaaactcgctagaatgccagaaatgagctggggacagcgggggcccgctgggggccatctagggagcagtctagatcaccgcatcgttcatcatgtgctcataaaaaatcaagtcacgagcgaacttcggagttctattgaacttacgtacttttggcgccccagcatggaagcgaaaaaagtgtgcagaacctgctgtatccgaaccacacatcatcgtgaaacgaggacggcaatgacttctgcccgcgttcatgcgtgcccagtggcgctggattggcaatcaatagatatctagattctgattggttgatgggcggttggcctcggaagaggttagtcatcggctcagtgggggcttggggggatcccgagccaaacccggtctttcgtcattcgggcctcctttttcgtgtctgcagactattgcagattgaatgaggcattattgattattggtattttggctgccagaatcaagtcagagttgtcgtggttctgtgttcatggtgattgcaagtcttgtgggaatgtactcagtgtagatagagttccgcgcgacgccgtttgcagatagcttcccagaggaccaagacgaccaagagttgatgcctgcctgcctggcctatccccgcaaattcgggagtttaggctcgtccactcagcggcggccttccaacgtggaacacatgggtcagttcaacgtcatcatgaacgtcctccaagttatccaagttcccttggcccgctgaacgtcgttgagcagtctgagaggcttaccatgcgatctggtcgccagagatggtgtcatcattggcactgttggccactgttgacacagtggccagtgagacccggcgggtgctggaccattgtcgtttgcagcggccgctcgtggtcctgccgcctcataaatcgaacaagttttcctcttctctcactcaatcatcctaacctccgctgaggcattttagctgcttagctgcattacggcgacacgcacgaaatactgtgtgctgcactaagccaacctctgataacactttaccccgatccttcattcttgttggttcagccgcttcgctcttccggaaccaattcgtgtccacatctggggttcgggtctattcgggctatcgcaactctgctcagtcgcctcaactcggccctttgccccgacatctcccgccagactgtggagaagcgtcggccgggacgaccaagaactgagtatacggctggatcatggctcctggtgcaaacatacatataccccctgctggcccccccgaaccaggacctctttactcagatttctaccaacagcaaatcgaaaggcaacggaacaataactatcattcgacatcgctaagaaacatggttgctacttctgtgaaccgtactgccctgcaccctggtggtgtccagtatgtcattctacctcgctgtcgtggcttcagtcgtccatggtactgacctcactgtctagacccggcaagggccacaccgaactcgaagaagaacttcatgaacacgcccacatcgactacgaccgcgttgctattgtaagctgaacacctcgaccatgcctcattgtcgtttagactttagtactaactagactagattgccaacccttctgtcgctgccctctatgaagacgctcttgtctacgagactggtactgctatcacatcaagcggtgctctcacagcctactctggcgccaaaactggtcgctctccttcagataagcgaatcgtgaaggaggagtcttcagagaaggaggtctggtggggacccgtcaacaagcctatgaccccggatgtaagtcaagctttctgttttatcccttgcctagccctttcttcgtccatcatgcacaagctgccgtcgactttccctccgagtggttacatttgttgataaatgcctcatgctctattgggttgaggcattttgaaattgtgctacctgaccaactagcctggtttgggtttgtcgttgtcgtgggtcgtctgtcgatctgcatgcaggtgccttgcagggctagtgtgacgtcactatacataggtcccgttactgacagggtttctccaggtctggcgtatcaaccgtgagcgtgctgtcgactacctcaacacccgaaaccgtatctacgtgattgatggtttcgctggctgggatgagcgctaccgtatcagcgtccgtgtcgtctgcgcgcgcgcctaccatgctctcttcatgcgcaacatgcttatccgaccttctgccgaagaacttaagcacttccaccctgactacgtgatctacaacgctggttccttccctgccaaccgcttcactgagggtatgacatctgccacctccgtcgctatcaactttgccgagaaggagatggttatcctcggtactgagtacgccggagagatgaagaagggtgtcttcaccatcctcttctacgagatgcccgtcaagcacaatgtcctgaccttgcactcttctgccaacgagggccagaacggcgacgttactgtcttcttcggtctgtccggaactggcaaaaccaccctctccgccgaccccaagcgtgctttgatcggtgacgacgagcactgctggactgaccgtggtgtcttcaacatcgagggtggctgctacgccaagtgcattggcctctccgccgagaaggagcctgatatcttcaacgccatccgctttggttccgtcctcgagaacgtcgtcttcgaccccatcagccgcgttgttgactacgacgactccaccctcaccgaaaacacccgctgtgcctaccccatcgagtatattgagaacgccaaggttccctgcctctccgacagccacccctcaaacatcatcctcctcacatgcgatgctcgtggtgtactcccccctatctccaagcttaccaccgagcagaccatgttccacttcatctccggttacacctccaagatggccggtaccgaggacggtgtcacagagccccaggctaccttctcttcctgctttgcccagcccttccttgccctgcaccccatgcgctacgcccgcatgctcgcggacaagatctctcagcacaaggccaacgcctggcttctcaacaccggatgggttggcgctggcgccaccaccggcggcaagcgttgcccgctcaagtacactcgtgccatcctcgatgccatccacagcggcgagctcgccaaggctgagtacgagacttacgacgtcttcaaccttcacgtgcccaagagctgccccggtgtgcctgatgagcttctgaaccccaagaacagctggaccgctaccaccagcttctcggacgaggtcaacaagctcgctaagctgtttaacgagaatttccaaaagtacgctgaccaagccaccaaggaagtcatcgcggccggtcccgttgtccagtaatcggctggtgaagatagaatcgtttcctttgttattttcctctttattcccatgatgcccttttctgttgtctaaaatattgcatggcgtgctgcgtttatttgggtttgcttgctttctggggtccgggaaagatacaatccggctttgccttttggctcctgtgctaaatagtcagtagatgttagacaatccagtggctattcccaattctttctcttttggtaacgttctgtggctcatggaagaagtcaatcgtagtcccaccgattatcccaccgattatgtctatgatcggttgccactctaaccgtacattatcttgcaagctcctgtcacagcatgttgacatctttgctggctcggtccttgattaccaaggtaagcctgaacatcaagaatgcatgccttcttatctggggacgagattggattagtgtccgaggtcagcttacctttaccccttccttggtatatgtagatcaaatttgcatgacataaaaacccgagtccaattaggagacttatcgaattatttttctgtcacggaggtgacagtggccgcaaaaatatataggcgaggacgacggactacattcctccgcgcaatgttgggactaagcccggtacgtactgtacttgctaataatattgggaagtgggaaccggggactcaattatggcctggtgcagtcccaacaaactaaatagggctggggcaggatatagactatctgactgtagtatattgatatcacaccgtatacccggtacatcaagcattgttcccttcatttaagggtatgatgatcagcaggatcaacacctcacccaggttagggccacatgtacaccgca

SEQ ID NO: 947 - DNA, 2452 bp, Emericella nidulans
ggatcggtgggtaacatattcgctggtagtgcctccgcagcgtccaaagaacccatctcatcttcgatattatcctcaaccaacgatggaacgtcaagatcagactcgctttgctccgacgaaacgacgtctaatgtcttcgaaggcggaatccgtccgcggaggcgtccaattgctggcttggcgtccctgaatacttccctccagtttttcaataaggacaccttttccccgtctccgggggcgtaaatctcgaccacgtccgtctcatcctggggatgtttccatgcgacaccttggaatgaggttaagtccgctgcgagagtagccgctcctttcctgcgtttggaggagggcgcgttgatatgggttggctggtcgatcggccatgcacctatggcgcgaagtctcctaacgacggtggggtcgtcatcatagtaatcatcagaaatctcctcccagtcactgtataggtctgcggtttcgagggacggatcgtcaggaaatgaagaatcgtacgtagcagctgctgctaggtcatcctgtgccatgattagttcaggacgaaaagaccattaaagggtgcgtgggggaccaagcatacagcggcagttgggtctgcttcctcgacccagaaaatcccatcatcttcgaactcatcatactcatagtaatcatcctcgtcatcggacatggcccagataaaatgcgccgagagagtactgtgaaaacaggtggaaagagcggatttgtgaaaacgagactaaagggagcgagaacaagcagccgcttgagcgagagcaccgtcactctgagggcagagtatactgaatggtataataagggttgttaatacgaaaaacaaaaaaaaaaagttggctgatgagatcagaggagcaccgcttacgcttgtccagccaatgaatgccaagagatactgtgaagaaaaagtgcaaccgcatctggtcacgtgaaatggcttccccgcatcgcaacggtttgcgtcggaaggggggatccacccattcatacaacaagccgaggggactcaggtgagcttcaaatgctccctcgctacctctccagaaactttttgtgtcgtgttattacttctctgagcatgcgagttgctgttgattcttagtataatccacggctctgcgcatcccgtgcccctctccactgcatacaatgccgctctcatctcttctccgcacttccgcccgcctggggcagacggttgttgctcgacgctcacgacgaactgcttccacagtaacctccaattcctcgagtaactttcgcgcattagactcgattttaattgccaacaggggagaaatcgctctgtatgtgcacgatccacatctctgacctcactaacgacatatagacgagttggtaggactgcggcccagcatggaattcgagtcactacgctctatacggatccagattcccaagcgcagcatgctttgagtacaccatatgcattcaatctcggctccgtgtccgcgtacctcgatggagaccgtatcattgaaatcgcaaaggcccaaggatgccagggaatacaccccggctacggcttcgtatgtataatctgcagtgaagtgagcatgatgctaatggattgttcattgatagcttagtgagaactcagagttcgcacgaaaatgtacagaagcagggctggtctttattggaccgccgtggaaagctatcgaggatatgggagataagaggtgcgtctacttccttgaggcttctctacgatatactaacattgtacttctgcagtcagtctaagcatatcatgactgccgctggagtgccctgtgtccccggctaccacggtgaaaaccaagaccctaatttcctcgaagcggaggccgataaaatcaaatacccagtgctcatcaaagcaatcaagggcggtgggggcaaaggaatgagaatcgctcgttcaaaggaagagtttcaagcgcagcttcagtcggcgaagtcggaggctatgaactcttttggggatgaccatgtcctagtcgagaaatatatcacaacaccgcgacacattgaggtccaagtctttgctgacaaacacggaaattgtgtagcgctgggagagcgagattgcagcatccaacggcgacaccaaaaaatcctggaagagtcaccggctcctcacctgcctgatgccacaagaaaagacatatgggcaaaggctcggtcggccgcgttagccggttcgctacgaaggcgccggtacagttgagtttatcttcgacaacgatacgggagagttcttcttcatggaaatgaatactagacttcaggtggagcatcccgtaaccgagatggtcactgggcaagatttggtgcaatgacagctgaaggtcgcggagggcgccgagcttccattaacgcaggaagaagtggaaaacaatatagc

SEQ ID NO: 948 - DNA, 2503 bp, Emericella nidulans
gagccaccagctcaaatcggagaggaagtaccttatagaggaccttcaggatcttgctgctgagaaatccgtccgtgtcactattcttaggtaaggaactccgcttctcaaaggatagacgatactgacagcttgacagcggcgatgtccatctagctgcagtcgggcagttctattcaaaccctgatctcaacacacccaaggataaggactaccgatacatgcccaacatcatttcgtcagggatcgcagacgcccctacgactgaaatgatatctgatacgctcaatcgacggaaccaggtgcaccacatggacagtaataccgacgaagatatgattccgatcttcacgcatgatgtcaataataaaccgcgcaataacaagcgcctgctaccacgacgaaattggtgttctattcgcctatatgagcctggtatgttaaagttatagtgttcgctttcgagctttcctaatcaagaacaggcactacaccacccgataccccagagccggagtccccagctcctgctatcgagccacggccgaatgcgctacaaagaactttgtcattgactcgcggagacagaccccagggccttttaagacgactctccggcaaaggccgcccgccaacaaaagagatcagcctcagccgccctcctcctgaacggcgaatgagcatggacgggccgttccctccagcaggaacaggggattcctacttcccggtaccagcagatttccgccctggtccgttcctccgacgaccaacgaacctgagccaaaaatctgccaagaaagcgaccaaacgaggagatgacggcgtaggcacattcgtcaacctagaaggcgggttggctgtcacgctcaatctggaactcaaccctaaagacccgtctggtatcacggtaccgtataagctcctcattcccgcactatggttcgaagggacagagtacgaccctcccgcagcaccagttaccaagggttggcgcaaatggctaggtgttcggcggaacgcctcgaggaaagcttccggggatgattacgaagcagaagaagggtttagcgacgaggaggacgaacacaaagctccaccgtccaaggaagaacatcctcaaagtcactctatgactgtgggagctaggcctgcaccgacacccgcgcccgcacctcgacactatgaggagtacgacgatgatgaggatgagtcggaattattcctcgagccggagccgaaaaccaggcccaatgtgaagcgcagcacaagcataaagaagtggtttgggcgttcataaagggacgggacgagtccattcgcactgaagcgtgcctcgatatattcttatgattttgcttgacgtgtgtttagaaacgactgatgatttaatgatctccatgacccgcatatgtacagcatataccagcaatacattggatagggtcgattatattattattctatccaagtaaacgatctcaatgtatcttgcagctgacttttaagagatccgggttttccgagccttaacagtaatattattactcaaaatctcaaatccgcctacagcctcggatctatataattagtcggtacttcaatttgcactgttgccgaaacatgcaccccgcacccctccatggctgtttagcctggaaagcaggcaacaatgtccacggctaatttccccctgagtaagtatcggcccagagcattgacgctgagcagctgcacggcgtcacggcgtgaggagctgtcataggactatgccatttggagacagtccctctcgactctcgatgagactgagaatataaacgttgaattcccatactgctggaggaatgattcctgattgccgactctatatgtaccaactgattctaccttgaaagcttttagcatagactacaatttatagtttagcttactgtctacattgtcatttaccaccatgttccatcgactacgcgacctctttttcgcgacgctggcacttcagtccatctctgaaaccccagtcgtcgctggtgcaagcgcagaacccctacctccgcagctgtcattcctatacacagcatatgtgtactgcaaaggcactctgatgaatgaagatggaccccacggcattcgtcgtgccatacccattgtcggagggaacttcacaggcccacggttgtcgggtatgtggcatatctagttatattccgatatatcatctgcctgtgctgcagatgacaagtgaactgatagtaagctttccaaacaggcactatcctcgacatcggcgccgactggggcattgtcgattccaggactggtattttctccgccgacacacggtataacctgcggacagatgatggcgcggacatctttatacagacgtcaggcccggtagctccatcgggaaatctgcatctccgactggtgtttgagacaggacatccggactattactggctgaataatattgtgggtaggttattccgagtggcga

SEQ ID NO: 949 - DNA, 3309 bp, Emericella nidulans
taaatcgggccacagcatcgcgtccatatttatgtctggctcccaatgccaaaatgacatcctggtcaaactcattgcatcggcatgcggcatgccggttctaataccgcgctatatccatgcccgtgtcgcaatcggagctgccatgcttggggcgaaggccgccagcgcggatcctgaaggcaacacggaagacttatggagtatcatggatcgaatgagcaagccaggaaggaggattgttccgacggacaatgagaacgaaaaggccctgcttgaggttaagtataaagtcttcttagagcaatgctatcagcaaaagcaataccgcgcgctagttgatgaggctgttaattcgtggaagttgtcttagttaccctgacatctggctctgcccgtctgcgcaaggtttataaaacctcttcatttgtattaagcacagggtagtgagcttttccattaatattaattaagctactctctaacaaatgtcactggcttcgtcgatgaggacctaaccagaaggggaaacacggacttcctacagagacactagtaaaaaaggtaaattcctcagctggacatggtctacgcgcggagccgccttcttcgtaatcttgatgcctgaatggctggctggacaaacgtcaacaacacctttttccgagatacttagcttaggatcatcgtccatatgaccctcattttcctgtctacatcctttcacggggaagcctgttctcttgcacttttcaggtgaccgcatgctgcggggaatgacatcttatcgtctgatcccgtcccccgtagttagccttggcagacttgagctcactttcagttcttctctcgctccatttctgtttctgcaccataatgtagttcgaaactccataatcgatatttctacataataaagtgcgggtcactttcaacgttcttcttgattcgcgctgtcttttctgcgccctagctccccagccaccgctgtttgtatcgcgccaagagctcaggtgctcaaggtgagcgtgaggtaaaaaaaatagccatggccgataaacagggcgacacgcaattttccgcttcatctaattcttcctcgcgccgtgcctcagccgtgtccggagaagataccaggatgtcctcgggaacagtgcgtcagtctagaatgaccgcccagaccaggacttacggtaagaagacaaatctggaatctacttgtgattcgaaggcagtctcttattatacgctatattaggcactttggattcatctgaaagaacgacggttgattcccaattcgtcgaaggccaacctgagagctcgagtcgcgcacctctgcccgcctccccttctatggggcctctacgaagtgacggagacaagttgagaaagccacctataacgcgccgaatgtcctcaaaacgccacgtacctcataaaggccaggagttctccacagacgacgatgttcacgagattgaggaggatatcgcccttcaagcatctaatcctcaaccctcgcctaggatacggccactgcggaaacaaagctcaactttaagacggaggctgaacgctcgagttaacccattttcgtcttccggtaatgctgattacgatgatgaagatgcctcctatgacgacgctggccttccagaatcaagcttgggaatgaatgggaaggattctttcccccaggaccttgacgacgataatgatagtgaggggagtaataatcaggaggcagataatgatgatgatgccagtgacgcggagagcttcactctaaaggatcgccaacaggcaataaacgagacgcatccgttcggaatacggttgtggaagccagccctctacaagaaaagtcgttcggtcgagaagactgcagaaggtgatatccattcatcacctgggggcagggttggcaccctcttgttcttgatgaatctcctatggacgttattcttcggctggtggctcgcaattgccgcgttgatgggcgctagtgcttgtttcattttttcgtattccgccagcgcggtggaatatggcaaggcattttctggactttcttggtatttattctacccttttggatcctttgtccgccttgatacagatgagcactacgctgaggaggacgagggggaaggccgcagcatcagcgagtatgaacagtggcagaacggcgatattgaacacggcgggctgttcttcggaccacgtcgtaatcggtcgcttgtgggaagaagaaggaatagtgttgattcggctggggagcaagatagtctcttgggccgtgcacccaggggacgctctgaagatagctctctccgtcctaagcgccgtttgtttggccgtggcgagtggacacttgggcgcgttgtattcttcgtctttttctacttcctggtaggaccactaatgctcttcgtctcgctcgtttgttggttattcgtcttctggattcccatggggcgcgtgacccttatcctctttgatcatcttcgcaggcatcccctagctctatcgtaccattctgatacgacgtttacccgaataagcccggggtcttcggcttcagtcctcctctgcacctatcgtgcggcaggcttgaggtattggaagtacacggttggtggcactaacgtttttcttatcaatctcctcgcggttgttatattcgtcgttttcgactacttttttttgagagaggccctgggtcttcagatttgggtcacccatcctggactaatatttacactcgcattgctctccgttaatccctttggcctatttcatcggccaagctgttgcgtctatatctgcgcagtcatcaatgggcatgggtgcagccgtcaatgcgttcttctccaccgttgtcgaggtctatctttactgcgttgctttgactgagggcaaaggtcgacttgttgaaggaagtatcattggcagcatcttcgctggaattttgtttctaccgggtttatcgatgtgctttggcgctatcaaacgcaaaactcaacgcttcaacgtcaagtctgcgggagtcacatcgacaatgctacttttcgctgtaattgccgccttcggtcccactctattctaccaagtatacggcagtgtaagtgatcgcatgctcctactagtgcttgaactaatatctccggcagcacgaactcaattgtcacgcttgtgagagtgatatggaaccaggcagcagcgattgtcgtcgttgctacttttctcaagtaccagctataaacgatggattcttccagaaagctgttcagccgtattcatgga

SEQ ID NO: 950 - DNA, 4854 bp, Emericella nidulans
atgaacatgaaccaatgggtatcgttaatattgaacatgagctcaacttgcatacaacataaccgtgaaaaactgactatcgcttcccagctgctcttctaaattcctccaagtctgcatccgtccaggtctcttcaaggcccctcgccgttcttgagcgatggagggctaaaccgcgcagatttgttgaattgtgtgtctggctgcccttcagcggaggctctgttgtaatcgcgctcacccacgttcttatggcgaaccgctggaccacgctcaacctcatccaggtgtgctcttctgtcaagcgcgtacccgtctttctgagactcgaatgtgtcccaagcggggctaaatagttgcggttagtcaaaggagtacgcaagctggaagtagtgcatacaagccgtatgagccttctttcgcctcctctggcgggttgttggtggacatggcaagtgttttggagtcaggtcttgatcgattatctaggatctctaggtgagccgtacttggggcccggtcagatactgggtgcgtggggctctattaagcattcctgagtggcaacagtaggtgttgacgtcagcggaatgcaaaaaagcatggtttctaagagacccattccacataatacttggacagtaatacgggcaggaagaatatagttctagaatatatccagtattgtttagcttcttattgtcaataacggcggagtacactacctacttgtactaatcccgcgcattcggatatcttgggttcatcctgtaaggccatcatccggcgaacctaggtgtgtcgcatcaagaaggggagatagtcatatagtacaagatgtctataattatatcatatgaaagaagaagtcaaaggctatcctcgattgtcatcccgtccaagctccggcatattcggattaatggtctggttcccagttgtacctccttcgacctgctcatccaagtatgaaccaaatgcagggtttgcgtccattgcagcatctgcctcggccgccaagtcgccctcgtcctcctccagattaggcccttgatatcttgagccctgttctgcccgcgttatcatggcagtatccgggacaaatgtattgtaccagcctccatcattctggaaagccgcgttggcctcgtcgaagctgaaacaatggaaatatggattcgtcagtcagtctgagccagtacttgtggttgggtggttttattgctaagcgatcacatacaaacgtttatcggcactcagggaaccgggagattctgtactagtaactggatttcggtttgacatttcttttgtaagtatgattcgatagctgttgctttacggtatctgctctgaaggcagacgactgagttcatttattattagattgactgacgcaaaaaatacgtaaccgggaagaccgtcgagactggtttgcatagtttagtagtgtagtttggcggctagcgggtgactttactgggtctatctgcacttatatgaagcagcttatctgttttcttgaatatgttcctgaccctaggagataacaaaagcaactacttgccatatatactgtaagtatataccgtaggttccaacagcggagtatttgttacttgcaagttacattatgcaagccccactctatagcaaatcttagagagtgtacggcaacagagtcagatgataatagtaataaaatagtaataataactcaccagctaagcggcgagaagtagggtattttactataaagaaaatccgcttcgctcaacagctattgtcaactgcgaggtctttggccgatttaacccttcatattccaagccccctcgtcgagatgataaggtattggatggtgtcatggtttctaacagcaaggcagctgctttgatatttatatcaagtatcaattgtaatcggaataacctcatgaacaaccctccaaacaccagttacggggtcaattagattccgggagtactgcaggaacggctgattaggactcaaattccactttgcgacgtcttcctcatttgtcccaggaggaatcccgtttcgcggaagaaagatcccgtatggttttatccgtgcttcttcgggtattttcaggttggctggggtcggaggtggacttgaagagctcgatactgatctgctagtgctgtttattgagaccctaccgctgttacatgggctgccgaggcaaatcactgaaggactctgagagagtgttttcggggcggtggtagcggcaaccgcggccatgcctatatccatttcgatagacacagccatagacttagcaaacgcctcctcaacatccacaactgcctgcgcaaaattaacgccaaaagtcctcgcataaaagccctgcacttgcggcgcccgctttagcagtgttattgcttcgcgtctcgtcaagggctctgcacatctcagaacagcaaaccagagcggaaacccgactccaatgtcgaatgtgaagggtggctgagtcccgtctgggcggtttgatgcgtcgagtgcgatgcgcgactgctcgactattgtttgaaaatttggcagacaggtatctgttgtagtcttgaagcgggagacgcaagtggatgttataatgtagagcatttcgtggtgggtgtaaaggagggcgattgttttggtttgctggggtgataacggcgtttctcgatgacgtagagaagtggttagggcagtaaatgctccatgccaagtccgcaatctcgacaatattgccatctgctgcgagatcatatggtcggggacattgtactcatttgtggtatcgtggtgcttttcgcacgcttcctggaataactgtgtctcagccatgagaacaaatattgcctcgcgggcggccttgagcgagggaaagatgaaacctggcatcaagagccggtctgtacctcgcaacaaaacattgactgctgccttggactcggaattggctagtacgctaagacgcgcaaagatcggaacgatcgtctcctccaacaatgaacccttggttgctggaacgacaccgctggctatttgttcgcgaagcgccagagctaggtgcgttccctgggaatatagcctgagtgcctcctgcgtgccaccctgcagtgcctcgatgcagataaacaagacacaactaatcaagcccacgaagacgtgtgcaccgccgcgctcgatctgctgccgaacagcagagacagaacgcgagtaccaccctaacgcatctcggtacttgtgaacagggttggagggcttatagctctcgaataacgagctaatagagataatggcgtcccagacggctggctcgctatggcatatacgggggacaatagtactccagaattcgacgtccaggccgccaaggatcggtgcggcatgttgggagtagtatgcaaatgcgcggcgctctcgccatgctctcgttgaagttggtgatggagatcgtgccaacgtggtctcgatggcgctagtggttgcggacgatgcagacgagaatgtcccgtatgttgtgcccgcgtactcacagtgccggcctgtgctggtgcagcggaggcaaaacggtttctcttctccgcatttgactcgtcgggctctgatacagtcagtttttcaccttcttggtttttgatgtaagacgcacttgcaggttttgcacccccgcctggacttcagcggcccgtacccgacggggcttctcgcgctcgcgggggctttgatcgtcatgccgatcgatgttttgtgagtggcattccaggctctgacaataacggagctgaagacatataattgcggcttgacggtggctgatgaagagttcaagctggtgtatgattcaggacgctgatcggatcggtgaagcttagcttgttttgccatcctcaggcaccaattttctcgaattctgctattgtggcagggcagggtcactaactggcaaccgtcagactcctactcacttgtcctgcgcatcaattctattcgactaagacggtttattgagacctcgatccgccatggcccgaggacttcgtctcacacaccgagtaagctagggcgcagaatttgcagggatagctcgcctgcataccggtgatgcgcaaccagtacatccatcattgactttattcacttagagctataatgtatcaggactcagcagtcttgggatgatgttattcgcgacggttacgctgcttgcggacgaggcgatgtattagcgtccttctgaagcgaatgtagaatctacgtatcaatggactgcaaaggtctgccattcccttgcattatctgcgaatatagtaaggacccagtagagctgatgcaagcactatttccccatatacactcagtttaagaattgaagaagtcattagaggaacgtggctttgaagtttatcccgtcagagaatcatggtacttcaggatgacacaatagcataacgcatattaaatggtacaaaaaggaatagacgctaagctacagtggcaggcgctgaggtccacgcattcgctagtccaaaaaaaaaagatctaaaggacattcttagctgatctcggttcatttgactgcgctcatttggtacgtaaatgcaatgcaacatgtataaagggagtacacttcgtagacgctcaaaacagcgaacatgattatcaatactgttatgggtaacaaccctgacccatctatctctttaacacccggtacattagggcaggtcaagaaccacatcctgctgggaagactaacattaaggtcatttaaccagccacggtttttgcgggtgctggtccgacctgttgccgttggcctttgaacggcaacttgct

SEQ ID NO: 951 - DNA, 2502 bp, Emericella nidulans
gctcgagatcttggacacgtactcgctataacacaggttcagagtttcggcgcggttgggaatatgcagcgctgcgaccgtaagcaccgcagccgccagcagacttgacgctcgccgtactgaagtgaggtcgcgatggacaaggatgatcccaccccagagcagctgattcatggtccggctgaaatacgcaaacagttcctccgcctcttgaagagagatgaggccccgcgaaaggaagtcctcttccagaagcgtcgacttgggctgctcgatatgattgtgccgcaaatcccgcagcttcgtcacctcatatagactgcgcattggcgcgggcaccaactctcggtcttgtaaatctggttcctgcgagggctcgcgtgtcacgaccagccccggtccgtcgggtttcacatccgacggcgagccgttcatcgaatggcggtttccggtgtggtatgaaggtgcggctggggaaggaccgttgggactgtcgccaactgtgtatgtcgagagctctggaagcccgttctggcggagaagatgcgacacggctgcttggagttgctggatagtggccgacgctcgagctttccacctagcgcccggtgtcagtcaaaggctgcaactcgcaaacagcactagaaagcactccaacagctcgatgaccagcccaagcaccagcacgaggaccgtcgaggaccaggcgacttacactccatcgtcatcaacaaacttctgcgaaaagtcattcacaacacacttaatcccgctgcgcaggcatttcgtgcagcttgtttcgcctggccggaattcacagcgaatcttgtggcgtttgcactccgcgcctgtaccgctcgcgaattagtagccatccgacgtcgtcgttctctcagcggagttgggtcgccatatcccagagaaaacacctacaagcgcgggctttggaaatcttcagcggagtaggccgctcatcagggacggcagagtggcggcggtcctgttgccggccgtcaaggccagcatcgaaggaggaacgcttcatgatagcggagactggcgagatcggggatgctccggtatcatgcagcgtgcatagctcgcgattcgcgacgactaagatcggcgacgaaatgggaatcggtaatcccccgcgactcgctgctggtccgggtgaggtttgagcaaagattctcggtggtggataagggagagatggaagtttggggaagatgggcgaagaaatcggggaagggaaggataagagggtcaaagaggagctggggagaacccgctacggtagggtgggcggcacggacgctacagagggtagcttcagagttcacagcgtctacgcggcaggaatagtctacgcaatcttcgtatactcctgaaaatcatctctttctgcccagtaccgacccttagatctcattcacgggatggactcgagaggcgcgtattgtactatgtagtcacacgacagacgtccaaaattgctggggtctcagattacgctagtcagcaagaatgagggaacaccagctcaacccaccctgctatccagcttcattgaaaccaagcgctgtaacgattagcgattcgcagagctcattctgcaggccaggcctgttctccaatcatcgagtgtggaggatccggcataagtccggtcgcggacaggttcggacttgatgcgaatgtggaggcaatccccactatagacaggaccatagatgggcatgtcaaccagattcttttttaagaccaagacccccaagacctgagaaaggctggtaaaaagttgctggacattctaggtatccgtatccttccaaaatgcatattctcatcacgggtgctgcgggcttcattggccaattgcttgcgagagaactgctcaatgacccttcatatactctcgtcctgaccgatatcaatgaaccaccgatcccagccggcgtcaagtatcctcagaatgcgcgcactgtcacggcggacctcgtcaaggcggcggatacggtggtggacaaatccctagacgccgtctatgcgttccatggcatcatgtcatctgggtccgaagccaattttgatctgggcatgactgtcaatgtcgacgctactcgcaagctcctcgaggcccttcgtgcaacctgtcccggggtcagggtgatctactcttccagtcaggccgtatacggtcaaccgctgcctgaagtggtggacgatactgtcattccgactccccagtcatcgtacggtgcggagaagctcatctgcgagaccctagttaatgaatacacacgacgggggttcattaccggctttaccctccgtttccctacaatctcagtccgccccggccgtcctaccgccgctgcctcctctttcctctccggtatgatccgagagccgttgaatggtgaagagtgcgtcattcccctcgaagatcggtccttcaagtcgtggctctgctcgcccaagacgctcgtccataac

SEQ ID NO: 952 - DNA, 4167 bp, Emericella nidulans
gtctgaatttgtggccacaggaccgcaaattcgaccacaggatcagtctagaagatgggctcggtgtggttgagaaggatacgaatcaacagaaattaaaggcatccacgacagtcgctcaggcgcacgaggtcgttgagacagcattacgcttgaatgttgccgcggctatgactgcctccccggatgatattgacattgagaaaccgctctatgcctttggcagtatgtattcatctctctctatccttccgtctcatctcatcacagctccattcgcttcctgcccagttactaacatgtagacagttgactcgcttaaagggattgaagtccgtaattggatttttagcgagctgcaggccgatgtatccgtgtttgaggttcttagtccgatgaccctaagccgcctggctctcaagattgtttcgaagagcacgctcgtgggcgcggagcttgctgcagaagctgcggcggacagtgtggcgtaagattttggctataccacatggcatgatatactaccagatgccaggtataggatctgcttactagttggggcctttaggtcgtctgtttgtcaccttcacattataactctaaactcggcatatagaatttccgatttccagatagaatatacaagactattgacatcacctcctataggacgaaatcaaggttgccaaatgtttttagcatcattagccatagcccaaacagtcgtttagaagcagataggaactcgacgaaagcatgaaatacctgaaagtagaatgactggcgacagtacaatgcgagcagctcctgcctgtgacggagtaccgccaatccctccataccagagcttgtctgatatgcttgaagggaagccattgcagtgttttgtttcgatacctgaagcacagccatagcgaagtagatagagggtactgcatgggccaattatctggcgtttgatactaccggttcaacgtgcgtcgaatcaccggtactcaagaagcaattcaatcgccagcctctaacacaatagtgagcttatctggacaaaccattggagaaagaaggtagaatactgactttctagctcttataccacgccactgcagctcaggcaccgtatctagtcgaagagtatgacctaggaaagtgaacgataccgcaatgcgataccaacaatactctttgtccagcagtatgtatagctcaagaagagagacaggaaattcattaggactgacattcaactcctccaggttatgtttgggttagggccaaagcactcatacgcagagtatctttggagctatacagggagcacccgtatgcctgcaggtgctgggccacgattcaccaaggacaatatattgggcctgttatgcacgatagatgaggcaatgggatgagggatgcctcatatggcgtactgtaaaatttataagtgactttcgtctacggttcatactctgagtacatatcacactacaaccgagccttcgccgctgattcctttaactgctgcttcaacacccgcctcagaattttcccgctcggactctttgggatattctctaccacatatatgcctcctcgcaaccgcttatggttcgcaaccctagcgttgaaccagagatgaatatcttcaatgacctttcctactcccctcatcgtcaataccctgccgcagcgtaacaaacgcagtcggcaactctgtcgcccttgcgtccacccagactccaataacagcgacgtctaccacatccggatgatcaacaagcttaccctccagctcgctcgggatgacctgtaagcccttgtacttgatcatctccttgatccgatcctgtatggtaatatatccctcagcgtcaataacgccaatatcgcccgtacgaaaccacgaaactccatcgtcatccacgtggaacgcacccctcgttgcctccaagttattatagtatcccggtgtaacattcggtccacgacaccagatctcgccgggttggctggctccatccttgcccacgtccgcgtcgagcatcgtctccggatcaacgaaacgaaactccatatttggcacaatacaacctacgccggcacctctcttgtccattcgatcattcgggattccagttgcgattggcgaggtctcggtaagtccccacgactgcgtgcagaagacctccgttccaaagatatccttaaatcgggtctcaagcgccgacgagagctcgattgtcagcggtgcggcggcggagagaatccgccgtacgctgcgcagattgtaattgcggattcgatcatccttgaccagcatgagtgcgattggaggcacgagcgccagctcctgcggcttgtatttctcaacgcacgagaggtacgtgtcaagatcgaaacgcgggaggatcaccacaggcgtgccccacgttagacactggcacatgtataaattcagcccataaatgtgactgaaggggaggaaggcaatcgcggcggtgcggtcgacccgctgagctgcggagcctgagtcgaggagttgggcgcgccattgttgaaggttcgatgtaatatttcggtgggtggtgatcacgcctttcgctggcccggatgtgcccgaggagaagcagatgaatgcgattcgcgacccggcttcgtgagcagggatttggcggagtgcggtgggggcataggtgctcgctaattgctggcaggtgaggtggccgggtgcagatgattggccgtcgaggacgatgactttctcaatcgaggtgccctttgctgctgctcttgcagtagaaagaagcgacgagtgggcgatgatgaatcgtgcccgactggtcttcagctgagcgtgtagttcctgagccgtaagtgccgcgctagtaggggccacaacggccagggacccgatgatagcgtggcaggcaatgggatagtcgatcgtattagggctgaacagagcgacgacatcgtgttccctgagaccgaatagctgttgcagcccgttcgccagggaccgcgtgcgttggatgacatccccgtacgtgtactgttctccgctgagggcatcgatatacatgggacgggaaaggggagtatcgaacgggttcgagaagaccttggagaccaggtcgaccgactcgatctcaaggttggggaaaggtgatcggtagattttctggctcatgttcctctttgtttggggcactgaactggcgtattcaagctcctttctttgatttcctgaaccaaatatcaagagtcacttcccactattagaagatagagaagattggtcacgatctgagagtgagctctctgtataacgcaggtcaagatagcacgcgatatgagattgcgtagggttcaatcctaacacgtgattgctgggtagatggaacgttcgaaaaaacagatgcattaattgcgatgatagaagacgatacggtggttaggcgttcttatatacctttccattttctagctttgtctgaaccccgccaaggattgggtttcgttggacatgcgaatgatattatgcccctggggttctagtgagatattcgtgctctcagcaatccaccccaagacctgccgacccgcggtttaacctgccctaccggttctggaaatctaagtgccacgatcgtagtaccatacccgaatttgacttgcactaatgcatatttctccacgcctttatgatgtgcgccaggcatcatgtgattgtccctaccgtgtgaatgggcttcttcctgttcgtctgttattttctttaagatccatgctctgcggtgttatgctgggctgttcctgactgcccctggctggttttagattgtcctcatatcgccccggggatcattgttgtcgtcctgttatgtccttgtgaaggcaccaaggcacctcttgagtgggtcttaataacagccatgtatggatgttacgtagtttggcttacaacggcaccatacagggaaccggctaccgactggatagccgattgagtaaacgcgatatatgtctaaagcctggctgatgtgagtggatcctgggtcgggccgagggttagcttatccctacgcatttttgaccccgcggggatttcttgttcggtttcaattatggcagttctgccattaacttgggccgcggttttggcgacat

SEQ ID NO: 953 - DNA, 3762 bp, Emericella nidulans
gcagcatcttgcattcggcggcgatttcgatcccaacggcgcctgttccactatcattagatccaatccggattgccttggaaatgagacagagatgaaggacataccacccccaataacagcaactcccttttccgcacctcgaatattcgctagattctccgccgtctcagcgagatacgtctcccgcgtgagcgagcgcggagcacttggaaactcgcgacgcagtccagtgcaggcaatcaggtaatcatatttctcttggacggcaccgctttcagtcgcaattgtggctgtctttgccgtgcagtctaaggagtcgatgctcccctgtacgcagcgaatttcgggggtctggagggcggggatatcggtgtatttgatccaaaaggacttggcaaattcttgggaagagagcgcgaggggttggccgattaggtggtctatattgattaagcatttgatcaggtagaaggtagggtttacagggcgtacagtagccatcacggggatcaactatggtcacctgcacggggattctcttcccggtgccgttgtccccttcagtaatagagaagcggtgccgtctaccgtggcaaaggtcgactaggttcagggccgctgcgaggccggcataagagccgcccgggatgaagaccttgaagggttgggcttgctcgaagctagacatctccgctggtcaatttagttcagtctaatctcgactcaactagattcctaacagagagagaggaggagcaaagtatgaaagagggaaaccaagagatggatgcgagtaacagggggagagcgacagtccagacttaaagccatgtgtggactgagtcggctcaaaacggatgttatcaatctaacggacccgcttgtatcgcagttacgctggtcgtacaaggattacttaccggtacagggacttaaccgcaaagccgcgacctggagtttgaggagcctgactctttaagctctctggcgtttggcctgtagttgacacattgcggtagctttggtgaacatatcggcatcgttgcagattggccccggtcctaggtgtctggtgacgtggggtttgcaagaggcttaacggtcgagtctggggttggagtaacagattcttccagaagtagcgagccaaatgtcgtggtctgactcggtactgaacgactggtaaccgagacgtaagcatcttgatttcgtggtgttaaaggagtcggtgaccatctgtcttgggtgcagctgtaatagaagtctgagcctggggaccacccctatttgatggaagcctgacgttcgactacgtcgtatgtctccactcttctttcagctcaatggcagggtctgacagcctgcgggcatcggaagaaggctgtagagatcacgataggctgttgaaccatgacgcagactacgcgtctgaggacacgaatgaccggaatagttcccggcaatgcagtccaagctccacatcactgaatgcttctcacatctttctatggctattttatttatttgtttttgtcctcatactgctggaacttgtagataccaggggtgaacggaagctatctctagactggcaggaatgcaagacaaacagcccccgttattgaggcgcaagcagacatgccgagaaaccggaaattacccctacaaatgtgaccaggcgccaagatctgtaaaaagagttttcgtgcagtcgtggctttctgtcctccccttcgatcctggttggggaccgaggagtggggtcgtcagattatcagattgataaagtccggtaccggatggcttaaaaaattacagatcagataacacggatcagataagatgccatgcccccttgcttgcagggttaacccagttttaagttctcttctccacttatcgagtagaataatatgcctacattgcattctgcatactaccaagctaggaaaaaagaatgtgggagcgcgagacaagtgctataaatggcgcctttatggtggttttatactgcaacaggaaagacgggcgtcaggcctgccgtcgggcgcaacactaagtcctagccctaggtctagacatacatgtatcttgatagcccgaaggcttgttgcttctatacttgcacactagagaagtgctcgatgttatggactgccctaacactgtgcagcattaaattgaccggatcgtggattcgtggccaagcagatatctacgcagtctaccatgcagcatctaaagccttacctattgatcataaagaaaagaggaagagtagatagattatgacgagtccctggatgcgcaaaatggtcttttgttcgcgaaaaccgtcggcttgatggtgcttagccattcgcctcgcactctgttctccagagagcatttgcgcttcttcaacctcatcgtctgttaggcgttgaggcaaaatatgacagagaaacaaccagcggttgcgaaacaatagagtgacgacagcgagatcgaccagaggcttttcaagacatggagctattacgagcatcccacttgtggcgatcggcgggtagaatacacgaggcaagtgccccatatcgtaaacggaaagagggaaaaggtggatattgatatcactaaggaaattccaagctgtaatttcaccgaaaagaagtggtcaaggtttgtgcagaaacagacgatgacacacatggtgcttgaattagaaggtaaagctcaaggactggaagagctggtctctttgtctgagtaggttgtgttccggtgttcgtaagcttaagctggagtctgcttggactcatgtctatttgtttccattgtacttcatgtattgtccctaaatagagagagatttccatacacaacatttgaagagccccaataacattacctcccctgtcgccagaataatacactttctaaaactcctccttaaacctaaaggggacaaattccttgacaacattgctatactctcccttaaactcagtctgcggaaccttccagcgcgcaaccatgcccctcctagccctagagacagtagtgttcgcagccgaagacaaaacaacaatctccgagttctccaagtgccggtcacacgtacctccaggcaccagcgcatcgcccgctttgtcctggatgtagctgtattggttcaaaatagccgtgtactgttcctgaacaccagggaatccgccagggacattcttatcgtatactgcaacgacggtgttctgcgccacgtttttggcttgcttgttggggccgaatttttccgggacctagaggtccccttttaaagggaaaaggaaaccccctacttttttaaaaaaaggaaaaaattttttttcccctttccgcaaaaaggggtttttcttccccgaagggggcccccccctcttttattttttccaccgttttgttacctcccacacggcgggcgggttgtggaaaaaaaaaaacttttttcggcggtaaaaaaaaaaaaaatcctttttgaaaaagtatactcccccccccgaggagggagggccccccaggccacatcacttttttttttttttttgggggggggggggggggggggggggaaaaaatctttcctcccgttttataacgggggtaattttttggccttttatctcttttcttggggggaagggggcgcccaaaatgggccctttttgtggggggaaaaccctattttactaataaatcttttccccgcaatgggtgataccggaaatatcccgattgcaa

SEQ ID NO: 954 - DNA, 2033 bp, Emericella nidulans
  unsure (1)..(2033): unsure at all n locations
ggatctagaaacgttaacggagttctctttgtagaacaacggccgaccgttgttgccgattaggagatgccaagttttgaagcattggcccaccataaactggggttatggcggtatttaggggcggtccccgcctaatatgcccaccatacggtccgttttgagactgtgatgttcctgagtttgcctgctgcaacggcggggcccggattgtcttcagcgggtcatgttcttccggccagcagagatcctttgaaagggtcatcggactcctcaaagctttcatcagactttaggactgtaccatctatagaggcaaatgcnttcagtttcttccaagaaagcattccaccaaaattgtcgtgcggacgaaggtgaggtagctgcagtgcacttggcgagatggccgtagcaaaatcatcgtcccagttatcctcttctccggagctaggagaactaaatttgtccgcgacaattctggagactgggcttggaagtgtaactttagttggcgtatgccgcgtgtcaagccgtaaagacggtgggttttgattttcatttctggttcctcttcttagggcattcgattccggcgaacgcaaagcctcattccactcctggacacttttcaccgcctcttcatattcggttgattttttagggactacggagtcagatcttcgagcgttgacgatccatgggtgtttcagaagtttgcgagcggacacacgaaggttgggatctttctgaaaacactgcatcaagaaatctttgactgcctgatcattcattagccatcccgtacagaagcagggccatgaggcaaactcactggtgaggcgccttgagggaggggagggtgatcgtcattgacaatccggaaaagagccggcatcggctgaaggttatagtacggcggttttccttcaagcagctcaatgacagtacatcccagactccatatatcagacgctgtagttgcacctgataattcaatcacttcaggggccatccagtatggagtcccgacaacgctcgattcgcttagtccggtggtacgactggccacaccgaagtctgcaagcttgacaaggccctctttcgttgtaagaatatttgcacccttaatatctctgtgtatgacgccctgatcgtgaaggtaaagaagaccatggagaacttgggacatatatacccccactaaagtttccggaaagcggccgaagtttttggcaattgagtgtagagaaccattttcgcaatatctgaatcgtcagctgctgtacaatttcctatcctatcccatccaggacgtactcgagaatgatgtttaacgtttcggccgacttcacgaacccctggtacttcacgatattcgggtgctattgtcaattgagtcagtagatgtcgcagctataggggccactggtcccaagcaggcagtgtcatacatccaaattcttcaggaggtcaatctccagctgtagcatgtattgttagcacgtaaagcaagcgaagttgtaggcaaacataccatgatgacccgcaattcactcttggggagatcagcgagcttgatctgtttgaccgctacagtttccccggtattccagttcagtgccctatacactgacccaaaggcaccacgacccaagcaatcacccaattgcttcaaagatcaccgtcagtttcgacaaccgggatgacagtgcggggaccgggcatacatagtccttgagctccgcaacatctttcgccgacgtctttcccatcctgtcatcttttgctttgtcgtctcgttttgatggactggaaccgagtctcgtgaggcgtccttttgcgggtgcgccgggcgttctagacgccggatgaggcgcttctgggccctcgttggaccgagataccatgactgatcacggttagagatggtacttatgagcaaggctcgattcggacttgaaacgtcggcttggaatgtacaatcttgagcacggtgggaagaggaaaaggcaggtgccgggaatcggtcggat

SEQ ID NO: 955 - DNA, 3512 bp, Emericella nidulans
  unsure (1)..(3512): unsure at all n locations
ttgttgaaagatagcacaaggatgagcctgcactgcttcaacggcaggaagagccggtaacacagtctcgcttagccgctttattcccatcattcactgggagaagacgctctgttgttcttcctccgggtgtcaaggagcccggatggtggatcaaagacacaggaccagtccgtgttgaaactaaggtttggcttgcaaatcaacgaacttttatcaaatggcttcatgttagcattttactttcctctctttctctcggtttgtataatgccgcaggcaagcacaacgatatagcgcgcgcactgtctattgtctacaccgcatttgccatttttgcggcaacctggggatggtacatgtacgagaagcgcgcaagacttattcgagcacgaagcgggcgcgatctcgacaacacatttgggcctatcatcgtgtgtattggattggcagttgcattgatcctaaacttcgctttcaaggtacttaccttctctgatactgatccagcagaagctgacatgactagtacgcctccaccgttgagaagttgcgcagaacacggccagtcgatatgactaccgttgagggttctttttcaatggccgcgaacccggaaatctgggatcttccggaccaacagcctttaaattgacgcaactcgtggtccttgcgataccacactcatgagaatgcgtctttgattacatcgtttacggcgttgcatcgattacggcgctgatgaattctcacgaagccggccaacagcccatatgttctcggcgcgttgttgttctcataggtagatagttcaatttctgtcttttttagtgtataatgcctcagcccgagaatcatgaatgtgctctattcacataaccacatatgtatatttgctacacggaaagattagtacaagatctcctgctctttactgactttctattagcttacaaagcacaaagcatgtgttggtggtaagtatcttgttcatcagacttctgcaatatggaaatcaagcgatgagttcacaacggcccagcgaactccagtggtcattacggaggatgtctccggcgtcagtcatgctgacaaatccagaagtacatcatggagccctcaagaactatattatacctccgatctacagagtataaatatatagactccccaccgcgcttccaaatcaactccaatgcatatatcataccataaattttgaacaatccactccagatcggtccagaatgacaaacttcaacatccacatcatttccgacagcgtctgtccggtatgtcccgttcgaataatcccccccaaatctcccagttaatccgaaactaaattcctcaaaaccagtggtgctacgtcggctaccgccgcctctcgcgcgctataactacacataaactcaccaacccgctggacacgttcaccatcacttggtccccattctacctgaacgcgtcttccccaggttatcccggtgtgaataagcggcagttctacgagaacaagttcggggcagcccgaacgggcgcgatctttgagcgccttgctgcagtaggcgaaggcgagggaattaagtttagtttcggcggacagacggggaagacgagggactcgcatcgggttatctggttggctgggaagaaagagagagagcaaagggaaaagggcgaaggggttgcagggaaaattgagaacggtgtgatagggggcctgcagaccagggttgtggaacggctatttcgggcatactttgaggaggaaaagaatattactgagcgtgcggtgttggttgaggctgcagttggagggggtttggacaagagtgaggtggaggggttcttggattcggatgttggaggggtggaagttgatagggacgctgagggggcaagaagacagtttgtgacgggcgtgccgtatttcatggtgcagggacagtatgcgatcgagggagcggacgagccggagactttcttggaggtatttgggaagataaaggccgacgggcaatgaatgatctgtatgacatgtagctcagtttgcgaagggcatgctgaagaacaattgacttgatgttaactaatgctaaggctagctaccttccacatcgcaattggataaacaagctggacaccataacaacccacaagccgatccaagatagaagcattgctgcagacgccggtggcatgcaaaattctaggaatacatggaatagaagtagaacgctggtgaaaacggagacagaacaagccatccagcgcctaagcagttgagacacgttaaggaaaggtaaaatcgaacaataccaccataactcatagcgtatcgtgctaaagtagagatgtctcaagagatgcgctgcgtgtaagtctaacaactaacagcccttacccatagcttgctttactgctgcgtcgtctgttggagttggaagtcagggatatactcgaacgtgtctttctctggactgtagcggtacgccttaaactccacgccgtaaggcttcggctccagcatgtacaacatccccaaaggtacgtctagatcggcgacttcgtcacgtttcagaccgcggaagtaagccaggagaacgcgcgccacagagcgatgagtaactaggagcacatggtcggtcatccgctccacttcgatgataacggttcgaagtcgattgatgacgtccaagtacccttcgccaccggggccaggatagcggtaatagagcttattcttcttgcgcgttgcatattcgtcgggaaatctctcgcgaatctgttcgtacgtcaaaccctccatttcgcctgcgtaaagttcgtcgagcatcttcatctgcttgacatcgtagtcgtcttcgttgaaatgttcgacagtttgcactgtgcgttgcatcatggagctccagacacagaaattgcgaggtcggtcccggggtatgtacgaggggttntggatgtnnnntttnntttgttttnttttttntttttgtttttttttgactttgtgttgttataattattttttatgtttttttgtgtaatattgttatattttagtgttttattattgttttagtggtgttcttctagtttgtttatatatttgtcgtagttctgcttctgtctatctgttattcgcgtaacttcaatgccatcggtctatactgtgccattatcatattgctccttatcagtgcaattctgtcttcgtaaaggttgaattatatattgctagtgcttactgtccaggtactctatcgatttatttagaaatcactgaagaatgctggtagaagattcgatcagtactagtcattgttctgatgtcaacatatttcttatccgtcatcgtctgtatattaagcgaacgctacgtagtatgagctcacaatgttatcatatgagttttaccattatttccctttgttttctattttgttgcgtctctgcgcccttgtatctatggaggccattcctatttaaaattttcatgtccatcg

SEQ ID NO: 956 - DNA, 843 bp, Emericella nidulans
tcagggtattaaataatggtagatgtgaagagaatcgaagaaaaaccaatttcccgagacgcgcctcagagatagagaagtactgctttgtattgataaaatactagcagtcggatgcgcaaggatgaggcgacgggaacgtaaagtataccaatcggtcacttgcacgtcgcagccatggaggtcagtcaagcagaggataaggtaaataaataggtaagaggcagcgcaagataattcaaagatgagtggagataaagacgttgagaagctttaaggctgagcaccagcccatcgatctggagtataccaagaattacactgaaaggctgctgtaaggtaaattaccagaaggtataggcaagatcggagaacgaagcaggaagtgtcaagaaaataagtggagaatgatgaaatagaacaagaccaccgtgatcaaatttcactgctggaggtgactcagacgcggatgaaaagcgtggtgtactgtactgcaatggcaccggggccgggttgaggttcaagtaaacagggcagcacggcttcagagcggcgtcaggatggttttggtctgcggacggtcgaggtcacgcagcctgtttatatcattgggacatctttggctgggcgcgcctacccatgcttgggccaggtgtgctagtcccatttaagattagctgggtccacctttgcgaaaggttttctttgatcacgtgagctgcgaatactccgccaagaaactgccagatggcctcaagtaagcttaaaggtagattaagtaaggcagatctctttgacggcagcataagccatgctagctatcggttgcttcatatgctgtgt

SEQ ID NO: 957 - DNA, 3251 bp, Emericella nidulans
attgtcagttcatgtatcatacacatacgatttaggtgacactatagaatactaggatctaggctgtatttgtcgctgacgagaacctccccgggcattctccatccgtgcctttcgtagatgacttcaactagccgcgtcaaaatgtcggcctgccatgtcacaagaagctcgccgctaatagctttcatatgacgcttgagtagcgttacgtcgaaggtgagtcggagactatcagagcatagttgcttcaccttgccttcaagcagcttattcgaaagcgttaattctctcagggctgcacagtatctctgccagatgatgcgttagtttgcgcctctcgcccaggcaacgaacagttccgtacatctaccgtttgacataccgtgagaacgacttcgcctcctagcctcttttgcctttgagccgctttgatctgcgcacgatagaaggacatccctggaccatacttctggatgaggtcctcatccatgacagtgacttcaaggcgacaagggcaatgcgagtgacagttcagaaatgagcgcgcttcaatgataagagaataactgcgttcagtaaggtatgatgacggttctagtcttgaacaactggccgccgtgatgttgcaagcctacgctggaaagaaagagcgagtggcactcatcgtggtcgaatttggaaagggcaagccaacatctgagattactttccagaattgagatccaagctgattgattctccgcgagtattacagatagataatgtccatcagaagcttcgtctctagagcttacttcccgaaggcttcccaaactctatgaccagtttcccaaactgtttactatctttcatatcctggaacagtccatccagggcggcaacatcgctcaattcggcctgcacgacgcgcgataccaccgggcgtactttgtgcgtcttgacaaattcgaccatgtccttgaattctttccgagaacccattgtcgagccgcggacatcaatattctttaacacggcctgcatcaagaatggcatcacgggagagactgtcattccatagatggagaggacaccgccagcctgtgatgtgttagcccgcacagataacaaaagagacattaagaggcttcagaccttgagcagtttgacagacttctcgacggagttaccacccgctccgtcgataacggcgtcaaagttcttctttcccttaggaagcaggccgagcaacttcttctcccagccatcttccttatagttcacaccccccttggcaccgagctcgatagatttgcggattttctcctcgctagagctggtaacatacacgtcggcacctcgcgcaacagcaaaaagcaagctaattagcgccacacctccgccgatacctgtgatcagaacggcagcgcctttgccggtattgctctcgcctgcctttaccactagggccctccatcctgtcagtcctgccaggggtagggcggctgcttctgcgtctgacaaatgctccggggcttcttcgacctctgactcgtcgatcgtaatatagtcttgcaatgtacccttgtcgtagaacttggttcctcccatgattttatagcctgtgggatcctccgggccttcaagagagtccttccagcctattccaggattcaaaatgactcgcttcccttgccatcgttctggatttgttacgtcagggcctgcgcccacgacggttccgaccccgtctgcgcccataggtacgtcaaacgtcagtccggggtagaggtgctggcgcagaaacacatcgcgatggttgagagctgctgcggacaacttcaccagcagctcggtgcctttaggggtgggttggggtaaggtctttagtgcgagcggataatagaccttcccaggcttgccctcagctttgccgaggaatattgccttcgacattgtgatatcgttgtgtcttgagaagactgtgtatagaataatgcggtttgcgagttcaatgggcgatttgagtagatgttggatttaaagatcacatcatccaaaataccgtgcggggatatctggcgttatcgataaccgaggctgtccggcctcaatactgatcacaagaggacatgttccccgttatcagtcacactttatatgaacagcatgctgcaaataactatgtacaacatgttcatccaaccgggacctgtctagacactatagtgcgcggacattcgttggattcgtatctgacttgccggaacaactgcctcggtttgccactcacaaacctccactatgctatacgcaagccaaatcatacaccaggtttagaataatagatacgcatgggtgagaaacgagtgatcatccacatcagaagctgggacaatagcattgaggctcacaatagcgctttgattggcaccaccgcgagtccctcggtggatgataacaggatgcttggctatatcgatcgctcctcgaggagaaccgtctcggcgaagcactatagtcatatacgtgccgatagcggtgagtatgttcgcagtaggtataatgttgatccgaatagtagccacatggctcaggttcgcaaaaattggtacgtacttcgcggatatattcgcctcgtttatacccggagcgaagggacttgccattccaataccaggaataagggacgtccttgctgacagttgtctttcgagagcagaaaaacgacatggtatcgtgtgagtgatggacagaagtttgccaaccgagtcgagcaggagagtttcaataagattgattaagcacctcaaggcttgactctgttgacttgtccagtatttattccgtttggtctcggggtctgtcgagacgcattatccttgctgacattcatgacacattgtctgtcatacagcaaacacggataagcaacattcagatagttcggtgctcactctgtgtgacgatggaatgaatacgttagaagcctgcaaaactgcacagagtgcaggaacatagttgcccggcagcagcaagttgcccggacagaaatagagtagaccttccacttgttccataggaagccacccatcgagcacttgatgttttagagaggctggcctacgcctttctgctgtacgcacttctcccgtaagggatgccaaggtggtcttgatcgctgccagtcagagtccactgtctagactcagagaaccatagatcatctgcaacgcaacgctgaccgcagtatgaacgcagggcaatga

SEQ ID NO: 958 - DNA, 1410 bp, Emericella nidulans
atgctttctgcaccgcggcaaccacattggctctggttaatggatctgctgatgaggagtctatgcggaagaaaggtgacggagactcatcggcacagatttcggccatggttaggccaacgtgttctacgacgaggaacaacgccgttagagtgcagtgctggtcaactcgtaggttgtttgcgtatgggtctgctactggcatagttgcgagaaccttgacttgacgaggatttgcggaataaggaccacccgactgtagggtaaagtgtggagtggtgcagccgcagtcgataacggtagtccacgccaaacttggcctattggtgtggctgctcctgatggtgatggggttattgctagctgttgaaacgagggctgatgaactatgtgactgtgaagcatgacctgcaaggaaatggactgtgttttcggttgtatttaatcccctggttagttcgacttgcgctgggtaacagatggtttcgtctgagagaggcagcgtggcaggatcccatattccggacaaggacgggtcacccggtctcgaaatgtacgtactagggttccacgagctcaggtccaaagggaagtcgcccaattgagggacaaattgggcatagtccgttgcggtcgtctcaagactgctagtgagcacatcagaagcaggacgagggatagatgttgctaagttatcgccttgagtagtattcaatgtgacctctgccccagatagaccctgtcccacatgcggcacctgcaatgtgggacttccttgcgtgacggttgcagcaagcgcatctagacgctcatagcgctgtcgtagtttctcgcctgaaccaatggtgagcattctccgcccagaggatcggacccaaagcccgtaatatgctagtaagatggtagcaagcaggaattcgacgtacggtacttcctctgagcctggatgttctgctgccgcctcttctctaggtcccggcgtacaggcttccgcttctgcgttcccgagccacccatctgctgttcctctcgagttcggggaggcatgacttgtagtgggcggtttgaggcgcctaagcggcaatagggagatagtcgcggacgggggcggcaggaaggagaacacgcaggaggtttggatggggtgagatggatgatggctaaagtcagcctcgagaagcagaaccccgctaggcctaaacgggagctcccggtcgcggcccgcaggcttgcttaggcactaatactctagcactcttagtaccgcgagatctgctacgccgttgcgtcggccccacggcccttcctcatctacttactccacccacagcattttaagtagacaaaacactgcaacgcgatagtctctgaccgagacgcatcacggtggtacatggctcatcttctatg

SEQ ID NO: 959 - DNA, 2162 bp, Emericella nidulans
gaacatttttctgccggaacagccccgattcaaccgtcgcaaaacgaaagccattgagctcttcccagctcggtttctttcgttattgggttagttgcttcatccctccgtacacatcagtcaatatgcaccgccggggcatatttggcagcttgctgtgtattgagctattttcgtgaattgatattgcgaactactggctaatgtttaaagaccgtagggagcagaatgtttgccagaccattaacattacgggtgcttgtgcagccatgcccgaagccttcgttatcatcgagctcgtccttgcctatagcggcctgcaggcaattctcttctagcgtcactcgaacgaaagcggccagcaaggtcaaacaagtaccatatcaaaaaccagagtctccgctacagtctagaagctcgtctcagtcgaatgagggcttgaaatttgccggacggcgaccaatgggctttgcaaaactagaacggaaagtagccaaagaaggtgaattagtactatacaaggccccgccgcatcgaagctatgtcctcggtgcatacgcaagcgctattttctgtttcgcgtatgcggtctacaactcgaacgcgaccattcgggatcctgtggtaaagttaccaatgtggcagcaagctttgactgggggagtctgcgtcgcaatgagcgtcatgggaacgctctttcttacaaggaccggaaaattgatcagaactgttaaggcagtcagctccaataatcaggcgcacctacgctttacagtacgaagtatggtcccattccggaaacctttcgaattcgatgtgctaccaaaccggattgttttctcacgtcgtttggctgtctttgtcgaacagcatggaggacaaacccctgcgcatgttcaatcaagctcagaacatgttagctttttcaaagcaccagggcagaagctaagtatgcttctttatggggtcttccgttccatccggcaaatattcacccaggaagacttcatcctcttggaggtcgacggccagaagggtacgtttcggatggatcgagctggttatgtttcagaggactttctaccagtcgtcggaaatcctgtgccaacgaggcgctctactgcttgaagttctcaacctgcctacttccgtcagttatcttgtaccaactagtcttctttcaagcgtcattagagggtatttgttaggatcttattttctgtacagtatctcggtcatctcgtatatataacaatgcttatccttgcaagttctctagaacctgtaaattggggttgccgacggctgtatccagagtcatctgaagtatatacatgtcgcggaaggcttgctggacacaccaagaaggctccaaattgaacagtaatgttgcaggaacatgaaaccggaatgtagtcggtttcaaacaaaagcaacactcagagaactggaccggagaagtggttgacttcctatagattgaacagtcatgtgaccaaaacgcgtggaagatcgctccaacgcgatggccgcggaacccccctcaacaacactccgcatcaccgccttgcgttttcctggaagatataatccaagcgctgtcgtgctctcagtcgctacggagagcgactgcgtagtggcaagatggggaaactgattcgccttgagctttacagtatgtggtaccgttgcgaacactgcgaacaaagtcacaatcgcggacaactaaccagcaactcgcagatttcaaatcatacaagggccatcatacgcttcttttcggcgatgcctacttcacatcaatcattggacccaacgggtcaggaaagtccaattcgtgcgttccctgagcctcaattttgcgtgggattcttttgcgctgaccatcttaaggatggatgcgatttcattcgtattaggaatcaagtcttcccaccttcgatcgacgaacctgcgcgaccttatctatcgaggtcgcgtcttgcgcacatcaaaagtcgacgcggacggaaacgccgtcgacagggaaacggaaggggtcgagccgacacagaatgagtacgacgtggaaccgtcgcaggatgctagcggaacaaacgatccgaggaccgcgtgggttatggctgtctacgaagatgatgcgggagaagaacagcaatgga

SEQ ID NO: 960 - DNA, 2449 bp, Emericella nidulans
cataatacttagcaagtcgtgcattcaagtgcatcgcctatcaatcatgtttgaggtgagcttgttctccgggcgatcattcgtaccacccatgtacaacactatcgaccgtcgtttactcgctgggggactctcaacataagactaatatacatcagcgtcgggcagcagatcgctatcgcttacggatgcaccgtgcccgtaccgttgctttgacaaatgatgagattgtggaagtacgggcagcacaacggaccttcgaaggcgcctatatccggacagctctctctcagttctcttttgcccttgtggtccttaagatatttacgaatgagttctacagtaccggggctttattcgccgtctatggtacaggggtacttatcatcggcctttttcgacgccagcagggcaaccgacagttcttctctgaggtaggagacgacggagtacatcgacataagttcagaaccagcgggaatgcggtagttatcctgacggccctgagtatcgccgcttacgccacgctgatcgctttaacactgaggctggacaagtaggcttaacagatccgagctcgtattgtcatggaaaatgtatgcgaacaaccttaacagtgccaactggaaaccaccacgtacgtaccctccagcatacggtggctgccaagcgccaagaattccgcagcataccaccgctatggttgctacctgcttcccatcccacgtcaacagcagccatacttgacgagtcggagcggacggggtgacagccttgagctggaaatcatgagactgtccacgggactggtgccgagacccgggacatgatttcctgatgatggtgaaaccacacaactcagcggattgggggccgtcacgcagaagggccccgggtcacaacgcctcaccgtcggactgtaaggcggcaacttgcgagtttcaaaggcgcacgacttgctcagcctcagttaccgcgagctaagcgagaatgcttgatgttcagttagtatattatagcgtccgaacagcagccggcacgacgtggaccaatgggggaaggcggaatcacagaggacgtacgagggaagaaactgcagtgagacagaccctgacctgacttcgcggtctcctgcgtagccaaactggatttgtgggcagagatggtgggcagaggtcaacttgttgtgatgcaccttacttgggccaagcattctttatccgccgtgcggccatcaggggccagagccaagccaatttacttttttgtgatctacagtacatagtagaacccagaacatcatctttaacttggagtactgaatactacggagtcctccgtaagatagcgttggatacggggtgtggaccgtgaaccgtggaccgtggagctgcaatacttaaagagtccctcgtctcgagcgcatcacgattgcttagccttgacatcatagcacccggcccagttattccggttcatccgtgctttattaaagcaaaagcgacctccagtgacaaagagatatcaactgataccctgcaatttcatttagtcgatactggacctatagtattatctcctgccggcaggtgttcgagttgttgggacgaagaaacggttgtgtgcttcgaaccggttgactcatccgcccatctgcactgcagagcaccacaagctctcccctcttttctgactgcagagccttgcctttgcctccttttgttcgctgttatcgttctcccagcttgctggggcatttataattctgcagctgggcccgtcctgcccgcccggggttttttccttcttttctagtcaaaactcgtcctaccttgacacacgtattggctgcaaatccctgcaccactcgcggggtatggcccaactcactgacattgcccgggcaggggtcatgacaagtgcatcctcttcgcccgattattctcgcaacactagctccggcatcaacttcaacggtactgcgtcgaacggcaagccgatgaccgaaagagatgctactttaatgccccctccgaaaaccgtcgccggaagagcgctagggaatgacctgcattccgattcccacaggaaaccgcacgcatccaggccctctagggatggtgtcggattcgccctaacagacactccgatttctaccgcaccttcgtctccacagttgtaagtcatactgctcctcgatggttggattctggtttattgcttttctgtcccagagcttgttcgcagtctagattcgctcggctgtatcccccctgatctgtgcttgacactcttgacacccgttgcgttggggtattgctagccttgtggaccccgaggtataccctttatcctactcgcttgcctcgctataatagcctctgaccctgttgctatcttgggcatcttgtctgaaacgctaatcgcgacaggcccgtgcagtaaggct

SEQ ID NO: 961 - DNA, 3246 bp, Emericella nidulans
aagtgtgcttaatacagcagcctgaccaagcatacggtccaaacactaattatgattgttttttacgaggtataatgtactgtccgtcggcatattaatggttcgggctttttgagattttccaaaatcacccctgtgccaccggcactaaacatagtagttaagagagccctgtagccgcgtcaacctacgctcatcaacgagcacagggggtatgatttctcacccaagtcttcaaatacgagagaacagttgaaagattttatgagcaaagaatcgttgccaagttactttcactatcacaaccgtatcatgcttaagtgtatgctttacggtgccaacatatggcccataaggaactcgtaaaggcagcaagacagttgatgagagtagtacttgttttctgttcatgtatactttcagaaaacaatcgtcttcaagcttgtgctggattgattggtcgcaattttgcttccataatatacctgacccgatgagcgcagagcaagaggaagacgcgactccttcgcctcgcgacccatcatctgccaatctctggtgtcgatcgctactaaaagattccccgcttcgaacttttctagatgtataatgaaagtagcggattgggagggatattatgggtcagtgactggagcagcgggactccagtacgcttacgaatacgcttacaatcgattctatgtacggctcttcgagtggcggctcctttcggtgcatgtaaagattacagctgcggcagtagttctcttacagtcatgtcttttgattatcgtatatcaggttgaatagtatggttctgaatccacagcagtacgtcttactgtgcttggctgtcttcgctctcaaggaaataatcagattctaccccatttaacgatcagctaatatatttaaatctcatccatttattattattttcatactccttcttttgtaaagggataaggccacgacacaatctttagtctttcacttagtcgtttgctttctcctattcacctctgtgtgccacaaaaaaatgcatgtcaagggtttacccccgaaaaagaccgacgagcccacggatcatttaatactgcctcaagacctcgactaaagacatctcgtgaagttgctctttcacaaaatgggctccttccagaaggataaaacgttccactgtgacgtgattattgtcggcgccgggttcagcggcgtatatggacttcatagatttcgtcagctgggcctcaatgtgaaggtattcgaggctggggctgacctgggaggtgtatggtactggaaccgctaccctggactccgtgttgactcagaatggccttattatcagttgggcatccccgaggtatggaaagacttctacttcaccgaacgatttccgaagggcgaggagatcagaagttactttgaccacgccgataaggtgctcaatctgaagaaagacatccaattcaatgcccgtgtcaattccgcaacctgggacgagacccggctgcagtggaccgtgaccactgaggctgggcacactgccactgcgcagtatctgtgcctcttcaccggcgtccttcaccgacaatatatcccgggatttcctgaccttggagaatacgagggccaggtcttccactcggcagcctggcccgaaggtgtcgatgtgaccggcaaacgggttgcggtgattggagccggagccacaggagttcaattggtacaggagttatccaagagagccagccatcttacgctattcctgcgccggcctccgatctgcttcccaatgaggaaccggccaataatgccagcggaagaggagtgctggaaaccctactatgagcttctcttcgatgccagcaggaagtcgcccatcgggttccccgtctctcggcctacgaagggtatatacgatgtgtcagagagcgagcggaatgagtactatgagaagctatggaaaaccggcggtttccatttcggagctgggaactaccctcaaattcgcgtcgacaagaacgcatcacgcatggcttatgccttctgggcaaagaagacccgcgtacggattaaagacccgattaaacgcgacttgatggtacctctcgatccgcctttctggatactgacgcgacggtcgccgctagagattgactattacgagtcgctggatcaggatcatgttgagatcgtttcgctggcccaggcgccgatccagaagtttactgaacgcggtatacagactgcagacgggaagcacagggagtttgacaacatcgtctgcgcgactggctttgagagcttcacggggtcgtacgtaatatccttccactactaaggaaactaaccagccacccagggtcgcgacgatgaatatccaaagcaaggatggtgtttatatcaaggacatttgggcgaaggggatccgaacctatctcgggatcctggttcatgggtttccgaactgcttcttaagctacagcccccaaggtcagttactatacgttgtatgatatcaccaaagctgagaggcgacactagcaccgacggtgatcgcgaacggacccacggtcctccagtgtcagatagacttcatcgtcgatgcgatcgctaaaatgagagcggagaaccttgaacgcattgaggctacggctgaagcagaagagggctggagacaaatgatccttgaagtaggaagcaagacgctggccgcggaaacggactcgtggtggacggcggccaatgtgcccggccagccacgacagttcctgacttacgtcaaaggtattgggaactatgagacggaatgccgggccacgcttgacggctggaaggggtttgatgtgagggagcggcctaactgtggcaaggatggtgtcgattcgtaggtctcacattgagatagtacaccgtctgcttagcattaatagattcttcacgacattgatgtatagcaaagccacggactaacctgctttcgtttcagcaggggccaggattttctgtttcccggctggagatctgatcgaccaagaggaataaaggactccttgagttcataccaacctgcaaaaagcgcatctcttcctagagccactaatctagtgccgtgaggtaaaagaagatatcacgctcaataccagagtacgcatgacaccagtccttcggtcctatttaccgagcctcattccagatagtcacttgcgctctccgaccacaatacacgaaggggccagg

SEQ ID NO: 962 - DNA, 2324 bp, Emericella nidulans
tgggggtagacatggctgcgactgtcgaagaatttgcggattccgggatgagtcggccgcgcggagtgcactgtttcttggagagaaggtcaattgggtgagtcgggagacagaaaggcggttgaatcttacaggaagggagccctaagagcggttgcgcgcaggctgtgtgtttcgaggggagatggaggttgaaagtgacgacaagccgggccgaagtttagctgcaaaggcggcactggcactgtaccgactgggtctgggaagtgtagtcttggcgctcggtccaaacacgtcgccaattcgagctggacttacgtaggctagctaattatactcctttgaacaacaccgattgcaattgttttcctcttttcctctggtgattcatttttcctgtcgttactctttccgctgtgcggaaagctctttgatgatgcggtggtgttcgtctctcttgctgttcggcttcttggccgctgtcaatgcattgagcagttcggggagtcgattgcttgtggttttggaggatgccacagagaaggggctatattcaacgctatggggggatctggaaggtatcaattccatgaaataagttatttgttgctcagatctcgctaattgcatgtctggcaggtcgcgggtataacctcatcttcgaatcgcctaagaatgaacagctttcattgttcgagcttggagagagagcttacgaccacgtcctccttcttcctcccaaatcgaaaggttcgatagactcctgatgcactgcagatagacggccaattgacctcatacaggttttggaccctccttaagccctaagaacctcgtcgacttcctcaatagcgaaggcaacatcctccttgcactttccggaaagtccactacgcccagcgccgttagctctcttctcttggagtttgacctccacctatctaccgatcgttcttccatcaccgtcgatcacttcaactatgataccctctctgcttcagaaaagcacgatgtccttcttctcgagcgccccggcaagctcagatatgacaccaaggagttcttctccggcgagggtgttgttgccgttccaagcgccagtcctcacacccttggtgacaactcgcttctcgcacctattctgcgcgcgcccgccacggcttacagctacaacccaaaggaggacaccggctcggttgaagacgtctttgcgactggctcgcagctggccctagtgtcagccatgcaggccagaaattctgcccgctttactgtgcttggttccgtggagactctgcaggacaaatggttctctgctaccgttaaagcacccggtggtgaagaggtccaaactgtcaaccgggaattcgccaagcaattgaccgcgtggacatttaaggagaccggtgttctcaaggtcggaaagattgagcatcacctggcgaaggatgacctcacagccgaagatctgaatcctagcatctaccgaatcaagaacgagaccgtatgtgcttctcttcactatcctgctcgcactaaccttgctcaggtcttctccatcgaaatttccgaatataactacgatggctatgtacccttcgaggttcccgtcaacgacaacatccagctcgaattcaccatgctatccccattccaccgtcttaacctacaacagtctgcaacaacaccaaatagcaccatcttcagcacccggttcactgttcctgaccagcatggcatcttctccttccgcgtcaactataaacggcccttccttaccaacatcgaggagaagcacgaggtcacggtccgccactttgcgcacaacgagtatccgcgcagctggaagatcaccggcggctgggtctggatcgctggcctttggtctgttatcgtgggattcctggcctttgtagttgtttggctttattcggagcccgcgacggcggagaaggcaaagactaagaaaacgcagtaaagcaaagacaaatgaccgcattcatgggttatgtatttattcaaaaatatcacatttgtatgaacagaaataccttgctagtcagtgggagccggaagattcagatgtactcgatgtatacgcagtaggtcagagatatatgtacacatgtaatactcacccaaagcaaactccagtccatgccctgagagtagagaaaaccctctcataattgcgattccccaataataacggtattagccagagcgccttctaaatcctgccgtgtcacccatctcaccacggcgtatccctcctcgttccatagcccatacccacagaccacctaatttagtagtcccctaga

SEQ ID NO: 963 - DNA, 1908 bp, Emericella nidulans
ctcattagctattctgataatggatgccgtgacgaaagcccattctgatgctcacagctctacctacttcgacacagttgtctttctgaccttgttcattctcgctggtcgttatatggaggcgtacagcaaggggagagctggcgatgccgtcgccgcgctcggaaaattacggccgtcagaggctttgattgtcgtgaacgccagctcagacgaggcgcagagtatcgatgtcgatctcctcgaaatcggagacatagtacaagttccccatggagcctcccctcccgccgatgggaggattgcagggctgggatcattccaattcgatgagagctcgctcaccggtgaatcgaaaccagtaagcaaaacagcaggagatcaagtctacaccggatccgtgaacgttggtcagcccgttgagattcagatcaccgctattggccgttcatcgatgcttgatcaaataatcgctgttgtgcgcgagggtcagggcaaacgtgcaccccttcagcgggtcgcagatacgctcgtgggccattttgtgcccgctatcacattgatcgctgttctgaccttcgtaatatgggtctctcttggagtatcaggagcgttgccctcagactacctcgacgtaagccgtggcgggtggccattttggagtctcgaattcgccatcgccgtctttgtcgtcgcttgtccatgcggccttgcacttgctgcaccaactgctctcttcgttggtggcggattagctgcacgatatggtatcctggtcaaaggtggaggtgaagctttccaagaggctagtcggctcaacgccatcgtcttcgacaaaaccggcactctgacggaaggaggaagcctgcaggtgtcagaccatgaatcgttaatcacagactcgagtcatatagagattgcctgggctgttgctcgaaagctggaggaaagcagcaatcacccgattgctcgtgcgatagctgccttctgcaaagcacagccgtcagcgtcggttgtcaactctgagatagaggagaaatcaggacagggaatgcagggcagatttactgtatcgctagtagactcgtcgaatggtacagcaacgacccgacattttgaagcggctatcggcaaccagcgtctatatgaaagcctttcctcttccgatcaagaccactattacctatgcaacactctctccagataccaggcaacaggcagatccaccgcgattctatctctgcgagagatatgccctactgagcctgactcaccaaccggaagtgaaacccacttcttcccagccatagtattcgcaatatctgatacaattaaacccgatgctgcaaacatgatttcgcagcttcagcaacgcaaaatcaacgtcttcatgtgcacaggtgacaatgaaaccaccgcgcacgctgtcgccgacatgataggcatccctcgaagcaacgtcctagccaacaccctcccagccggtaaagccgactttgtccggcaaattcaaatccaacccgcacaggcaggcggcggcggcacaacccgccaaattgtcgtcttcgtcggcgacggtgtcaacgattcccctgccctcgccgccgcagatgtgagcatcgccatggcgtccggctctgacgtcgccatcaactccgctagctttatcctgcttaattccgaactcaccacaatactcaaccttgtcctcctcagccgccgagtcattaatcgcatcaagataaactttggctgggcggtaatttacaacctctgtctggtccctgttgcagcgggcgtcttctatccgattgtctctgggcatagaatggccactggttatgggggagatggtcaccgtccaatcacattggcggctaagcccagtctgggcggcgctggcaatgg

SEQ ID NO: 964 - DNA, 1011 bp, Emericella nidulans
accgaattactttgggaatgacattccaaatgtcatactttgatgagacctgttggcgctcaatcgtccactgggccagtgcgctctttccagcacctgggtttcctcgcacaagcatcaagctccgcggcccaactgtgaaggtggttaaatgtgactcgaaccacgagaacgacccatctgccagcgagtgggcttggctctcaagcagcatttggagagggcggtcttggatcttgagaaactgatagacagactccaggtcgacgtgctgcattttggacttaacagcaccccagcttgccttccgtattcggcgccaatgaattgtgaatcgactgaagtagcagaaaaagccatggtttagaacctcattcatagactgccaattttgagttcgcataacctgccgatattccgaggatatatgaacgaccagttgtagtaggtgggcgtaaatctcagcaacctctcgctgtaacgccctcgagctctgaaattcgttctcttcttgaagcaggtacgaaatccccaacgtcacccgtccatatctgctgaaaatggcatcgatcatatcgatattgtcgattcccatctatcacagtcagaaccgtctagtatgcaataccgcgaacgtacctctaacaaaagcagggttgctccccagatcatcgtcgtcgcctcttcggcaccatccatgaaacttgtaacggaatcgcgtagagaggcaacagcaaaagctaatcgagacgctcgtcgcaaagtgctgtcgagacgactgccatccgcgggcatccgccgcagccgctcgccggcaatggcatcgaaaaagacatcaaccgtaggtgacttttcctgaagttcatcgggagttaaccccagacgagcatggcactcctgggacactgtatccaccgcaccccgcaggatcgggagggatgatgggccaccgtcgacagcattggccgtgtgtgcaggcatgctgctcgacgcggcggtaaaccccgacat

SEQ ID NO: 965 - DNA, 2614 bp, Emericella nidulans
  unsure (1)..(2614): unsure at all n locations
tatctaaaaattattctatcttaagtttaaagctctatagcacaaccaaaagtaatttaaattagataaactaaaagtcttgcaaactaggatatctggttatagtatacctcttaatattatatttagaatatattagtagggtatatttaggagctattaaagttaagatagtatttctactagtacttgttaaggatctactttgtcagggcagatcagcctgtcaaccaggtaaggatgccaatgccacgtaaggccaacaacaaggaaacgaatagtaatgtattgcaagactaaaccttggggatccttcagctgggggatctcccgtagtcctaaatacatttgtggaaagacatggatgtaacccaacagtaagaccatgacgagcgataaagtcataccaaactttatctgtaaacggcggccaagtccggtggtttcgatgatgcaacatgggaaaggatttccggatctctaacgcctatcttagagcttaatcgatcgtttgcctgaggctcccaatccttgatatcggggcccagcagatccgtaacatgcagcaactggtcttatcctacttatacctgagaaagtcctatcaaggttaccaaagcctaaaataccaacaccatcatctacttctgaaagcaactaattatttagtataggcaagactccagcaaatctatgttagttgggaaagcagaagtagtaaattaaacacctttaaagctgctaattaatatctcctagtacaatagagcaggcagtggataagattattaaaagtacagagattactatgtagaatgctattctagtacagcaagagatccagcaactttgtataggtataatatactaaaaaaagaagcagaagatatcaaggtattttatccagactagtggcagtctgacaggcagtaaagggcagcaaaaggctcaagaacatgaagaactcacccaacaggtaccaaagcaacgtaggccaccaacctgcagcaactacaatcagaccagatataatagattgtcatgtactaatagatagtactgttctatctgataggaaaatataatatttgtattgcctgaagcctgcagttctcgtttatatttctgaacatagtttttctatatttggccgcgcagctcggtggtggattacgttaacgaatccagtgcaaatagcgagaatggaggggtctagctgagggggtgtcgacttgcagtcctcatatccccacgtctctaaaactcaatatccccgaaatccatcattctaataatccttcttcgtcttatcagtcatcgatacacaatggcgtcaaatgccagtcctccttctaatgacaaagacagtctggatggtaatggcaatgactttgcaattgatgagagcttcttcgccttcaccccgcgcagactccgcgttgtgtgcgtcggcgccggattctcaggcctgataatggcgtacaagttgaaacatgagcggccgctcagttttgtcgattttactatctatgagaagaatcctgaagttggaggaacgtggtatgagaatgtttacccgggggtgggatggtaggcgttcctccactactgcatgggataagtgctgatagacatgacgcagtgacatccccattcgtgcgtctctccaattcccgctctttacttcgatttttattctattccttatatataattatgttttaagcatttatgcacatgcctatcgcgtcgctaattgtgaaacccacctacatcttctacttcaacccgaaccccgactgggcgtggtgctacgccaagggcccggagatccagcagtacattctggacacggcagaaaggtaccgactcgagggagaggattcagtttatgacgaaagtcatcaagctaatctggaacgataaggagggcaaatgggacctgaggttgcagcgngtaatggaggtgtcccaggataaggccgacggggcgatttttagacacatttcccttccttacccccccaccttccactccatcaaacctaacccccacaaatcatcactacctacccaacttctaaacccttcataaccaccacactatgtctaccctatcttccactacacccttcaccctctaactccccgttacattaactctccattccatacaatctccatactttcccacctctatcaccctctcatatcctccattcaatcacatccaccactcttttccatcccaatcctaactcataatcccccctcaccatcataacttcatacttcttccactttaatcccacttcatcatccctacattctccatccacttccattccccttcctctcccaattccacatactttcacaccatcccaccttcaccatccacccactatacactcatctcaccccaccttcataaacagaaccaatcctccccctatatacaccctatcccctccctcactcctatactctcccttaatcccacctactccttatcaacacatcttctcttatacctataacctctccaactttcaatctccacctctactatattactcatcatctttacatctcttcctccaaatctactctt

SEQ ID NO: 966 - DNA, 3692 bp, Emericella nidulans
tcaggttgattcttaggtggatgtaaaccccagagcagacaaaagggacctatgggattccaattatgaaaaactacccttctcaatcacctgttggtgatcctcgattggtacagcgtgctcaaaagaacttacttctacatgttggattcgaagagatcaaacccctaatagctattttgggaaaatgttgtacacttcccctcagagtcttaaatgcagtttggatcggacccgccctgacagaacctaacatctgtcaacagaaaatggaagctcaacacggtcgatataaatctctccactgagcatctagtagccccattctgaaaaaggaattatgggtacagggtcaatctcatgcgtctcccgacgaaatttccacacccgctcattgcctgattccaggcggaactcggtgtctagatagtcgacaaacgccttattccctacccttggttccccgaaagtcgtcacgacgggttcccatccgcggagctgcatttctgttcctgcgagagcggcaactgcgccgccgagagagtggcctactagggttagagcgtaatcagggtattggtctcttgctgcggagatggtgtctaggattgttgcgcgggttaaacgccatgcgttcatgaagcctaaatggacccaacagtcctcgcacttcggtgcatcgccgtcagtatcgttgcctggggaaaacggtatgtattcctggggatacatggaaaggtcaactattgcgttcgggattgagtatgtaccgcggaaagcgactatgattcgcttcggtgaggggggatgcgagagggcgatgtagccgcaggaatcagagagaaagggacctgtatgccatgtctgagtttctatctagtcagctactatctctcaaacggctcgggtagatcgtctgtggaaaagcgcacgttgattagttcaaacccttttagctcatcacagtgactgaggcattggaacggctttctaatgccagtagtcccaatgcagtaggcgatatcgacaatatgagccagctcctcaatagagtcaaatagttcctgggagatttgcctccctggcgtgatattttcgggatccttgctggcctcaaggggtaccacgtgagcggtcgagacgctgcatagcctcgtgaggaatataataagtgtaaggaataaactgtcaagagacaccgtcatagtagcgtagcaccagagctgtacctgggcatcaacgaggcgggggctaggtagatatagagtggttggcgttgcttcttgaacataacagcggcgaatctggggtaacgctagtgcagcgcttatcccgatcaggccacatgtacaaccccacatgcattgagtatcacccgctgattccacctgactactcggtactgtgagtgaccagaactgaagtttcgagttgaaatgtgaattgttactctttattatatctctatttgtgactatttgtatgaagctcagcccaagaaccaactcagatggtccagatgacgacacggccgtcaactccgcttgctaggcagcagtcagtatatgctagaaatgtatgtttaagatgacttactgcttattttgtgcacggagccagcggtatcctcatagactctaattgtgttgatggtgttttgatgaacggtcttgagctgcgtgtcggcctgcgtctgtcccttcaagtccatttgacggaacatgttcagggcagactcttcgcggacactgccggcgccactcctgccttgttctcaatagtgccctccaattgccaaccattttcatctccacgaaggcgatatggctcgcagtcctacgccatcaagttagagtcattgtcgatttgggtaacagaaaaacatataggccagaacttacatggccagcggcgataatttcgttctctccattccagatcaaactgttgaatggaagaagacgtgtcgaaatattcagcatggcgcggggaggctgctcgggggcactaggatacacgatagtgacactgctatcatgcccggtgaatgcaagcgcgtttccacttggggagaagcacacgccgtgaatccaaccggcagagtcgtttagaaattcgccacagatggtgttaaagggaagtctctctccccaagcactcggctccgggcgcgtatcgacgcccttgatgaagctggaaaagactctcgcatgagagtcagttgagcctgctgcaaggagaacagagttcggatgccaagccagtgtggtgatggtgctccgaatgggttttttcaggtgcttggaaatccaccagtcgttctcctcctcaaagtagcatacagcaataacgcgggcaccagatccaacagcaaacttctgctcagatggcgaccaacgcacaaaagttgcagcccggttgattcgaagtagtaccagcgtgggtttccatcctgtgggggtctgctcccaaacgtaggcgttgcggtctatatttggtttgaattagctacagtcaacaagacaaattttgttcctaccctgcgagcaagtaacaatgcgacccgagttgggtgcgatatccacgctggtgacggtcttctcgtggcccttcagctcatcggtcagggagaacttgctgcctgtcttttggtaaagctccacattgttctctcgggcaacggcaagaactgatttgtcggatgagaacgaatgatcagcaataggagcgtgaaaaaggtggtgaggttcggcggtagccattgttgttgtaaggacaggaggagctctctactgtcgccgagttgccgttgagttgacacctggtaggcggggagctggggagctttggggctatgatgcgaattgcggacccatggaatgaacggttagataatacttcaagtcatgtgaccagcttattctgaagacggctcacatcaacttcaacgccgcatttacgcgacgcatttacgcgacgcattccacattatattccgactcttggaagtgtaaaggttgcggccaatccaccttgtcaatctacacggctcactatttcggtaccttgaaatataattgattgtcgacaatggctacaaaaacaggccctgctcgcgccccagcgaagccgcctgctggtcttccgaaccaaacgtcagatgtcccttctcaaggctatatcaagattgctgactcctcctgaagattatattgtaccaacctcccagacaagcttcgaaaatatgacctccgactcgccctttatacacttttttccacatatggcaccgttctcgacattgtggccatgaaaaccgaaaagatgcgcggccaagcccacgttgttttcaaagatatccaagcaagtacacaggcaatgcgtgcacttcaaggattcgagttttttgggaagccaatggtaggttcactccaagcgttgactggtggtgactgacgtactggaagaaaattgtctacgctaagggcagttcagacgttattgccaggcttcgcggaacttatgtcgctcctgcaacagctcctggtcaacttccgactgtgtcaacggatcttcaaaaatcgatttttagcggaccccctgggcaaccgctttgcctccaaagccttctggtgagcccaacgggactgctcaaggagtgaagcgccaccaagatgagagtgatgaaggcg

SEQ ID NO: 967 - DNA, 1093 bp, Emericella nidulans
gcagcagcccagcgccagtatgagtcctgatattgagaaacgcgagtcttcttctgttcggagtgttacacaagatggaactgaaaccgaaatccctgcctgtgataacgaaggcaggtccagatatcagagatgggcgcagaatgtcaagggcctggagacgcgagggatcgagccggtgccggttgaggagcggcagcccgtcagcgcgtctgcctcgttccatatcctgctcacgtggtttagtatgggaatggcgctaaacaacttagttgttgggacgctggggacggttgtgatgcaattaaattttctcgatgcggcgctgtgtgcgctgtttgggaatgtgcttggttgcgtagcgattgggtatatgtgtacctgggggccgaggagtgggcatcgcacacttgtgaggtcgatccattgtgatcttgaggagatggaagctcacaattgctagatcgtatcgcggtttcttatggggttcaaccctagcaaggtgtgctgctttctgaatgtgcttaccaacattggttatggaatgatgagctcgacggtcgggggccaaattctgtctaagctgtctggcggcgctgtatcagttgtggtcggaatcatcattgtagcccttgtgagtctggtggtggccaccttcgggatgcatatattccagtactatgagaggtatgcccagccaataaaacacagagaccaaccgtcgctaatgcaagcagatacgcatggttcccgcagttgatggtcttctgtatcctactgggatcgtccggtccagagttcgatttcaatactgtctctatagggtctgtagaagaagtcaacgccaaaagactggcgttcttctctctttgcctctctgccgcaatgtcctgggtgccaggagctgccgactatcacgtatattattcacctgataccgggacgtggaggatatggtccctgacgacggtaggagtaggcttagccatgactatcacgctccttctcggtgttgggctgggaactggaattgcccacaatccccgctggggcgccatttacgacgggacccccggtagcgtggtgatcgcgg

SEQ ID NO: 968 - DNA, 3213 bp, Emericella nidulans
cgcagttctgttgctgatgctttttgatcgcattctgtttttgtttttctcctgcgtctcattcttagcgcgaggcataattccccgaagctggaggcgggttgcatgacctccgagctgcatttgatggtttttttttttttttttttttttgggcatactcgcatcttgctaatcacagtcgtgtcaacaactatacctagcagaacacggcttagattgcgaaatatagattataggcaaggagctttggactgtctgcaaggagtctgaaccaaaattaatagagttcataactagaaacaaggtcactcaatcctcttctacgcttgtacccgcatgatgctatttgcaactgctcctagctcttatgatccaatcgattcctcttacccctccagagctagaaattggggttaattcctgccatatcgtctccacctaatgagtgactgcttgggtggttcgagcagagagattggacattctcaatgacgatagacattgcaatctgataactcacgtagaacaaacaatgagatctaccgcttcttctacggatctctcgatcagtgattatgtatatgaaataccacactagccaaccctgaaccatctctctcaaagagtgaaggttagtgtagacgacagccactaaacccaatctgggcatcacccccactcacacgtggctggccgacgccggtcctgtttcagtacccgtaattctgactgtgtaactccacgtatcagttcaacagcggcagaaatagtccgctcacgtcatgatgtcctgccatggcctaccgctttgagctgctttcttccgaaaggcggtgagggcttggggagcttgggaaggcgattaatgaacttcattatttcctcggcatgccttacaggcattttttgagggattgaacagaaacgccttatgatttatacttcaagatactatcagctttgcggaaaggtagtgcgggacatcatttgttctgaagctcaagttggggtcttaattgagcgacttgacataagtcactatcccgaacgggtacgaccatgtcttcttcaagaggtcggggtcctaatcaaaggagtccgcatgtcttggtaaattaccccattctgatcactcgctttgtctttcaggaagccactgttgatacttatggttatatctttaggtgactgactctcgagaacaacattcgtccgcgcaaccccgtcgccgccgttccccagctgccacccgcttcatcacggtcgataacgtcctccaatatgcctccgacattccctcaatgcaacagcggaacccacctgatgcagcacgattacgacagcgaccccgtctgccttccgcaacaggcggtttgatcggctcgggcgcaggcggcgcaagtagaaatgccaccagcagcgccaatgcatccagcacagcagccgcaataggacgtctagcggctcaagcgcacctgccgcctcgtacaacaaaagttagtgagaagcttgtgctacttcccgaggaaggggttgagccgcaacctgaagatgaggacgaggaagaagaggagcaagggttgggtgatgagatagtggacgaagaattggtgcaacggattgcaagggacaagaacattgaccccgactctgtgagacatacgttgctggcacagaagaagaagctcaggggcgatttcagtgtcgataacgacgttgcgccgttgctggcggaggaggaccggacgcgcaagagggcgattgcaccagagagagccaagagttatgcagagcgactgccgaaggcccgtcgtgctgagaaattggctcgtgtcacggcatattgtaccgcgcaggcttacaagatgagttctctttcatcattcgtgaaggatacgcatggtggaagaaccaaactttatgatgactgtctatatacggcgtatcatctgccgttgttgcctgggcacgagggttacagagtgcggagcagtccgttggtgaagaagcctggtggaaagtcattgttagatgaggagattgaacgaaacgagctgcgagatcacgacgaggattatatcgagtcagaagagcactctatcttggagggtcgaccggacgagcacgaaaaccaagagcggaatgggcggccaagctccagtaagggaactgctaatgatggccactcgcaaatattgtcccccggctccacgcctgcaagacttccatacgacgtagccgagatgttcgtattcagctacggcgttgttgtcttctggaacttcacagcgaaacaagaaagagatatcctcgctgacctggcattcgcaacctcctctgcaacagggtcaccaataaccctcgcaactctaccgctacaggaagaagactttgagactgaagaattccactttgagtactccaccgaaatctcccgtccgcgcgtctacaacgatatgatcactctccgaagtggcgaccatatgatcaagctagccatcagccatggcatagcccaaagcacgaaactatgcttctttgaggaagtcatggcccgtcagatggcggaggcaaaggacgtcccccgccgtctcgccatgacagggaaactaggtctaaaacgagaagaggtctttcgcatcctaggcaagctattcaagagtcgagtggaagttaatctctgtacgtcatctcttaaagagcacatggttgggcgttcgttaacagatcaattgcagcttctaatgtccttgacgtccccaacttcttctgggaaagcgaaccaacgctttacccactctacattgccgtccgcgaatacctcgaaatcaagcctcgtatccaggttctcaacgagcgatgccgtgtctttctcgacctcgctgagatactttcagacagtatcgcagatagcaacacttcccgtgcgtgttccctcttaccccataacctccctactaattctcagatagatcaaacgtggatcatcatagtcctaatcgtcatctccatcctcgttacaacatccgaagtcttccttcgattcggcctcctcaactcaggaaaagggacctcagcagctggattcggcgctgctttattcggtaaagttatacggggcttttcctccactacccggacgtgttcttgtccgaacgtgatgggctcgagctcgaatttctcggggttagatggcttctcgtagtaact

SEQ ID NO: 969 - DNA, 3198 bp, Emericella nidulans
  unsure (1)..(3198): unsure at all n locations
ttaccgagtctattgacagcgtctacaacgcatttggaactgttggtgattatgctcgatctgatgttcgcggctacttggaggatctagcttacgtgctcgactcgggtattaaggtcgccctcgtttacggcgaccgcgactatgcctgcccgtggaacggcggtgagcaagtaagtctgcaggttgactacagccatgccgacaagttccgcgctgccggatacgcaccgctgcataccaactcctcatatgtcggcggctctgtacgccagtatgggaacttctccttcacgcgggtataccaagccggacatgaagtgccggcatatcagccggagacggcgtatgagatcttccaccgtgcaatgttcaatcgggacatcgcaacaggaaagatctccacggctaagaacagcacttattccaccaaggggccttcctcgacatggaatgtcacaaacaccgtgcctgacagcccggagccgacttgctatatcctctcactgtcatcctactgcactgaggaacagactcaaagcgtggcgaacgggactgcattgatcaaagattacatagtggtggaggaaagtctctaaaccgggaccccactgcgagcgtatttagatatatattgctatatatacatatatacatgtatataacttgtttcacgtgcaaaatgcatgtaaagtaaatgtcggtaaataaaaagatgccaactaaaaagataaatgagcagtggagcttggctggacaccgataacgccaaccttatccgtaagaggtaacttgaagttgtagcgggccactttcaggcaccaccggccagtgtcgtctcccaatctggccctataatatgattgccattgtgctgagttcgttgagcacttcgcctctgttattctagttgaatcagtctcaagacgactgtgtcttaccacaacggcaagttggtggaagcttctagaactttcgatggctggtgctgccgtcaacgtcacacgtcactccctggggctcttgcaagatcgcactgccatcactcaaggcaccgtctgacactcccatcctccgtatatatcggcatcttcatcctgctggtatcccttcgaaacgtgccctaaactaaacagcttactgctgttctgtgcctttacctgcctgatatactaccaacagctccccgcactataccttgccgaaccttctacgtcattcgagttcccctccaacagcctttattacctaccgacccttttgacaacacacctttgggcgtactgcatccaacccatagattgattgggttctccacttattaatcaataactgaagctcaattcgagatcacatacacattatggtcgcagaaacaaagttatacgatgcgcttggcatcaagccggacgcttcgcaggaagatatcaagaaagcctaccggaaggctgcgttgaagtaccatccagacaagaataaagatgatgctaaagctgctgagaaattcaaaggtatgttatgatcttcccttcttgttcatttcatttgaaccccggctaataccgtatagaggtctcccaagcctacgaagtcctctcagatcctgagaaacgcaaagtctatgatcaattcggcttagaataccttctacgtggtggtcctgcaccaacacccggcggcggcggtcccaaccccttcgagggaggcggcatgcccggtgggttctcctttggtggcatgcccggcggcggtacgcgcacattccacttctcaacgggaccgggcggcagcggcgggttccaattcagctccgcggacgatattttccggaacttcaccaaggccagcggcggaatgggcggttttgacgacgatgacatcttctccatgctaggcggtggccttggtggcggagctcgcagcggccggtccgcggttccgaagcagtcgcggagcgagcgccagtggtaatggagccggcgctgggttccagcgacagtcgcagcgggcgccaactcctgaaccgacggtcgtggagaagcagttgccgctgacactggaggagattatgagcggttgtaagaagacggttactgtgaagagcaagacgttcgacgcgagtgggaaacggactgtgcaggatgttacgctggaagcgactatcaagcctgggttgcggaccggatcgaagatcaagtatcggggtgtcggcgaccaggaagaaggtggccgccaggatgtgcatctcattgtgacagaggtaagttcacggctacatgaagcaagcccaataactcccttgttatagaactaggcactaactccaccatagaaagaacaccccaacttcaaacgccacggcgacaacctcatcacaaccgtcgacctatccctcaaagaagcccttacaggttggactcgcatcgtgcgtaccattgacggcaagtcgctcagagtctcaaagcccggtcccacgccgcctgggtacgaagaaaagttccctggtctgggcatgacaatctcaaagaagcccagcgaacgaggcgatctcattgtgcgggttaacgttgaattcccaaagacgttgagttcgagtgcgaaggaggtgctaagggatattcttccttaattgcctattggatagattttcgtcatgatctccttcgctttctgtttggtccggtacatatacctagtttttattttcagcattgttggcgtttgggtgtgtggcgaattttcatgataatgatgggctgcaggatttctttactcaatgaatgaatgattatgatgctatcccctgcagcagatctgcctaacatttctataaaagcatattcacatgtctgttttgtctcaatgacgcctcgtttcatctacgtaagcccttgtaaatgcaatatgcacctggtcgtaccggaggccatgaaacccgtagagtacttcaaaagaaaatcaaataccgtctagcttaagagcaacatactataatttacgtgaatcacagagcaccaagctccttgagcttcgaaatcaagccatcgacatcctcgaccttgccaccgccctgtcgggcagggggttctattacaggtcagcgttgagaccataattgaaaaaacaaataacttacctgtaacctttagagtctacngtctcctcttatcctcaaccccgagatcctttaacgtccac

SEQ ID NO: 970 - DNA, 2688 bp, Emericella nidulans
tcaacagcgtcgtaccctgtacggcacagtcacgatagtggcgtcaataactcaatcgtaatggctaccgattattattgcggttatggcaccgatctttcctgcctaatcgaatccaaacagcggtgacgacttgatgtccaacgccttatatcaggcccatacttcttcaaggcgtcctgtctctagactagggtaagagcaaataccgaaggaggcgagcattaaatgtagtctggaatacaagaatataaggatgtctatccaatactgagtaaagactagacgaaacgaaagaacctccattggtaatgtacatccagttccattcccttccatcaaaccaatgctcaagtagttccgtagtagacgaaatactatctggtaaagtagatactgtataggtcccattccatgcacgcaaagaaatacgatatctaacaacggtacaaccttacctcgccgttcccaaaatctgtccctcctcatcctcctcattcactgtcacagtccaaagccccaaactctcgccaccagcagaacgggcatctggcttcgcatgcgcattcaccatcgccttactcgagagtgctagggcgtccattaactcggccatgcgcttcccagccacaaagctacgtgttagaggctcgttttcggcgacctgcatcgccaaattcatgcattgcactaagatctcggagctcacgatgtgcgcacagtagtagagggcgctatggtattcgaggaagagttcagggatgtaggtggtgcggatttgttcaagttcggcggcttcggtttctggagaagcagcattagtgggtgatttagggacagtgttggagggtagatatggtagataaaacttaccgtctcgtggggtgactagccagtcgtaggggatattgtcaatgtgcacgctaatggcgtctagggcgtcgtggacttcctccttaatgcccttgatggtccccgagtctcgtcggcgtttgagcttgtcgactttttcgcaggtaagagcaaatgcttccagagcgtcaaaggcgaggatgagctgttctaggtcgcgcatagtctgtgactggacgtaaagaagtcgagtctgactggtggattgcaagctagtattggatgacttattccgcttgtgaccaaaggacctcagttttgacggactggagggctctggggtgccgcggtcggttccatcctcatagtcccctgggtagaagtccgcaatatcaaacccgaagaattcacgcgagaggtccgaaaggcgcatccgccggctcagctctctagcagcaggaagtttgccggatactgtcggaaaggttagcatgattcggagtcaaatacaaacaaactcactgaagaatttcttgtagagctctgtcccaagaagacagatccggccccattgcccgtcgacaaaacgaagccattcaacgctacgtatgagtcgctcgtcttgcgtcgaaatttccgtcccgatgaaatccttcttgacaggtgccagctcgcggataccatccttgcgaacaatgacttttgacacccacttgaatgtcctcgtgtgctcgacagcagattttacagctgtgaccgaatcccactgctgtgcgataactgcttcgatgtcgattccgtatttgtttatcaattgaactagcaatctcctctctctctcatcaacgatctcgagtaacacatccccaagcaccagatactgcccaagctccggtagaagcgacgcatagagcggaatgatatcgacaagcccagcttcctctaggtcagcaatatacccaatcacatttaccgacgcagtttcaagaaactgatgatctttgcgcacgtagccggccgagtccgcgacaacatataggtgagcagcaattcgtaacgcatcacgatcctcagccgcaatcaggagagagtcatccacgtaagtgggttccaggtcaggcacgtatgacggtccgtctctattggtagctgcctgcgagacagctttcgccaaggacgtaaagaaagtgtcatagtttttacctaatatcgcagcttgaattgtccggtaggggtttcgagcctcgccaccgactcggtcgtttcctttggtgtactgcacaaatttgttgaaatccgcatacccggcaggttccggctggaaggccacagggcttgtgggagaatgattgagctttcgctggaactgcttgcagaagcccctgtaacgggctaaaacctgattgttgaaccaaacatagagataatcgtcccagctcgtgcacaccttactagctgcttctgagtcaccacacaaaagtccgtagacagcccgttcgaaatcttctgtcttggagtctcgcgcaaggctagagcaagcagccctccaggtttcttgggacgggaggttcatatacgtgtatttccatggcaaaagccggtggttccccattgaatgggcattaatgctgaaccgcataaccgactggcgccatgcttcagcggttgacgcccctgctattttagccaagcctgccgtgtcagcttttcggcttaatccgtggcccttttaaaggcctttttaaagtacgtttggggaaaggatcggctaaggggacccggacggtggcaaccccagaatccccccatggaatggccggggggggggggtttttt

SEQ ID NO: 971 - DNA, 3038 bp, Emericella nidulans
  unsure (1)..(3038): unsure at all n locations
gttcctgcgtaatcgtcagccttaatcgaagtaaattgctaaagtggtgaagactaccatcccaatcccatgcgcgtcgacagccccctgcgatgcctccgcaatgacagacataacagccttgcccaccattacaggaagatggaacgggaggaccgtctcattccgcgagcctggctgcgatgcacgcgtcatggagagtttccacatcatggcctgaagccactgctgtgtgatgaggatatcaaccttttggatttccgagacaccctcgagcgagatcggtttgctgagagttgcctggatggctgatgtaggcggcatctcggaggagccgtctcggttatttccacctccgcttacgcttccccctgctgagacccagtcgtaaaggttgacgctgaggctctcgaagacgccgatgaggttgatgaagccgtaggcgagaatcgggtcgtcggagcacaggacttgcggtttgtggatggagttgcggagcatgacaggtttcgcttgttggagggcatagcctctgcagcacttgtcagtttatggtctattcagctctacggaggtaaataccgttctgtgatgaagagcagccagaagacccgtcgcttctgttctgcttcttcggtgttcaactcggcgtatgttgattcgcggtgcaagcccaatgcgaaaaccattgatgtcgcctggcaaagatagaaccatgcgtggtcctggcggtctagatttccgtatgaagcaaataggaagaatgaggttagaagactctcaacattcatatcctcaattgggtcgcaatctttccttgcgcgcacggcttcggcgagcagttcttcaccggacattgatgagttctcaccggcctgaaaatgcgaaggatccgcgacgggcgttgctccgtcgagtttcagctggatatgtgtggcggcacatagggaggccagaaaggcgtaccgctggggagttagacgctctggatggtggcagtcctgctggagctcttctcttcggaccacgggcatgataggaaacatatatttcaagtagacattgacgtgcgccagaagcacaggtgcggtcagaatccgcggcgaacgaaacagcaccgcagtcggagagtccgatagggagttcagagaatccggcgaagagacgagttctggtggaggcagccggctgaatgagtcagggtgttcaggcggcagatattgcggctcttccatgaagggcggagacgtgggcgagccgccgaccgggtagctcgtaggctctgcataccattccctctctgcagagaatcgtggaggatcatactggagaatctgtcggtctctggccactagtggatggataggcgctagagggtatagagtccgaaatttcggccctttgcgacgcagcacatcgctgtaggagcaggaaaggagcaggcgctggcacttgtcgcacgggagctctcgtgagcacttgattttcctccggcgacagttgtcacaggcctgcttgaaaggtttgtgtttcggagcggctggtgaggccatggtgcacgatggccgggccaaaggcgaacgatatgagcagtgccggtagatgagaagctagtcttgaagaggcatgcgggtcatgtcggattgctcgtcaacagtataaaatcgctatagtccttgcagacgtacgcatgggtgaaaatctggggaaagcgagcgggggagggagaggataaagagagacgggcaggagtaatcggatagcagtgacactaactccactatccgcttgccctccgtatagtactccgtagtggcctgcagccgtagtcaggctcagccccgcgttacaccattgcttctcggcttcgtctcttagcaacccttaacagttcatttaaggcttcttcgcgttagctttgccggtggactgcactccagcctgccaccttttgcccagagaaaagagcgaggtgacggctacagccaggcccgagagccggctgtcagaaacccctgaatcctggatccgggattgttgcccagtatgacgtcttggcagcatgcgcgattttctagaaacctcccctgcatgaagcccatttgcctgtgtgatccttggtctagcggtcgtcccctgcgctggccattcgtcagtgtcgagtaagacatgaacgcctctttagaaatcgggcttctgtggctcacttaagggcccaagtctgtcgggaagccgaggaacagcagcatgacccaaggaaccgatgcagtgccaaccacagatgccgaatcctcgtacatcgtcttggtggtgttgatgtgcagcgaccgttctccaccgtgggttctgggagggggcccgattccagtctcaatctcgaggtctgtttgagttttaggataacgaagcgctggatgtctggatttcatgatttcatgtgatactcatggtgccgagagcatagctagcagtccagactccggattatccaggaaatcgatcaagtcgactgttctcagtctggtcggggactggggttagcgggaaggctggagactggagttgctcaccggtggtaattttaggcatggcacgcccgcaacattacgcacacaatacgggattctggggatgaaccctgctctgggtacacactccgtacagaaatgcttggctgagagttaacactccacaatctcctgtcttcatcctcttccatcacccggagcttcgaccttcgaatcctgcatccttgatatcaactatcctcgactataacagcttcgttataggctcggtcttttgtcggagatctgaccaatcaccattntgcagtgcctccacccctcgaacggatctgagttcccagctatgtacgggttgatcgcaggggacccgacagcctcccatacccaatgcttggtggctgtgcttttgctttaacaaggctcttttatgatatctaaaatcccccttgctgcatgtgccttagatttaagtaaatgatatcgccggactgcaaacatgttgatttgctg

SEQ ID NO: 972 - DNA, 1984 bp, Emericella nidulans
ttgtaatccctcttaaataacctttatttatgagatgtggtcaacggctgaaaagtgaggtacacgaggcggggaaaaatcatggcggtcgaattgggtggatgcttgctcccttgcccaataatgccgctgtagtaacctcccccaggcacgaaaaaaagttcgatttccgccttgaattgcacggcatgggcgatcttctggatctctactctgcgatacatcagtgtgggcactgattagccctatttaagtaactaagtggtgccggtgaattactcctgatgggctcccacgcctatcctctgtgtactcgccagagaatagtagagcatggcagctgattgattagggcagagataggctgctggatcttgtatatatcaaattgaaggacacagcggggacggtggaagtgtagccgggatggatatagttcttactgtcataaccttcacggacctcggcaaagcggcttagctcgaccccgaggatccgcggcttcattaattatcaaccccatatttctctcattgtagtttcaataaccactgccaacgacgcctgccatgccagcaatcgccccatcggagccgccgagcttcgttcaggcgctgcacctggagaaattacccgctgctggcgagcgatacttgagcacgttccccgcactatcttacgactatgcgcccgggaaacccctgagcgtcaatcgctcctacggaggacacgcgtttgcacaggccatctgggcagcgagcctggggatcagagattccggtcttcgcatccatgaagccaatggctactggacgttggcaggctacgccaaccggccatttctctacgaagtcaaaacactgtcaataacgcgatcgtttgctctgcgcgaggtgattgctcgccagccaacgaccccttcggatgagtgcccattcccaaaatcagacggtgataaggaacttggtccggtcgcattcgcgctcacctgctccttcaagcaaagagaaagcggtccagcatactggctgaagtttgacgccaacaagtatggcaatctgctacagcaagatcccagttcatacctgcaggatgtctacttaaaaggacccaacggggtcggttcaatcaggctcgccgactttccaagtttagacatccgaacccccgatttacaggagcacagcatcaaaagcccaggaacttcccacagacgcttacatgtgtatcgtgcttcggaggcgttggacctcgatccaaatctagtggcagctctccacgcatacgtctccgatcgggccggcttgagcgtcctgctgaatgcctttggggccactgacttaggcatctccggcagcctcagccataaaatcctttttcatgtcagcccggagaagatggctgttgataagagaacatggtttacccaggagatgtccagcagtcgtggtggagagggacgaggcgttatcgacagccgcatctggagtccgtcgggggagctggtggcaaccaccatccaggatgccctctttcgtcagcccaaggctaagttggcttaacagaatgcttgataagattagatttatgctggctttatgcatcccatccctatccagtgtttggtatcaaaaaatgttgatccggagataaatatattcagcgcaagtggttcaagaacgcctttgttgtgcataatcagtctagctatgttcaagctatatcgaagccatctcacattttaaaacaagcctgttggacattaaatatcctcatcagctacccctaccctgagccctaacccattgatccctgggaacggcagaatggtaccgttagggtctagcggcatattatggcggaatttttggctgatgtgaaaggctccattgatgatcaggtgaagagttctattgaaaccagacagccaatcaggctcaaactttaccaggatattggaacagatttaactataggtgagcat

SEQ ID NO: 973 - DNA, 1213 bp, Emericella nidulans
ccagcgttggagcatcatcgccgtgcttcttcttggtaagtcctctggcgagatagagaagcagagacgaggctgaccctgcaggcgagtgtatttcaaatgctgatagcacgctcgtcatggccgcgactgcacacatctcgtctgagttcaaccgcctacaaggggctgcttggctgtcgactgggtatacccttggagtatgcgccgcgcagccgatggtgagtagactgacggacaggcgcgacgttcgctgatgcgtacctagtacgggaaactaagcgatatctacggccggaaaccgcttttgctgtggtcctatttcttccttgccctgggctgcgtagtttggtgatcatgactgatgcagatttggagacgacgctaacggctctccagtggactcgcaacggaaatgtggattgtcatcgtcggccgtgccctgagcggtattggcggtgctggcgtcatgaccatgagtgcgatcattatcaccggtgagtgcgaggccaggtgccgggaatactacagtcagctaaccgggcagacattgtggccaagcgagagatcgcaacatggcgagctgttgtcaacctgtccatgacgctgggtcgcagtcttggaggcccagttggcggagtgctgacggacacaatcggatggcgatggtacgtctatcgaatgctcctattgtctacatgctgaccctagcagggcattccttctgcaagctccattactggggattgccgcccttctcgtcgctattcaactcaagctggtccagcgtaatggctttggtgcacagcctaataagtccaagttcagccgtatcgacctccgcggatccatcctggtggccacgagtatcgcggccatcattcttctccttgaccagggcggaaaggcattcccctgggcatccctgcccgcattagtcctagtcagttcgggggtcctaacgcttgccctgtttgtttacactgagctctacgttgcaccggagccgatcttcaaactccagatccttaaacgtcccaacgtggctgctagctaccttgtcagctccttccaggtcgccgctcaggtcggcatgatgttcaccgtgccgctttacttccaggtttctggatcgggcgtccagtaccgttgctggtgctcatatgattcccgcagtggctggcaatgcaatcggggggcttaacagcaggtt

SEQ ID NO: 974 - DNA, 3094 bp, Emericella nidulans
  unsure (1)..(3094): unsure at all n locations
tcaaccaactattattccgagtgcattcgccgcacactcaacttagataaccaggtatacaggatagtctgagatttatacacatataatcataaagctacatacacatgcgatcatgacaagcaaaatcagcaaatcgcccagtaacagcccaggtatttccagccaagtacctctctattccgattcaatcctcgcactcgtaagaatgtacgaatgcagcgcttaaacaatcgtcctccttttaacaccaactgtcaagcccagaggcttcctcaggaaaccttcacgggtctccatcggccccttctgctgcagctcccagtcaaacatgcggaagacagtggagcaaatgacaaggagttccatttcggcgacgttgcggccaacgcaagcacggggaccagtgctgaaggggatgaaggcggccttctggcgggcagtgaggcgctcgggagcccagcgctcgggaatgaactcgtcggcatcagcgccccagatttccttggagtggtggatcgtgtaagtggggacggaaagaatgtcaccgggcttgaagatgtggccgctgatttccacgggcgggttgccttcagggatctcgcggggaagacccatggccgaggtgctgtggatgcgcatggtttcccagatgacccattggaggtaagggatttccttgaccatggcgtgggttggaacttcaacgtcttgggggatggcttcgtcgagaaccttgtggagtttgtcaataacaccaggggtacggaggcagtagtaaaggatggcgcaggacgtgttggaggtagtatcagagccggcaatcaactgggttaaagcttcagcggtaagttcagcacggccgagtttgttgccgttggcatcctttccctccatcaggcgagcaagaagatcgacacgggtgttgttggccatgacctcgggcttgagacgctcgttgacacaggcgatggcaattccagctaggttctcaacagcctcgagaccatcacggaagaaacggtcgggcaagtacttggcaaacggcttcagggcagggtagcatccaagagtagcagagacctcgccgcggcggttcagaacctccacagcttggacgtactggggaggggagtcgggagacttgcgcatctcggcaatatcctggcccttgtcgagcataccaaacggagcaccgaaagcgagatcaccgatgatgtcgaaggcgacaaagttgaaccagttcagagcatcgacggtagcgtagccgttcttggggttccgctgaagattcgagatgcgggtcaactgtttgaccaggttctcaatgttgtggtgaatgtactgctcaaactgaccaatcgacttggccgagaaggtgtgcgataccgtctgcgctgcgggtgtgctccgcacggtcccgggtgttgaacagaccacggcgaatggagacgaaagcatcatagaaatcactatacaattagcttgcatcaactgacacgataactgagaaaacgtacgacttcagaaacccatttccgtgtccatagacagcctggatagctgcatcatcggcaatggagatgtggcggggagcgatgcggacgagtttgccgtatttcttgtgagcattgtccacggagatgaagcgatgacccaggcgagtctgaaggagcagccagaaattggtccaggcagccaggcccggcgcaggaatgtcactcaatcgccatgtctggagatacggaacgacatagtaggcggccagcagtcccagaagagcaagggcaatcctctcgggagtgatgttttcaggcgtaaggaagtcggtgatcatgatgacgggatgtctagagcatgtgaatgttagcctgttaaaggaagaaatgaggaagatccagcagaaatcaacatgaacaataaccctgcaggccactaaccgttggcggtagatgaaggcggggcgggtattacgaagctctgagtcttgggagacaagagtttagaccggtttagaccgttgattctgacttgaaacagaggacctcgattagtccatggccgctgaagtcaaacaaaggccatcgcaacgcattctggggacatatttatgatgggcgctcaatgagggcatccccgaggcaaaggcagcacacggaagtcgaggtcgggagtctggggttctgctcacagtgagcgccagccgattcgcatccccgacctccacttacttcggttatgctgggagagaagacccacggaccgcagttccaatgcaatccttcgctaatgatttgtgaaccatagtcgatgcgatgcggacaagcaaataagaacagaggccaagggaggctacccccagatcaatcagagaggtagtgattacttccccgctttgagagagaggatggacatgggagggcgtccctccattcgtccttgacagtgtcccgtgatcagccactctagcctcaggcaggcctcagcaaacacaagttatccaatcagcagatcagcacacttttctgtctgctgtactccagatactacgagtagtaatactgctganaagtcaacgtgatcattatcattaccttcgtgttatgtgctatacatgtataggagactaccaatcatctccctccactttatatagcccactcttcctcttctcagcctcccacttctcaaaccaagccttcatacgctccctgctcttttgactacccacattaactgtgggtatgatccgcccaatgcgaacggcacagcaaaacatagtcaactctcgaaacgagctgtgctcgctatagggtacgccgaaacacgcactctcgcgcgtgctcccgcgctgtggagttaggtctcgcacggagaagggtgtcttccaatgtgatgagtagagtactgttgacacgggcgggttttcgagagtccggccggcaggtggccggtaagtccaaccggtgggtcggaatccaatgacgcgggtgaagtgcggtttcatggaatcgaggtagtccagagggtttcggcgcggatctcaaagagcgtttgcatatggacttgggcttgaagagggtcgtcggtgagt

SEQ ID NO: 975 - DNA, 6207 bp, Emericella nidulans
cgcactacatctcccagcatctcctccacccctctacccgcgaaccgcttctcatcgccctgggaggttttcccttcgctctgagaagcaacatcgagaaggagctgcaggttttcaaagacttgggcgtgggttgtgtctttgtcttcaatggtttggattttgggaagaagaaccagcggcctcaagcgcaccatgagactgtgagggcgtttgagcatgcttgggagttgtatgatcagcaacaggcggaccaggttgtggatgcgtttagcagtgtcggtatgtgtttggtttgcttttgccttgggttaacgatttatttgaggtgttaatgggtttgttgcaggtactcctcggcctgagtctctctatcgattcttgcaacgcattctcgttcagaatggcatcgactacatggtagcgccatatagtgccgccgcccaggtaagcatctgaccactctcgccactgtatattagcacgctcgctcctgacacctgttctgcagctcgcccatctcagcaccggccccagtccggtcgttgacgccatctggggcccatcggaagtgctactgtttgacgtcgagaagctcatcacccggatcgaaatcgaccctgcgcagtttttctggatcactaaacagacatgtcaagaggagcttggcaggctaacggatgagcaatttctcgacttcgcgcttcttctcggctcctctttccttcagacgttcccattgttcgagaaccccgcgttccctggaaaagctgcttctgttcgcgatgctctgcctatgttcaatgctgctggacgaagcgctctcgccctatgtgtacaatacgaagaagagcgccgtatgcaggatctccagtatacggaccgctataaacgcgcctacatgaatgtcaagcaccacgtcattatggacatggagggaagggttggtgttatggatgccgaaaatgcccccactgacatgcacgaggtgatcggtcagcgtcttccggaggaactatacttttatctctcgaaaggaatgctcggccctgatgtgccaaactatttgacctccggggaagttcttatttcgttgcctcttggcgttgaagactcgaagatataccgaaaggttgcgggcgagatccttgctccactcagagaacaggctatgtttttgctgtcaaatcacctccaccgattctaccagactaagacaatccgcgttcggacttggtataacgaaaatgccgactctactatcactctcagaacgccccctccagtaataccgtccatccgatcctggaaagtttcaggtgaccgatacacagagggagtcaagaagttgcaggttagtaggccatttattttgaaaacgaaggctctaatatacgtagggatcatctggaccattcagattcgctgttcaaagtttgaaggactcggaatttacgccgaagacatttgcttcaaaggatactccggtatgagactatgatatcatggccgctcagaactaacttccctagcctctttcatcgaaggatgaggttattgccaatgtttattggcaattcctgcaactccgcggttacatcaatgaaaagcaccagcttacaccttggggcgaatgctagagcaagccctctcagttctcgatcccgaagattcattggaagaagctacttttgtggctattgagttacttcggttcggaattctgaacgcaacgcaatggttctcacaagtatctggagggccaatgagaggatccggtgagcagacacacccatgatgttagactgttcctaacagtactagatgaggacaagtctttcaacatgttgatttcccgcgttgcctgtattggcaaactgcggcacaagaacatcggctactctggacctcttagcagacagttactctcttaccggtctcttatcaacgaagtccgtgcgacactgcgcaacctcattgaaatcacacttgccagccttttcctcagcggcgacgcaaatcgcgaccgtgatgactggactgaactaggtgtcaggtaagcgtggctaccttgacaagcagccgaatctaacgtattcagccttccgttcattgacgacaacgactgcggcctcgggattgccgtccggacataccttgacgacctgccactgcaagccgaaccgacctcacaagaggcacgcgaagaggtaaaagccaagggcaaggagtggttccagcatagcgatagttttacacataatcttgagagggcattcaaactatgggatgcggtatgtatctctctatctgtgaactacagctcacgaaccattgcttacttgtaataggtctacaagggctcccagaatgcggggaaggagttcaaggacgcaaagatctgggctgatgccgacaagtggttgtctgacagacggtgatttatagcaatatgatgaactatggccacacacgcctaggatttcgtcgtgtcgacggctacgttctcgacaatatacttgatatacctttaatgctgtttccgtagcttatcgtgcggagtatgcagagccaacggggtaaaactgaataggctgcattagcgggaacgattggtagctacactatttattactatctggtatgctcacttctcgactgatggcttcagttcgtagttcgtatctaagtccccggcttggtttttacaagtgtcctctattttagccgcagatccacgccatagctccattattaatgctccccgactactgaacctccactttcagctcgaccttaaccctttacccttcctattcttcgacaattgatctgtcgaccataagcaagctatattatttcactgatcttcgcctccgcgaggatacgttgcaaaatggtccgcgccagcactctcctgctgagcggcttggtgactctcgccaccgctcgctctgcagtcctcgacctgattcccaagaactttgacaaggtcgtcttgaactccggcaagccggccctcgtcgaatttttcgccccctggtgtggtcactgcaagaatctcgccccggtttatgaggaactgggccaagccttcgcgcacgccgaagacaaggtcagcattgcgaaggttgatgctgatgcgaaccgcgatctcggcaagaggttcgggatccagggattcccgactatcaagtggtttgatggaaagagtgaaacaccggaagattataagggtggacgggatctggagagtctgacggccttcgttaccgagaaaacgggcatcaaggcgaagggagcgaagaaggagccgagtaatgtggagatgttaacggatacgaccttcaagagtgtcgttggtggtgataaggatgtgtttgttgcgtttacggcgccttggtgtggacgtatggtccccttcattctatttactttcaagcttgctaatgtattccatgtagactgcaagaaactcgcaccgacttgggaaaccctcgccacagacttcgctctcgaacccaacgtcatcatcgccaaagtcgacgccgaagccgagagttccaaggctaccgcgaggtcccagggcgtcaccggctaccccacgattaagttcttccccaagggctcaaccgagggcattgtctaccagggtgcacgcactgaggaagcctttgtcgacttcgtcaacaataatgctggaacgcaccgtgctcctggaggcacgttgaacgaaaaagccggcaccatccttgcccttgatgagattgttgcgaagtatatcacttccaagaactttggcgagctggttgatgaggcgaagaaggttgcgaagactgtcggtggaaagtacgcggagtactatgttaaggttgcggagaagctggcacagaatgaggagtacgcggctaaggagcttgagcggttgaagaaggtgctttctaagggtggctctgccccggagaagctggacgatatggtctcgcgcagcaatgtattgcgtaaattcttggaagtggaggagaaggtggaggacgtcgtgaaggacgagctctagattatccgactctgggctaatctgtatatggaatgggttgatgtataggtacttgccactgcagatgcagtcttcaggaaaacgtattagattcctcactgaccatcgatgaaagaatgaacattatatgattgacgtcttccaaattctcattgcgcggactcacagcagtacgggtaatcaaggatagggtatctctcagtaaaaataacaatctccgcagcagaaacagcaggcatatgtatatatacacatcacttcgcggcaggagtcgtcgccgtggctgcccctgtcgccgcgtcctctgcagccctcagtgaagcctccagttcatcaagccgtcttgccatgtcgtcaactgccatgaaattcaattgaagtcagatatagccaacccgcaaactggcagaataggacaactcacacttcccaaacatttcccgagacacggtatcgaatttatgctgcaactggtcgagcagttcatctacggctgccgtgaattggccttgaacgtctgtactctgtagttgggcgaggtatcagtctgatcagctccatacgtagcatgtcagagaacttcaaaccggttgttgagttggggctgaaggagagagatctgttgtccccgtaggtgtagaatcttggtttgcagacattgattcggggttgcggccggcagttaatgttactgtagataggggatctcgcacgattaagacctggaatatactgaacagcgtgcaatacctagtgcagctccagggaccgctccgttatcgataaagctgccggaggaataatcttccttgaatcaccataccgcatcggtgctagttcatgtgcagctcaaaaaaattagtggattgatacttcggctctcatacaaacatacaatcaagcgccgccttactctattttgcgcctttaggaattaggttgaaaatgccgaaaagaagtaaattgctccaggctctcgatgagcacaagggaagggactatgacgccgagaagcagaagaagttactcaaggcctgcaaaaagaggaagggcttgaccgggaaggaagaagagaaggtttgttgttctcccacattttaggatttaaatcttcgagtagttgctgattaaattatcagttaaaggaggagtcggtcaaagacaagaagactgaggaatctgcatctgaatctgaggaggaagaggacaaggaagagagcacaaacgccgccgagggcgaaacctcacaaaatgacgctgctgatgacgccgaagacgatgaagaggctgaggacgaagatgaagaggaggaagaggaagaagacatccctctctcagacctttctgacgacgaacgcgaagacgtaatcccgcaccaacgcctcacaatcaacaactcgaccgccatcctcgcctcaacaaaacgcatctctttcattagccatttaacgcccttctccgaacacaactctttgatcagcaaggctgaagacgagatggatattccagacgcgaacgacgacttgaatcgcgagctgtcgttctacaagactgcgcagacagcggcctacacggcgcggaaactcctgaaaaaggagggtgtcccgttcacaaggcctggcgattactttgcagaaatggtcaagagcgacgagcatatgggcaagattaagaagaagctttatgatgaggccgcaagcaagaaggctgctgcggaggcaaggaagcagcgcgatttgaagaagttcggaaagcaggtgcaggttgctaaattgcagcagcgcgctaaggaaaagaaggaggccattgagaggattaatgatttgaagaagagtgcgtcctacgttcttaggattcttaagatggctgtgctaatgacttccacagagcgaaagaatgatacatccggccaagacggcggcgcagacgacttgtttgacgtggcggttgaagacgctgtctccgagaatccactgtagcgcgcgcgcggcgataccagcggtcccaacctgaagcgccagaagatgaatgagatgtacggcttcggtggcacgaacagtatgcgaagagggtgatcgattctagcgtgatctacgtgattctcgtgaagagatgatggtgctagcgcagcccaaacttccgggagagta

SEQ ID NO: 976 - DNA, 2066 bp, Emericella nidulans
agaggaagctatgcttaacaaggcgctaaagccgatagagagaagctatatagattcacgtatcccagtggactacacaaaaccccttcatgaggtctgtaaggacgtgctcagtttcaccttcagagcctcaaattcactaaacatgatctgccgccccctgggaccaaccgacccctcgctcccatcatgggtccccaccatgtcaaacagtgcatttagcttagcaggagacggtgtctacgtgcgcgttagggcagatccattggtcggcgggcctcgtccgggccagggcttctacagagctgctaagaacgccccagccctctggtcttttggcgagaccgaggataatcggccatgtctaacagtcaccggcttcgaactagacacaataaaggacaaaacatcccccgcagcctccggggtcgtaccaggagaatggaacgagttcgttggctggacagatcctcacacagccccgcccgatccgttctggaaaaccctagttgggaaccgtgacgcaatgggccagcgtgcccggactttctggaagacggtatgccaacgggccttccaacgtcggcccccgaacggcgacttaaatgtagagaagacaatgcggaccgacaaccgcgaccacgtcagagaatatctggagcgggtgctgaggactgtctgttcgagaaggctggccattttgagcaatattcctccgagccattcactttccttagtgccatacaaggcgaagaagggcgataaggtgtgcattattaacggctgcagcgttccaattttgctgcgccgtagtgagcaaaagacgggccacgaagactattatgagatgatcggggaatgttacgtgcatggtatgatggatggcgaggcatcgtcatataagaagaaacgggggatcagagatgcgaccttctgcttgatttgaagacgtatgccttgttcttatacgaaaaaataagtattcacgtatacacccagtctacccgtgaaagcactttcactttgctcttaatagacgcgttttctgcatggcgatttatgctcgtacctgactaagaatgattgttcagcgactctagcctagctgcgtcgctgtgataaacttcgtgatatcctaagaaatgatgccatttcagacactctatgctatctatcaaggggctgcccatgggttactctttcctttttaactgaaacaagcatcatgatttggaaacacgatcgcggctgacaatagaacagcataacaacatagcaggaaggaacgactaccgtcttgaaccgttcatgccgggctttactctacattttcaactgaaaaattatgtgtttcactgtccgagctcggtatagcaaatatggtagtcctgcacgaacgctaaccccgtcgcatctgcgaagctttccgatgtacttggcagatttgtaagggtttgcaagctaagaaaaaggtatagaagcaacctcatggctcagaagtttgggtagcggggagagggtagaatttgccgatctgattcctgacctttttggcgccacaaggggatcatatgagaatatcccagtatcacgacaatagcagcgctaggtgacgttaacgcgctgggttctcagtaggcttacctataaaaatatgcaacatgtcagaaatcggcgcctttgcgccgagctcattccgactcatgacattaaccggtagtcattttctgttgcgatccagactactgagcggaattcgacggcattgctagtgaaacctggacataatctgacgtctaacaatggggaaatagtaaggtgtgcggatggcttgtgatgaagggatcactggtgaatggtgtagtgctccagggttgaataaatcatattataccaatcatgtctgtgatacatagcagttaccttagccatatggatcaaaggtcttagcgttatatagctgggccttcgttcagtggtttctgggggaatctcaggatcaatcctaactgctttccgagtagctaaccagatatctaccaatgcacggccacctgtctagtttt

SEQ ID NO: 977 - DNA, 3727 bp, Emericella nidulans
acagatgggagaccggcgtatatgccacggatagtctgtctgggtgagacgctcggagtagagacggatgggccgtggtgcctatctttctggagacgagtcttgatggtgtcgagggggtaaagggagcaatcaaccgtaagaccggcaacgctgccggcctaaagaaattaagagagaaactaggtcagccgcgacaaaggcttgaagtaatcggtgtctttcgcgtacaatcagagacctggtccaaagcgaggacaccaatggtccttgctctcgtgactcagtcattggtgttcagtggatatggaggcgactcggatcacgataacctcaaagtcgcactttaattccacacaaaacaagaccggaagtgtaagggaagagggtgggtgaagagttggagagaggaaaattggtgaactcggagcttacctgctgtccaacattttgtcggcagtcctcccgccatgccttatctgcgccgataccggttatcgcaagctgaatggcactgttcaccactaagatacaactgacattccggggttattgaacttttctgttttatatagataatctattgctatgctggtctttgggtagaattaacgacaggtaaataaaggaaacagacattgaggatggcaaagaccgtatcgcgagactcatgtacaaggtggactttctgtggactttcttggaggttaagaacgaagccaaaagggaataacacagtacggagagaagaaagtaaaaagaagaagaaaaggagaaaggaatctagcgaccaagtcccggagaaaggcaaataaagtgctgcagcatgggcacccacaacgccgagtcgagactgaaaacacaagttggaaattaggtagtcaaggcaagatggtgtataaacaattgaccacggacatctttcgcaaagaaagtaaaacaaatccaccacctgggggaaaacagaaagcaaattccagaaaggattgatgacacgtctggtctaactatagttagcagagccgtaaaaatccatatgaaagaacggtataaacacagacgccatgcatctagaaacgcaaaacacggaaagatagaagcttttcaggttgctcattatacacaatcagctggcagaatcatttggccttgctggccaccggcacactaggggaagggggctcaaggacgtgcgtatggccaggagctttgatcacttctccagtcacctcctgctgacatgctctgatattgcggacccactcgtccgtgagcacgtcgtcaagcgttgcccggtctttcacgctcactttgagcatgcgaccaatgatgtagcggctttcccggggaaggagccgaagtagcctccaaggcccttttatgacttcctgacgttgaccagccgcttgcgccgacccgggcggaagcggaggtgcctctttgctggtggtccgagtgggtttgttctgtgtattagccttatcacagttggtgtcctttgttggtggcttctcctgtgtggtctccggggggaggttttcctcttggttgcctgtcgtgggcttaacaggggaccgcgggggcgtagccatgattttcgaaggctcttcgcttatgtttgccgcgtactgcggaggcttgtcctcaatggcggcactatgtaaatccggcgcagatttgacggggcggtgccgtcttggatcagcgtctggtaccggagtgcccggtgttggcgttgaaacaaacagtctataagagttatcgctaactcggggttgcttccatgggaatctgcgtaggctcatgcagcagaaaataatagccagagaccagatatctgttgggcgaggatcatattttttctcgtcataaacctctggtgccaaatatggatccgagccaacgattcctgaaagaagtcagtactgctttccacaagcatctggaattgttggactgacttacctgatgcaggcactatgtcgttctcaaatggatatcggaaaaccactgcacttccaaaatcaatgagcttcatgattccatgctcattgactactacgttgtccaatttcaagtcccgatgagctaaacccattccgtggaggtaagcaacaccacttaggatctgcttgaaagagcaggcgacttcttctttcgacatcttgcccgtcatgacaattgcaaacaagtcgtacggcgcatattccataacctcgtaccagtggcttccctcttgaatgatatcgagtgtttcgattatatttccgtgatgaagagtggacccaatgcaaaattcagcagtcaccttcttggagtattccttcattgtttcccaggaatggcgctccctgaactgcttaacggcaaatgttacaccgtcgctattacgctttagcagccgaacagagccaccggcgcccgagcccagaaccttcccaagcttaccatacttggagttgagaccatgatcatccgcaaatgggacgttatcggttgccatttgataaggcgtgttctttccggatgagcggctggatttcttcgacgtaggtgattccccgcgcttatgcttgtggcccatcttgaagaatcgcttgagttccgccatatggccatgcggcttgctctctgtatctggctgtcgcacatctttcttccccccgaagataccggcacgcttgtcgcttccctttagatccgacgcactggaggagcgcgccgttgatgggcgagcatacgttccagaatgttgacccctgcgcttcaagtcacgaccgttaaatatgaaccgcgggtcaagctgcgcaagatttttcgattgagggggccgcttgctgcgtgcgtaagggtcattcggttcgccgattggggtaatcgcgcctggaggagtatagctgttgacggcgacgctgggtgtcattggtgggctttcatcacgagagcctgcttcagggccaacgaagaactgtgctcgatgtcgtgtcccattgagtggatgcgaggatgtctgggtgacaccagtttgtttcgacagttgatctgttgacggagggcgtgaactgggggcgctctgtgcaactgcattcttggactgtgcgcttgttggcggcgaagctgacggggtgatctcggactgctgggacggcagaggaggcgcttgcttcgctgttgtctgggcaggctcaccgggtgcagaaacgttgtttttcgcttcatgcgaatgactcgcggctggcgtgagaggagtgcaattggattggctgggcttgaggagaggtttgtgttgaaggcagacttctcatcatttcacctcgctttgactttcgaagagcgtccttaaaaggacacgcaatccatccacgtaatctaaccccccccatgccaacattgaaatctggcaagtaacaggcgtccctctctgccctctgcgcagacgccacctggtttcgtttgaggatgttcaacaagctcttgacctcttgtcagcgtgggatctcttgaatgggaagcctgccacgagagagccacatctcactttttccttcgtttttggccagtccttggaacctcggccctggttctgcatccctcaaccgaactctggcgagccccatattcctcatacttccggacgtaaaatctggactagtacgccgttgtgctgtttaaaatttaacgccacctgtttgacccaaataaaattgtttcctcccggaagcccttc

SEQ ID NO: 978 - DNA, 1407 bp, Emericella nidulans
tatacctggccgccagtccaactccagactcaaggaccgtggctgccaggtctcgccgtaaatgatggtaggtatacgcatcttcaggctgctgtttgtctgcggctgtggcctcgctagtgacaggtacgaaactcagtgccattgccgaggcgtcgtaactaataattggcttgatgaggcgcacgcagtaattgttgtcgtatgcatagttgacgagcttaagagcggtgccgtcttgtaacagccgtccagctagagcgtcaacctcttcttgagtgcgagaattgactatctccagcaatgtaatatgcagcgactcaggaggtgtgaaccagattgctagtcggtgtgagcagacctcattcaaattcaaatggagaacctgggttggtacgaacaaggtgctatatcatggatctcctgctgaatctcagcgacaagctctttaatatgttttggtggccgagcgtagagattcaagttgtgacgatggtcagcgaagtttactggtgctttcgtcgatgccgggtccggtgctggtactgcgtcttcattctgagccttcgactgcgcgacaagtttgcgtaagatctcgtcgacttgccagccagggaaatcttcatggaggagtttttctttgaactgggcgtttctgtttgtccggtgcgtttcgtatcgggcttggatcatattctatattggtgttagcatgttcatttgctagttgtgaggacgatgctacagggtcattctggcagtcgagaaggagctgggtgaagggatttgttgcttgctgagacacgacggaagaagcagttgccattgctgagaaacggacgcacataagaccggtctttttgacagaatcgcctgtggtctggggaagtgggttatatatagcggtaaagagcgtgggctactgcaggtcaaggtatattccttttccgtgcactgtgatacaggtcaagaacatcttagtctctgagcttgctatacaagaaagccatcgccttttccaaattgtcctttcgacgccgcttctaattttttttgtcgaagttcctgatagaagcctatgctacgcatcgctttcaatactctgtacctactagtgttgatttgccccactaaaccccactaccatggcgagctttccgtcatccctctcttaaccctttctatcaaacacctgactcttcttccccctcattatcacctccatttaactccgttcaactatacctcagtccacaagaattttttttcagggaccgaatagagcatcgcattcttaagatgttgatcaagtgagaatacacttttccgatacatcccgtagcagcggctaacgggagatcttcaacgttcagggttccgaccacttaccggaaaggagattgactg

SEQ ID NO: 979 - DNA, 5909 bp, Emericella nidulans
agctcgtgtcatgcgctctaagcgtccgatacaatcgtccgtatgacgggtattcccggtaccagtccagtacgcttccagttacgcctttagatacgctatccgtccaacactccagtggacggaaaagctccagctagtccgccgcaccggcggacgaaatggtaattaacaaaggccgctgtgacgtacagatcctgcccatctttcccatctcaccctctgccatatccccaattcaacacatcgtatcgctggatcgtccgagattacatcttcatggaccgcaggcctagcatcgaagatgcgcctcccctcaagcgcaagaaagtacgtcgaggcacccgcagttgctgggaatgcaaacgacgcaagatgaaatgcgtctttgagcgccccaacgatgccgtctgtgttgggtgccaccgacggtggacgcagtgtgtgagccaggagttccccgagcaattgtccacgccaatcgacagcacccgccagctgcgcgatcgtctacgccaagtacagtcgcggcttaaccaagtcctgcaccaggacgccagctatacgccggcttgcagcactgaccaggatcaactgtatactgaggatgcggctgtccagcagcctgccccgcctctcccttctctgtcccttgcggaacggtttcccgccggggaagacatctcacacaccttgtacaacgccttgccctctccgcagataccactcgtattgccgcggccagcagtcaccagtccgtcccctttcatgagatcctgaccacgccctacagtatcctcgatcgcgatggcctacgcgcatacagcccgctgctacccataacgggccctggtgttcatcccgtgctgatcgcgcggcatatgcttcatctggccagcttcctgcagcacctgcaccctgatcttcacgatgaggttaagggtctctcggagcccccgtccgtgatgcgcgaacggatggccgaggtagctatccgcctggtgaccacgcaggatcagttcgtgggcagtgtggaattcctggaatgcatcatgatccagagtctgtacgaggccaactgtggacatctgcgccgcagctggatgatccgcgccgcgctatggcgatcgcccagtccatgggctttcaccagtccggcgcgcgcctgcagtatcaggtcctccacccggacaccaaagcctatccgcactttatgtggttccgcatcgtcttctacgatcgccagatgtgtctcctgctgggcatgcccgaaggcagccctgatcggactatgggctccgacgcgatgctagcgcaggatactcctattggccgtctggagcgccagcattgtgttgttatgtcgcgcctcctggagagcaaccatgctggccccgtctcatgctctgactacgcactgattcgggatctagataggaaggtacaccggttggcacgcaccttacctagtcgatggtggctgacgccgaatctcagcaaggagcaaaataaggagacattgttctgggatatgcgacgcttgtttgcgcagctgtgccactacaacctcctcaaccagctccatctgccctacttgctccgccactcagccgagctcaagtacgattactctcaaatcacttgcgtaaatgcttcacgcgcgatcctctcccggttcatcatgctgcgtcgctggaaccgagtcgccttcagctgccgcactatcgacttcatagccctgatggctgccatgaccttggtgctcgcacatctcgaccggtaccggtccccgcagatcgataattttctggccgccaagcgcttgtccgaccgagcaatgatcgagcaggctcaggagcatatggaggagctcgaccggctgaatgccgacccgctcagtgcacggagtgcgcgcctcctgcgccgcctccttgcgattgaggcgatggccgccgacgggggaatctccacagcgcccaggcagtccgcgtgcagaactcagagagcgagccccaaccagaagcgacccattcggacgacaaacacgtctatattccgtattttggcgtcattcaagcggcacgccagctcgtctccgccgtcgcacacccgccaacccctaccgtcgtcccgccgggcgctgaaggacaagcccagacacgaccagctgctgccgcgacaacgccgtctctccaagcaacaagtaacaacatccacagcttctctgggcccttcttctccgaagtcctctcggacgaccccctgtgcaactgttcgaataccccggcatggccggcgtggaggacgggacattccaggacatggaactagcgttcttggacaatctaatgcgaggcgccggggacatgtaaggggtacgaccgagtgggcaatgtcataaccaactcggaaggacacttgttgtttctttttcaaaactctacgtaagagttgctagaaaaatcgagtaaatgcctgatcgccactgttcttcatggacacaccttgtggtatcatgggcctaatacaactctctgcttcgcaaagtctgattgatctgtataatgggatcaaggagtcgtgtggcttgaagtgcacaagtccacgcgcattattagattttatatcttagcccagcggattgcgcatagagcgtagtctagcacactatcataaacagctgtagctaactctcgaatttgctgtgcctagcttggccgtgtaaaatctcaggtatctgtaatgctctagttatttcgtttcctgccctatgcctcaaggcagcactgcagttctccaatcacatccccatcggttcaatcggtttattaatccaccagaccagcgggaggagagtccacggctttcggcaccattgtattcggatggattctatgtcctgcagactcggtgtattcgtcatcttctcctattccttaccgagttaactcaggggactcatagcctcccaaactcggggtgctcgctgcgggcggctcacagcaggaggattgccctgagcgtttacttccatacccgcttagagtagcataattcatccgtgcctctacacattgaacaacgctagtctaagtagtgacataagaatatcctaattgtgactgtttgttcgttgtataagtgatggacttgcttgtgggttgtacgctactggaacccaaggcgcaaaacgaggaaaagatgccagcatcagccaatatccaagcggcgacgcttaataaattcatcgccggatggagaccttctccccggaagcctggatggcgtcctggtctgcaaactgtacgcagcagatcctgcctttcagcctgggggtgccggcgagctcgcgggctgaggcgcagcaggttctaccgaagctcatcgaagtccttatcaactataaggcaagtagttcatcccaagctgtgtattttgagtgaaagcagccgctgatgtagtcgctatagagattcgcaaggtagtacatgatgctgatcgcggcacggctgccctttatgtcacctccaagacggacagccgttcgagggagacttcaagtgaacgaacgagtatgctgtttttcttactctcaccaaggacgggcaggaaatcgacaagatggaggagatggtggacactgctttctaccgggatttctttccccggttccaaaaatatttggcggagaagggtgatgcacattaagatggacagaattagccataacccatttcatacgtattgcctgaaagctcctttgtgcttgtatcaatggccgcctctgtattgaagctaaatgaataagatggccagaatctgtcagcaaggggctgttgtatggattaataggggtttttgcttcctcttgttcaccatgaataattgtatgcattcatacgtagcttcgataactcggaacgtagatcaaagctcaaatgtagtcaacaatgtatgttgctagagtggcatgatccagttggtctttcccatgcgagtactataatatccagagttgcctgcataattcgccctagacattgcgagttccgatcacgggccgaacggacgacctataattatgcggcgaaggcgacctctagttgtttcattatctaggtccattgtatgctttgtaggccgttcttatcctgaccaagtgaagcttgttcatgaaaaaatggcgtctccatccaatctgctcaacgtggccatcataggcagtggctttgccggcctttctcttcttatcggcctgcagaaatacgcgcacatcaaaagctaaatgtacataaatttttgactgctagtgtacatatattgcttatttgctctgtatatcaaagactaatcctgactcatttccaatccgaagtatgttccggtgtctagcgcctcttgaaaggccatttgagagaccctagaacccaaaatgcccgccttgctccaaacgatcaactatttttttctcgtatgtctgttcgatctggtaaccctgactgtaccgccgagaggatatcattctaacttgtgccattgctgttccatagccaacgtcataagccaggacgtgacagcgaattttggccctaaatacagcggcgcaatcaagctgctagtcttgtcccgttgttgacggtaaaattctctaacttggcccttctatatcccgtaagacagtttacaacttgactttttggctccaatgcgcggccgttcattgccagtttctgcaactagatcggtgggtagatcggtggacaccccatccatctgtgctgagtcaattctgaatgcgtgttcttgatctcaaagaatatactcacgggcaggggtcaagggcgtacaatatggccgatggtccgaagaaaaatccgtaaacattgatcaaaattcgaccataaatgaaccaggataccacaaaagaaataattagtgcaacaaccaagatgataagattgattgtatgcatagctttttttgaaatattggtcatattcctgcgcgtatctgttgtctgaagtgcacatgaagctatcagtttgttttttagatacggggcaaaagtggtcctgtgtcttggtggcagtgaagtcttttgtatctatcttcctttgtttatatatggttcccaacagggcgcccttctactctttgttttcgagtcatatgaaccaacacagcgaaccgcctaagaatgttggtccaggccttgaaatcaccatgataaggtattacaagacacttgaacagttggagatggaagtctcgcgcatccaattatttcgaaccgcagctcgtggcacggctgttaattggctttattggactacattgctactcaggtacacggtattctgacaccaggaacatcctaccttcgaaaaatgcactaagtcagaatcaataagtcttttcccgtggagcaaatgcagatattagggaccaccgggcagaaacggtcctcactaggcacgcttactcatctctagactggggcctatcgatcttgatctgataaacttacagctggctcgtgttgcattgttgtacctagagtcaacgacagtaagactctattaaatatcctgaaggaacatctccaacaagtacatgccgccaggatgctcattgagcacgggtcgagggtcaatatcgtcaacaacaatggaagcttgccagtgcctggagtgaattaaaggactatgacgccaaggcgaagctgggtaatcagaggcaggaaccggtattactagaggagtgatgtcaacgctcaaatttggaggctttgctgaatacgcacagctactccagtggatagaatcagcccatgacacaattccgctgagcagggaaaggattatggtaaggcctgtcaaccactgtaccctttgatcagaaagtagtat

SEQ ID NO: 980 - DNA, 6530 bp, Emericella nidulans
cttcagtcaagctgggaagagaagttagaacgagtagttaatatgtgcggtgcaggcacttacgctcggaaagcttcccatggtacgacatactctgggatctcttcgacagcttcttccatgaagtaattgtacttccacccaaaaggcggccggaaaactccatcttcaggagtagcctcaaggaagcgcacacggtatatggggttcccccattccgccttcttgatgtcttcttcaacttctccgtcttcaggctctgcagcttctttcttcttttcagcctcactctccttccgctttgcgtggaactcggcgacttttgcgctgatgacatccgagttcggacagactccgaggaaacgcccgcccttcttcaaacatccagcaacattacgtagcatctgtcttgccttgacctcactttcgaaagcataatggatcgtgaacatggatgcgacaacatcgaatccaccaccaccccatcgcgaggccatgagagaaccgccagggcctacgttggcttcgattcctacctgctgcacaatgggaacatcccccagccattcaccaaagcaatctttcggtgcgaattctgcatggaaaatgggaccacgacgttgacgaggtccacgtccagttctcatttgggcgtagcggtcccgtgcctggtcaatagagatctcggcagggtcaaggccaacgtagagatcgataggctgtggcgccaactgccatttgcccaagtccccgcctttaccacaacctaagtcgattaccagcagtcgtttctcatccacgggtggcagtgcagcatcattagcccagtccttggtatcaacagtccgagagacaaactcctcatctggcgagtacttttgaataagggtactcttgacccaattgttatagctgcgcagccccttgattttactctcggttttgcgccattccctgccgcgctgaggcacggcattgtaatgttggcgaacgatatctgtaacgcctcgactcaaggagtagcgcatagcatcattttcctgagcgcgttcgcgttcttcttgtctcctgcggatagtttcaggatccacgaggccccgacgtgcgccaccgcccggtcgtttccgctgccgcgcctgtgcttccggtgtaggtgaacgacgcggaggtaggggagatggcgatctacgcgactgctcgttccgatttggggaatgtgcgatttcatctgcgttccgccgggaatagacagagtgcggcgatcggtccggtcgtcgcttttgatgtcgttcttgaactcgcctgcgtttgggaccggagcggtcttcagcagcttttgatgtatcctctttctctcctaatctacgcttattgtcgacaggagaaccattctgaccattcgcagctgctgtgggtgaaccgccactctccagttttcctgccgaagtatgaacaggcctggagctttgtggatcgcgaggagactccattgccgtggatttagggtgccgctgggatcctgttctgggggcggtaatcactgcacctgcatcacattccttgcgtgtgctaactccaccgtcaccgtcttcaactggttcattgacctcaccacctccggcttgattgtcacatacacctgcatgattgttgtcttcctctgctggtaccgggccctccgcgcccaaggaatcgaccgcaagacttacctcccctgggtggcgccgctgatgccatactgggccatccttgcattcctcgtcggcttcgcggtcaccgtctttaatgggtttaccgtattttcgccctggagcacacaggggttcgtcaccagttactttgccattggtttctttgtcgtgatgtttgccttctggaaaacctggcatcggacgagctttgtgaagcccgccgaagcggatatctactctggtaaagccgaggttgatgcggagtgtaggatttgggaagatggaggcgtcgaagagctgagaagggccgagttagcgagaatgcattgggcgagaaggtggtgggagaagatgtggtagatattctgcttgtattatactgttagatcttctcgtcatgtacttcaaatagtctatgaacaactttgaacaatatacatttatcaactttgacatgtagatatggaacgtcaagttctgggataaacaagagatgataggcaccccgagtgcgccagtccaactgaccttcaaggctaaaccgacgtagctatatattggttgaatatgacgaaactgtcttaacaactgcacccatttaccagtctgtcctatccaatgccttaaccatgcctcacttcgatacaagtccagggttgcagtggatcatgtgacgatggagcgttcaagggattgctcagctacaggtctcctaaactatatcaagacgacagattgggaaaggcttcaacgaaaccactatacacactatggctataacaagcagacctgtgacaatttccattcgcactttcgaggttgcatcgctcggaccctgcagcatatgttatgaggggtacaatttcaccaagctaatgccttggcttcaggataagtatgatcagaaggacacctagtgccgcgcggtctaattcaagctcttggggttggctcaatccgagccaaaggctgcaagctaaacagttctcacggggcgggcatgctcttagggcagctgcccatacgtccatccggagatcgtcaggctccctgactcaattattccgagcccctcgccaagctaatagggtaccttggtctggcgcaattggtcagtggcattgtctagatgcggagattctcatggatcggccaaatggtcggtataattccattccgacaaggaacccgtatatatatgcgactttcagcactagggatccgggtttctgagaccggcatctgggacagacgttaaattttgggatacagaactcggttcaagacaggcgaaaatgcgcgtcacggtggcattgctctgccttgccggtagtgcttatactgccagtgcagcgcaatacgctaagttcagatacctcgagtccagcgactttcgcatcatcatcgacgccgggtccggtgcattactctcgatcgtcaaccctcacgacaatgcatccatgagttggatcagtggaccagaggatacgccttggcagcccgccgggagcagatgggggctcggctacgtgaatctaggaccgctacatcggagtttttggcaagatgcaattgtcaccttcaatggcaacagggtgagcgccgcctacgcattggatggactggacgtgaacgtcacaaggacgctcaaccgagacggtgtcttggaggagtgctacgttttcaccaatacgggtgctgagcctcttgcactggacgatcacggacccgagtcttttgcgatttacacccccttcaatgatcactatacatctacaacagatgtcctggaacatcgggcccatgcacacgtctgggcgaacggaggggcctcgtcgtgggtcaagctcacgcgaatgggtttgcgaggaccacatctcggtattgtgctcacgcagggcgctttacagggatatagtatagaggggaggagtagactgacctcttcggacacacgggggatctttctgctccacccggccatcccaacgctggagagcggcgggtccggtcgagtctgctgggagctgttttggcatgaggactgggatgagttctttaaaaaagctaagcagcggtccagtcagttcttgcatgttaccgcagatagatggaccgcagcagcaggcgaaaccgtcaacctaaccgtttccgggcaaagatcgggcgaggcagtggtccttaatggccagagggcagagctacaactcgttcctagcggcaatgattcatattcgacgaccatccaggccgataagcaaggagagcaggaggtgtccttcaccgtcggagagagtgaggagcaaacgaactccactattaccatcaacgtcgttcccgatatcgacactctcattgccaaccgcgtcaaattcatcacgacaaaccagcagctgagcctggatttcccagacgagtcaaaagcgggtgcgtacgccgtgtacgataaccaaatggaaggtatcgttacgtttgatacctcctctgaccgaaacaccggccgcgaaagggttggcatgggagtcctgattgcgcggtggctgcagcagaatccaaattccagcccagatattgaagactcgctgaggatctactacgattacgtcaacaacaagcttcaggaaaccgacgggtacgtccggtcatggcccattggcgcaacagacggctcgctacggctctacaactggccctgggtgatgcaactgcatctgcagatggccaagctgggcaacaaggaagtgacgagccacggcgactacaaggccacgcctagccagcgcctcctggtcactatcgagcggttctatgccgagccggaagcgatagactattatcccatcaacctccccatccacgagagcctggtatatttcaccggaaaacgcgacgaagataccgtcgcccgcctcttgacgctctttacagcacacggcgaccgcatcacgtccgtcgggtccgcctatccctcttcagaggtgaactacgagcaatcgattatcgcgcccgcagccataatcctcctggagctataccgctcgacaaacgagagcagatggctggacgcggctcacggccactttgaccgattagaggcctttagtggccgacagccgaatttccatctgcacgatgtcgccattcggcactgggacggatactggtttggcaaggaccggatgtggggggacacattcccgcattactggagtacgctgacagcgattgcgatgcatcactatgcggtggcgacgggagatgagcactatagtcgccgagcagagggaattctcagggcgaatctggtgcttttcgacgaggaagggaggggatactgtgccttcatctatccgacaagtgtcgatggtcggccagggagttacctggacccgtacgcgaacgaccaggattgggcgttggcgcatcttctagccctgagggaagatgggttgggcgagggagatccttgatgagccaggcctgtgcttgtctggtctagtatcatggtttactaagcccgggtggtgatagtggtatgctgtgtactaggctgaccatgaggtctgcatttcagaggttttagggctgttaaatgcagttaataacaagaccagacacattatgcgttagaattggataactgcatacctagacagtcatataaatacgaaaagtccaatatctaaagaaagaggacacgcgatctaacaaataggacatagttcgagtacatgctaacccggcgacaagtgaccaggagcctaccagagaaaactaatgatatacatcatgtgaaagaaaacaatgatcgtctaaaactgatgggacgaggtgtcgaacccacagtagatctgtaggacgatctgcccgctactagggcaagaatggcagagccctggacggcgctggccacctttacgatttaggcagttaatatcacttgctggccgatctgccgtttaaggaatcgcgccttggtcaaggagccggctccttgtccttcctcacattctgggacttcgcttgctatcctcctcctcgcagcaatcggacttggccactgtgaaaaacttgagatacagactatggagactcttcaaatcgaagctgaaccaccagcacctcgtcttctgctgctcaaactcatcagctcgggcttctcgttcttcgtggcggggctaaatgacggcagtctaggtgctcttgtcccatatatccgccaggagtacgacatagacactaatatggtctccatcgtgtgagtctccttctagtctagtcagggaatatatgccaacgaccgtctaatctaaccgcggctcagttatgggactaccttcttcggctggttttttgccgcgctcaccaacagctttctaggccagtactttaatactggtgtcctactccttcttggggcagcgctgcaggtcctggcgcatgcattacgcacttgggccccgccattcccgctgttcgcggtgacgttcttcattgccgcgctgggccaggcgtaccaagatacccatgcgaacaactttgttgccactgtcaagggcgcccatcgatggctcgggtttatccatgccatgtatatgggcggctgtctggttggaccctttgtgtctaccgcggtggcgtcctcgggaaagagctcgcactgggagctgttctataccacaccgctgggcatgggggtagtaaatctcgggctggtctgggtggccttccacgagtgggcgaccatgaggcagcgcgagcagcccggacgagtcgagggtcctgcgtcaaacaaagcaggaggcggcgactgagatcaagaggactcttgctcgccgg

SEQ ID NO: 981 - DNA, 4755 bp, Emericella nidulans
ggatgagttttagactccgaattattttctgcagccgacgactcgtacgtgccctggtactcgagcgtctgaccatatcaacagccgcatagaactcgttcctgcaggcctggctaaaccgcgcgggggcatgtaggaccgcgaggaataatgctgccaaggcagagagaagaaaataattgaatggttctggccgctggaagtagatgtctgagacacgagagaagtagtcaagcatgtggacggttgactttgcggcttcgactgcgatcagtgcaccggaggcgttcatttctatgctttctgtagacaggaggttttgacggtagaccaggatacggagttggtttgcttgcagggcgaggaggacttgtagcatggtgttgttggtacggccagttgagtctgagtgtgctgtgtctgtattctcccccgttccaggagtagtaggagggtctgggctgaagcgcagttgactggggatagattggatccattgctgaacttgaaagtcgaggtaagagcagtaatcggacgttgcggccttgggtctgctgcgccatcccatgacgagactccaaatttttgtgctcagtcgagcgtagttgatcatgcaggtgaggtatggggttgtggtgccgggttcaggaaggtttgtgtccatatctgagtcttggattgcaaaggggaggcctgtcccgaatgaccatttacggtcgagcacgtagatacaccagaagaggcggctagcgaaagtccattgcagttcgccggggaagacgccccctgttcggagccaagtttcttgtcgatgtaggccaagttgcatggagcctcgcactgccatcccgatgaggcgccaggaaatgacttcgtcgtcgcggtaggagtggaagatagactgcatgttaatattagtatgccaaaatctgtatgatacggagaaacataccagcagggtcaggatgagaagttccttcatatcaacttctggtattttcacacgcgtcgcgaatcggtcctctacactatcagccaggaacgcagcccgttcactccggccatgggattcagccagcagcgccgtggccagcagtatcttcagcacctccacatctctagcgaagaaccactcttggtccgttatcaccggcggcgtcggccctagtccttttccatctttatagtaatcatgcacataactccgcacgctatcaaggtcgatacacgggtacatcacacccacattgttctcgtacaccgtgaccagccggagcgcttcttccttccctagacacccaagaggatcattagacatcgcctcgacgtccgacataacagcagggcttgttgcagatgttgaatcagattcctcaacatcactctcatccgctgtggccacaggcctctgccgcggggtgattccaaactccgcactcgtagggcccacgtagtctggagagcccggccggttcatgagccgctgtagcccagtgctgaccgaagacgatgagacagaagcattgtgactggcgctcggcatggcggatgccgattccagctcacgcattcgcgcggacatggtctgcatctcacggtgcagggactggatctgctgatcgactgtcctaaacttattcgagagtctaatgtcacccaatgaacgtgagcttagcctgtcagagattgtatgatacgattccaaatggattaactcacccgccatttccattctcaaccgtcggcgttgtggggatattagtcgaggcgtggctgctaggggtgtagatgcattgagctttctggcgaacacatcgcgagcatactggtaaaccgtcgcactttagcttgcgccgtttacactcgttactttcggcagttaggaaagcacaacaagttgctgtgaggaggaacgtaccaggccagctgcgtgtacttggctcgttttctgctccgaggcagttccgaagggctcgatcttttggatgagctctccatcatgcgatggaaagcgagcccaggcaaccgctatttctagaagctatccccaccttcatatgagtatgatccttaagacctcagggcgggaagtgtctaccatggctggtgttcggaaattgaacagaagaggtcggtttgcattccgagacccacggttagtgcggaattacaaggatgcttatgcattcatcgtcatgtgcataaatctaggatagagttttcagaaaagagcactactatattttgattcatgcatatacatcgcatcgttatcatacaacaagatatctactttaatccgccttaaagttgggcagttcgacagcactcggatttacctacagtccttgacgcctcgttcttcaatgagggcacatccaatgacggattcgccgtgaagaagtcagccggtttgatcatgagctggaagatttccacaggcctaacctattgtcagcgctgaactccgtactagaaggggaatgcttacatgacgggccaatcctcgatgcgagggttgtgagttatgccaaacgtactccagacgactacatccgtgtcgacgaccacatcaccacgcttgacggcgtctgatacaccatcaacctcgctctgactctgaagcgtgtagcgaccgcctgcatacagctcgccatcccggtgctgcgtcacccagacgtggtgctgcgcgaattgcgctcgtttggcctgggtggaattggggtctgccaacagcttctgagtggccagagggatgaacttgtacccaataggcttctggctgatagggttaatcttgtgagggttgatcatcttgacggttcggttcagatctggagcggcatcaaagtagcacgctctttccacggtcttggtgtcgactttgtaaaagtttccgttgggattagtagcctcattcatcgggactgggtgcgattcttcaatctggaccgagttcttcgctccatcaatggccgggtctatgcgaacacagaagatgtgctggtggttctgggccaggacacctccactgaccacattaccgtagtcgctgaccttcccagcgtcaatgttgacgacgttcaaaattcccgtcgcgcgcgcctccacggtgatgccggcggactggtcgaacttgtaggcgaatacgtactcgtagtttgcaagagtaatgataaactgaaccaccaactcacgatgtcttgtaaccacggcacgacccgtcctccagttagaatgcttccagccaatgccattatcttgctcgtgcagacaaatggcattagggagtttcttggcagtaccgtcggcacctgtgatgatggcgtcgaaatacttgatgactccaagacagtcacacccgatagacaaattgtttgccatgttaccgccgccgccgtcaccgaagtcgaaagcctgcttacggtggtaggggggccgaggatcgcgatatggaacagtctaggcaaccgagcaattagctcgttcttatggtctgtcgaagcgactcaccatctcactaatactcaagcggtgcatcacactgcggccgtcgtaccacacgtcatggatagtcgcgccttccctaggattgaaggcaacgcggaaacgccacttctgccactcgactagcgactcatctgtgatgcggaatgagggaccctcgggctgaacgacgttcagtggcttgagatccttccgagtgccttcaggaagcagttcaggcacatagtccgaccccttgcaatgtccgataatgtcacgtttgaaggtctgttcccgcaacccgtctcctttaccacccgtagccggacggtcgactcggatgatctcttgtgtatgcgcgtccatgacgggaatgagcggtagagggtaggagtagaagttggcgtcggggttcttcttcgtagcatcttgggcgaagcacaatccttggaagaaccgtctgtttggctcagctagatccaggccaccgtacggccagggttcaataacgacctcgaagcccggcggtaggtcgaactcggcgagggcttccttaaacagtggcgacgaaaacaacgttccacaagcacatcgaattcgctcctatgaacctgttagcggggcaggtcacatgtccctggaggattggcttacagagtcagagcagcatgatgctgttttccaacgaccgtatgcttaacacacttggatgccacaacatctacgagtgactcttcgtacgagggcactcgatccgctccgataacatcgtactggcacagagccaaccgcggaggacgaggcgttgttgggctcagacgaccggcatgttcaagagcaaggaactcaagcagctggccttttgggggttcctgaaggtagatctcacggaagtcgataacggtgttggggtgctgcgcaatcacgatgtcgcgagcaaggttaatttcatcctcagagaggatggcgaggggatggggttgaggggccatagtttcagttgtgaaaagaattattgaaagaatctacaacgagggaagcagtcgctttgtagtaaatcattcaggtactttggcaacggcccatccgacccctctcggaatgctcggaatacacgcggaactttccgagctccgcactaaagcttgaggggagcttcagaagtcggctggacttgctggatacagtttaaagctcatggctatatcagcccatcgatattgataatttagtgctgataagctatcgccgctcgataacgaacttggg

SEQ ID NO: 982 - DNA, 3425 bp, Emericella nidulans
ttcccctttagtaagccctaaaagaagatgcaaaattcccattaaaaggtataaacctttccgcaaccagttagacaagtttccctgtcgaaggttctaggcggtagttattacaccagagcgttatcggacagtatgttcctcactgtctatatattgagccactgtatatccacagcgttccagattctatcacctccccaaactgagtaccgcattgcaaggaatcattgtatccccataccttcgtccaaaatcaaatgcccattaaacgcattcatcccatccacaatctctaaatacggctgctggatatcctgtgggaagtccttgattatctctcgatcaacgactaacccctctagaagtactgtcgaaatcccattagcattagtgaattaaaactagcaaagttgaaataccatcatcgactagcaacactccattaggagagagtagtttattatcaaggatgaactgcgtataccctttgtattcttcctccgcggcatctatgtaaatgagatcgaattggccacggagagtggggagcctgttaattgaaccattagcacatgctatggtagaaaacgaaaggccacggtgcgcaagtagacatacagatccaaacaacgtcccttgagcgtctggatcctgtcatccgcgccatatcggtggaaagcctcctccgcgatctggaggtactcttccgagagatcaagactaatgatctggcacgctgctttgcgtgtaccttcatagaaagcgagtgtgcttattccggtaaatgttcccagttcgagaactgtaatggttgtttaacatcagacatccaggttgacatggggagtcgcggcgagacgtcaccatctgggagtaggatacgtacttcgtttaggtccaagtgcccgcgcaaagctcatcagccaggcgcactgggagggcgacggtgccatgaccgattcatcggaggagagcttgccagtgagggttagttgttcttgaactgagtgcgggagcggagagctgtaagatgagcagtattcccctacaaggacgacctgctccttggtgaagtttaacatgcagcggtctctcattctgatggttagtggttgagctgtgtgtgaaggatgggatggcagagagtttccgacctgtgaatgtgtttcgacttagggccaaaggcagggaacacgtgagtttcctcctactcagattcgggagacgtgcgatggtctgccggaggtgttaagagtaggggcaagtccagtggaactgtgagaatggtgatgcactcatacggggtaaccctgactgtgccagaaattctgatcgccgcggtatccacgttcttgcagcaacaggaacaatgtggctagaaccagtcattgtgcaggaaccaacatgggatctagagcaaagtgcgctattactctgtacaagcatacagcagaattaggctgtatcaacttgacttctttactatgaatctctcattgtttgactagtcaggttaccccgcaaattatgcccgccctgaactcaaaatatagtcacgtcaacacctttgctcttcattcaataggttcacaatgactaggatcatgaatatgtcacgaaacatccacagcctatccattttcatccagattccaaacgcatccatgcttctgaacctactctgaactctgctgcagtcagcaataagttcagcttcttattatgcgttgctcaaacatgaaattgtgcgcctccaaactagctgtgagcttaacagtgttcctgttccaaagttgtccgcgggcaaacccgcaaaaagcaagcaagatcactcgcacagtagcgccataggtagtccacaggaaagcctcccccaataatttcactattgtttcagcacccatccaagtatatgcaagctggctgaattaaaaacattataagccgttggtctgcacggttccacaccgagtaacaggtgccgctgcattttccaaggttgtacggcatactggcctatcctcgtcgttgaatgctgcaccaagactgcttccacaactagtgtcggtgccctgtttgcgcggttgcacttgaatatgcggtaccactgcagcttatcaaggttctactgcatccagccctgttcttgccattgtactggcaaacttggcacgtactcttacgccacgacagagaatgaaaaaataaaaatgaaaatgaaaataaaaccaaataaataaacaaaaatgcgggggtgcgggcaatattctggcattgctctgagcaaaccagccacaaactgggcagagatactccgtcgcctggatgttgctcgacaagcccccccgcccctccaacaccaggtcttgtccgcgtcttcgattcgcacgacaagctcctgctaatggctttgcttactatttttcggcctgccttcgtagggtttgatctagctacgttgagcccttacacctatctttgctgtctcaaacaactcaccatgcggtctgaatcatcaaccgatgtcctcattgtcggcgctgtatgtactctctagaaggtcatgatggctgcaactaatacacccaaacaggggccggccgggtaataacacccacacacctggggtaaaatacattaacaagatatctgtcgcagactcacaacagcgctatggctggcgcacacgggagtccaattccgaattatcgacaagcggccgaatatcccgcggaggggccaggcagatgggtatgtggtgtatacaccgcttgttagtagatcattgtggtaacaataacagcctgagtcctcggacgatggaaatcctcgagacattcgaggtagctcacgaagtgacgaggctatgggagcgtgcaacggacgagatgctttggtgccgcgatgcgcagggaaacctgacgagaatggagcgttttcggaatcagcctccacaaggtgtcaggtacgtttggcttccgatctccgaatcatgaagacatgacaatgagtctattggcgcgtaggtggggtcacggaacgcttcagcagggcgtcgtggaggaaattatgaagaagaagataacggaagtctgcggcgtggaggttgaatatgagactactttgtttgagttgagtcttgacacaaccaaggccaatgatccggaggcctttccgtggtctgcaacagtgcgatatggcactgatgagcccgcggggcagatgctgagcaagactatgctggcgaagtatgtcgtcggcgcagatggcggacggtcatttgttcgacaaaccatggggatcgagatgcaagggacaaaaggagaggcagtctggggagtgatggatattatcgggacttccgactttccagagtgagtgtcctatcgtcatcatgggctccattgctgatatgaatggag

SEQ ID NO: 983 - DNA, 1100 bp, Emericella nidulans
ccggaaggggccaccatggcctcgggctcagacgataagactatccggttgtggaatgtcctaacagtacgtcttcgtctttacttgtgagaacaggtactaatccactacagggcaaagcacatccaacaccgttcatcggccaccacaactacgtctacgcgatcgccttctcccccaaaggcaatatgctggtcagcggctcctacgacgaagccgtcttcctctgggatgtgcggtccgcgcgcgtgatgaagtcgctccccgctcactccgacccggtcagcggcattgatgtggtctgggatggcactctcatcgcctcctgcgcaacggacggccttgtgcgcatctgggacacgtcgacagggcaatgcctacgcacgctcgtgcacgaagataacccgcccgtttcgtcggtcaagttttcgccgaatggcaaatacgtgcttgcatggacactggatgactgcgtccgcctgtgggactacgttgagggccgctgtttaaaaacctaccagggccactcgaacaagaagtacagtctttccggcgctttcggggtttacgggcagtcgattccaggcaggacaccggggtatgcgtttgcggttagcggcagtgaagatggggccattctctgctgggatgttgttactaagaaggtcttgcagaggatcgaggcgcatgatggggttgtgctgggtgtggatacttgctcgaccggcgaggggagattcatggttagctgtggattggatggaacggtgagggtctgggaggaggttggacctgagcgtgagcctgaacctgaacccgaacccgaacctggacagtgtccagaccaggaccaggaccagggcagggactgggatatggactccgaaatgagggaagcgggcgaactcgctgatgagaccagggatcccacatagcccgaccccgcttcctcttgcagattgaataatcccaatagaccatcatgactaacgagtaacgatgtgaatcctccctaatgctacatagacctacatatgcgggccatgaaagttgtaagctcagttcatattttacaccactgccgcgaactcaagttgaaa

SEQ ID NO: 984 - DNA, 3379 bp, Emericella nidulans
taacgcgccgtctctgatattcccgccgttcctattctgcctaacgagttatgagatttgccctgaggccgcattgaacgagatgaaagaaattttgtaacctgcgctggaggtgtttttatcattgatttatggtattgggttcgggacctggcattatggattctcctccttgtaatgtgttctagaagcgtggatcgaattcaatctctgctagattcaatttggatcgagtaaagaaacttgaaagacgttatcgtgtgtcgtaccagaggataagctgtggagcacgcaccacatggctggcgctggaaatggaccgaggccgctaccagccgacctcggacttcagtgcataagcagtacataagcagtactctgtagaaccatctgcttgctataaatcccgcatccaagcgtcatcattaacttatctggattcaatttcgctctcagcccttccttcaactccggaaccaacagtaactcgtcccgggtacattcacaagatggccgacgacacctcccgcaaaacgttcataatcaaccacatgaacaccgaccatgcgcgctccctctccctctacctgcgtgcctactgcggcctctcagcgcgggcctcaacatcgcctaaactcgaagacgttcggctcaccgacatggtaatctccgcgcaaggttcccggtacacaatccctttcgacccaccgctcgcttccctttctgagacccgcgcccgagtcgtcgcaatgcacaaagaagctctgaaacgcctgaacctctccgatattaaaataacccggtactccccgccaaagggcagccagtggattggattcacgctttgtctcgcgatactagtaggatattgccgacggggaaatttcgagccgggctcgctggtctacgaaggacttggactagccaaatacccaggttttacgggatttagctacaagtggcagccatggatttgggggcctttggctgttgcacacggctttgaggcgctggttctgttagggtatatgcggctgaggaagtatggggtccaagctttctctggcttgtggtggacttggatggtgctagggtttgtcgagggattcccagcttggatgaggtttgatggattggttaggagggctgaggctgaagagaaggaaaagagtgggtagttatttatcttggagttatagacggtccggcataggtaaggagagattagatatttcgacttcccgattccttagtctccttagtctggaaactgagaaaggcctgaactcgttcaatctattagctctaatcacgtagtctcaactagaatcctgaacaggcgccggaaccagtccaaatgcgtggagtacagcaagtccagtcaaatcacgattagaatggccatatataagcaaaaaacccttggacaatacgtccgatcgagaccaaagcaatctggtacatcacccttcttatatacagggtagccggaattgtattgactctatacgaagccgcaggtttaccagcacagaggtgcgatagctacacgaatgtagagtgaaggcattacaaccgattgctaagtgtcatagaggctaagcttcacggctcaaggagtctgtggaggagacctgatataagaattgagagttatactccggaggttatgttagtacctcaaaaatgtgaagtacaacgaaactcgaacttcgaatgacaatagcttggctggctgttagtcaactgaggtacaacgtcatcttgcaattagttatgttctttgctagatagtgagctgctgtaaacttgtagttcttagaaacatgtctgaagtctagagtcgagacttgtgattggtgtaaattagtgggggtccggagcggaataacaatcgaggtcagcctcctgggtctgtcagtaagctaaccacgaaaggacaagcgtagacgaggtcacggggtactggcctagccggcttcggctagcgcccacgaaaatagggcaacgtcgaagcgagagacacacacggattccacgatcgccgacgacaagcactcaactccacgacaacccacgacaacccttgccgctgcgttcttggtgaagggctgcaggattagaggtgagtattttattttctggctattgtgatcttctcccccccccggtttccgctggttctatcttgaagagcaagtcggtgcgccttcgatcggtctgtcaaatttccatccgtccactcgttcacccggtatcgatacaagagggaatggagcattacgacaggggagcagaggcagaactctcgatgttgctactttttttgcttggaacaacttccttgaaagattcttttctgaatgcggctgggaaactgcgaattggatatccagcgaaaggttaccgacagactcacggccatcgataccactcagcgggatagaattgaaggcattcggacattagatgatcagcttcgcttgtttcgactcgtgctaatcaattatccctggacagtcccccacatagacagcaaacatgggtatctctcgcgactcgcgccacaagcgctcggccaccggtgccaagcgcgcccactaccgcaagaagaggtatgacgaggattgactcgatacaagtatcaagggcaggattgacgataacaaacagggctttcgagaagggtcgccagcccgccaacacccgtattggcaccaagcggattcaccttgtccgcacccgtggtggtaaccgcaagttccgtgctctccgtctcgagtccggtaacttctcgtggggttctgagggtatctcccgcaagacccgtgtcatcgttgtcgcctaccacccctcgaacaacgaactcgtccgcaccaacaccctgaccaagtctgccgtcgtccagatcgatgccgctcctttcaggcaatggtacgaggcccactacggccagcccatcggccgccgccgccagcagaagaccgctgaggccactgaggagaagaagagcaacagcgttgtgaagaagcaggctgctcgcttcgccgagtctggcaaggtcgagtccgccatcgagagacagtttgagtctggtcgcctgtacgccgtcattgcttctcgtcccggccagagcggtcgtgtcgacggctacatcctggagggtgaagagcttgcgttctaccagcgtgccatccgcaagtaaacgcgagtaaatgagaagagatatcgcaaaaaataaactttttccctcttatttttgtgaagccttgattgtcatgtaaaagggtgtggtatcggagttagcaatttcagagtttcctgacctgaccatggcattggcatagttggctcacatgtaggcagcgataatgaatga

SEQ ID NO: 985 - DNA, 3696 bp, Emericella nidulans
  unsure (1)..(3696): unsure at all n locations
gcaatttggagctgtacgcaggcggaaatagacgaggcagagcactgaagtcattgggtacgtagaagacaatagagggtttggggcaccctggacagctgtccaagcggagccaaaccctcaggatgttgacaattatgggtggatatagtattagcaaccgccccgaccatcctagtggggggtgttttcccgcatagccatagatatcattggctgggacggtgtatgaattaatccgaaatccgaaatccgaaatccttgcggagggattaagctcgacgagtttgcttcgtgaagtttcaatttgctccctcttcacatatacgtacctgtgcgccaacatatcttgcgttttatggtctatttagcatgggcggcgaagtacgtgccatcttttcgctgttcaatgtcggccagttaaatggttttgcccatttcccacacccatcacggagctttgagcccaagacacactctcggcttcgtgatgtgacgctcaatagcattcaaaatctactcggtgcactcatataacggacgacgatgtgctaaacgattagatatgtcaccttcacatcggccaggctggcacgcagatgggtaatgcggcctgggaactgtaagtctttattactttgtgatccttctggcagcggctaatcgctcgattactatctagttatctcctcgagcacggcctaacggccgatggtcatgtcaatcccgatatcactacggacatccaccggaacgactcctatgtgacaattttcaccgaacttggcaatggcaaattcgttcctcgctccatctttgtcgacctcgacccttcggtgtgtaacgggcgagtagggagctggaatttgagctgacaggcttatggtggtatagcctatcgacgagatacgcactggtacctaccgccacctgttccaccctgagcagctaataagcgggaaggaggatgccgccaacaactgtctgacctccgaatatttgagagccgcgtggtaagccaagctaatgcgttctagatgctcgtggtcactacaccgtcggcaagacgcttgttcgaggcgttgttgaccgcattcgccgtgtggctggcgtgcattggaacccttccctgagtcctggattatatactaatttccttggagatagctgctcttcacttcaaggttttatgatcttccacgcctttggcggcggtaccggctccggtttcggcgcacttttacttgagcatctctcttcagaatatggcaagatgtccaagctagagtttgccgtctacccatctcctcgcacgtcgactgccgtggtggaaccttacaatgccgtcctatccacgcatagtaccattgagaactcggagtgcactttccttatggacaatgaagctgtttacgatatctgtaagcgcaagcttgacatcccccgccctggttataataacctcaaccgtctcaacgcccgggtcgttagctctcttaccaccagcctgcgtttcaatggtgaccttaacattgacttgaatgagttccagactaatcttgtgccattcccgcgtattcactaccctctaatcttgtatgctcctgttatctctagtagctgcagtacttacaagagcttcaaggtcaaggatcttaccttgcagtgtatgtgtcctgtcttttcttctaaaatatcccttcagtctaactgtctggcaggctttgaacctaggaaccagatagtcatctgcaatcctcaaactagaaagtatatagcagtagctctcttgtaccagggtgatgtaatgcctcataattgcgcccgggctattactgatatcaaggccaaggcctcttttaacctggtcaagtggtgtccaactggttttaaacttggcattaacaaccagaagcctatgtttgttcctaacagcaagcttgcttctattaactgtttagtcaccatgctctctaatttgaccgccattgctgaggcctggagtcgccttggccacaaattcaaccttatatactctaaacatgctttcatttattagtacgtgggtgagggtatggaagagggcgaattctcggaggcccgcaagaacctagcagttctagagaaggactacgaggagatcaccggcgatactgtgggcttggatggctatgtagaacatgagtattaagcaacagttcctcttcctggttgaataacactattactggtcatgcaatcagctagagaaagtataaagttgctggatttcaagccaaaatacaattctttcttacagttctttattatcacatgttaaagtacacaacatgattccgtcgactgaagtcaaaagtatgatatggccagcagacaaactggaatagtgacttcagtatgcaaccaaggacacaaagtctggcttgatgtagcagaaaccatagtttgtcttgatgtttaataaataaaactatcagtctaccttgatattctaaagagaataatttgcggggaccacctgaatagaacaaagcgcgggacgagactcgaatctagccttttctgatgaggaatgttttctctgacgctctattggattcctatgcagactcaaagggatttaatagcccaattctcaagcttgtgcgctcttgtgctctgtgtttccttagctcgttctatctcgctattctatagtttgatttcgtggcccatttccaaattcatagttatacgaatattccaacttattactcagtgccttggtcataaccaattaacgttatagacgatgtgttcttacgcgccgtcactggagtctaggatgacgttttcaaagtacggaaccttcagtagtgacacaccttccagctaaaggaaatgatatcacaagattgagaaatgagcaattgaatcacgaagatagtggtggtgaggaagctattcaaactactccacagagtgtagaaccctgaaagcgtgccccaccaacttgttctgaatgtaaaattcaggggcatattagaactagatgttcaaatcctgcgcgacttaattactgtatttattaaaaaatgcgtggtgggaatgctttaagttaatgcttaaaatttttttgttgggatcggcccctctttatatctttatgcttaagggcggcttggtaataaccgggataattcctttgaaagaatcaatttattggaaatcccattttggtggggtatcaatgattaaaagcctgttaaatttcaatcatagggtcatgcatttctaatcagtttttatttatataagagattttttttctttcttgttataaggacttctgaattctatctccgatggttattataaacgatataatttatatttcttaaatattatatgattctttctttctttttgagaataatgctaataaactcctgtccttatattctaaggtttttatttttgtgtcgtttccttattttagtaaggtactctcaactttactttatttttttcttaataattttttatttatttttttgtatatttattattttaatcattttttcttatttntttttatatattgtcatatattttgttttaatatagtgtcatcttatcatatatgtatttgttttgcttagtattttatttttttatttacttctttaatattataatttataatatttagttttc

SEQ ID NO: 986 - DNA, 2246 bp, Emericella nidulans
gagaggggacagaaggaatgaatgaaaagaagagaaagagataagaagtagagtaagataagaaatgtgagaataataggaggtaagaaagaagatcacgaaaaagaggagagagcggataggagcagagagtgggaaaattaacatgaaatagatataaaataagagtgagcatataaatgtagaacagggaaagcaaggaaaaaaatggcggatgatgagaggggtacaaaaggagagattgaatgggggtaatatggagaaggttagatgagtagacagggaagagaaggcataaaagactagaatagaaggtgttagaagaggcaggttcaaaggataaaggaccgaaggccactggaaaatgaagttaaagacaacttcatcggaaaaggaagccttggacaagaggaccccagaaacgacttcattctctaaagcgagtggccggcgcactggcccccctagaggcaggacctcggatcttttatccgtcgagcctctctcaatcgcacacgtagaccgtccaggccgttgcacggcgtacctacgaccgataaccaactacctactacctactaccagctagctggctacttatctacctgtcgatctacttagagtatatttggcaatgcctctagataaataatcctggtcgccgcgctattcctatccctagtcctattcctagactccctattcctcggtccctcgctgtgggaacagcatgctagtccccgggccctgccagacagctgggacgcagcacgcttcaccagaacctgaacctcacgcctcgagccaccgaaaagagaccgcagacactcccagacactcgcattattccctgcggtggaatctgtggatggagaatacgtcatattaacatatcgggactaggggcaaggacgtggactggtcgggatcctggacggtctactacgacctactgcttcaattcttcctcttcttcttccatttctgtctgtccttcctgtccttcctgttcttctgcactgctgctctttactcgctctcggggctctgtctcgttctctcgtccgctcgaggcgtctgtactcaaccgactcagcccgctcccactcgtcgggctctttggtcgtctcggtctgctatcactcgatctcgagtcggttcgctgcctgggatcattgagaccagacttctgtcccagttgagagtggttccagtatcaactgctttcgccggccccagtcgatcactgggttactcacattcttatcggcatcgtcttcttctggctatttgccctcccagacctttcaccccacgagtgccccggctgcgttcctctcttgtttggctttccaccgccgctagtccatttccctacttaccttcattttacttctagactctctccattcgtcttccatctcccatctcccatcctccttcttcactcctttccttcctcttctcttcacctccccctccctccctctccccgtcctctctcttgctcgtcctcttcccctccagtcgcgtctagctccacattgccaccgtctgcatcctctgcctctgttctgagtcgattgcttgtgggaaggcgaagtccgtctatccgtctatccgtctattcgtctaccttgtctactggcctaccttgtctgtctactggtctatcttgatatcctgatcttcgagatctgtgatatcctgtcgatatcttgtcgatatcctgatcttctggtagacttccaatagtcaccatccctcacgcccttgctggacctcacagggctctaacccagcagatcgtccattttcactttcttcgtctattttcgcacttccttttccctcgtctccctcgtcctcttcctctctccaactttgtgcccggttggtgactggttggtgactggcccggcacccttccctctcttcacctctcttcacgggaactttcaacttttgattttcccttgattttcctttggttttcctctgattttcgtccatttcgctttccctcccccttgatactcggccgatgccgtcccataccccccgttccacccatcgcccgtgaacttacatctgatgagggatcgtctccccgtcacggcccgttgctgaatttctgcatctcgtgtgccccgtgaaccaccaccgcagcaccgtgaccacggaggcccaataacccccgactctcttttcttgtcgcgtcggagggccggctatgtcctcggata

SEQ ID NO: 987 - DNA, 1530 bp, Emericella nidulans
aagccctgctatttacagcacgggcaatggtgatcactggagcgctcagaacgtgcttccacctgagctggtggcgtcgtttcgcgcgtgctgtcgatgatcatgatcctcaacaatctagctgcgaccggtaggagatcgataccggccgtttggatctgcatcctcttacggatcacgggcggcgaagctgccgcttaggctacgtccaagactgtcgctccgacgtggaataccgctccaagcatcgcccttggggccttggcttgaagccaaatttggacgccgcccagttgggtggctttcacgaccgagacggctgaggcccccggaggcgtcaattgaacggatatccggccttacgctctccagggttgcgagagtcctccgttcagcctcaatctggcgcagcgtatattcacgcagggccagccacacatcgttggaggttcgttcaaaccagcggcgcttttcattcagaaggtttgatgttactcgttgcgtctttttggtcaaatagtcctcttgactctgtgcttcatcaagtgcactgatggcctcgtctaccttttcggggcgaacagatgaactgactttcagccggtccgccgcagcgcgtttgctgcgagtagcttgctgagcttgtagcagttcccgaagcagaatatgacggttggtaagtgtttccttgacaatgaaggcgtccgatgagtggtaactaaggggatccccaagagtagttgcctctgcagttgcctgaaccgcatgatagtctcccacggcttgaattaccttccccagcttgcggtaggcatttgaaagaccagggtgcgtctcctggacatgcatctgtccaaccttaacgccaaaatctgactccgcgagacccaggcctaaatagcagtgagaacctcatggctaatgtgaaaggaagagttacaacatacctcgtcgagccttgactacacgatcaactttatggctcgcatccatagtacccagataaaacatcttgacgacagggcgcgcattttgcagctccggcgtgtcgtcaggaggaggtgcaaattgcttcaaaactttcctccgaacacctgtcgcgggttgcttcatgcgaacaacgggactatatccgaagtcgctttcaacaaacaatacaatctcgtcatcctgaattaggacttcattattcagtacagtgttcagccatcgctgcattgaagccttgactcgaaattcgtcctcgtctgtcccggctccagcaggggtcaaaggcgcaggtacagccggaacaagtgcctcgggattggctgacataagatggtccgcaagcttgccgaactcagaatgggtccgcctgacatcgcggtattgagtagttctaaactttgggatattggtctgatattgtggtcagtagtgcataagtgatttcgctgcgctgcaggcaattcccacttacatgcacatcgaatcgaaggatgggatcctagtattctatagtgtcacctaaatcgtatgtgttatcat

SEQ ID NO: 988 - DNA, 1383 bp, Emericella nidulans
ccatccatggcatcattgcaatggcgagatgtcttggactacttcttcgggcagaatctctacggtacctcgtaagagcatgggactgggtgctacgggcgtgggtgcaacggtggtagtcggtctaatcacagccgcgggaactgttacaccgacggccaccgcccagacagacccttggattgctattctatttttcatcctagatacatatcaacgccatgcctgccagtggcttactcctgtgccgccatactgctatctgcggagtattcccagttatcagccgtatccaggctggcgagcattcggctctcgctcctccattccgaacctcttggcatactccgcaagcgatgaacctaaacacgcgatcactgcccagttatcctgagaattcaagacggactgtatctaggtagcattcggacacggcactcgcctcaagccgagtcgcacacactcatacagtgtattatagtatatgagctgccattccctgagacttcaatgttttgcaacccttgtgggaatgtcccaggccatgctcctccatggccatcatattgaaactacacttgcttgctgcattcgacaatcagctgcttcaggcctgccgactatagagccagccgatgagtccagtggtacgagagagctgtcctgttgacaggatcgtcagcatcaactgctcggtatcctaagggcgtactcgaactcttgcatattaagcacttgtcatcggaaggaccagtgttccaggacttccagacatgctcttaatatatcggctgagctctatctgccttagaagtagactatttatgcttgtgatcaccagcatcctttgtagacaggggaagagcgtgcgtgacggtcctgtgacatcacacaactcctctcagatatatacgctgcgcttccaagaacctcgactgatatagagatcgaatcctacctaccacctcatcaatacaccgcaatatgcctacgtcaaaggttcaagataaaaacggacaaacgctcaaggagggagactatgtcttcacaaggatccgcggcgttcgcaccaagggaaggtaggcgtcaccacgacctagtccagcctcagtctgagctccctaaatacctggataatgtttccgtgtttgtggactagcctggtgtaattcatctgataagcccatcccactccgcggggcccaatatattgtagggaaatgcagagactgatgtcagcaatacagatagagaaaatcgtcaccgatgaggctgaggctgagcaagaaaacgtgaagaatcctcccaaggtatgaacctccccgcactagtttctgtgtgaaaagaccgctgagataggtctggcaggtgatttataatgac

SEQ ID NO: 989 - DNA, 1962 bp, Emericella nidulans
ctgtattggaagtaccgtcttcaatcaagaaggtcatttgatggccctcttcttacacaagattacttgcaccgaatacgaaaatgtattggaaaatacaaaaagttggtctgaaactcgaatctagattcgccgtcactcgagttcggctgggagcatattgtctcgtaaattgactctcagtccttgtgcttttattccttgatatcggcatagataataccgcgaccgccggtacccagatagacacgtccgtacacgcgcggatcgccttgtatcattgcaattccaccgtactgatgcttctcgtcattgactcgcacccaagtcttaccattatcgtctgatcggtatactccgtctttactgagagcaccatggctcgcggcttttccaacaatgaagagtgttggttccgatgagcgacgcgctccggcaccaattgttagctgtcttgctgtcactccgcgtccagtgatctttgtccatttcttgccaaaattgcgggtatggtagattccatgatcccccaggcccagccatatctcgcctgctctgttgaaattcgcaattggcagcgctcccgagtatgctggcagcccgacctctttagctttgtaggcgcggtaggagaggccgccatccctgctcagataccatgttccatcagtgaaggagtaaaatgttcgtggctggactctgtcagcgctaatgttgggagtctgcacattcaagccagttggagacacccaagtctgtcctaagtcagtggtgacgtatggaccggaatggttcgtacgaggagtgatagcctgcagagtcggccaatacgctgtcattgccgacgaccacacgatatccttgcctgaagcatcgatcgcaatgaccccgggattcgaggagcttgtgtttatgccaggaatgcaggttgcgaacttggtccacgaactgccaccgtccgcggaatacgccgcgagtccgcagccgtcagtatagttgtgtccgcaagggccggcacggatgataatttccggcttctgaccagcccagtcgagagcattcaagtttgacaacaccggtaagtcgaacattggctgcggaacgtcgagatctccataccggtatccgttgatatcacccagaccggtgagaaggtgcgaatcgccgccgttcgggcttgctaaggctaaagcaaccgattcttcaatgccttgagcttgaatgtaccagccaggggactggttcttgtcgaccttggacaagttgtcagttgcccagatagtcgctccggtgccataaagaacatggtcagagtcactcgggtcgataacaactgccgtcatccaccatccaaactttgtcagcccacgaacgggagaaggggcaccgtaaccgccccattgagggccccagttgaagctgagccagggaacagcggtaccatctttgaacgcagcttcctcaatcggatggccccagtacccgcctgagccagatggtgtcgaaagctgagacacatctttccaggacttcccaccgtcgtgcgagaggtacatactgtccagagccggaccgggatcgcgatcgagggataccaccacaagcctttccggattttttgaatctacactgatcccacagaatcctcccgccgggaaagtctggttgtcgaatggcgccggaaacgagttgttagttttcggcgtgatattggtccacgcagatgaagtcgtgttgtagacatacactccgccatatgtcacaccatacggaccaggtgcatcggcataggtcacatacaatgcgccattttctgctaaaacacctttcatcggctgtggtccagtgctctgcggctgcgattcagctggaaagaccaggatatcctcatcccactctactggctgtccaggtacagcctcccaactctctccagagtccctcgtaacatagatcccccag

SEQ ID NO: 990 - DNA, 2179 bp, Emericella nidulans
  unsure (1)..(2179): unsure at all n locations
taccgtactggtaatgtcataaagatagatgacataaatcttatccaatgcagtctttatcctccagtctccctaacccttatgcggtatcatggcattcacgccgttagttggttccgatcgactcgaggagagcgttgaccttctggatgtacagagcctgggcccgctgctggctgatatccttgatctccttccacgcgttgtacttgtacttggcctattcgttgttagtctaccacttatccatagctcactatcatattgggaagcagaacggcgggtaaagacgaacttcaaatgagaaagcacccggcgcagcaggctcctcgttcttcgagcgcttgaagaatgcatacaactacaacgaagccataatgttagcctgttctcatccacctagcaacccacccaaccaaacatggggcagtaagtaccttcagcttatcatcattcccgggagagctcttcaactccttgaccagctccgtcgcgtactcaaagcccgcagtcagggctttgctctgctcggcgtccgagacagtagcatcgtcgccaccggacaggatagcctcgatggcggagctaagggcatcggcgttgatggcagcggcgagctcctgcaccttggcggagtacttctccttgttctgggaggccgtaagggcggcagtgaaggtagggacggacatcttggtagctctttgttggaactggtttgggtatttgaaggaagggaagaaagatgaatagagagaggttgtgctgggagagaaggggctcggaaaaatggtggggtgttggtgttttggtggggtaaataggttggtcagctctaccttgctgggctgttctactccaatcttctttctatgagtgtcaaattgttatggattgcaaggttttagtgctgggggtggttttacgaccgttttgtttcgttctctcatctaacaacttgcgtagtagcacggtcagatacatatttccatgtccaagtcggtattggatcacaaggaaccaacacatgataataataacttcccgaggttaagggcgacgtcataatacttccaactttccctatacctctgagcgacaatgtatggacggcaagttcatcactctttattctagtagatccgcagggaggtggcgaaaacgagtgtcgcgcccgaatcgcgcatgaatatgaccggtcaatcaaccgtctaccttcgcactagggtcatgattccttgcctttgcagtggccaagatcgtctcttacgggctcaaggtagtgaagagcgactatgaaggtcgtggactgagtcggatttgaaactgtttatggctggtatactattgttgagagtctggttttgaacaagtccaggtgatataacaggtaagattctagcctaactccaagattgttcaggaatatatacgaaaaatgttctttaagccagtgctctgtggattatgttcagtgaaggctatggggcaagacaggcaatacgaggcattgtgattgtcgaagtcggcggccagctcagactcggaaaacttgagataatccatcactatggctggccaatttagtttcttccagatccccagggtgctagctctcttttagatctagaagcggctggcactattagtgtgctgctgagatagacgctcagagcaccgcttcacatccatgatgcccatatgacagacatgcatcgaaaaaaatggcaggtcaggaacggcatcaacagggtatttccattcccacaattctgtctcaaccaaacaaggaatgatctttctcccgcttgtttcgctgccgttgaaatctcgcaatcattgtctccctgttcctctctgcagttgcgttctcatatggcccttgcgcttcctctacatccaagcaatgatctaccccttgaaaacgactaccaggtatgtagtatcctgcgtcagcctcatctgataagcccttacgataaacagagcttggtatccagcgatacactattcttagaaagctgcgtcggcattactggggtctgaggagatccgcagacaaactaggcatggcgtggaactggtagagagccccctttgggtcaataatggcgccgtcctttccnatcaggttcgatagttattcgcagggcaatgtgtaggacaggggagggtaaag

SEQ ID NO: 991 - DNA, 3381 bp, Emericella nidulans
cggtctgatcctcgttgggctgaatatcgagattcaatctcactcccacctatgattcacttatgctgagcaacacatgaatgccatcgtctgccctggcagctcccaatattgcgggacaccccgggcagtgagtcgaccttgcgttggcgactggcctatcctggagattcaagaaaaccaaaaaaggcctattcagtaatagtcatcttaggaccccgagacatgcgtatgcttacaatggaagactgcaagcggtaggtgacagcgagccggggccgagttccatgaagcatgggtcccagtccgccagagaagttttctgcgtagctccagtctagattgagagaatcgacccgcacgagcgtggatctagctttcttctttgcgccaacacaattgaccatccacgcataggtcttcgatttcagcattcggcgtctggaacctctgtcaaaaagcaagagagcggtcttctagagccttctcctgtcgtactcgagattgactgacatgtctctggcagagcagatcggtcctacctggcttgaacttccagaacccggccggggtcatctcagcctccccatgggtacaccaatggcacatacatcctgtccccccttgtctgcactcggaagcaatgccctcaaatcactgatggcaaaaagtgaacagtcctaggcgacatgtccccgtgcgaactaaaccctggcctccccctacctgaaccggcgttcctctcactgacgccacgctgccacgcccactataccccaccttgttgcttgttggcgctcgggggctgaagccattcgaaattgcgccaggtagatgcagagctcaataccatggagtctacggagtacttggagtgttctccactcagctcgagcgagcaatgacatcccgaattcactcgctagtttggaacctttgttcgagaccatccctagattaccttctaggcgacaccctaccattggcccctgaaaagtccacttgaatcattgactaccggcggaggcgcttggggcattatgtgagctgtcgtgggttgcattgctagctgagcccaggctatttttgtaccccaggagcagaggccgcatgattatcttagactgcccttaaaggcaacatgatgtgcctcgcagaaagctgtaagcattctttcttatcctctatctttcactaatacttgtatattggtggttactaatacctaattgacgtgaagatggctcagcaggcgcagtgtcttctcccaagcttcggtaccatttctgacggccctaaacgacccgtctcgatcacaacaaaaacaactccttcgcaaagtgccaagttgctctctgcatataagaacgactcgctggatccgttgctaaaaaccgcgtgggggttactgctttaccggtatactggcctgcaggatgtttgctttggatacaaacatgacgatgctggagctcttgtttctcagacgtcagacgctggaaggctcttgacgttcagactcacaatcaatgaacacgacacaatcaagaccatcttggagaaatccgggggtggatacggttgtcaaactgacattggtgtgagcggaagctccaatgcgaacaatgataactactcgtcgttcaatacggtggttatggtacgagtctgcggtgacagtacaaaggaagagacctttgtacgaccagtatttcagagtatccttccagaagaggtacgcgtgtatgatgatcatagactatggtatgaccgtctgaccgttttttagtgccgcgccagacttcacgtgaaggtactacaggaagatatctgcatcttcttggaatggtggaatacggatatctctacggcacagatggaaagtgtcgctcggtactttgagcatattctgaaccaagttctttacagcgatgacactgttgttgcgaatgcagactgcttcctggaacaggactgggctcgaatttgcaagttcaattcagtaattccagagacctatgaccgttgtatccacgatgtcattagcgaacaagtacggcttcatccacagcgagaggctgtatgcgcctgggatggaagttttacctatggggaactggatgtgctcgcttctgaactttcgtatcgtctaaaaggctatggtgttcgcccagaaacttttgttgccctctgcttcgataaatcggtgcgtttcccttccaagatccgttcaaccgctcccttcaacctgggtcaaatccggaacaaagacataggtcaatgctgtgacatagttaacgactatttagaaatggaatattgtagccatgctcggcgtactgaaagctggcggcgcctttgtccctctcgatccaacccatccgacacctcgcttgcggtccttggtggattccgtcaatgtaaacatcatgctctgttccaggaacagggcagagcatctgagcaaggtcgtaaataatctgataccgctggatgaacaatcgttcggcaagatttcttttcctccaagaggatatctccggcaagaagtgaaaagcaacaacgcggcatatctcattttcacttctggctcaacaggaaaaccaaaggtaaggcgcaaaaaccccgaaatatgtgttttcgcgtctgactctttctagggcacgctgctggagcacagggctttcgtctcctgcgttttcgcctacggtgcgccaatggggttgaatgctgatactcggaaactccaatttgcagcccatacatttgatgccagtctgtgtgagtctttagcaccgctgatacacggaggttgcgtatgcgtaccgagcgaagaggagcgtttgaacgacatagtccaggcaatcaacaggatgaatgtcaactttatctgtttgacgccatcctttgcccgattcgtcaatccgtcgagtattccccaggtgaatactgctctcttggtcggagaagcaatgtctcgaacagacttagaagcatggtcgcatatcaagcttctgaatggatatggtcccaccgaggccgcggtttgtgctgcaatcaatagcaccatggacattaactccgattgtcgtgatattgggttagccacggggacgcatttctgggttgtgaaaccgaacaatcacgaccagcttgtccctgttgggtgcccaggagagcttctgcttgagggtcctacccttgctcggtgctacataaacaatccggagaagacagatgaagttttcatatataatcctacctgggcacggcacgatccaaagcgcggtgatcgcaggttctacaagactggagacttggtaaggtacaactcagatcttggttcgctcactttcttaggaagaaaagactcccagatca

SEQ ID NO: 992 - DNA, 1536 bp, Emericella nidulans
tctgccttacccgtgtagagatctttcgttgtaggatcaacccacttggtgcgtttcaacaccttccagaacacaaacatgacgacaaaaaacgccagtccaaagtacgaggtgacgaaaccctgagcattaaatggcttgaacacggcatacccgttaaacagcgccgtgctgaaaccgagaatcaccgccaagatagccatgtatggctggaacggcgagatccagggcaagtagcttttgcgatcgataccctgggcacgcagggcgcggtaccagccaaggaaggtacaggccatgctggtgtaggtgaggaccagcccgatagtggtcaaggcgacaaaccagtagaagacgctgatggaggcattgtcggctaccaggaaagtgacgcacgacagcagcgtgacgacgatcacacagtaaacggggacgccgtccttggtgcatttggtcaggaacttgggcgcctggccgtcgcgcgcgagcgaatacagcgtgcggctggagctgtacaggtaggcgtttccgcaggaccagcccgagaacaggatcagcacgttgataagatcgggcaagccggtgatgcccaggttctcgataccgatcacccacggcgaagcggcagacccggacgcgcccgagtcgatcgcagacatgagtcgcgaatcgtgggagtcgcagataatgccgacaccgagcacgccgacgacatagaagccgacgatgcgccagaaggtcattttcacgacgcgcgggatggtgcggcgtgggtgctggatctctccagcggcgagcgcgggtaagtctggcccagcgatggtgaaggccgcgtagaccatgaccgagaaaaagccaaggaagcgcccggtggcgccgtctgtgtagtattcgtacatgacgccgtcagtccagtggcggaagccgtagacgtcgcgtttagggttgccgccgaccatggtgatgaaggtgaggaagatgaggccgaggaggagcaggattttggtcgaggccataatgaattcagcttcgccgtagtatttgacggcgacgaggttgagcgctaggcagatgaccatggccatggcaacccaggccgctgggttaacgtcgatctgccagtagtccatgatgaaggcgacggcggagtattcggtgcagacaagcatcagcccggcgtagaagtaaacccatcccctagacggatgttatcagagcgtgttccttggacccggaaagcagagggaccttacatggcgaatccaaacgccgggtcgacgtatcgcgccgccagctcaaagatcgaccctcggatgggcaggtaggcgcacatctcgccgacgctgaggttgatgggaaggatgaacgcgatcccccagatcagatatcctagcaacagcgagaggggacctgcatcgcgaagatacgcgccgattcccacaaacaagccggtcccaatgggagccaccaatagccatcaactgcacatggcgcgacgaaagaccgcgcttggtctggggaaacggaacgatggta

SEQ ID NO: 993 - DNA, 2526 bp, Emericella nidulans
ccctcacccagcttataaattgaagatcttcatgccctcttatctcaatccaaacgaaaatgactgactctagcaacgtgtcgaatctaccaaccacggacatggctgaatcggctcagaccgagggggagaagagggaagagaattctgtgcccaagcaagaggagtcgcgccccaactttccagagggtggtctcagagcttggagtgtggcgttgggcaatgctggcgtcatgttctgcactttaggctatatcaactcctgggggtacgtgaagcgttgtccatagctgctcaaaactaatgtctgcagtgtctaccaggcctattatgaagcaaaccagctccgcagcgaaaccccatcggccatttcctggattggctctctccagacgttctctatcctcagcgcctctctcgttggggggcctatgtttgaccgatacggcgcaaaagtcatctaccccccagccgttgcattcgtgttcaccatattcatgacgagtctgtgcaaggaatactaccagtttatgctagcccagggcgtacttggcggtgtcactcaaggcctcactatgacgccggccatggcagcaacgccgcagtatttcttcaaaaagcgcggtgtggcaatgggcttaggagtcgccggcgcttctgttggcggcgttatacaccctattgtattgaatcaattgcttactcgaactgaccttggctttggatggtccgttcgcatagaagcctttttgatttctgtggttctgttgatttcgtgccctgcgattcgggcccgcttgccaccgcgcaagagcaagtttcttcttccaaaggcgttcaaggaagcagggtacacatcgcttatcatcggctctgtctccacgttcatggggatgttcactccgcttttctaccttccgtcttacggtatctcgaaggggatgtcaccaacactggcattctatctcagcgccattctcaacgccgcctctttcccaggccgtatcgtgcccgcaattctctctgatcggttcggcaagctcaacgcctttgccgcagccggagtagccacaggtatactcacactatgttggcagcgtgtggagggcaatgccggggttatcgtcttcaccgcgctctttggctttgtttcgggggcgatcatatcaggtggtacagtcgccctggccatgtgtgccaaggatccgaaagatatagggacctacatgggaatgggaatggcatggacctcgcttgtaagtttgatagggccacctgtcagtggtcgcttggtggacactgatatggggtacacggcagtggcaatattcgctggtacggcgtctctagttggaggcttgttcgtgctgcttattgtgaagccgttgagtgggttcaagattctgtcattaggttgatacaagacttgcccaataaggcctggggtgttttcagcgggggccataactgtcttgctcggtcaaaatctgataaccaatcttggcgcttatttagggtttttttttttcatgcgtaactaagagaagccttaatgattatcagcactatctgtatgacgtttctggttgactacgtttttgttaacttgttacaattgaatttgaaagaaaaggcaccagacatttgcccagtctgcttatgcttcctttcatacgtcttctcaccttctttacctttagtaaacgacccatgagcaaaggtaggcaacagattcgggaatctgaatatctaggctgcaaagtgttgttggagagagctgggaattttgggagagttcagtaaattgatgaggattgtccttttgccctcgaccttttcttcttgtctccagccttctcctcgttctccagatggcacctagtgatcactcatggatatcagaacagatagcaagcaatgggtgaatactgattggcaagtttccatgactatgatatagcttgcctttcgttcattgcctatgtcctaacttacgagtcagaatacattaccattctgcgatgcggacgatgatcatactcaggagtcctatttgacttgcagtgctctagctctgggctaccaaaacaagacgcgaccttggcccaccgattcctgaagagaccaaataagctgaggaggcagaccacgcgtgaggagcagcggtccctagtactacgaggacgaagccatgctcccgtaaggctataccggggccgaccttgctttctggccactaccccgggggggctatagccaaccaacaacccggcttgagggcaaaatgccctgggcaggatgcccccggaatgccggggcccaaagcgctcaaagcctcatatacataatttgaattaacatcctatgggatgctcgttttattgtgccgaccaaaaacattgtgaagtttcctgttggatcagccaactgatcacttcagagagtacaagtcccccggtgcctggttccccgcaatcttatcggagtcagggtggggactcctatattcctctttcttctccaatt

SEQ ID NO: 994 - DNA, 3714 bp, Emericella nidulans
tcctacaatagcagcgagccagattttgatacattgaccccgtgggaacaagttttaaccgggcagcactaccttggcgggaacactttggcaattgatgactgcgcattttggccagttctaagggagtttgtccaaaagaccggaccgctctcagacaaggcgtatcctaatttagcccagtactatacacgagttggcaaacgtggcattgtcagggcagtcctcgaagaaatgaaatgattgcggcgtcaacacctggctggactagattcctgcctacgacggaatgagatttacgatcatcttgtgtcatagacaaacttaacgaccttctaagttaactgtgtagcttctgtttcagtcgtaaccatatacgacatacttgttgttgcaacgttgtttgttattttgttgcccagatacgggccactatacccatcaattgattacaagcattcaccgtcgaaatcagttcttgtcaagacatcgttcaacgcaaccccgctgcacacaacggccttgaggaaagcatcagcaacaacactggagccctcggcgttagtatgcgtatggtcattcgggtagaacgagttgaccgtgtctgcgccgagcgcctcaaagatgctcgctgtataagctccatgatccacatagtctactcctgccctttgagccgccaactcggcatacccgacaaatcggttcggcgtgtaggagaatgttccgctctcccatgggttgttgggcgtctggctggagatcaggacgttggcacccttctccagaaacagcagcgccgcattttcgatgtacgctgggaaggtgaggacagtttcggccaccccgttgtacacggtctcacaggtctcatcgccatcgccagggcagtcagtacggccgttatcgttggagagagagccgccgtcgttgtgtccaaactcgataacaacatagtcgcctgcttgaaggacgtcggcgatggcctggaagcggccctcgcgggtgtaggagcgcgcgctacgaccaccaatggcctggttagagatttcaaccgagacgctgtcggcaatgtagtcaccccatcctagtaaagtcagccagtcagcatgatgctcttaaggtcaatcaaaagccacacttaccaggagtactggacgccatggtggagtcaccagccaagtaaattgtctgcgccagcgcggacgggaggagagaaagagaggtaagagcgatggatttcatttttgcagtagacgattgcgtcttggttcgagactttggcttgcttctgttgaatgtagatacaaacctaccgccaacgaacctatgcctcttttatatacccgccaacctctagctccttagacagccctcaatccagacaccaccagtttccttcagcacggtagaacgtcctatacgtggaacatgttggcagcctcggcgtttgagcccccgacgcagggtttacctgtcaaactgtcgaatattttcccgatccccacatcaactccgggggaggaagtgtgaaactcggcccagcggagacctgtttcatgacgtctgtcatgactagtaggatagctccagagttgcaacagtcagccttgtcgttttggggccagaactcttcgaattgctccgtgtcggtttcgtatgcggtctcctctccttcacaacgggtaagcctcggtcaagcaggataccaaaacctttgctctgttagaaccagtagattgtcagtacatcaacctacaagatgaacagaacgagggaaaggaagaggtaggcctcgcacagaccgctcagcagcaacagcgaaacgccgagcacgacataagggtctcatactctgtggactgcacgtcatgcagaatttgtcagccgcctgttccccgcgtcgaatctatccagctgaagaagatcggccgacccggtgaaaccaccaagaccctttcttcacctatcagaaaccccgttcactatacgttattcactgtgggtgcctgaggatgagcggtgcaccccgtttgctattctgcatgactcttcaataaggctatagttcggaggagtacccatgtgcaggttggtttcgggttatagacaagcgaagtgatcatgccgggaaaggaaagatcaatttcttgtttgttgcttgcattcttggaagactcgctccttgtggagttgtccttggtaccatattaggatatctctgagtgaggtttccctgtgattagtagagagtgcgttgtagtactgactagtgggagtggggatgctcgcgtggttggaaatagctcctcagacatcattcttcagacaatagcgtcaaacgatagcattcggtgtcaatagtataaagtatttttcaaactcatgtaacatacaattcaccgcctagtaaagtaatttggcaggatggccgagcggttaaggcgttagattagaaatctaatcccttcggggtccagagttcgaatctctgtcctgtcgaacttttttgttgttgatattctcactccccatctacttgttgacatctacctatcaatcattactctatataaagtgataatttaccagcataatcgttccttccgcttttgtattctcaatttctcaacgctttaccatgctgactttgagagcttctgaatcgcgaatggcactgttgttgcctgatttgcggtgtaggtgaccgccatctgaacaaggcaaagtaggcctaatgaatatgttaccctgcctctgtatctatggcgcattccaattactgaccataagcttgctggatgggaacctgcttgctatctgcagccgaggcacgtgaagccgatgaccgaaatagtttcagctccccacatgctgctcccatctccgcatgttgtgattatactctggcctggctgttaatgcgatcaaatattattctcgtgctatatttagggttctattgcgagcgagatatagtctaacccatttcctatctgatataaagaacaactggcctgcttaatcatcgctccgcgttgcattcaattttagccgaggttgtgcaactagcccttttggatatatattgagaccacttgcatatcacatcgaaggcccagcaacacaacagccacacatagcgagcataaaatacacaccatggcctcaaactactcgcccaaatactttaatatcaatttcccacaagaatatgtcgcccacgtcgagatcaaccggccgaaccagctaaatgcgttcttcgaggcgtatgtccgcaatacaagctacccctcccgtccctcataaccttacggagcaacgatgagctaacgtttatatgagtttgtagcatgtggctcgaactcggccaactcttcgcccagctctctactgaccccgccgttcgcgcaatagtcatctccggcgctggcactaaagcattcacagccggcctcgatgtaaaagccgcgtcgcagggcctcctatcatcagactccaaggccagtgaccccgcgcgcaaggctgtgcacctccgccgcgaagtcggctcgttccaagattgcgtctcatccattgagaaatgcgagaagcccgtcatcgtcgccatgcatggtttctcactcggtctggcgattgacctctcctctgctgcggatgtgcgcttctgtgcgaaagatacgcgcttcgcggttaaagaagtggatattgggc

SEQ ID NO: 995 - DNA, 3355 bp, Emericella nidulans
acccatagagaccaaatgaggtatgactacgcatagaagaggaaaacatagctggatctgctaggtgcatatagattgatttcttaatatcacgtgcatagctaagaacccaatataagtaatctaacccgtatgtcaaaacacactgcacaaaagtcttctgattatgtcgcatcgatcgtattcgtaactcttctagttctattgcgtctgatcttacgaatcacagaatgataaacctgaggggaatcgatggattgtccggatgagtatggagaaacccgtctattccgatgcgccgttcttcttatgatggagcatccaggtaagaagatcaactttcgtgacaacagccacgggccttagagtcccaccttcatctctttccgtaacaatagccgcactattccactcaaaaaagcgattcagtacacttaaagatgtatccatagtaatctcgacgaatttcctgctcctggtttgtggtttgggggcatccctcccgttctgattgggctccaagctcgcaagacccatgtctcgaggatcggtgacgacctcggaaatggtgcggaaatcaaacattacgtcggcaacggggctcctaccagttgcgcggttgtgcgtcaatcgactgagaacgtttccgagtgtaaccaggccgacaagctttctgcctgatggtgccagaacgggaagttgatcgaaccctttgtcgcgcatgacttcaatggcagtctcacaagggacgttggagtggacggttgtcactggtttgagccggagcgagctaaccttactaccggcaaaagcgtcgtcttgtccttgagtctgcttattggaggattggaggatgacttcagtcggtaacgaaggtaggagatcgttggcggcaagccaatcgtcgtcggcgaactgtatctgattaacaatatgccatatcgcttgagtgcatgcggtaagttacctttgtgaggtagcttctgatgctgtctggcaaaatcacaacgacaacatcaccctctttaaacatgttgtccctagcggcctttaccagggccgcgattgcgcttccgctgctcccaccaacgagaaggccctcctcagctattaaacggcgagcatactggaaggattctttgtcgtccgtcttgtaccacttgtcgacggcgtgctgatctagcacctgtggaatgaagtcatacccaataccttcgaccttgtatggctcattggcatgctcctcgtttagtgcagctgggagagccagtattgacccttggggatccgccgcaattacttgaacgttggaattgtgcttcttcaggccgcgcgagagccctgtaatcgtgccacccgtacccgcgccagcaacgatcgccttaatttgtcctttagtctgactccagatttcttgcgcagtgccgagctcatgagccaatggattgttttcgttaccatattgatctaggatgtgcgcatttggtagctccttttcaagacgcttcgcaacgccgatgtgggattcgggcgagtcgtatgcagcttcattaggagtccggatgatggtcgcgttaagagcccgtaaaacagaaaccttctcagcagacatcttctctggaagggtgatgatggtcttgtagcctgtaagtgaaccgggaaattagtggtggcacagttagtggatggcacagatgcaggcgtctatcaaaacctacctttgacggccgcgacgagagctaacccaataccactatgggaaaagacgccttagaacgcacactccttgaatagaatccttgaagaatcagaaaacatacgtgttaccactggtaggttcaatcagagtgtcgcctggcttgatacggcctgaccgttcggcttcctcaatcatgcgaagagctatccgatctttgacgcttccgcctgcattgaagtattctagctttgcatataccgtcgcatttatcccgaggttctgcggtagtatgcgcatcctgatatgtggagagtttgcgactccttgcacctcccacttctttcttattgagagcgcgcctctgaatctctttgagtacctccttcaggtgagctagcagtttctgacagttgcatcacaagcccagcggcctctgaaaccgacttggtgttgcggatggcgtcgatgagctcgagggtgtctgccggagaatttttccggattgtttcgacgagtaggaaaaccgcgtgtttgtaccgtcttgcttccgcttccagggcctcatagtccgggactggttcgtcttgtttgtgctatggaatgactgagactctgatgggattgcagtagctgccagcgaacacatacctggatacgttgtcggccgggcatctttgatctgccggtgattgcgagctcaagagaatatcagcaaatgcgggtcgattgacgcggtgcagcggcctggacaacgcggtgacaggggcgacgccttttttaattcgaaaagacacggaggagtaggagctgcttttatatcagactctcggttcacattcgcgcgcgaggacaatggctggcatatagctgaggctacggtgtaggactgctggatcattcaggtagggaccgcagcccacgtcaccgcgtcctgctctccctcgggctacagcatcccattggtcttgacactgtggagggctcaccctcctagagcacgatttagtaagggggtccgggatgtcccagctatggagatcgcattcgaccgttgccaccgactgttccttgtttacgtccccgcagacttggcgacgtaccgaggagactcgctaacgtagcaaaccgccttattcaacagtgcggtgtcgctgtcatctgccctgtgctaaagaccacgaggcaacctgctaagagctctaggcgaccaaaaacgtttacagaacgagcaggctccttaaccttttgccaaaagcagagtgcgaccgtcatctggatggcctgccaatgttatgattttcatgaagcaattgcgattctagataggtcggttagcaataaatcgggatcgactcagccgcacccaaatgctgaagactcggacatataatactcgctagtcgatatcaaacgcctacgcaataacattactgctctttgaacgtgatgttgtgtttatgaaatattacggtgcagatgccatctctgactgaaggttcgacacggtcgacttaatgactgcttactggtttagccggccgcccactgccagcattgaagtgtctactctagtaaagcacaaggagcttcgaccactgcagagggctttacttagggtcgcagtataccccagactgtgcaaaactagaatacctc

SEQ ID NO: 996 - DNA, 581 bp, Emericella nidulans
aaatgggagtgtataagacgtattgctagatgtgaccgaattagaaactgcacactgaagttgagttcgctgcataagcagacgtacttcaccaaatcaaatacggtaaccctgttgcccaccggcgaaatcaagcaatttccatcgggagtgaacagaaggtttcccttgcgatataccgtaccgaggaggttcgagaactgcttctttgttagtttgctggaaccccagagccaattggcaaatccgtctgtgcgtttcgagcttgtactaaccttaaaatcggtcttcatggtcaacagccagaaaagcgctcctcaacgtcttctctactgcttcagatcaaaaaaagtcggccttacgataagagctcggatcagctgctttttccggccccgggagcttagcctagaaagcactagcgtggtggcctcaggaatgtggttccacgaaacccgtgactttgggggggctcggaagtgtggattcaggggcagcaggagccagactagactcaaccaggcacgacaaacacgacaagattcaggctctggctgctgtcttcttgtctttcactctgc

SEQ ID NO: 997 - DNA, 3883 bp, Emericella nidulans
acacgtcttcccctttgatgcaaactgagcgggtccacactcccagattcggtttcttgtagtaagttcgtagtagcagttatagatggaaagagcctatccactcgggggagcagactcattctcggcgacggaatccgtttatgtgtcctgcgatccgttttggtgcccgcacttcgttttgccataacactctattcgattggtcttactctcttggtggggccgtattaaactctgctccgaaaaataatgactatggtgtgaatagagagaaaactgataaatcatctgcaactatttcacggcaaacactcctggataatataacaactcatgttcctctcacgatgtgttagttgcaccgagcccctctctgaccaacctatttctgcgacaatgtcaaagaacccagataaccgactcacccacttcgatattccttccgatgattattctagccaacaaagctcgcagggaagcgtcggcacagttgcgcaagaactctttgccaagcctcctgcagagctttcaacgcgccgcttgaagcggaaagccgatctcccggcaattcctgaacaatcgacggctcgtccgccgcaacctcgtgatttagccatcccaagcgtcagtaactctaaaaagagagcagtaactgacaccggtgtttgctacgcgtctccttgggactcatttgaaaaaatttacgaatgtgatctggcgggaactgttcaggtcgtcacacgcaaatctgagcggcatggggtgtattcactccgtcagttctccggacacaaccttgacgagcttcttcacaaacttcgattcacccaccatgagaataccgcctccgcagtggaatgctttgtaacaaccgacggcattttcgcgatcagtgatttcgccccgctcacgttagaacacgttgtggcgtgtcaagcttatccgaacgtgaagcagttaaatgcgattttgacccaggttggttacttcccccttctggttgaatgatacctactgaaaggtgcgggccaggttctgaatggccttgcttacttagtgtcgcaagacttgcgacacacttcgttgggctgctccgacattttgatgaacactaatggcgttgtcaaaatcggtatcagtcaaaaccctcaacggtatctcctgcagataaggatatgttctaattaaaaccaccaggatgcctagagaaatgtgttctaagggatcaaaatgaatcccataaagctgaactcgtttctgtcgggaatatcacaatggagctgttgcagaagtatgtcaaaaacgaaggcagagtcggtattgacaaactcgatcgctggtcttcggattccgtcgccgttagtttcctttcagccacaacttccgccaactctataaaaactctcatggaggtatgtttcccttaatttataggaaaatggtgcactcacatacgtttcgcttcaagcatcacctaataagcaaaatgcatttctgcaaggaggaactaatcggcctcgcgtggtttgcactccattcgacgagaacattttggtcttatgtcccaccggcaaaagagaaacggctagcttcgtgagctgctggattaaattgttacttcgtttgtctcgctctcgtatatgcgaatcatgtacatcatccaaggattcggacatacatcgttcaactcgcgattaagtaattaacgtagttcccaagcgagtccaacagtcaggtttcatagccacctgatgacgccgtggcagccgcactgactgtccagtcggtattggcaccccaccgcgagttgaccatgtctgaaatagctataagcgaactaacagagcggttgccattcacaattcaataattataattcgagaacaagggcctcggtgacttaccgctgcctgtatcactgctttagggccaaaagcacgagcattatgttactaacgataaactctccagatactctggaatttccaaactttattctatattgttctctaaaagccctctataatattcacttccttttacaactgcgatttcctatgctgaatactatcatagctcatggttgatactcaagctctaccatcttgatgcgttgatgcaaatgccctctcacgatgtgtcgcaattcatcacgcaagacaccaggggcggaaactgcagatattaattgactcagcattttgaatactaaatggacaaaaagccatcttaccaatcagtagaacttgcccttgattatcccggatcggggagagcttctcaatcttttcacgggagagctccgttgaaaccactgtagcatagtctggagcgccttggtaaagcgtagctcgctcgtgtttcccgaaaaggagtttttcacggaccggaggaccttgttccacgtaaatagatatgctgagtatctaattgtcttgttaactatagttcttccaagttagaagggtcctcacatagccatcgtccagcacgtcctccttcaatagatcattgagttgttcttgggccgcaattgcagtgcctactttgttaacccttgcgcagatcgacgggtattgctgacctaccacgcgtctctgcttgccagacgaggtgtactcgacgaacgtgcgaagtgcacgtgttgtacccatatatcaatcgcttggcgtagggtataacggccgggagccctgctccaccggcgatgagtagaaccgtttcgtagttgttgacggactcgctgagaccgtgaggcccgctgtacaaagctaggcaggaatatccatcaggtccgatcacccgcatttggcgagcgattgttgcagtaagaccgcttcgaggctgcacgaggaattccagctctgactgctttccttgtgaccaggagacaactgtgaatggatgcgtctgtgtccacgaccaaaagctgacgcctgggagccataagttgacatattggcccgccctcacgttgacgggtcttggtaagatcaggcggattttaaacgtcctaccaacaaacccgtccttttcaatattggattgacggacgtggctggagatgatggctcgcgggcacccacctccggaaaatattccgtttctgtagagaagggatgcgacatacaaacacgacgtgccggtaaaaacactaagcccaatgtaaagatagagcctagggagtagtttatcttggggtagatgcttccagatgccatatacactaactattgttaatgcctggtggactcggagagaaagttcgtaggaaaactttcgaacgaacggaaggaatatcaaagaaagggctgctaagcaagcagttgcctatcaagtccatgttagctcagaatgaagcatagtgcttgtcgctttataacttacaatgacggggaataaggtctggccatccgatctagttatgccgtcttttcggttgaagacaagggcgccgacatgaagcacgacaagtgccattgccatccagccagaggcgcgatgcatttggcggtaagttcgtaaaggaatgcccaaaaggtcagctgagtagcttaggtgacttgaggttaacaggaaaatcatattgatcagggaaagatctccagcgcggcgactgacattttccaaggagaagttcagaaagaagacgaggatagagttcacagtagcataagctaaatgcgtcaacacgctgagccggctccaagggcccaggaagcggtgacgagcaacgacatgggggtaaataatatgccgggaaagtaaaaccaagatcgggctcttccattgggaaaggagcctcagaagcctgaaggcaccagagacacgagtacctgccgctgtgatgcgtagatgcaagaatgtcatatttagttga

SEQ ID NO: 998 - DNA, 3369 bp, Emericella nidulans
ggagttaaccttgaacgtcgctagatatcgccgcggagaggaatggattggtcagcagcgtttaatcacgtgacttattcgtcgtagatggtggtgttttctttggtgttatgtttaactccaaacatgacttagcattcaccaaggatatatctctctgagagaagaccagggatagcatctactcaaaaattcatactatcgagtctatcgtatcgaaatcttctcgcaagacaagaattggattgtcagatcagcaataatgggcgaacatgggacatagaccgccagctcggtcagctaagacatctatagaatactggataaggaacatatgaatccctcttcaaagccaaagtatgcttgttagaagcgagacatgccaatgtttcgcgaaatgtgataacgaataccgacgaagccatgacaatcgataaataatttggaggtctctggtagtcaaaaaggaggaaagcagttatgggtacaacagtctatatatgttggcctttgggcgggatatcaggagcctgggtacgggagacagcataagacatagccatgataggaggcccgtcatcgaactgatatcttcattcctatcttcaaccacctatcaaaaagctgctgactagcgctgacaattcgttggattccttgagtcgcctttcatggcacctcgtgtaaacctacatgcttctagttggttgccgagtctaccaccccggatacgcgacagcatccgtacaaggacgaggactgtattcagaatagtagttgaaattaatgttccattcggttcaaatatacctttttctgcattatcgcgcttccatcctgggtacgctacaccgtctgcatggagactctaagaatgacgtctgataaatgatagttatgatttcgcataccttcacctgcttcgtcgcgcttccctcctgggtatgcaacaccgtctgcagaaggggcccaaggtaagtacaagagcgaacatttgcctaaatcaacctcaccttcattcacgtcgtcgcgcttgaagcctgagcagcgatcgctctgctatcgcgtttccagtcggaaggcaccacgccggctataggaataataaatacaaaggttaaagtagggcctggctaatcagaggttgagagaggaaatggaacgtaccagcaatactggcaatcaaggccatgaatgtagtaatgcccaagaccttatgatgacgggtataatagagtcaacggtgggtccagaagagaagcacaaagtgaacagggcgataaggtctgattccataaagactcttagacactctgatcgaagtgcagatggtatacgtgtatttatacctatagtacagcttgagaccaaggaataggcactccttgattatcacaagcagtcatcaagtaagccttactgcgcatcagaatatattgatttttaggagcacaccactctaatcatccttgagtggtggacttaagtacaggtatcagaataggcgtcagccatataccgtcttggagtactgaaggaatgccaggatgggagattaatccatgattcatgatctaaccaaccaaataacacaaatagaagaccagaaacttttttgcctagtatagcagcgctggtgttctagtctatgcaggcatgattagtagtgctttatgtaaccgtgaccaacatcacaagtaaccgagttacctatggctgagggaaaactaatgaattgaaaagacctgttgacatagttcagttagaaaacccagttatagcagagatgatagaatcacatataaggcacgtggaacaatttaggtagccttcgtgtcttgtctgtgaggtagggcgactgtactattccttggagggtcgttagcagagatgacaggctcacctgttacagtcctcacctcgtctcccaaggactgcggtttgccactcaatgtgaatgatccagatttgcatccgtctgcccacgcctcgcccataccagccgtgggcattccggagatgctcttcagtcttgcccggaccaattttgcagtagccgcgaccacaacctacgtttaatgggagggacaagggctacgaagcttcctatatggttacaaccagctgggctagatgcatttggttcaatctggtactttgccagagtttaaagacggcctgaacagaatgtatacggggtagtctgctaccttgtttcttccttcatatttggtacatcctagatttgcctgtctggatcagcaatagagcaactttagaaaagatatgaaaaagcgcacattatgcagctagataggcatatatatactttccctgagagccaaaggaatgtggccaaagcataacctaactcagtcacgcaagatatgaaatagtgctgttgcagcaggtctctttctgacatgtactcgcagtatatgttaaaaaggttggttagatcttgctcatcaacatcatcttccgtttcatattcataataagaggttttccaccagtgctcagtaaactcctgcataatagaaaggtctgtctttgctgctttattgtaccaaacagttcgcccccttgctagttgttcatgcttataggctgccccggcaatcttttaattgagctcattgactttgtgatatatttccatcatcccagggtcgttttccatttcaaccatagcagcagcaccgagcttgcagggagaatcattattacagtgataggctatacttccctccactgccagggatcctgcgggaacccatcataacgtctgccgcgaagcttcttatgtcttactttctctttgggcagggatcatgtgagtaacgggtatagcgaaaatgtaaacaagataaaggtaacagtatctgatgtacagtttaaaagtactggatgaaagtcaaagaagccctttctatttctcttaagcttgggtggccaaagtagcggcctaaattgtagttctcacccttctcaacccactcactcaagtgggtgatattctcaccttgttctcacccatctcacccgcacccaccctagagttagtgtctctcaccctaaaggcagcaacacacttggagccgttgcacttttactggcgttgataactgtggctcaagtacgcctgagcggacggaaaccgctgtttccaacaccctatggccgtatgtacttgtgattcctgcatatgatattataaagcaataatacgtaatatgagagttctccctaatcctacccacggcgcctcgcaggagtaacctgctttgctattggtacctccaccaacagtctcccatgtgaaacaaccgtgctcatgagccctgccatcgcaattcaagtccaact

SEQ ID NO: 999 - DNA, 5375 bp, Emericella nidulans
  unsure (1)..(5375): unsure at all n locations
ttgctaaatactatatctggctcatcgtgtaaggatggcacccgaccaagacgttgttagtggtagtggcatatatatagaggtaaccgcgcaaaaaaaggcaaatatccaattggcaaggtagcggtttgatgatcctagcgtattctagatggccggcgccaatacatcttttgtgactttggtatagtataggtaatttacctctagtcattcccaatatatggagctgggatatagaaggggggtgacgcgagccttcgctgggccggcagtcactggactcggtgcaggtcgggaaaagcgacgaagtgggaaaaacgtggtgtagatgtgtgtgaagatgatatttatggagtggtaatatctagacggacgtgtataatggttagggcttaaggacggtgaaaaatagaaccttattcacctgactttccactctggttggcattgggagattactagtgattattattcagaatctgtgtcatgaatctctcgagaaacatggcatgattctccgtaattcgtgagactattggtgacgatgtcgtattataggcacggcaagcagtcagattctgccggttggcataccatccagacttattgcctccgtatcttcacaggcatttatgctatcataataatttcagttatggataagtaaagtaatgaacttcaccataccacttgtagagcgaaggctacttatctcagaatctgcgtacaaattcgtttgctatccgcatcatctcatcacatttgacaccactactcacgggtgccgtggtttctatatcaaatcattaattgcagctctatccggatacgccataagattgaccagtataggatagccctccatcacgtccccaagggcccgcttctgctgacacagcttccacagcaccaaaatagcgcgatgggtaggatggatgcatcatcggtgagataggggtctagaaagaaaatagtttggtgtgtctatcttttatgttgtggttcccaatcgtcagaactcgaaggtttcgacaatcttatggccagcacgcgattatcaatatgcgcttgaccggggaggcgatgaagatgatccgcgtcggcaaagacagtatcggctgtttcgccttctctatccgccttggttggtattctctccaaatgaacagtatccgctgactttgtcacatcttgtgacttgttcttgctagggttgacacgcacctacggctcgatccagcatccacgtcaaatggacagactcgcggtgaacgtatgctactaagtgaccgcggcatatcaggactgatccggacagggccatggaccgtgcctattccagattattgcattcaagtttcctagacatctcctcgacttcagagtcgttggggagtagttgtggcagaagcagcgcggtaagggtatggagccgtggtcaacgccacagcagtaatcccgtaaatatgacgttcggacggagaatatgcggaaagaagggacaatttcgtcaaggaggcaaatcttggggctgcaggattgtccggcgactgccggattcttgagcgccaatgaacagtcaaatcaacccagcctgcctaaaatctctgcgcaatcagaggcagatctcttccaaaggagctacggcttcggaacttgaatactacacaataatcacaaggatagggttgggcatccactgtagttctacggtgtgatccgccatgccacttcggatctacagtttgcctcatttcgagacagataatgactggtaccggtattatatacataatactacagcaagtgaagaatgaacatactatggatgcatttgcggtgaagatatcatctatcgcatgttgtggtcttgaatatcagcttcaagtgggttcaccaagtatcagcaataaggacatgagttaagattttagtactatatcggcagatcttgcactgggggctagaaaacgcaacctgattaagttcgatgcaattaaattagctgctattgtcgagtctgcaattaatcagtagagagggcgaggcggaaatccgtgcctattctagttagctgaggcagacttctccatcctcggatattgtttctatccccgcaaccggggaagctttcatgatgaacgactatgtagtgccaaggattgcataaactttgtaagttattttgtctaacttgatcaagataccagcgaatgtcttctgatgagctccgtctggaaaaagttataaaagggccaacatccctcattgccagttcttgacagtaccacctgacaccgcgcgtcaacaattcagatttaagtcaacagtatgaaaggcctccaaatatttgtctcgtctgtcctcaccttgggagctctggcagcccccacgacggacatgaccaagagggcagaccgcggttcctacactgtgtccggactcgggcagcgcaagcaggctattttgaatgcgggtggaaacacccttgatcttgcaattgccatgcttgagacgtaagttagcatatatccaactctacagattacaagttttacaagggtcctagagagggaatgacaaccgactacacctacggtgatgggaagacctatgatgccgccaatttcggtcttttcaagcagaactggggcatgctccgtgtctgtgccactaggtatgggttggccggtcagtctgaggctgactggaataatggcgctatactgaagtatgagtttcccgttcccaaaccctgcaattaaagatcccgcctctgatgtatgtgcccagttcgaatgtctatgccgatgtcgcgtcccgctgggactgccagggatactacggcgtcgacctgtggtttgcagggcaccgcaatggtgcaagcggattgagtaatccgaatacggatgatattaacagtaattgacccgtctttactcggtatgctgtcttattctcaggttactgatgccatctcatagactataagagtgctgtctactggatccagcagcagatcgacagtaactccgtctacaagaccgatgacacgcgcttttgggttgatgtccaggctatctaaagcttgggtgtagtcggagagaagaggggggcacaaacttcgttcagtcgaatttggatgcatatggccttgattttattcagaattgtgcagagttatttagtcaccgtagcagcgttgagaactaaatcatgtcttcctcgatcgagttggacgctattgtgcaggggacatccaccacgttccgcaacacttggaagcgacaccattcaactctgtatacaaatacagcaaaaatggcttataagtttatgacagctgatactagtatacaggcatttatacagtagaataggccagtagagcatgttctagcaaggtaagtgactggagcagaatcaatatatgaagtatttttatcttgtcaatcatctgttctctacaccaaagccttattatatttcaggtctcacttgccctgaagcggctccagtagaaagagatggtactattctgtaatatagtatacggcattgacccggtgatctgacaagaacaaggctgctaaatattacaggagccgttagaaagaagccgctagaatggagtctaggagattacaaaaagtgggcagggctggctaacatgagattccagttttcctagttacgtccagcagataagaggattgatacgacaaaaatacatcttaatgcaagtggaaagcattatactcggcccattaacccacaacctcacctctttcttcaactcccgcaaccgggcacccggtacgaaccactaatcgcatcgagctatcagatataataacaagtattgacactgctcagcatacccatagtaccatagatgacatctggcgcatgcactcggcgagggcctaaaagatccccgatgaagtctcagagaccttggtcagctaagaccttacaactagccgcactagaagcggtttagggttgatgaaaccgggactgaaacggaagatgccgcaatagaccagttttcctcttggtgggcgttaagaatcctggcggggagtacttagggttctgccgtgcaactacccctatagaattctataataaagtttgggacgtatactctttgtattgatacctttttcgggcccgggtatcggaaggtcaacgtccccgggagtggcgggaaaaatagggctcatgaccaccggtcacggtctgttgcgcataaagatgagatgcgggcagacgcacagaagcgtattgcgggacgttgcttctcctaagcaggcaattttcctcaacacagtcagatgtcatcgagttgcagcaagatcgaaaataatgccttcacccgttttagcgttgacgttggccttcgttaaacacggatttccgcgtcgtatacctcaaataggcagtcttggcgccaatatctccgggtctccgaacctttagggccatttgtagctcgtctacgacattatcaaacggtctgcggagaaagtctgggggacatccactttcaggaattggagcacagctcttggcgcggcgtggtctgagaaatatctcctaggccgtgccgatctttctcccttggacctgaatgggtacatgcgctacttgcgacccgggtgtggtgctgtaatacgattgaggacaaactatgtaatatcccgtgaaatccatcctgaaaccaggacaagctaacccggaaaaaattaagttgcaaggaaagttgcttgatagaagaggcaatcctcttgcagattgtttgatccaagggggctataaagcgatagagaatcaaggtggcttttgtaagtcagaaaaccatcgccttgaccaacaacccaaagaaacaccaaataacacgatgaagtactctctgacccttcttccaactatcgcatctctcgctctggcaactccggttgccagacaatcgggctcaaatccttcagtcgacgggctaaactttgtcattgatggccagaccggctactttgccgggactaacgcgtactggctcccatttcttactgatgacgccgatgtcaaccttgccatgagccatttggcggaatcgggcctcaagctcctgcgtgtctggggttttaacgatgtgaacaccgtccctgctgatggcactgtctactttcagctccatgcggacggtgtttcaactatcaacactggagggtacggcctccagcgtctggatgctgttgttacggcggcggaaaatgaagggatcaaagtaatcatcccgttggtgaacaactggatgattacggnnnggatgatgcctacgttacggcatatggcgcaccagaaagaca

SEQ ID NO: 1000 - DNA, 3772 bp, Emericella nidulans
  unsure (1)..(3772): unsure at all n locations
tgatttttagagagcagccctaagaccagcttataaggccatagagtacctgccgtgtaggaaatacacgctttcgcgcctttgactccggagatctggtggtttcagcagcttcaccaaccgagcctgcggcctgcaacacatagacttaccttctccgcgtatttcttggaggtataatggatgtcagaggtgtactcaagaccgtgagcaacgagcgcttcatatgtcttccttgctttttcaccgtcggcttcattcaggtaaacgttcatacatctcgtcaagttcaggtcacaatcaatatcttcctcggctatcagggtcttgagagcttttatgtgcgcgatctcgaaatttgcgacctcagcaccggcatcaaggccgtgtctttcgatatgcttggggatatttccgtacaggtcaggacgcaagtggccgcctgtacctcatatcagtcttgtaacagtcaagtaactaggaacacttcaactgaccgttacggccggtagctcctgagcatatctgccttgcttccaagatggtaattgcggggcgagattggtcggcgtgagaaagctgtttatagaggtggtacgcgaggcttattccagagtatcctgcgccaatgattacgatatcgctccgctgaggcagctctggcgtagttcgcaggtcatcaagctgatggagctcagtgcgccagaaaggtgctgtgggatttgcgactggtaacgtgggcggtaatgcggtttcactctccataattgagaagtccctggtcttctagctcttctgacgctgcctggtctactctatatgtgcatttaataatgggcgctgtataactattggaaagatgattgtcagctgtgcggggaacatggagtaatcagacggagctcgctatcattagcgcctaatgtgagccacctttatttacgccctgttcaaacagctgcagctcaatattcatgttgatttatatattatccagatgaaaaccgggcaactgtggatattacataccagccattctgcagtacctactgcagcctgaaccccgccaggtcataattcctgtcgtatataatctatgcattgactatcgcctggacaaagcccgtttcatctgggcctgcgctcgaaggccatcaaatctggttatatctgaatcaagtgtgatgactttgaggattccaccttttggaatctgtacgctcaagggcagcggtagttgatatcctgacaaagtattcacatatcttgctgacgtccttcaagactatgattgcatgaagagatctctagtgagaagtgtttcttatctgtgaactgccaagtgaggcaggtaccggttgcgatagtagtggcaaccgaacgattgtgcaaagaagcagcctctagtcagtctctgcataaggaaactaatcagagctgaggacacccactgacatgagagccagtgataatttccgaaatgcaattctgtctcgcataatgacgtgcatgcgagaatagaacacaggtagtgatttatcccccttccaccgaaaggtgaagtctatttcagactttatttctccaagtatagtatcccgagtccgcatattctcattgttagagactgcgccaccttatatacgagaagggtccttgcttacgatgagagatagccagatcccagggtgatggccatgcttttatatatcctttggagtgtggttcagaaatgaatgaactaattccacggatggggaagctcccgcgcagccccactccttccggattcggattagctctcctggcacttgaagccgggtctcctccccaggctgtcgcgtcgcatacgtacactaccttattctcccacagcgtcgtccactttagccactcagagtcatgattgatcccggctaatgccaccattatagccagacagattttacttgatcatatctcttaccgacattatcgccgccatgaccgattattcgacatggaaggtcaccgacctgaaggcggagctgaagcgacgtggtatcccccagaccgggttgcgcttgaaaaaggaaataatcgaaaaattagaggcagaggatactaagggttcagcaggaggcgtacaagaggccactactgctgagccagagcgagacgggcaggaaacgtcgcaacccggcgaacccggcgaaccagaaaccccaatcgcaaccgagaaagcggacgatgatggcgcgcagacgacagacaccgcagctgctccagctgcccagtccgagccgacggtggctgaagagaagctaaacggactcataacccaaacgtctccaccgaagcctgacggttcaaccggccaaccctcacaacattcgcaggcgcaagagccgcaagcagaagcggatgaatctcagcagagcaataaagaaagtgacgcttctgccaaggaaccagaagcagagattgccacccagccggcggaggagaaggcggaggagaaggaaacgagaaccaatgtcgagacgaatcccaaaccgaagcccttagcaagccagttgagcaggctcctggcactactgatgagcagagcccaaaatcgtacaagatggcgggaaaaaaacagagcctaccgatacgcaagtcgctgctcttggagcccaaacgcctggggtcaacacgggattatcgacccccctccccgcggaggagcttattgacgacgtccgaaagaggaagcgtcgcagtcaaagtcctgctcctcatctggaagaggttgcaagaaagaaagctaaatccgcggagaaatccgcattgccgacccccgatgaatccatatccgcctcgcacgatgatatgcagcagccgcccgtccagagtccaactccggaggggaaaagccccgagacgccagccaaaaagaatacaccacaaaaacaggatgtgcgcttcaaaggcttatttaattctattggaccagaaaggacccgaccgccacagccaccggttgatacagagatggaggacgtcacagttgaacccgctctacatgctgccaccgctgcattgtatatagacggccttatgcgaccactccaacctgctgccctcaagaaccacctgctctcggttgcatctcccccaggggagtcaccaaaccccgatctgatcgtcgatttctacctggatcccattaagactcattgttttgtcacgttcgtcgatgtttcgacagcatctcgcgcacgtagctctcttcacggtacagtatggccggatgaaaagaaccgaaagagcctttttgtcgattttattcccgagcacaaagtccaggactggattcggatggaagaggatgcccgcggtcagggtggtcgccctccccgttgggaagttaaatacaagagaggtgacgaggttgaagcgatcctcgagcagattgaccctgaaaacgctggcactcatacctcccgtggctcagcaccaatcgagctttcacagcccacggaccggcgcccgaacgggccgtccgaaacgggcactggctctcttcctgcgcaaggattcgagtcactggaccaactcttcgagtcgactactacgaaacctaaactcttctaccttccggtcccgcgagccgttgcggatcggcgcctagacagattcgatgacttactgcggaaaggctcgtttccacgacgcggcggagatgaaactcgcaagtattcgttcgtggatgacgactcgtttgttgatccctatagtntagtcagta

SEQ ID NO: 1001 - DNA, 912 bp, Emericella nidulans
  unsure (1)..(912): unsure at all n locations
caacaccacggtgactgatatcgtacgcgctttagagcaggaaacagtgtcggcgcagtgcaaggagaaggccaacggtttgttacaggtcttccttcctcacatcctgcggtacttctccgatgagtacgacgaagtttgctccactgtcatcccgtgcgtgagcgatttgctttcatacctgcgaaagatggccaaatccaacccctccattgcttcccagcattcatctatactccttccgatcctcaaggcgatcatccagaaaatgcggtacgacgaaaccgcctcctggggcgacgacgacgatcaaaccgacgaggctgagttccaggagcttcgcaagcgccttggaaccctgcagcagattgtcgcggccgttgatgagaggctctacatggaagcagtctcagaagtcgtggccactacattcgagaacatgcgccaatcgggagctcagctggactggagggacttggatcttgcattgcatgagatgtacctgtttggagactctgctactaagagtggaagtctctacaacaaggggcagcctagcggcccgtctgcggagaggctggttgagatgatgctgcgcatggtcgagtcggacatccgatcctttacccatccggcaacgcaactacagtacatggaaatctgtgttcgctacagctcctttttccacacccatactcacttgatcccgggtgtcctcgagagcttccttcaacttgcccatcacccaatgaagaaggtcaaaacacgagcgtggtacttgttccagcgcctggttaaacaaatgcgagcggatattgacaacgtggcccagacagtagccaccgccttgggcgattttctggtaaaacaggacgtgttgccctnnnnnantagnnctatattcaagaagat

SEQ ID NO: 1002 - DNA, 5718 bp, Emericella nidulans
gaataaccctactaaagggatatgaacttccttgaaccgaccagcggatagatggcctaatatctctagcctagttcgcaataaggacgcccatatagccgccctcgagatgatcggaggcctcttcgagcatggtgtccaggttgatctcactgccgacctccttgcgctaccgagagaggcgcacccggtcgttactgacctgccgccgtacccctgggaccattcgaatacgtattggcaagaatcacggctgagcaaggattaccgtttccgccatcatgcccctcatgacctgttgggcctccgtctggacgggaccagcaccatcgaaccaatcttccggcatgttctgagcgtagacgagttgccatggcttcaagagcacatcattgacggctttgcgctataccctgggtcagcctttctgtgcatggctattgaggccctgaagcaggtgtcgcaggatcgtggcgggaaacggaaaatcgcgaaatacgtgttcagggatgtctccttctccaaggccctggtggtccccagctcaccagccagtattgaggtgttgataagtctgaagccgtctcggctgttaaaagggcgcatgggcgtggcatgggaagagttccgcgtcacctcggtctccgctgatggaacatggaacgagcactgtaggggatcgattcatgccgaatttcatgaagagcacgagctcgaggatcgtacaggatctgccggacggtcactggagcaaacccggctggaggagatgaggcagaggtgtcaggacatcatcaacccgcaacacctctatacccagctgcgtcagaatggaattgactacggcgatagctttgccgtcatccgcgagctccacctgggtgagcagcaggcaattggcaggctgaaagtgccagatatcgcgccactaatgccagcccagcacatgcaaccgcatgttatccatccgactgtttttgatgccttcatgcatatcgtgctacccttgtaccaccgacactgcagccaggggccagtaatgctaacatcaatcggagaggcttccatatcagcggacattctgaacaagccgggggatgagctgctggtcgcatgtcgcttagctcatgcaggcaggaggcatgggtccgttgaagtgtccatctttcaacgtgatgcacagggagatctcatccaagttggctccctctcccgagaagactttcgagcaattggcgaagatggcggcggaccagaaaatatagaatctagagagcagtcgctgattccttgttattactacctcaactggacccctgtcccatggtggccgattcggagtgtatacgagcggacgggactctgtccaaacatcaatatcttctgtctagcgagaacggcctctatacagactttgatggaaggcttgctctgtcatttgcgaaccaactgggacgcccagtgctctatcgtcccaaattgcccggaggcgacagaccctgcggccatccatatcattttaatcgacacatctgccacatcagtggcccctgagaatcttattcacatactctgccggcttaggtctgtcctattggtgacggtgtccgtagacagaatatcgggcgcccaaacgctatctcccagtggcctcgctcgagttgctgagcgagaagtgaaaggcttgctcgccatcactctcgactatcagcaaagcccatctttttctcaagacccgctgcatgagatagtggtagagattgtaggtcgatcgtttgtgggtgcaagccgagacaatgatacaattgaacgggagtatgtgtatcggcagggaacgctgctggtgccccagttggaaaagagcgcatcaaccaaccaatggcttgcagccagcataaatggcagcagtatcgaggagacctcgggcttccatacatccggtcgccctctgcaattacatttcaagacaccgggcttgcttgacagcgccgttttcgtccccgtcgacggtctcctggatacgctggagcccgatgaagtgtcagtgaaagtgtacgcccatgcggtcaacagggtagacattgcaattgcctcggatcgcgccgagcccacagaagtcatgatgggcgagttcgccggcgtggttgtcgccgcagggccctctgcgagggcgctacaggccaggagaccgggtctgtggatggggatcgcggccctatacaaacattgccagagtaaaatgccacatggtgcaccggctcgacgatgccatctccttcatcgagggtgcatctattccaatcgccttccagtctgcagcctacgcgcttactagaattacccgacttgaaagggaccagacgattcttatacatggtgcgctggagcggttggtcaggccgccatctccattgcacagcatgtcggtgcagaaatctttgccaccgtcgggtcccctgaaaagaaacagctactggcagagcaaaaggggattccgacgagcaagatcctctccagtcggacggctgccttcagagatgatatcttgaacctgactaatggaagaggcgtggatgttgtgatcaactgttcatcaggagacttaatggatgaaagcattccttgcgtagcggactttggatacttgattgatctcacaaagtccaagataccgctctctatggaccggggcctcagaaagaacgtcacctttgcgtctatcgacatgcgactgttggcaacccagcggcctagacagctcaaggagctatttgcaaaggtgatggagctataccaagagcaaagcctgacggcaattgcgcccataacgacgattccaatcacagacctcagtgccggctttaggcttgtgcagagccaacgatacgcaggaaaaattgtcctagccgctgacgagacagtcttggtgaagcagctcgcccccaagccagaacttccgcatttgactgcggacgggacatatgctgtggtaggaggtagtgcggccctaaaccgcatgctttgcagctttttggaggcgagaggagcagaacatgtcctcagtgtgcagtcacctaacccagcagcgaaaccagatgctcaagtctcttctcgtttccaggtggtgaatgtagacgtcgcaaatgcggatgcattcctgtccgctctagccctcaactgtcggccggctctgagaggaattatctacgttgaatggagtcccggggcaagcactctggtccagataacgggcgaagatatccactgcagcctcaatcggatgcacagcagcagattgtcgatctcaaaggcagcatgtaatgagtcagtggagttctgtatcactgttgcgtcgcccgcgggcctgttaggtcttgaaggacaaggactatacgccatggggagccctctgggcgtcccatccatgcccaagtccattacattacgcctcgacgctttgggggaggatgaaagcaaactctctgtcgaggctgcagacttagatagtatcctcaattatgctatcagcagcattgcacgtcaagatcgcgaggcggagttgtttggcggtcttgacagggataattgtcgacgagaggatccaattttcagtactgtattcagcactactgacgagatgggcgagaccgaaaaggaaatatcgtcaaacaggatcgatcagcagattacatctgcgggcagcatagagaaagtccacagaattgtgatggaagccgcagtgcagcagctaacctcgttcctcgctatggaccctgatgatatccaggagcagatggccgtcacagatctgggactggattccctcctagctatcgaattcaagaactgggtagtgaggaccatgcaggctcctatgcagacgtctgaggttctggacgcgccgagtctttctcacctggtgaaattgattgtacagaggtccaggcttgtgcaaaaggaatcatcatcagcgccaaatgaaatttcttctgctagagatcagacagacactgtggagaaaaaaagggctactactaccagcccactccctccccttcctatcccagaactcagagccatcattaatagacatctctcctatctgcgagcctttgcaacggaccaagagttccaggaaacagttcgattcgcgtcagacttccagacgccaggtagtattggaagacgtctatacgaccgcttgcaagttatgaaggcagccaatccagatacatggtatcacgatttatacctccaaaaccaatacctcgttcgcaatggtcccctcgccccctatatgaccttcttcttcacgcacccggttaatatcggaagacactcgcaagcggaacgggcagccctcattgcgtcaacggttatccggtataagttttgcctggaaaacggccagatccaaccccgacttgtcaacgagcagccgcagtgcatggacctatacaagtatatgtttaatacggtccgtgagcccacgctgggtgtagatcttatgagtcggtatcccggaaacgattactttgtggtcttgcggcgtgggcatgtctacaaggtcgagtttgattcgtcagcacaacatgcccaatatgagaggctggagagaatcttccagaccatcctcgacacgcggatagacgaggtcgactggcttggagtcctaactacagcggatcgtatttcatgggcaaaggtatactttcttctcgcaccgattatttgtaaatgcaagacagctgataacgaaggcagactcggcatgaatttatgcaccttagtgaggagaacgcatcgtatattcgaaccatcgagcaatccgcgtttgttgtctgtttggacgatggctctcccgagacaccagaagagcgaggtcgccatttccatttcttagacggctccaatcgctggcatgacaaaccgattgagttcatcatcgcggccaacggggcctctggtgttctaggcgaccatactgggcttgatgcaggcactgtccatgagctgaacaccgagattgcggaggcaatccgtcgccaccaggacagacgaacgctgtctaacggaacttcttgcgaagttacggtacacccggttcgatattcagcaatctctcccggaatcgaggctcgtatacacgagacgcgctctatatatacggccgccatctccagccgagagcatcgatacacgacgtggaccgggtacggctcgtcgctgatgaaggcatataagatcccagccaacagtgcattccagcttgtggtccaactggcagggcgatactacttcggacagacctctccgtgctgggagacagtgctccagtccaacttccacacgggccgggtagaaattaaccaagtagtcacggcgcaggttgcggcgttcgtggacgccgctgcagaggccgttccactgtcggattgcagacagctactccttgaggcggctcgagcccattcgagcgctgtgctggcttgcacgcgagcgggcggatcggatcgatttctctccatgatgcgagaaattgttgaggccgacgagcaggagccggagccgtatcatgacccagtctataagagggcacggccgcggaagttcatcagcaattgctttacgacgggtatggctgaaaatggatgctgcttgcgagaagacgatgggatctggttgcattttgaggttgagcctgaaaggtgagtagag

SEQ ID NO: 1003 - DNA, 4805 bp, Emericella nidulans
caattcgtcggcggcacaacctgtaatcccgaaggaatcacagacccttacctccccgacggttcctttgactacgacaaagcccacggccacacctgccttggacaaaagtctatagcctggcggttccctctagcgttgcagattctcttcgcgtggatcctcttcttcggcatgttcctatttcccttctctccacgctggcttatgtccaagcaccgcgaggaagaggctgttgttgcgctatcgaaactacgaagacttgaccccaatgatcccctcatcaaagcagaggtgctggaaattaaagccgctgtcatgttcgatgaagagagtgatcgtgaagctgttcagaggggtggtaaactggcgccatggaaggcgctttttgcgccgaatatgttcaagaggctggtgttgggctgcggtatgtcctctgccttctctttatttctgacggacgctgacgctggccgtgaagggatgatgatctgccagcaattcaccggtatcaacgccgttctgtactacgcccctcagatattcgcctcctttggcttttcctcgtcgaagcagacccttctcgctactggagttaccggtatcctacaaatcgtcttcaccatgccggccgttctcttccttgacaagttcggccggaagaccttcctgatcgtcggtgctgctgggatgttctgctgccacatcgtggtcgctaccgtcgagggcctgtatgaggatgactgggctctgaatgagggtctatacaaggcgcagggatgggtggccattgcgttcatctggctgtttgctgtcaactttgcgtactcttggggtatgcatcctctcacctcactccttcctcccttcattatgcattagtgctaacgttgccgtaacgcccgtcgcttgggttctcgcgcaagagatcttccccaacagcgctcgttcccgaggtgtctcgatcgtcgcatccaccaactggatgttcaactttgtgattggcctgacaacgaaggacatgctaaacagcatgaagtatggcacgtacattttcttcgcgatcttcagtgctcttggcggcgcgtttatttggtggtttgcgccggagacgaaggacaagacgctcgaggagctggatatttattttggtggtacccaggaaagtattacggaagcagaccgcgcccgcatggcgaggatcaatgagcagctgggtctcagcggggtggagaaggtggaggatctgattgacgagaagggaggcgcgcatgatgagttgagggagatgtagctgcccagggttagctgtctagggagccagccttccagataaatcctagggtcgagtctccgcgcctggagtgggcaaggagttttgggaggttggtaaaacattctgctacgcggctactaagataggtgcttaaggaatcatagtggagtaaatgatcaataatctggcgcttgaaatcgcgattgatgaagccaatcaccgtctgtagcaccttcttcagccaacaccgtcagtgtcaaagcaacagtccaatagttctgagttccaacctatatttcttcgttgatctcccagctatttcttgacaggccgagataatattcgcaatatctcttggtttcggcatcgacaattacctcgaggtgaaagagggatcgtggaattttcatcactgaaaaaaatacataaatcgaaccggctgagctccaatcacgatcacaactgggaaaatgcaagatcttcctgaaacaggacttcactcgccattgggacacgagtgtcaatgtcacatcttccctgttaaggtagatccttaacaaactatttcgttatctacaggagagtcatattgtacacacatctcggtgcaatggaggtatccggtgaattgaaatgctggaaatgctggaaatgctgcaagtttgggatccacagaccagaaactctccatggtgctagaaacacctgaaatataatatgaatgtggcccaacaacagcaacagggtcatgacaaggtctgtccaaaagcggcgactgaacccggtggttccgctgatatatctcccggagaagggttcttacatcgactgctcatctggcgttccattaaccgtttgccaaaggctcccaattgcattatcagggcctagctggacccctaacaagataaacgaagtccctcgggtcacgtgggcctgaaacgagtctctgctccaagtataagtagtaatacctcactcaaatttagcctgaacccgttacttgtgccatcgtccgcccacccacgtcgccgtatgctgagcggtgtgcctactatggatcatttatgcggtgagtcactatagatccgcagataaagctgctgcctggagctccagtcggagcgatcggatcgaattattctcaatgggcatgggagaacggggcgatcaacaaagctaagccctctgagggaattcttagcctttcttggcccttccattggccaatcacagccggtttgtggctgggtccagcaaagcttagggacaatagtgtttcgggctattattatcgcaattctccgtgtacctcagccagtcccacgatgctgctgtggctgggcacctgctcagctcgtatagaatacttgtaaggcgtaggggaagacattctaccccgcttctgaggggtataaagagacctacccctgaccccttctttctttgctcaatcctccaagaatattcatattactctaccgcactcgttctcttccttattatatcacatcaagcattatgggttggttcggtaagttatctgtcccgcgcaggaatatatttctctgctttatctctaacagtgtctctcctttttcctgcagacgacgactctcaccaggctcgctgctacggcgagttccaggacctcgaccacaccaatccagagcaccgcgccaagttctcccatgagctcatcgctggtgccgcctcgttcgaagctatgaaggcttacgagaaccactgcgagcgtgaaggtgcgcttactccacgactgcatcccacgtccaaacgagcacaatggaagtaaatactgattttgggtctttgtaatccaggcaagccccagagtcatgagactgccaaggagctgctcgcaggttttgccggcgcgttcattgaccgcgaaatcgagaccaagggtttagacttcgttgaccgtgaggaggcgaagagacacgctcgtcgccaggttgaggaggcttcccgccaggattactactagatgtagtgcacatgctttgacgatgagcatgcttgtgcggcactgtacataatttcggcctgatccaaattccggtcgcgattcgtgaatacattatatcctgatatcagttccattctaaaagactgcttaaacctttgaactggatgactgcgtaaattcagaagattcatgaggcgtatccgtagtgctaggacgcactctcctcctaggcggaaagataacacagagcgagatggctggcgatcagcagacagacactaaacacaaaacatcaacagcccacttcacgtccagtggcggcccatgtcatcaatggacaaggatacttacagtctgaacaagagaaaacaccactgctctggaagaatgacaaaatggcgttcttggatcagatccgcctggcagaagggcgtactgagactggtgaacaatctaaaactgccactgcgaaggcacaatcctgtccatccttggctcggtcataaaggaggcaaaggcaaaaaagaaaaggcaatgcatcatccgtgaatcgaacacgggcctcatcgatggcaacgatgaattctaccactagaccaatgatgctacttcatgaatgacccacttgatctttatcttgagaacaaatgagctgataagtgcgcaactgcttttcgtatgctataacagctatgttcactgagctatgtcatgatattgtgagagagttattatctgcagggttctacatgatgtagcaataatactttgtcttttcttgtgtaaggtatcttgtggattcatcattaacactgggaaagttctaaagccactgagccggtaagacgagcactaaggaaatttgaatcatgtggagaggaacgttccctcgatgcagattctccagcttcattacaacggggtggaatgggcccgtgcgccatgaatcgcactgaacgccaggggcatattctctggtcaaaccactacttcttgtggttttcgtcttcgaacgccacaccgcctgaccagagccacacggcgcaacaatttagtcgtaaatttagtatgcatgtatatcactcgaaagctaactccaagcaaccgagaagaggtgtaatttcaatggaatgcatatacgcaggttcgtcactgttctctagctgcaagccatggttggcgcatagggctgtgaatgtacttggtgacagggttctagacatatgttatacaccaaccaaacgtccttcgacacaaacctcgttccgacacccatcgcagtcgactactaaacgcagtgactcatttcagactcaacagtgatactcacctttcccactacatgagaaggtagcatccagtggctacagttgtcaatcgtggtagcaaggcagagtctgtactgcgactcaaggcggctgacgtcatcctagcgccgaacagttactaggattgcaatgtcgcccaggagcttcaactgagtaaaaggtcggtaaccaagaagtttcaacgatcaatgcccgtgccacgctggtagtc

SEQ ID NO: 1004 - DNA, 1301 bp, Emericella nidulans
  unsure (1)..(1301): unsure at all n locations
gactattgcttttcgtttttaaaccacataatcatcctgcagctccaaattttgctccggcatcccctatcttcagagctcaaccgttcagccggcaaatcgagcttctgataggcaacgagccgcgcagcctagcacttagctgctttaaagagtaactctactaattagtagttgcgagattactatactcatcttgccatatggcgggagaaggagccctgaagcgggcagcctcaagatcgatctctcctccgcctctcagaagaaaggctgagacactgaagagtaagtgaagcatatcgcgcattctcacttcactgacatgcctatcaatttcatgtagagtccgtggcgacctcattcttcacacctgtatcacaacgcaaaactgagccaacaagtatctcgtggaggatcgtcaaccacacattgattgtgggaaagttttcgttgggaccaggcgaaccccccccaaaaagctctggcaagcccaagatagctgcttttgacttcgtaagttatcatgccgacgctcatgtgagagtatcagtattgattatcattcacaggactctactttagttgcgacagcctctgggaatacgtttcctagagattctgctgactggaagtggtggaggcaaaatgttccctcaaggcttcagaaactcaacgcagacgggtgagtgaaagtctagcctatcttcgccggataaactgacggttttagctaaaacgttgtcatcttcacaaaccagggtaaaatcagtctcaaaaaggacaaaaaaggaaatgtctccagttacttcaacaagttcaaggagagagtttcggccgtgatgaaacagctaaatatcccgttgagtgtatatgctgcaactgagcatgatgagtacaggaagcccagggcggggatgtggaaagaatttctcgatgactacgatttcgacgtaactggcattgattcctctcagtcgatattcgtcggggatgctgtcggacgcccaggagaccactccgcagccgatcggtaagtcagagtcattttggaggtcgttgaatgatcgtagctgacagcatcgagggggttcgccgccaacgctaacatggttttaaaaacccggaagagtttttcccgggagctttaccggagccagtaatggcattcgattccagcttgaatacctacaagaattacttttgttgacgatggtgagggtaccaaatgcactaacgccgggaataatgtaaaactgatcctatgaacctgatcacaaaattttcngaagatcttaaaa

SEQ ID NO: 1005 - DNA, 4304 bp, Emericella nidulans
gcttgcgttgttatggccgtcgagacaaagaggcgctacatgagctctgtacgaatcattcctcgacgagtcaaaggggactgcttgccatgatttgaacaagtatcatggctaaaacccgttctagtgcatacaatatatttgtctgtccaggtctatatacatagtacatgaacagtcgccatgagccctttgaatagtttcgccaatctattgcttcacctcgcaagctcggcctcgacctgtccgaaatgtccacaagctttgggaaccgtacgccacatgaacccatcatatcatcaatcacaccagtatgaaagttatatatgtatcttcggggcgtaagatatgacagctccgaagaagctcagaaattcactggcatccagccagcgttgacagctctatctgcagcccgacaggacgtgctagctagcttgttggaatatatgtcctcgacttctgaaaggcgcgaattcgttcggacgtgtcacatatggggaattgaagggtttcgtccacccgttatttgtgtagttttgatgcgcgatatgtttcaaggccagtgaaagatgtagaggctgagagtctctaggtaattacttagcatcagcatccgtcaatagaagtgcgcttcgagctaagtgaagagactgggttaggtcattcaactgtaattgccggacaacatatcaggagttccatcaatacattatatccatttatcttgtcgcggaatatgtactttgtaggaatatctgcacggccaccatacttgtatatttatccgtcttcccagtgctgtcgctaacagcaaagtcggatctgacgctgagcggagggtgcgttcatttctcagatgggcaaaaaatgtagaccatactccactactttgcatactcactatctcaacgtcttttaggactcgtcgatttagcaatggtatcagtgttagctgccctgatcgactcttggtcggagagatatccctttgattcatccaggtccgccaagagacaaagacctgatggattcgtacaagggcaaatggcgactttcctgcaggttatgaatggatatgggcggatgcgtagaagcttttggtgtgcgaagagtatggtgagcggcactggcgctggattctgggctgaggcaggcagatgacccccgggctctgacagactgcaatgaccgtacggtttgacttactctaggtactgagatagataccacctgctgctaatcgactaattgatagagggtacgatggtttgatgggcggagcaggcagcagagattaccgtaacagaaaattgggcatgagaaagtgagtgaatgatatatgcaattgtacgcatatccagaactgggagtatatcagtctatatctagttttagctgtccctaccagctgatcaaccctctttcccgatcaaaacctccccggagctgcgtccccggtttaacgaccttgccttgcaagaccgtataccggacgatattctcgcagtcttccggccgcacccgcgccagccagatacactgcgacgcaccctcatccggcgcgtttgctgtcacgggctcagcctcagccacttgagtcttggtggttttgtaccagtcaaagtcccgccttcggtacactatcacgttagcagcatacttgtggcctccaacgtgactaatgaagtagatgcccacgccgccagggcgctcgtcatccagatctctatgcagacctagcggacgtaaatgacgctcaaattcaccggcagaagcggcgccgactggccacaccttgcatctcgggtcttctgcgagcagagtaagatcaccgctgcatgcgggcatgagcgtgaccggagagatgtcataacctgtcctccgtcgctggttcagtctctttattctccgtgctggctccgacgcgttcaacggcgtcgtagttgtcactgcacggtcgacgaaattccggatcagatccggcgcaagcttcggtgtgacatggtcgatgatcgtgaagctcggcaaaagaagcactgtagtcggttgctcgcccttttcatggtgatggtattcatccggaacaggcatattactcgcagataatttcagtttctgcgcagccaaacatcattattagcctcaattccaacacagacaacgtcccacataacgcatatttttgcgtgcagatagaagggaaaacacaccccgttcccaggcagaaccccgccccgttcaatagcctccatcacgctgccctcttcatccgcaacatccctcacccagtctgtctttcctgtcgcaacaagcaaatgcgttgaccacccattcacatgcccatacagctcatcttcctggtccacgtcaaacttcgccgggtaccggattgtacaagtcgcgcagtcgtgctcgcattcctccccatctgtcaccgggtttgtcttgctgaacagtgcctcggggagcgacgctttgacgaaatcctctgagctgcggatctcacggggcgcggggttcggtgtggaggggctcgactgcgctggtgagggggagggagagggcgtgaggagggaagcgccacgacggaggagagactgcatattttttaggtgatcttcgttactccggctgtctatctcgttgcttgtgctcgaattgactgggattggcggagtataagtagaatattatattagtattcggatttaccgaggggtcggaaagaatagatttggaaaatgtagtagctgactttcggaattgtggaggacgatgatgtgagaatgatcagatcggatcttatcaatcgctgaaccgaactgaaggcgattattggataccgcttggttgagattgaaggtcgtaccgaaatatccgacgatgtactgtatgtagagcagtaactccgagctgctctcggagaagtctgctgtttagatattcatacaattttatgtgagcctatcaccgagattggtggtgaaagggcgcttacaaagattctctaattgcgcacagctcggcgaggccaaagcttttatatatatttctgcagcttcacaacaacagcacaataacaacgctatcagctggacccaacactacatttacatggatgattcaacaaaagaaagcaccaggttgcactgggttgattccacgtaatctacagaaaactcgagtatgacaaagaaaaagggactaagacatctttatactgtcacaccttgccactggtatagccagccgcaatccccgtatatccagaaaccccttcatagaagggtacgcacctatacgacaatgcatttactcggactcttcctcctgcgcagccttggcggcagcagcagcctcctccttctccttcttctggaggtagaggagcgcattgaccttgtcggtgatgttgtgctccttggtgacgatgccggagatctgctcgcggcccacgagagtggcgacaatgctggcaccgacgatgaaggtcaggacgaaacggtacatgctgtaccacttgggggcaaggcccttgatggaagcacgagcgtcgttgtagtagaggaaggtgaaggcaaggaactgggtgataagggcgtgctcaacggggagcagcagagtaggccaggccacggcgggggcaatgacaccggcagcgtagcgcctgtagccagtgcgaccgccgtatccagcccactcgagaccccagtggacagctccgaggaaggagaggatctgtgccacaattgattaatcctctgtttaatctcatataaaaccactgcagagcttaagtgaactcaccacagcaccgtatccgacctggacgtgctcaagcatgtgcagcatcatctcggcgctctggccggagaagatcagaccatcaccggtagcgttagcacggctaatctcgtaggagaggtacacagtctccaaggaagtagcgaggtatggaaccacaccagcaataccgaggtaaagagcgtccttgggaacgccctcaaggctgaaagtctccttgatgattttctacggaacggcacaaatcttcattagctaggctgagcgttgagcaaatgagtgttatacgcttcgaactgccgggaacgaagcatatggaggtgatacgtacagcatcacccttgataccagccatgacatcaatatcctcatcgctctgcagcacaacacagattagcaattgaccgcgggccctgacccaagagcaatagctccctcaccttctgaggaacggtcttcgttcccgtagaggcgtatcggacgagggcggtggtgac

SEQ ID NO: 1006 - DNA, 4426 bp, Emericella nidulans
ttttccttttgaattcaaacgggatggacatcaagattgacaaaaactctgataatatccagttcctggaatataatatcctggggggcgttctagacttttatttctttgctgggccaagtccgaaagacgtgagcgtgcagtatgcggaggttgcaggcttaccagccatggttccatactggggtcttggagtatgtctaccggccaggaaactatacatggtgtcaatcactgacttttcagtttcatcaatgccgttacggttacagagatatcttcgaagtcgctgcggtagtacataactatagcgacgttgaattcccctcgaaacaatgtggaccgatatcgactacatggatcaccgcaaagtttttacactcgatcgagagcgattcccattggatactgtccgagctttggtgcaatatcttcaccagcgagaccaacattatattgttatggttgatcccgcggtagctcactctgagaacggcgctttcacacgagggctagagaaggatgtgttcatgcggaagcaagatggaacgctatatcaaggtactttctcagcctaggcttaacaattagctacgtatctaaacctaatggtataaaggcgctgtctggcccggtgcgacagtttttcccgactggttccatccaaacacttcagactattggatcaacgaattcgcgttgttcttcaatgcagaatcaggagttgacatcgatgccctgtggatcgacatgaacgaggccgctaacttttgtgactggccctgtacagaccctgtcgcctatgcggaggagaataacctccctccggagccgccagctgtcaggccaaatccgagcagccttccagggtttccggctgagtttcagcctgtaaacagcaataacaataacagtagcagaaaacgcgagacgcaagttgttattgcagccaggcaaggatttgtcaaagtcggaaacgacaatggcaatggcaggaggctgggtctgcagggccgcgaactgatcgatccgccctacaagatcgccaacgcagctgggtcgctgagcaataagactatgaatacagacattttccatgccaatgggcttgctgagtatgatactcacaatctatacgggacaagtatgcctttttgtcctctcatttccggagtatatgttaatcaggcacagtgatgagttcgctttcacgagacgccatgctctacagacgcccagagaaacggcccctagtgataacgcgcagcacctttgccggtgcaggctcctacgtcggtcactggtaggaggcattccaatccaactgtcctgaaccagactattgactgcgcgcaggctcggcgacaacgctagcacctggaccaaataccgcatctccatcgcccaaatgctcgccttcgcatccatattccagatccccatggtcggttctgacgcatgtggttttacaggcaatacgactgaggagctgtgctcgcgctgggcaaccctggccgcttttaaccccttctttcgcaatcacaatgagtacgggatggtctcacaagagttttacaggtggaactctgttgccgaggcagcaaggaaggcaataagcatccgatacagtttgcttgactatctttacacggagttccatgaacagacggtcacgggcgagccgtttttgctcccacttttctttgtctatccaaatgaccccaatgtggtgggtattgactcacagttcttctatggggatgcgattcttgtcagtcctgttattgaagaaggtaagacggaggttcatgcttatttcccgggtgatttgttctatgattggtacacaggtcttcctcttcgtggaaatggtgaggtgataacattgacggacattgggtacactgacatcccgttacatgtacgtggtgggaaaattgtgcctgtacggaccgggtctgcggggatgaatacgacgactgaggtgaggaagagcgggtttcggttggtcattgccccaggactcgatggtagggctgcaggccgcctgtacattgatgatggggaatcgttggagcagactgccatggtggatgtggtctttacctatgaggacggtagggtgagcgttgatggcgtgtttacgctacagactgatctacgtgttgaggctgtgactgtgttcggggacaatgtggtcgaaaggactatcgacctgcctctttccggaccgggaggtgttgagctgtagctcccgcttgacctggcataacacttcattccctatcgatgtcatgcacctagttatttgtatggaaacaaaccttctcctttctgaaccgtctcgcattcactctcctttcgaacagaatatccatctccgcaaacgtccttcccttactctcaggcagtctgaaataagaccaacaaagcaataccagtgtaatcccaccccagaagaacccggcgagtcctctccagtcccaggccgtagggttcaacatcctcgggacaataatcccattcacgatcatgaacatgttatatacatttcttgccagtacgattgtctttcctcggagctgcgtcgaagggatctcggagacaatactataacataccgggcccgatagtgcaatcgtacgtaaatgtaaacagtagtaataaagagccaatagcccagctcgctgtcttcgtatcagacaaagaggtaaaacccacagagaaaagtatgatgaccagaaggagaagaccgacgacgtagagggtgcgccgtccaaaccgagtcattaacaaccacgagacgagtgttccgacgatcccaaacgcgtactggcctagcgacatattgaaggactgcgatacggatagacctgcctgctggtagaagtaagtcgaatagcccatgaacgaggagccacagagggcctggattgcccaggtcagacaggtgatttccgtgcggcggcggttcgtagagtggaagcaggaaaggtaggactcatgagattgagaaacatattcgttttccatctggatggtgtatagcatcagggcaagggtggtttctgtttggcctcgttccaaagcctgccgggtgtgcaggatgaagaaagggtggaggcagaaagcctttcgagaacgcttttagcctcactcaactttcccttcctcactagccaccacggactctccggcccaacccacacaatgaccaaaataaacggcagccatacccattgtatcatgaacgggatgcgataactccattcgtcaccttgtcccgcatcctggactggacctatatgcaggcaagcccgcaacacccccgtcgccacaaactgcccaagcacccaacacagattgacgtacgttgtcaggtaccccctcaaaagtacgggacatacatctgccgcatacgctgttgtcacagtttgaaatacaccccagggaatgccgcaaagaatttcaccgaccagcaatgttgggagatcgggtgcgaagaccaggatgaaaataaaccctccaagggagagggccgatgcgaacatgagccgtctataccccgtcttttcgataacaaggcccgtgatgaacagaccgagtatttcaccaatatacgcaccgtttgtgagggcactttgccaggcggcggagagttcgtgggtttccacctcttctcccggccctggacttgaggatgcgttggaggtggaggtatagatgggggacccgtacttgcgcacgaactcgggaaacgcaaaaaaggactgtagaagggtcgtgtcatacccttccattattattgctaatgagaagagcatcgaccacatcacggcctttcggtacgtgcgcaggccctctgtgaagctcaggctgtgttcttgggccgttgcgatgcgggcttgctcgaggtcgatagcaattgccctcgatgatccggaccctgattctgcactgctggcccgctctgggtctcgattctgattccagtctgtatccatgtctacgcccatatcgctgtcagttcgctacagctgttaccccgggagcgcttgcagaagcttcgtagcggcactgatggagatggtctagtctggtactgtctgtgtggctcttccgttgcattcgatgccggcattcgagctggtccgtctgctgtgtcgctataatacagccacagttttaaggaagccggcccttgataaggagacggacacatgacggagctaatgggccaagagaaaacatgaagagatgtggtatggcatgagcatttctttttctttttctttccatttcgctggaattctcgctgatcgttcttctactctctgtggaataggcatccaggactgcggggtatgtgattagtgcttacattgagttacgctttcaactctaccaccgtttgtggatctgtttt

SEQ ID NO: 1007 - DNA, 5536 bp, Emericella nidulans
cctgtttgctcattatacgaataactccgtcttgggaggcgactctggctctgagactagactagacagctgagcgtaagaatagtaggtgaatgtttttgcctggcggcgttctcagtggtacacaatggtcttggtacgtacgattatggtagattgctgattaatttgcgaggattgagtagatcgctatatgcgtagagtgctgtgagcgtaaattgttatgatcaagagtagattgtatacttcaagatttttattcttttattctttttattctatttgcttattgtatttatttatctatttattccatgcattgattttttacattataaactttttgcagtctcgtatactcagagtacttcacgtactctgcgtaccctgcgtactccgtccgtccccgctgcggcgtcatccagttctaaattgggaaaccctcgaagcgcccaaccgctcgtctctggcttttttctgcttttttcttctcctctcgttcctttttcgcatcttttttcgcttgcttttcttccttgaaattttccgccactgcgtgactcgacgatctcgtgtccctgtacatcgcgtatatatacacgactctcccgtctagtgttcccaggcctgccgcctccccagccaccaagggctcctctaaggctctctaaggctctctaagcgctcacatgcggggcgcactgccatcgccgactcgagtcctattactgctgcgccagatcctacgaatccttactctcgctgatcgctgaatcactagtcgctcctcgctctagcgagtcgtgctcgtctttgcggtcgccgctggatcatgatataatcgtccgcgaccacctataactggcactatcaccggtcctatcaccgacaccatccctgctcgctgcggcctctcaccgtttgtttgctctctgcgccgcctccgccatgctcgcaacccaaatgccccctccggcttcacatcttcgcactgcctcgtcttcgtcgggcgctgaagcagcagcttcgctcccggtcatgtctccagcactcccttcacagcatcaacactcgaccgcgcctgcgtcgcatccgcactccagcatgtcctgcggcctcacctcgaaggcgcctaaccggcctgcgctctcgcggccgaaactcacgctccagacctcgtcgctccccatgtccttcagcacctcgtctacgggcctctcgctctcgctggctacagggccgacggcgtctcctaccgttcgtaacacctttaagaacgcctacgacgtgacctacccgtcctcgcgaccatctcgccgtctcgatcgacccggcaaccgcttttccaagccgtcgtcgccgtataccccaagcaacccgtaccagctcgtatcggcgtcaagagcatcctccgcaactcgtacctggaatcgtccaaacgacgggccaactctgtcggcccgtccaacgggtcatcgggacgccgggtattcttcccaaccaaaaagcaggtcagctaccggtacccgctcgaagaagagatcaagaccatcaagtatacagccgcacactcggatctggtctctgactcggagtctgggtcctgtgaaacaagctctgacgacgactcggattactccacttcgagtctcgtctcgtccgatactacgccctcagatgaagagacgaatacgttggagaagaagaaaaagaagcgaaaataccgcagcaacgaacgccaagtccgcgccgtcgctctcatggaaggactgaaagacccgtactcctcgcagagccaaacaccacagacgccccggcaaggccgtctcaagcgccgtcgcgaatggaggtggacacttgggccgcttgaagaagctggaaccgcgacagattcatcacaacctggttcaggctccccggcacccgctccctcaggatcagaaccgcatcgggatccaggagaacccagcacgccggcccccaacgcgacctcgacggccccatctcagccaccgccgcaaccgcttccagtctcgctgccggcgcaccatgacacatccgacgcaaacaccgcttcctcgcgaggaacagaagaatcagaccctaaaccgccccaataaccagcggtggggcactttgcactcatctacacctgcattgcatataatgcgcaacgctcgcattcagcttacgatttatgcatcatcatagaacatttctgcgttcattctcacactggactcggcattgccattttcacaccgtatctatattggtatcagactgccgctttttctttcctatttatagactttactttattcatggatacccgcctacgctatgttacggagtgggaccagcactcagcatcccctcgtatccatttcttctatttttcccttttttttttattcttttcttctactttctctcttatatataccttctacatacctaattattcattcgttcacgttgcaagtaccatattcataccatcactcgagacccacttgatcaaaacatcaactgctgcgccgcaagccgcgttgtctggtacagcgtgcaagccggctctatacaatatctatgtgacatctacatcaactgacgagtcactagccgagacattggaaatgaatacaaccttacaactccattgggaatatcattcaagccaaattttatctgagttgcctatgcagtggggcccatactaatacagtattccttccatagaaacttcaactcatgtagtagtcgtagccatggccacggtcgccagccgaaccaatcttcgttcaattgcggccgtggatacgaacccctcgatacctaactttaggtaaggactcgaactcaacttaattcaaacacgaatacgacaatacgaggccatgatgatgtgatgtcgatccgaatcgggtccggctgcatgagctggtttcgtcgacgccgacactggaaaagagcagtccaggtactcatgatatggctcatcccaatatctcaatcatcatgatcagtaaggcctgtgcgagaggtgatttagggctttgcgagcattggcaggctctggtggtgtatcgatctggcatttatcacttccaagtcacatgcctaacgatgcagatggcgagcatatacgaagattaatgctcgcagagccccaagtcccatatcaagcgccgcaatatcctctttagccctcacactctcatcagttccagccgataagcgtacggctcgtcaggtaacatgtccaacatccacaagctgcattaccatatcctgcagcttttgtgggaagacgtgcaaaacaccctcactgagaatagccttctgtttttttatgccaccaattttttgttgcagcggggtatgcgccgagacatggttttgggggtgtttacaagaaatagagcaaagatcttgcggtagctggtttcgatttaccgccagctgagagggtgagacgcggtgctgcatggtattggggaaggtgatagttggccctgtttgtgtgtatactggctatctcttgcgtactgtgtcaggctgtcatctttacgtgctcaaggagcctgatatttcccggagaaagcggtggtccttttgttgcagcatataacgtttactgtacgtggcgaggcgtgctggcggaatgcgagtctgttattttcttgatgttggcatgacgtaggaatacaaagctgttgcgcagatgtgttcgttcgggttcgttcagagcgctttccagaagccgccgtcacaggtgaggttccccggagtcagttcgagattggttattgaaaaatgacttaaggtccattggaaacggtttctccagcctaatggaatctttggtgtgacagctcagagtcgacctggcttgcctcgaagctgattaacttgaaaatatgcaaaagccagtcccaaccacctgaggaaatagctatgacttggcgtgtaggcacgatagtgcttcgaacaaacgcattctcgagatgagggtggagggaatacgcaagcaataacctttgctgggtaagctgattgccgcgagctgtgctggccagtcatgcgtgcggctcatgcagtgcgaacatatctggatgctccctatttatagcaaaggccgtgtgattgattccacttcagggtttcttcaatagcctgctaatatttgtaccgtctagttatgcagcgagtgccacgttaggacggaaagccagcgattgataacagctaagcgtttcggggggagctcgaagatgtcgattatcccgttgagaagtatggggcaatgcagtaaatccgctctattgctctaccattgcaagcccaagcatcgggcttgccctatccaggttggagtagctaactgaggaggcccggctagagtagtgacagggagattgatcagtactggtttgacatattcgacagaattaagaccctctcagcttctggcggcaacggaaagttgtcgatggcagcctattgaacggatgagaatagcctacatggatgcttgggcgtctgatacttataacgtcagcataggcacgattataggggtaacagggaactgcggttgagacttcaacagatatatttgtctccctccaccgtgtgacatggacaattcatggtaatatgactcggtaagcgtcttgtattcagcagtccaacattgcaagccctattgatttcaagagtgagagctggctgccactggcttggtaccgcccttccagtcccgacatgagcccatccttccaggccttcgcagtttcttgcattattgcagcgaatgttcagataattagtgatggccatatctgatcttagagacgcaggttataaaggcgcatataaggtccgactgtggcctgtgggtatgaaacgaagagcaataagtcgcgttgtcggacgtgagcaatcacgtgactacatacgccttcgctgactctctgggatcatttctaagataaatcatcgaggcgcttaagtacgacatgagtaaatggcagccgttccgctgagaaatgatgaacgcattatacttcactttgtaaggtctttcccgccttcgaatcgggggtactgattcctccaggactacgactgtttctacgcctccgtctttgaggccgagcaaccaatactgaaaacgctccctctagccgtccagcaaaagcagatcgtagtcacatgtaactatgaagctcgaagacgaggactgcgcaagcttcagttgatcaaagaagcaaaacagatctgtccagacgtcgtcatcatccttggggaagatcttaccaaatttcgagatgcatctaaagacctctacctcttctttcggaggtctatctggggtgagagagttgaaagactggggtttgatgagatattcatggatgttaccgacatgattacctataatgcaggtttattgaacccgaatgaccagacgcactcatttttccatctggactcgcgagatcctacggttggcttcgcctttatgcca

SEQ ID NO: 1008 - DNA, 5114 bp, Emericella nidulans
aggcgatggcttcctctttgttcagattcggcttccacgtcgactcgaagacagacattgcggctagcgatcctgatcccattgtcacgtaggggagcttgtctgtcgatccgtgcgcgtgaacagtgtagaggccgatacccggttgggtcgacaccagcaacgaccaagtaggcaccaatgtacccctggtagcggaaaaggtgttgctttagcatggtcatgcaagtgatcactcgtgggggccggccggtcgacagagagtgtagttcgatgttggagctgatcagggcggtggtgaactcggtatcagcagctgtaccagcaccagcgcaccagatcttgggtgcgatgtagtgtaacttctcgcaattctgtagaaaggaaaatattgaattaatcccttctatactaaaatatgagcccgctagcttaccttgtctgctactatggggccagaggtcgctctggtatctgcggcgatctgtgctgatggtcaaccccatcaactatgatgccaccattacccaaacaaactcaccacaacaccattgtcgaatatacagccaacaattgttgtacctgtgctcgtagcttttggaagcggtgctcccttggcgtgaagagccgcgttgcggttgtagttggagaagtcgaagccggccatggcagcggctggggatcacagttggacttgggtaacggcggatagtagtactgttaatggggcgagcctgaagaacaaagtattcgaaaagagtaaaggtaccagattgagttgcagatggagagctggagaaaggacggcgatgaatggagctggggatctgagagtgacgaagcttcccgccgcctagtcttgatgccttgtatattaggctgcaaaggtcccgtgcccagaatccaagctcctactgttttcttttgtcgatccaacccaagaattccaggcatgggtttcgcgtttgcttgctacctgtgatcaagcacccgtccgtggtggacatttatcgcccttcgactcctcacatttcaccaacagccttgccatccccgttccttgaagggagtctatcaagattcccagttttgcgcagctcttcaatcggagtcctcagcaactccaacgccgctcttttccatcaccgccgccgagttctccttcccctcatgctccaaagtccagagtacacttaggcgaccgtcctcgttctatctcagccgatatagacaaactcaggatggcattcagcatgggggctgcaaaccctcccgccgaattgggaccggaacttccagatctatatgcggaggtaagacctctggattccgtgtacactcgatcaattccggccgtaaggctgctaacgctcggaacaggaagtcggtttcaaaggcgtttccggcgacagtaacgtccaactcctccctacaccttggcctgccgatgcgcttcctgccccttcctgcaccttactcgctgtcgcagccaccaaaggcatagtagtcggtgctggtccgaacacgttatgtgttgcgtctactgagtccgtcagagcggctatatccgcagatgacgagaaagagaaggtcaagacaaagccgttccaaccgcaagcgactatctcgcttcccggaagacctacgcatatagcatttgcctctggcgatagcgccctggtgcttgcgacagaaagcgggactcatctgtcggtctttgagacaggaagcctactacagcctaatgcgcagcctgctatatccattcctaccaatggcgccactttccggactgttgcgcccaatccagcccaggcggaggattcccattcatcccttgtggccttggtaacgaacgctggcgagttgttaatggcggacctgaaggccggcaatctcgtcacgggagcaaatggcaacatcttgaaagccgatgttagctctgttgggtggagtaacaaaggcaagcaactcgtagctggcctcgtggacggaactggttatgtgatgactccagatggcgtgcagaaggacctcatccctaagcctccagatctcacagatccctgtcatggtaaatttcacgtccaaacagcccattcttgtatagctgattttgcctagtatcatccatcgcgtggcttgagaacgatatcttcttgatggtgtatactccgaatgttgcagaagatgatgcgggactgactccctcgtcgtcatactatatcatcacaagaagaaagcaacagcctttcttgatacagaagctgcctgaactggctagccctttcggctataaacgtgcgccggcttaccagttcatcgcacgtatccggaattacatgccacatctgacggatgctttgattgtgtcttccacggcatctgcagacattggattaattactaggtcttctcaggcactagcgagtgacgatagtgccagagccatcgtgggacaatttgctacgacggaagtgaatgacgactccaaaaaagcttcggttcccttaaaggactcaaccgacgaaacgtcagttataggtttgggtcttgatttttcaagttcagaacctgtcatagcccccattcaaggagaggatattgctgaaagctcaactcccttgcccaatctcctcctattaaaccacgagggcgttctatgttcttggtggttcgtatataacgagtcaatccggcaaaaggtaccatacgacggattgacttctgctaaaacgcaagtaccgcctgcgctgcaatcgcagtcaacacaaccgcagcccgcggcgcagtcaccttttgcgcagccgtcctttggcagcccggcagcaccatctagttttggcaccacaggcttcggcaagccgtctgcggcacctgcatttggcagtccttcagttccaggaacccctcagcaacccagttttggaaaaccttcatttgggacgcctgcctttggcacatctgccttcggggcgcctgcctttggcgcgcccgctgcgttgggctcgaatgcacccaagttcggtcaatctggatttggacagtcgtcgactccggtgaaaagccttttcggagcatctggtgctcctgcaggaggtggtttcggttcgttcgcgaacgtaagtggcggcggtggtttcgccagtctggccacgtcaaagccctcggaggggtctccctttggcaaactgcctagtgaaaatccgtttgggaaatcttctgtatttggtgcccagtccgagaccaccgcattcactccccagaaaacggaggagtctaagggggcttttggtgcgggttccagtggtttcgtccttgggtcaactttcaagggggacggtactgccgtcaatgatgcgccgaagcccgaaaaaccttccgggttgttctcattcggctcctcattcgatgaaatggtctctacgcccagcaaaaccagcccgcctacagaagcaatggatgacattgaggactcgaatgctactagtcaaaaccttccggcagcaaaggaaccagcaccctccctatttggtgcaagctcgaaaccttccactggatcgtcgattttcggatcttttggatcacagacgcaaaaccaatcaccatttggttcagcacaaacgagcaagtctccattttcactacttggaaataaaaaagccgacaaccaagcgccaagtccctcgtcggcaccctcggagaagactgcagtggctagcccacctttcacaaaagccaagtcacctgaacctgaaccgccccttcctcctgactctacaagcagggccgtatatggtccgggtgacacatctgcatcttccaatgtctcaaaaagctctgttgatgatgcacctctaccgccagatttcacagcgtcccgaaagtctcctgagcctgaaagcgaaccgcctttgccgcctgatttcctcacgcagcctaagaaagaagaaccagaggaagaggaggaaccggtgaaggccgaagaggcaccattgcctccagacttcacgaagccaagtgcgcccttggggaaagactctcccttggttcaagaggaatcggacgcaggctcggatctcgggtcggacgcagatgaatcacagaagggtccccccgaggatgagtctgagctcgaagacagtggtgaggacaacacgcatgaagtcaaggaaccgagcgttgagtcatcaccagagagttctctcgacgacaaacacatgggtgaaggctcagctggtgggctgtttggcaagaagcagttatttggagaaataagcaagcctttgttccctcaaacagcacaaagtcgcgaacctccgagatctcctagcccgatacggcctcctcgtactcggcaaggtctcccgaaaactgaaaatctccgctctatcagtgctccacacaagcctggagatgctcttgctgcccgaaaagcctctctcaccgaattagcaaagcgcgaagagctccgacaaccggcgcgcagccgtgcccgggagcctgaacctcagcctgtcgagacggaagaagaagccttgtccgacgatgaagacgagcgactccgtgcggaccttaataggccactagagcccgtacctacactagaccccttcctacctcaccaggattacacgggtgaaacctcgaaacctggtattcccggccaaattgagaggctttaccgcgatatcaactccatggtggatactcttgggataaatgcgcgctccttgtcttcttttcttctttatcaacaaaagtccactgactccaattggatcaacatactgagaagtgatagcccaactgatattctggatgagaaactgcttcttcggcaaattgaggatttggattctaccgtcagtgtccttgcagaatctcttgagaagcacagagtgcaaggggtggaagagaagcttgaaagctgccgagaactgttgggtaaggacatcttcacccttcgcagccaatgtgctagtatcagaaagacgcttgacgcgtacaccgatgctgcatcaatcgtttctgcacctctttccacagtgcaggcaaacctccaacaggatcttcggacatcgtcagtcgagagcctgtcaaaaagtcagaac

SEQ ID NO: 1009 - DNA, 4890 bp, Emericella nidulans
  unsure (1)..(4890): unsure at all n locations
ccacttcatcagacccgagacaccacagcgcgggccaatgagcccagatagccttaaagtccatccagtagtccgattgcgaccaaatgtactattcaccgttagctgggcggttacgagacggcggaaacgaaacaaaccattccaacggtccagaagacggcgtagtatagccacatccagccctcgtccgcgagtcgaatcgatgcttttttcttcaatccagaccatcgcgccaatggccaaaacacccactccatcgcgatggcacgaatcgcggtgaacgcaaagacggagcttataacgaagtagatatcatcccagccctggatgtataccccctgcgaaggttgatagtacgacagctggaagaacggcgtggtgtagggcgagagagaagggtatcactggtggacggccaatagcatggaaagggttgtcaaggatatgcctacagccaagaagcccaattagcaaaaggcagcccaagatgccaaagaatgaaagggaaaaaaaaaatacaagaagccaaaggttcatgcataccgatatggttcgaaaccacccactcccggaacgtggtgtccttgacaggacggtgcgaggaggtcgtcacgcaggcattgagctccgtaactgactgcgctggcagagtcgtatccttagccataatgtgggataaaagctcggagataccgtgagctcagagaggataaatcgtggcttcgtgcaaagggatgtagccggtgcggatcaacnccaacgaccgggacattcagcgtacgagactacgattccgggtcgagaggccgtagaaacgagtgaaaacgtggttccagaccactatacacgagccgagtgcactggctgtggtgttgaacgttttggcgtaggtgtagctgtttagaccaagtacaatggtggttggggaagaccgtcctttgccgtttcagtttggcggagcgggcgagacgaaacacgcaaggagatttcaagggcagtgatctgctgcaacctcggaagaagagattgatagcacaaacacaccgctagtatacaagggcgacggacgagaggggacgtagcaggaacaaattcagagaaagcaaaacagctccagttgagttttggtggtgaacggttattgttcctggtaccatactggctctcgcagggtcacacttccacaggtacccggcagagtactcaccgcctcccgggctcccctcacgcatcacggcaaggtccaatgacattctttttccgcttcacaagcccctgctagaggctgtcgtcgtccatccccgcaacctaatattgcaccgatactcgtcttctgacctccaaaatggctcaaatttggataataggttgcttatatgtctatctacttgattaatcatgccgtaaggcatctataagctttcctgttccaaccccgctgttaccccgttcacgtactccgccgcactgactcccagcttagcaaggtcgactcctccttgcccggccatcgcccgcgacattgcccgcacgacctcttcctcctcccaaacgtccaacggggcccccgaactgccttgcccatccatagcgaccaccgtctgccagtacgcatcatcccggtccttcaacacccgatcccgcacgaccgcattcctcgtcacactcacagcgtgcaacttcgagctcgcaccggtcagagacgccaacgacgccgccacgattttatcgacctcgtctgcctggttgggcggcgtaaagaaccacctattcgtagcagacacgtagataaagcccgcgaggacaacatcgaagcaggccaaaaccagcggcctcaatacagccatcctctggaacagcgcagtcgggacctcaatcccatcccgtacagcgtcggaccccgatttgacagggtcatacatgaacacgacataagtgtccagcgctgcgaggatcaatcccgcaatcgtaaacttgttccgccatctgcccgcctctctccccgcaaacgatgtagaagtcgcaattccaacaacggccatatgcagtagatgcggaatcattgcgttacgcgggtaataaaataaggcgtaagtgttcggattatcaagcctgcaaaatcgacactccgtcaatgcccgctccccgaaccgtagataaatcctccgcgcctctttggacacaagctttgaccggagcagcacatctgcatctgtaagcacacccccaggcctcaagcgcgctagtcgcgagaataccgtctccagcgacgtggttatccgcgagcgcgtgagcgtaaagatgcttgggctcggcgcgaatgggttcgaggggaagcttagggtcaggaagacgaggatcgaacagaagaggacatttagggctctggaggcgacgggtgggaggggtcgagggtttggccgcgacgataattggacgcggatatagcggatggagtttataattcgggggacgataatgggggccaggatgagagcgatgctctggatgctggggatgttagtcttattgtctgcctctagcggaagtctagaaatgctagaaagatagatctacttacgcgctccatggaatattaatttcacccatcttcctggatttcgagtgcgaaccaggacaggttgtaggttgtttggggaaggttagttagttggcatgagctgtcttgggactttaagcgccaagacccgtttggcgggctttgttcggccagggtcctcaggcaactgtagtatggttgccaggcacattcgctgtagtatatggttgagcgattattggatcaaacgcaacgtagtttagcagccaacacttttgatataaattttttttttggagatagtacaggtgaacaaccagtggagttgctccaaacaatgaagctaattttcacgtcacatgtacccagctcaggtatatactttagctagtaacttatatccatattacaccatgtagctagtcaattattctatacaagcatatctataaccataagactctaaccaggcgtccacgaattattttgcggcccctccgagcccccaaacagattttggatcatcagcccaccagccgcatctaagaactccgccccgagcgatccctgtgtgtaccgaaagctacccccaaaaccttgaccatacggactatacgacgctggattgtctccccaagcggctagcgaccaaggcgggcggaagggccccgtttgagacaagagaaatgggtcgaagctgtagggagaggtccgctcatggccgtgctctaatgcaagaagtatcagttatctatacgtggctcatatagcgagagtaaacttaccgaggaccttttgaagtacagctctcgcgcgaagggccatgtcgtgagaagacccaagactccccaggcaatcgacggcacgctgtatatggcttctccaagactcggcaagtggatgcgtgggcccgtatacatagcaggttgcctgaacgaagcttgctgtaagaagccagcaagttgcgtaccaggtgagtcctcgctgccggttatccgtcgactcaagaaatccacaaatcgacgtcacacacatatctgcagcggcgagacaagacgcaatcggaccagaagatgtgttgagttcggacttcgaggttatgttttggaagagaaaaggcctgtttatgacgattctcagatgatacgacctccataatacgactcgccgtgggatatcgaacttcggctccaggtagacctctgtgttgaaatgggcgggaaggtcattgtgccaggaggaaatacgctgttccaagtcctgggctttggcaggggtgggaaggtgatgggtcagcagctcaacctggatagcattcgcgatcttcgcaagtttgacctgtgcaatcagacaggacgtgatagttggccccgtcgagctctcagggagctcttccatgtctactgccagatcgtggtcgtctacattggctggaagccgaacatttaccccgacgagtgagactgccggacggcccaggatcaactggacgcccgagacaaagatgaagagcgtccaccacacccgtcgccggacctccatcgtgaaaggggatgtgcttggcatcccaaactccctgtgcaggccaatcgcgagagccatactgaagccgatgccgaccagtataaaggcagcattaggcttgttccgcttttgtaagtagtttgccatcaagacgattgcctggacgtagctcagcgatcctttctccagtacatccatcgacaggtgtttccgtgcttctttgaagaagacaatatccatcttcgtaccgttcgagtcgccggcaaaggcgcctatggcgaggacgatattatatagcaacggccatgaaccatcgtgaggtttagctagtgcacctaacgctgtcagtacgggctggtccattacatgagcctacccacctgatacccgtgcacggaatgtcccttcatgtaagatgggatacgcagggtgatagaatgtgaaataagcatcgagatagcgtgcaacctctgactgcttccgcggaggaccggagtcacagatatcttcgtcgtccaaagacgaagccgggatgaaactgccaagagggatatagagagggagggactgtaggaacttcagagcggccacgcccgactgcgggcccgtgtagccagctttatgggggtcgattgtcaagaatcccatcccgtcagttgaattgtcaaagtcctgcgattcgtcaaactcatagtcttccgcgttgctgtgttcggcaacgctggtgggtggctgctcagtcgaatgagtcagctcataaaaaagcttgatcttcttcgacgttactgaagccgagccgtcct

SEQ ID NO: 1010 - DNA, 3488 bp, Emericella nidulans
  unsure (1)..(3488): unsure at all n locations
cgcgcgaattaaccctcactaaagggatcaattccagactctccagggaagagaggttgcccgagcatcagctcggccatcacacagccagtagaccatacgtctataaatgtcagcttgtccatgaaaatccaaggtgccgtggatgtttaccgatcttggttgtgtaattcgtagcaccaaatatcaattctggggctcggtagtaacgcgagcaaatgtatgatacgttaggctcattctcgaccaaaatcttggcggatccgaaatcgcaaagtttcaggataccagtagcggggtcgagaagaaggttctggggcttgatgtcgcggtgacagattccttgtgaatggatatatgccagcgaacggaatagctggtagatgtaaagcttgacttccaacatcggcatggttgtcttcaacttgttgaagtagcgagacgcccgataaacagtttccggtacatattctaagacaagattcaggtacactttggtccttttgcggcgataccatacacgggttagcactgacatgcagctaaacactgttaattggggagcataccctttcgccattcgaatagtagaaagccttcagctcgacaatgttaggatggcgcacaatcctcatgatttgcaattcacgattctgctcagcgtcagcggggagtggccgggcgagcacgacggtgagctccaacaatgggcacataccttgaaacgcttgtcctggagaacccgcttgatggcagcatcctcgccgctgggcatcatttttgtctggaagacaactccgaacgacccattaccgacaattttacattgcgaatattgtatttctttcgtttcccctgttagtccatcttggactttctcgcggacgacttctggaaagaaacggacgaaagcagttagcgatcgggatccatggcgaggctcgcagcgtttgcggctaaaggcattggagatccttaccacccatgcgcaagttggaaaacaccccagaccgattctgtgacatcacggtgtgtcttggaaggcggacaacgtgaagaagatcggggaaggagtcctatcgtgaatatggaggactagactttaattgcggatggcgggagagggttggaaggtaaggtgtgaggtccgttttgggcagactgtgaccggtggagcacgagttttgagaggggtgctttggatgggcggaacgttgaacggaggaagatgagtggaggttggcgtgagatcgaaggttaagagcactagacaagcgaaccgcagctggctcagaccaaggaccaacggacttgggtaggggtgccaagagcacagacgcaaggccagggagtgctccgaacgggagggtagaggtgtgtcgggttatcggcagtggctgtctcctttcgggagggaaccaagcaagtgatagaaagtagtaggaggggaggggaagaaagagaaacagaattaaaaaagggaaaggaagaaaagtaactaattcgaggaacagtagaggaattaagtcacgacgaaccagaagagagcagggggagatcaaagaaggtttacgggtcaggtattattaaaaagagaatgggtcggggagggaagagggagaagtgagcaggtgacgttgatggagcgacgaagcccaaacacgcgagggctgcaggaacgcgggaataaagcaccgaagcagagggagcagtggaagcaggatgagaagatggaggaataatagggaccgatgctatccaagtgccactgtctaaacacacttctgacctccaccagctgaacagccaggcaaaagaaactgcaactgggagggaaaagcaagaaagaagcgcacacccacactcttttctaggtgtctcgcaaggaatcgggccaggaaaagcaatgtgaatgttcgaatatctgggagacttgagatcgtttggggaggggcggaagtggtctagcacggagctgtggcagtgtgtggagaggcaaaggatgatgatggctgggattcctactacctcgcatcgcctccaggactccagggctcccgggcttgggccggattgaaggatttctctttatggccgccggcataaagataacaaaatttacagtagcgctggttcttaggatagtaaataagatgatgctaagcagctcgtagtgcctcgtcatttgagaaaggaacatgaccagccctggttgttacctcgtacttcaattgctacagggggggttctctatcagtatagtattgacatctagcactggcaagatgactgctctgtttaatccataacgctctgtcgtagcttgcctctttcgtccggatctcctacctttgaagcagacatatcgaccgctggtggtgctcgctccgccgggtggtctgttaggagtcaaaaagaggggttgtcgtcttagtaatattaccatacaggtattccggtcacgagcccaggcgtagttctccactatgaagctgtgacatggagggtttttcataattcttggctgttgcttttgaacttggatctctttttcagagcgctggttccatgggcaactcggccatgattgaatattaggcaaagacgtgaggtgattctctcattctactctgtgtggatgtaatgctgctcagtacactgtaattatcccttggacttgtagctcaggatctcacttgtctgtcatggatcagctagatgagcttcttctggtccaagctctctcatctaattagttcgacggatggttggcatctgccacgttcagcagtaagagcttcactcagtattgccgcactgtcgctaattctggcatcgtcattaatatgctaggtgctctatcaagtcccatacgacaatctggaattcgatccccagttcctcaatcctgtccgaaattcggtacatacgtccgcgcactaactccagactccttgggatcatgatgcagtggtcatctggtcctttgtatggggcattctcccactacaggtgcagcaattggttacccacattgtgtcttacacccaataccagtggctccacatcagccgctcccgtcattgagtgatcgacctcctctctgcagacgagctcctggccagccacgggttttaatatttcaacgactctacgactttgtttcgtttttagtatacctgctcagtaagaagtgctacctagcatcgagcgggcaggaactgtattcaagatacgaaatcgcggcatcctttcggccgatgccggtgggcctccacaagcgataaactatttgtgcccatgggtcgcgtagcagttaccttgctttcggtaagggcaactctcgccagccataatagcgtcataccttccgagtcccgaacgtctacctagccctgagcgctccngtgacagacaggcgtgccatgaagttggtgtcaagtgaccaagcccgctttttcactagctatactaantcgatcttattg

SEQ ID NO: 1011 - DNA, 4834 bp, Emericella nidulans
atttcccaatggccatcgcagattcgcaaccaagccaaaacgtgtgatgcgaacaccagcatcgtgcttatttgttgaagttaggtaggcgtttccatggtgatggtgatgatgatgatgatgccatggccaccatgttctctcgtttgcgtcgccatgaccggaagtgtggtgctgggcgttattgttgtggttgatgaggtggtcaatagggatagcggcggaaggggtcgggcgcggacattggaggaaaggggagcggaatacgatggactttttgaagcagtacgagcgggcgacgtggcgcttgtgcgtagaactcggaattgagtcggagaagaacgcgcaagtggaggacgagtcaaccggggtctagctctcaagatggaacgacggacgagtcctgaaggtggtgttggtggtgatagatggaccctgcaccacaggggctgcgtcagcggcattgcttccccgtgacggactcgaaggcacaaccaccaccacggcttcagaaactagtagctgctactaggagcgtaaggaagaattgcagaagatagtgcgactggatttgattcgtcaacctatcgagggcactgctgtttcaacgggtcctggctcgtcagtcacatcgagttgttgagtcgagtccaggtaccctgcaagtgcagaatgaggggaagttgcttgttttaggaaagctagggaccggagcgaattgaaatcagatgaagttgactggccgtctacgtcggctgtatatgaaccctccaactacagtactacgccgtcatccggcaaagacgagccggcatgcgctgactgcgattgacggttcgggtagcttgtcttctcccgacggctccgctgccacaggctgagtcttatctgatcaattccacacactgtaaccaggctactgctacaggtattctggttaacaaaaatactacgaagccctctcctctctcccttctcgacagccccttcggccaaaatcgaaatgatgccaagctctcggtgcttagtatctatggacacgcagcctctgacgacgcactccggtatgagaccgatgacgtagcaacaaatccatctcggaattagtggaccacagccattgatgctcccttcgtttacatgccgttcagaatgcgtctgtataaccaaaagataaactatgcgaaacgctggtatattgcgatggtatagttctgctctgggataaacggacaatttacggaatccctctttctcaagccgcttgtttctgatccttgaaaagttgtatcaacttgttctgcatgtcacagaatatattgatagcctggagttataagtatcggtattggcctcatcgcctagaatggatcgaacatacctgtatgagctttttttttttgcccgtcccattctccgaacggctgaacgctatccgatatccagcttcgtcattgacataagagattattttgggacttggactcggcggttcagagtcgaacaaagacgcgggtaaaggggtaacgaaagctgctgcaacagactaagagctatcgtgatatgatgagcgccagctagggcaaagatttcgtcggtagacgtcaaacttgcgggcaggacttgtgttctaacgccaatggcctcgtagtagttctgggccgagacacagaggggcagcaatttctgcgggtccacgaatctaacaaacgcaatattaatcaagcttaaccgtggtggatgccaacgaagacctaccccgactcgaaatggactttgagctggttgacgtatggtgcaatgtatgtgcagccaacctctgcggcgagagcggcttgcacaaacgtgaatagagtcgtggccagtgtacgaacgcccgccatctcaagggtccgacacgctatcaagccctcccttgtactcggtaccttgatacaaatccgcgcggtttcaatgtctggagaaaaacatcggaagatcttgacgatccctatttcatcaatcaactcagagcttgcgtcaggcatattcaccgctatgcaacttactgaaagcatttgctaccgtctttccgtcgagtatgaataaaaagggttcgtttggacatggacatatccccggatatggggaaccaacttcaatgccagcttaaccctttggaaccatgccagtacccagtgttctcaattccacgacgcgagtctacaaatgaccgctatttcgatagctagtttatagggatcaatccctgggaagcgcggagcaagctttgatgactcttcgatggaggccttgattaaattcgcttgctctggtttcgagagctccgcgaatgcgatagcctaggtcatcagacaaatccctgcgctgtatgaccaatgtatgcacatacctgattggaagtacagtcttggaattggcctagagtcctggcaactgcgaaacggtattatatttcttgtcctttgttgatgctgatcttgaaaggacaaaatggtggagtcgataaagaatgatgtgtaccttctttaatcaatgtatcgcagtccacaactgtcctctgacggagaatattcagacgggtttcgcttgccatggccgatgagctgggtgtcgaatctgttgagggaagagcactatggactgggggtgtttactgaaagaggggaaagcgccttcaaagacaccgtgcagccatatactatatttatttcaccatctttgactgcttaaggagtcagctgatttaacactgagtaaccgatggtgctagcagtcaaaacggcattgtgatcatatcttggtagcttatagcgaatgcatggttatttcgggaactggtcaatgatgccatgtatccaagtagtatctaggcaagcacaaaggaagtgtactgatgatggtgattgttgaggctcaacgtgcaaatcagcgaacagtggggatcgcgtctgaacagagccaatttgagctctggatcctaaaagcagttatgactttgaattctagtttgcattgcctcatgtcgtctttcagataagcatttagagcggggcgttctctgacagcaaggctcttctgcggagtgacacggtaggagcatagggtagctttgcgcccacaggccaacagggcggcatggatattgtgtctaggtataatataataggtatacggtgtataatctacggagatgtgaccctgatatgaaaccctttcctttcatggaaagaaagaaatgggcgattaacgacgggatgaatttcctctcaggtaactcattaacctctgcggtcgcgacagaatgccgaaaccagtgaggcttcgctgggcacgtcaacatcatcccgtatgaggtagacaacgtgggctgagtcccttgggagaagaaagtcagaaaagcacaaagtctcgaaagaaaatggcaggcttgatagaccatcacgtgattatatggaagaaagatctttcagctggttatacagccgcggtgattggacaagcgcccaaatgcggagtcccgtgacttggtctaagcccgaggttgtgctccccgtgattccgagccgttgcgagagatcgggaattcaaggccactttcttctgggacgaacttcaccttcgcgcttggattccaactcctcgtcgttgtttcggacatatcaaaaacaatcatgctctctcaaaaggtcgctcagcagtcgctgcgtcggcgtacgtgctccttatatttgggttcggtaattggcgcctctaacttctcccagttgctgtccagcagccctatgccatgcgctggtccctgatgaacgctgcctcccccgccgcggttgccatgggaaggaatgtccagaagattcagacaaggtgagcggactacgttttgcccttccagtgggtttttgggagtttcgtgtcgctgcgcaattccaagggactcttcgcattctacgtcatatacaacccattcgagtcgctgctgccgcgtagaaacaacatagaggaggacaaatgctaacaatcacggccagattcgctgccaccagcaccaccacttccgatcccaataagatccttgtcgagcagcgtctgcgccgccccgtctctccccaccttaccatctaccgaccccagatcacttggtacatgagtgccctccaccgtgtcaccggaatcatcctttctggtcctctgtacattttcgccactgcatacctcgctgctcccttgtttggatggcaccttgagtctgcctccttggccgcttctttcgctactctgcccttggccgccaagttcagcctcaagaccttagctgctctgccgttcacctaccactccttcaacggcctccgacacctgatgtgggatactggccgtggtatcaccaacaagcaggttatccagaccggctggaccgtcgttggtctgagcattcgtagcgctctttaccttgcttatgtgtgattctcttccgtctgtcataccaacaagtttcttgccgttctaaaatatttccttgcaatatattctatacaggtcatttgtactctttgaatgcacattttcttacattgacaatttcagttgatccatctcgtcaataggttgtaggagctaacggggccgctacggtatagttggaagagctcacgtttttgctcatgaagtgaaatcccaaggatgttaggaaggaggaaaagtggataagcttcgtcggagtaacaataaactcgttttcgaccaagcataatccaacgatcaacagattaacatgatttgaacaggactctgcaatggttgctgacgaacaaactagtaggaaacacaactt

SEQ ID NO: 1012 - DNA, 5115 bp, Emericella nidulans
atacgccaactgggaaccatacacccataagcaaagcacatgagtttgcgatcgggtcgtccccaggaaccgaacaaggagttacaggtagccgaccacctacgagggctcgcgggtattcctcgactctttccatagctggacgcaaaggggataacggttcgagagtccaagggactcctgcctttgaaagttccatactgagcaactttagacggcgaccccgacaggcgagtattctacatatgatgcaagacgaggacgggtcatcagatttagacgacgatgactttctcggcggcttgagcccgcaagatgaatcaacgccactgaacatctcaaggggaaagtcacttgtcctcggacccgccatatcttcgcttgacaagtctccgtcattaccatcaattggtaactcatcgaagcgcaaacgatcaaccgacagacccgagcctcaatcacctctttatctcgcgagcatcatgcctgggactccaagacctaaattggcaaccttgcggagcgaagcctccgttgagtcacatggcctagcagaaaccccggcagcttttagcgagactatggtgccacccatgagcagccctgtgtttaatagtacactggaaacgtccacccaggaggcagataggctaccacctggaacaagaagggctcgcaatgcgaagcccgcaccagcaaaagacaagaaactccagttaccgacggcagcattacaaaataagctcttaccccaaaggcgccgaagaaggccaagacgccagaatctatcaaaatttgatgtgcttagtgattcggaagatgatctcccctcagcagcggcagacgacgatgaattgagcttcttacctatgcagaagcggtctccagcgccacggccgccaacgagtacgaaaccattgcgtactaatcgggcaaacctgaactcgaatactcatgataaggatggcaaggaattcaagcgatatgaggctagctcgcatgaagaaaaaaactatcttaaagagaacaagccaatggaagtttcctcacctttgtcatcagctctcgataccgacgaacttgactctgagtttgatctggggcaggaagctccagctaaagcttttttgagcgaggagttacgattgcaagctctgaagtttgctgagatagacaaatggcaaatggagtttgaagatgtggttacggtcggcactcaggagaacggtgcatttaggtaaagctcgtctcatgttacaaggagttaagagctacccattctgttgataggcgttatgaagcgattaatggccagtttgctattgttaagcctaaaaggcgaacatttgagtcattgcagcatcttattacgaaaatcctgccagttaatagttcaccgcattgtgcgaatgtacagatatcgcgcaatattccagctgcgggtaccccgctgttactgataccccaccctgtaggctgtagcaacataggcccgatgcaagccgcgttgcatcggactgagataaaagctccacatcgcccgacacgggcgcgtctcgaatctcttcactgcacgaaatcgaatagccatgacttctctggacagtatccttgcggacaaatacccagccaaggctcatgctcgtcgggtggccgagggccttaaggcgcttggccacagcggcggcgctatttatctagaagcgcaaaaaactcgtctaattgaggataacgatgagccggtgccctttaggtacgccttactggtgcgcgaggatcctgtcgcacactcttccccaagctgtatttacgcaacccttcctgacccgccgactattgcagacagcgtcgccctttcttctatctttccggatgcctgcttccggactcgtccctagtctacaatattgattctgaccaattaaccctattcattcctccaatcaacccagatgacgtgatttggtctggtctgccgttgtcagcagctgaagctctcgagcgatatgacgtcgataacgtcctggagacgacagaagtcaatgctaccttagcgaacattgctgcgtcgcatgcaaacaatagcactgcttttgctatcgcagagcaagtgtccgaaggtacaaaattcgagggcttctccgaaacgaacttcaacgtcctgaaaggagtgattgagaggactcgcgtcgtcaaagacagctacgagatcgctcttctcaggaaggcgaatgatatctctgcaaagggccacatcgcagctatcaaggcatcaaagtctgccaccaacgagcgcgaaattgaagccgcgttcattgcaacctgtatcgctaatggagctcgcgagcaatcctatcatccaattgttgcgtgcggccagaatggggccactcttcactatgggaagaacgacgaggacttaatcgatccggtgaccaaccggagaaaggacaacgtcctgatcgatgccggtgcagagtaccgcacttactgtgcagatattacccgtgcatttcctctcaatggcaaattcctaccagaaacccgccagatctatgaaatagttctgcggatgcaactggagtgcattgatatgctcaaggagggtgttcagtgggaggatgtccatgcgcacgcacaccgcgtggccattaggggcctgctcgaactgggcattctgcgcggctccgaggacgagttattcgacaagcgaatcagcgtggcttttttcccgcacggcctgggccattaccttggaatggacacacatgataccggcggcaacccgaactacgaagacacagatactatgttcaggtatcttcgggtacggggacggctgccggctgggtcagtcatcactgtcgagcctggtgtaagattccatacccgtcgtttttttatctctgttgctgattatctcccgtgcagatctacttctgccgtttcattattgaaccattcctcaagaaccctgatctgcagaagtatattgacgtgggtactctgaatcggtactggcgtgtcggtggagttcgtatcgaggacaatgttcatatcaccaaggatggccatgataatttaaccacagcacccaagactattgaggaggtagagagcctagctgcctagaattgtgatccctgatagagccgcgtacctcaggaaaatgccgaaatagctttgtgtctatgcttgtctagatgcaggttttccatccggtttaaattagtagattaagatcctagaaagtgcacaaaaccaagccaagtgaattagttgaccgcaaagaatcttaggaagtagtcgggtcagccgctgtggggtatagactcattggatacgccgcacaaagtgcgacgcggcgtccagaagaacgtataaacacgcaaatagtgaggcaagcacagagagcaaacgttcttgtgcgctgttcaccaaaagatgatacagcgaatatcactcataggccactgcggagtcgcttcctgccacttcccctaacagcaaattctgtttcagccgcatcttgagcacgcttctccctctggtctagaacaacactcaacacatcgaaacaaaactgggggacatcgagacacagctgtctgaattcctcttccgactcatggcgcaagatgtggcctctcataccccagaagttcgacacaggcttgcggatagtgacatcgtcggatttggtgtttgcgtatacataacgagcatactccaactcaccgagcgaagtactattgatacggtgaattttggaatgggcaagggatttcagcgtagaaatacccagcttctcagccaaagtgtacacacgagcgtgcttgagaagccggtcaccagaattgtcggctccttcatccgctcctgtctccgatggagaataatcccgtgtatagagatattgtaagaagtagccaaatgcttctacgtcgtcatctggaagctcaatatgacgctgcgaaaaaaaatggggatcttatagttagtgaaagataaacactaaagacgggagcttattcggcgtaccggaccatcatcaaaggccttgacatgatcagatagcaaagacgactctaagagtaggtcttggtgagcagtcatggcagttctcttgtcgttacttccgacaataagctccacgattggcgaagtcaggaacctatcgcccgatgtcactatcaaaagtaaccgtaaccgctgatcctttcttgccaaactggagagagaggggagtgctgagtagttgattcagcacggtggtgtaacgtacccgggaaacgggataggtttggggagttggggctcctctgctggctgcgtttcgacctcagccggtcctgcatcttctcctgcgattgtagcctgagtcgcctcggtatcaataggagtttgctgcgctcttgctgcgggcgctctctcctctctcgttgaaacttgaacttgggggatcaaatccattcttgaatatggtattgggacataccactgagcgatatgacagtacttggtataacggtacctggagtcaagggaggacacagctaagctgggatggtgtcggcttaggcttgataaattgagaattgagatacccaagcttttaagattgagctgttagggcgctttaataacatatgtgactaagccaatgacctcatttgagcttgatctccaatacattcttcgagtttgatgctgatctatggcagcagacgtttcagagctgtgaataattgcgcacgcatcgtcggttgatacagtagcaaagttcccgactatattagctcacgtgacctgtatttgtagtgttcctgccaaggcaagtgccacttcgcctatcggactttgggtccttactgtaccagatcggcagtgccggcctgtccaacatatgagcgaagtatataataagcggctgcgacgacgttccctgctcgagcgacagacagctgcgctacgcggcgttgccaattcgaaccctgttgcctcaggcactgcttgcgaagataaataagttaacctgtgaaatgagtcagggacatttgctggctgagacaaataagtgagcctcaagtctcttccgtgcgagcgctcaggaat

SEQ ID NO: 1013 - DNA, 1064 bp, Emericella nidulans
cccggatcatggacttcgcagcgtaggtctggatctcctcctttgtcaatacccgcaagacgatgacatggtccggtcgctcttttaatcgctcttggcccgcttctagtgcggctggatttacaagtcggcggtcaatcttggtccaacgggccccaggtgggatccccttcttgtgggcatccttcaggggagcaacgccttctcggacagggttcggctcctctgggaacttatcacgtggtggcttcaatatacccttgggcggcgcgtcgggctccttagagtctgtcttcttctgatctgatttcttatctgacggccgctcgtggtgacgggagcgtgagcggtggcggtgaggctcgttctccttagaactgtcggagccgttgatcctcggacgtacagatggctctcgtcggtactttttcaggtcgtcatccgatgagcactcatcagactcgctccccccacggcgtctggagcgtcttctcgagcgacttcggtcgcgaggcactcggcctcgatggcggtagcgatcagcatgcgaactgaggtcataatcttggccttctgagtatccgctagctaaaacggctgttcctagaccactaccggacaccgagggtggggactgcttgttgaagggcttcctcgctccatggctgtctatcgtgtctcgtttgcgcgcgtcaccgtcgggccgcttgtgttcacggtgggcaggacgagtgtcatcaaactcatcccgataggaagagtaaccctcgtcgtgatcctgatgaagggtaactgaacgtggtgggcgttgccgcgcgctcgccagatccagttcactgttaccaaaaccgtacgtcgatcgacgcaggtcatcgcgatgtaccttgtcatatccacgatgtgatggagggggtccatgtgcgcgagggtcccttcgccccagcaagagggggttttcaataccagtcaagctcagaggtcgctcctttcgggcgttcagatggtattgtagcttggccaccgcctccttctcgaattgttcccgcggattggtgtaggagagg

SEQ ID NO: 1014 - DNA, 2528 bp, Emericella nidulans
cgcccatataaattgcgtgcaaccggccattgtgcgacagcgttgcggtcagtgttccagggaagatgctactccttgctatagaagagacttcgagctaaataaaaagctggatgagctccttcgaaaccagactgatgccgcacgccctcgcctgcgactatcctcatagttcatgcaggaacaacgccgccgcaagtgatattgtttttaaacccagtgctccctcagagaccggcggccgaagattcctcgattttctcagaatgagattgccgcttctcctgctcacaatatcgagtctttacccgacgtctgctctctggcaaagatgcagatgtgtacgtgtcgtcatcaacctttttctgcaaatcgcctactgatccggagtagacaccagctcacagttgctggcaacagattgattggtcctccttgaatgcgactgtgtcggggaagctcattcgcaactcgccaccagcagtctcctgctaccccggtcctaagtataacaaggaagaatgtgcccatgttggctcgcaatggtccaataccacatttcagtctgagcagcccattggatactgctatcccattgacaatagctgtcctgttacgaattttacatggcaaggcaaatgtagcttgggaccgtctccagtatacacgatcaatgctaccgagctggaggaactggttgctggtatctcttttgcccgagtgaacaatgtccgtctggttattcgaaacactggccacgatctgctgggaaagtatgtttccacagcctcgctctcctgcctccctaacaaagctttaggtctacgggatacggatctctccagatctgggttcggtatcttcgcaaagggattctgttccaacctaccttcaacctctctataccctgcgcagcatgcaactggaccggcgcggcgtttacggtttccgggggctacatttgggacgaggtttatgaggaagcatttgtccgtgacctgatcgtggttggaggaggcgatccggtgagatctcattccatcctattttcgcggatatgcattgatttatttgtaagactatcagtgtcattggcggctatattcagggtggtggccattcgccggctactcacgactttggccttgccagtgaccaggtgctggaagcccaagtcatcctcgccaatgggtcaatagtcgtagccaatccgtgcatcaaccccgatctattcacagccctccggggcggaggtggaggtacatatggcgtagtcatatccgttaccatcaaggcgcatccttccagaccggttgtggcgcacacgctcgccatagtacccacctcaacaagcaacctcaaccccttcctggatgctattactgatctatataccttttatcctaccctgtcagaatctggcttctccggctacggctcttggtctattaacgacccgatcactacttatggcaattccccagctggatacaaacatgcattcgcggccctagacaaaccactcgtatcagcgaagtcagcattagaacctattctagacacgttgtctgtccatgatgcgattgacatctttgtcagctggttcgagttcccctcgtatgcggcatactaccgcgccatgtccggggttcaccaaaagaccggggtccccgaaacatcccttgcttctcgcatgtttgacaagaaggctttgacttcagatcgtgagcgcctccgggggatggttggagccgtagcaggaaacgccttagagtccactataaatcaggtccttttggtagggggaggcaaggtcctcgaagagccagaatacagcggcgtcaatccagcctggcgaaagacattcctaatccacatcgtcgctcgcggatggcctgcgaaactcggccctgtcgtggctaagaaggtcaagacagatattacgtacagcaaatactatgctatgcggcaattgacaccgggaatgggtggttatctgaacgaggtgcccgccggaaactgctctttttttctttagtaggaatactgacttgtattcatcaggctgacaggaacaacccttggtgggaagaagatctctatgggacgacaaaatataatcagcttcttcagatcaagaccaagtacgacccagagggggtcttctactgcccacaatgcgtcggaagctcctcctggtacgagcaaactctgccggggaagaaatacggcccactctgtgcgagataaatgcggcaatcggtatagtagtaaataaatctgttcagtcaactgcagattggcagacaagagtccttctctaagaatcgtcccacggtagcctatgattccgctagatatgtggtccagcccttgacaagattgaccgtggtcaattattcagtcaaatagttaacggacgggcattggctcggcgtcagacgtaaaacataataaattatgcgtcgctagaaccactcccagtcctcgaattcacccaggggtagaggctgtaagaaaattcgcgc

SEQ ID NO: 1015 - DNA, 1934 bp, Emericella nidulans
ccagtcattcgctcgaatcgaacgttccagaatttttggatccttcacttgcttcagcttttagttgttaggtactaaactaaaggggcagagggcctcaccaaaatcggggtcttcccattctggtcctagccaagaacctggcctgccttgtttgtatcttctaaccagtgtgcagatattcttcatgcgcgcgtactcgagtcaccacctttcatttgattatccctgaagccttgccaaccattatcacgcttgtttactcccagcaacccctcaggcctctctgacatttcctttccaataacacgcacaagcccctgcaatacgtgctctcaccacttagagattttaaatccataccttgataggaaccgcacagttaacctaggatgtagtctgcaggaaacattctgctgctcatgcatgttgaaagagcatacgtaatgatcgactcctatgcgtattataacgagccattgcggggaagcacagacgatagccggtgcattcgtggatcaccctgcttctaccgcccggtaccataacttggtcccttcagaacccagacggagcttcgctccgtcttaggattaccaatcaaccagattccctggatatgccgagtccgtatgctcgccgggcggagactgcaagagaaccttcactctgtacgactaccaaacaacgacatgttcaaggacacgagagcctcgcagttatcaagtttaaagagtgccatatggcttattgcccctgaataaactaagctaaactaagcaatcatccccctcattttcatgtcaaaggtatattacagcgtcattggccggtaagtccagttttctggtcgtggtgtttggtggcgttcttcaggtctgtagctgtttgtaagctgttgtaatcagtaatatcagcgaggaagagctgcgccatatcattcgacccggtatctggcagtcgttgtagtaaacatagtgaagatgtcgaagagatgcaactggagggatggcagtgaacagtataagcatgaaaacaaaaggatgaagataagacccggcaaacacgctccaatgagaccagtgcaatgtcgagcttgccggtgtcttttcgtgggtttcagcattgttagcctacctatctacaggatctactaccaatcaatgactcgagagatacggtcggtattactccatataatccatatataccacacagacaaaacatggcaggtctgcagaggtgagtatatgacagtatgacaatcgtgggactcataaagggcgttctggtaagaaatgctttaggactacatatgtgtttcgttttggttagttacaaatcaagcttatctaatagattattattagctctggcggaagatccagccatgctttcccatatttccacacacaacctgggtttctgaactcgattccactccagtgacgaaaacccagggttcggctagttatacgaaagtaactggttacgattagagcatcgaatggcgatcgcgtcctatactttccactagagatgctgttatgggtcctttgcctatacaaggaccttagaccttagtgactcggccaaggcctgcgctgtcctgaaggcggtgagcacctacaagacttcctcacaacaacaatccttctttctcctttcttctttagcgattccttcctgtacgtacggcacgtctagataggaagatccatctaaatacgtcccttaacattaggaatcgctcactaatctcaataatagtatgaggagaccttttactatgacaatggaagaagaaagtgtcacattgttgctacagcagctccaggagctccgtacggagatgcggactcagaaacaacagctccaagaagagaataacagcttacgggcggaactacaggccgtacggaactcgcagctga

SEQ ID NO: 1016 - DNA, 3687 bp, Emericella nidulans
tagaggaaggggatatagggtgagagaagggataaagagagatgagtgaaggaatgataggtgagagtggcgaggggagtaaggcggaggagagggtggagtagaattggatgttgtggggagagtgaataggggagggaagaagagggagtgattagaggtgtgtgtgaagtggcgtgaggagggagacgtagggggtaggtatgaaatagaagtaggttgggactatcaggagtgtgagggaagaggtgggggtgttgtgatgcaggtagaggtaccagaggtgggagaagggtttgagagggaggagaaggggggggaatagcgggtggagagttaaggagggggtaggaagaagaggagagaaaggaagagttattttgcgaagggggtgaggagaggtgtaaaacctttttagcgggagagggttgggggggtgtgttggggaatgactataaaggggtgggggagggaaagacgtaagatagggcgtggtgtgaatgagagcgagtattattagtgggggtcgaaagtgcgtgtggagagagatcgcagtgccagccaggtggaaagaaagggaggaggcgactgtagaaaggcaaagtgtggtgaggaatcatagggcctggaggcgagggtttgcagcggcgaagggaagctgggagcagtgccagaagaaggggcagaaggatgtaaaggaacagagtcagagatgggagccaaccgccagctgaacgggcttctcagccgtacgaggtggcggtttgcatgaagccgccgatattgatgagcaggtagaaccatagcatggttcgctcagaagtagcctccgggtcgacaatgacccgttcgccgctgggaaaaacaatgatcttggctttatcgcgaggcatctggtcgaggaggaggggggatacgttgggcttgaacatggctgcacagattagtaccagatatgggcagggttctgggatgaaagggtgaatgggaaaagagaaacctgaacatacaagcaccgacagagagcatatacagtgagataaagtacggcgcctttgcacccccattggccagcagtttgggcgccgtagcaccgaccatgagaacgtgcgcaacaccaaagaccgcaacaccgtagaggatcatcttgaaacgtccagtgtgcgcatcggagaggtagccaaagaacatgggcagcaggtacgcgagcatactgaatgactggctgacggcattcgccttgacggtgcccatgcccagggcaccagccgtgtcctgggtcccgcgcgcaggcgcgccgtaaccattgcctcccgcagggagaggccggttcacgaagttggagatgagaccggagactcccagatacgaggcgcgctcgcagaattctactatacagataaggtaggcgacggtcgggagggcgccggggatgcggcggagcgtcttgagctcctcctcggtcggctcttcataatcggagacggcgacgacatcttcgacggcgggcgcgccggtcttctcgttgaggacgggctctgctgctggttgtcagtcttggtatgtggagtcggaagggcaaccgtacccatggggaggagaggtatagacaagaccagagcggtgcctgagaagcggcaacgatcgtcggttgggggtatggttaaatacctttggaattcctgtctcttttttaaaacagccttcatatgggacccagggaatgggcatgggagttgcgattgcgtgctgtggcagatgtaaccataccccgtcctgttatcaggtccattggcccatggtcaccttatccaattgggttcctcccccttctctcccccaaaagaagacgcaccgaatcggagcgataagcggccgcctggtaggcgatcatcaaataaaaattactccaggcaggggtcgcttggctggacagtcggctaagctccctgggcgggcttagcacaggcttagctctagagttggcgtcaataaggagcatccctcgggagttctggctggcgttgggttgcattcttatcgccagaatagattaattcgcggttcgtttcggtcgttggcattgggatgcgacgatatgaccagttcttacatgtctgctgcttgcctgattgactctctttctcgattccggtgaggcataatctggacccaccatggcgatatcgctatcgggctaaactgagtgtcggccggcaacagttagattgctcaataacgttgtcaactccaccaaaaccaccagcctgggaggtggcctccgggctggccccctctttgtcccaaaaacaagctaaacggcttgcagcgttgcagtagcctcataggctagtctcagaattcgcaacaaaagtcgtggcttgcgctagcgggctagtaacgattgccggtcatggcgataaggagtggaggtcatgaacgcaagaaccaaggcaaggtctaagttctaggtcacttcaatcgagaggcctcatcgtgctgcctttggcacatattacagatgtcgaacaaggcacctcttattcggaagatgtaggtcgcccgttgtgctctgactccagaacggttggagaatagataggagacccacttgggttcagagaacgaagcctgagcaaaaccgtgggtcagacggctttgaccggcttgggggcgtatatggagaatgttgacggtatttcgctagaggggggcatggcatggaagatggaggcgcaatagcccagggagtgaaatcggcgatctttttattcctttatttctttcttccttagagtgtcaatttcggctaaaccgccaagctagcaagggagaacagcccagctacggttgtagacaggtcaatcaggttgattcaggggcagagagaaccttgagacaaggaactatagccatgacggcgcctgttccttgctgtgctggcgtcttccgtcttcgacgcattggcagaggccgatgcaccaatgagcacaacaaccagtcatgtgtaaaaggtccaaggtcagcattggagcgcccgaaatgtacattgtttgtctcagacctcgcgatagacacgacagcttatggattggacaaggacctgcattttgagtggcccaaccgctggccatggttaggtacgtgtaacctcatgcgcagtagcttgaagctaaaagcatataagtaaagccagttgactattcccaccaatcgccgtttttcaatggcgtcgaactttccctgattgggcctggctcgggtcggatctggccgcatggaccctgcggaggttacacctggaataatcacgagatccatgtgtttactgcaccagaccttaaggaatgcgcctttgaatgagagactgctagggcaatggtattcctgcttgatcgatccaatattattgacgcactctctaaaacagcatctgatatggcctaaaatatggatttgatcgcatagcaacaagactcgcgagattgttacgcagccgaaggcactgcaaattctcgactgacatggtgtataaccacatctaagtgctcagatcacgttaaatcccacgcttggcaaagggagtgatccatctccaatgtaatgagactggcgaaaaatatatgagtactatgtggacaggtatcattcttggattttttcgaggctggccatgagaacagtatt

SEQ ID NO: 1017 - DNA, 3115 bp, Emericella nidulans
ccgcatgctcgatgcgaaccacggccagcccgtaccggaatggcgtctcactccggccattgtcgggtccgtcgcgttctcggccggcctgttctggttcggctggtgcgggtacagggacgatgttcactggatggcgccagttgcatcaggggtgctcactggtctcggcattttctgtattttcttgcagtgcttcaactatatcgttgactgctatcctacgttgtaagtccgtcgccgtctcctgcccattcttctctggactaaccataacagcgctgcgtcgacaatcgctgcgaatacgatcctgcgctctgcgttgggatgtgcgtttccgttgttttcaaggcagatgatggagaacctcggcgttcagtgggctggcaccttgctaggatgtatcgctgctgccatgattccgatcccggtgctgtttcgtatgtacgggccgtggctgagacagaagagcaagctggcttgcgcttcggtgtatagccctcagaagacgggagatgtctaaaaatcgcattgagaggcgttggccgggctggttttggcggctcatagaatctgtgtatatgaacgaccatgtgtcatgacttatgaactttgtatatacatcattagcgtgttactcaatattagacactcattatatgcatattcaccgttgaagccctagcttaggcgctcaggattgagcctcccggtgtatgcgggcacacatcaggtggaaatttcagaaagaaaatatcgagtgatttgcaagatcagttgtgttcattgtattccactttactaccatacaactatagaccaggatcgatcattgagtgctcgcagccgtacgcagtctcactgcgtatatgtaggagctccatcctcagcacgctcttcatctttcctaaaccgagcaatgttcgatttgaatactgcgagccgtcagcattattgtatacctgcactatgaaatacgtaccatcttccatctcctccaaggacttgccagtcgtctccctgatgaacagaaagacgtagaccacgattgcccagttgaagatacagaacatcaggaacgtccgccagcccatgttattcacggcatgcggtgtcgcctgcgagaacacaaagttgaacaaccactgcgtagctgttccaacggcaataccgatctcccgaattcgcgttgggaagatctcgctcatgtaaagccatggtacggggccctagtcgaattgttagcttgctgtgctggcggtccagtacggactggctctggctgttagcatacccaggacatgttatacgaggccgcctccagatagatcatcgcaatcgatgcagcggtaggagacgatatttcagtagcggttgaatctggcgtgaacaccttcgcgaggatcgcgacgataagcatgagtgctcccatcatgaaggcgccaagggctagagaccatttacggccaatccgttcaactaggaaaaggacgaaggtcccgcatgctacaactttgacaacaccgaagaaccctgtgatcaggagcgtgtcgttctcgctcgttccaacggcaccgaagatctgaggcgcatctgctacggtcagtccaggacgcagacatgttttagatgagcaagcgtacagtatgccagcgaggtgtttccagtgcattgcgcggctgcagttgtcagcatagacccaattgagagtcgctatctaacaaggagacgtaccgatctggatgcttatcgcgatgaaaatcctgaaccggttggctggaagattcagctctttccaggtgacgccctcagttgcagccacttcggcgctgatgccgtctaggatctctgccatttcagtgcggacttcctctgtgtcttctcctccacggacccagatcagggattgcagcgcctcatcatgtcgaccgacactggcgagccatcgcacactctccttgagaaacagcatgccgaggcccaggatccccgccggcacgagttgcagtccgatagggatctgccactggcgatcagaggatgcgacgtatttttcgacggcgtagtcgatccagtacgaggtcatgacgccgagcgtgaagaagaactggaacagactgcccaactgtcctcggatctctttagggctcatttccgcgctgtccacgacgggatgtcagcttagttcaagatcaatataaggcagcagaggattacctgtacatgggcaccatcacggtggccatgccgacaccgacaccgctgatcacacgagcagcataaaacgcgccaatcgagtgcgttggagccacctggatgatcccgccgatacagaagatcaaagaggcgagcgcgatcgaccatcggcgaccaaactttttggtgaacggccaggcgaaaaagcaggaaaagaaagctagatcgaggacacaaggtcagcaagctgccagaactgcctgggagtcgagacaaggacatgcctccggcctgcagaagactggtagagtttgaagcgatatctgcccgctctgcctctgagtatcgaaacgactgcttgaacgagtccagagtaaggattccgccaataatgcccgtatcgtacgcgaacaggaaggatccaacgcagcagaccgatactaagaacgtcgcccgtaggcgaccgagcagtttacccataacgacggacgaaacagcagatcagtctgagtacgctagtcgctggtatcgacagtattagaagtatcgacaggacgacaaggagaaagggtaatctgcgactgatcggccggccgtgcactctttttatgctggctgatgcggggaagctctacagctctcatgaccagacacgtccaagcaaccagcgggcacgagaacatggtatggtggaatggcggcatggcgccgggtgttgacgatataaagccacgttattgcttagtttgaggaactcatactgtgattcgagggtggtcgataacatcatcgcggctcggcatagcaccatctgtatcgagcccccggaagagtaccgagagacaagtggaaataacaggaatagtccagcaatctgaggcaatcagatagcgccactgtcgccattccaagaatagat

SEQ ID NO: 1018 - DNA, 2178 bp, Emericella nidulans
ccatggaacgtgccgccgtgagcttgggtaagcttgtcggttacgtctccgccggtacggttgagtacctgtactctcacgctgatgacaaattttacttcctggagctcaacccgcgtctgcaggtcgagcatcccaccactgaaatggtcactggtgtcaacttgcccgctgcccagctccagattgccatgggtatccctctgcaccgtatccgtgacattcgtctgctttatggcgttgaccccaatacatcggcggagatagacttcgacttttccagcgaagagagcttcaagactcagcgccgtcctcagcccaagggacacaccaccgcttgccgtatcacttccgaagatcctggtgagggtttcaagccctctagcggaaccatgcacgagttgaacttccgaagttcatctaacgtttggggttacttctctgtcggaacagcgggtggtatccacagtttctccgacagccagttcggtcacatcttcgcgtacggagagaaccgctccgcctcgcgaaagcacatggtcattgccctgaaagaattgagcattcgtggtgatttccggacgacaattgagtacctgatcaagctcttggagacgccagcttttgaggaaaacaagatcaccactggttggttggatcagctgatttccaacaagctgactgcagagcgtcccgatacaacgatcgctgtgctctgcggtgctgtcactaaagcccatcaggctagcgaggcgcgccttgaagagtaccgtaacggcattcagaagggtcaggttccctctaaggatgtcctgaaaaccgtcttccccgtggacttcatctacgagggtaagcggtacaagttcactgccacccgtgccggtcttgacagctatcacctcttcatcaacggttctaagtgctcgattggtgtgcgtgccttggctgacggtggactactcgtcctcctcaacggtcggagccataacgtatactggaaggaggaggccgctgctacccgtattagtgtggacggcaagacttgcttgctcgagcaggagaatgatcctactcaacttcgtactccctctcccggaaagttggtcaagttcaccgtcgagaacggagagcatgtccgcgccggtcagccttttgctgaagttgaagtcatgaagatgtacatgcctctgatcgcccaggaggacggtattgtccagctcatcaagcagcccggtgccacccttgaggctggtgacattcttggtatccttgcccttgacgatccatcccgtgtcaagcatgctcagccggtcaccgagcagcttccccaattggaccccctcaggtcgttggtaataagcctgctcaacgatttttcctcttgcacagcattttggagaacatcttgaagggtttcgacaaccaggttattatgaactctactctcaaggagctcatcgaggtccttcgcgaccccgagttgccttacagcgaatggaacgcccagtcttccgccctccactcccgcatgccccagaaattggatgctcagcttcaaaacattgttgaccgcgctcggtcacgcaaggccgagtttccggccaggcagctgcagaagactatggtccgattcattgaagagaatgtcaaccctgctgacgccgagatcctgaagactacacttcttcctttggttcaggttattaataactacatcgaaggcttgaaggcgcacgaatacaaggtgttcgttggacttctcgagcagtactacgctgtggagaagctgttctctggcagcaaagctcgatatgaggatggtatcctcgccctccgtgaggagcacaaggatgatgttgccactattgtgcagatcgccctgtctcacagccgcatcggcgccaagaacgacctcatcctcgcgatcctgtcgatctaccgtcccaaccagcctggaatggccaatgtgggccagtacttcaagtcgattctgaagaaactgactgaaattgagtcgcgtgctgcggccaaggtcaccctgaaggctcgtgaagtcctcattcagtgcgctctgccttcgctggaggagcgtctttctcagatggagctcattctgcgctcctctgttgcggagtctcagtacggcgagaccggctgggcccaccgtgagcccgatct

SEQ ID NO: 1019 - DNA, 5411 bp, Emericella nidulans
tcatgtgccctacagcttcatcgttgctggtatcgtcgtcttgggtggtgctttgtttcggggctggagtttcttttattttcggatctgccgtcttcttcgaggacttcgcaggttttgggggctttgcgtccggcgtgatgtcgatggttggctgcacatcgtcgtccttggatcggcgcttctcttctgctgttggcatgagccaggggttttcttcttcggcgtccgactcctgggggacgggttcaggcttcggtggagcgcggggcttgtcgtttgcttttgaggttgtcttggttccggtagtggcagccttcgtctcctgttcatcatcacgttctggctcctcatctgaccctggtgcttcctcgaactcattgccgttgacttgcttcttgcccttatcggccttcttgtccgtgacgccgaacttgcgacgtccctcttccgattctgcttcggactgagaatcctggccttgtagctcacggttcaggcgacggatttcggcatcattcgcggccttacgagcagcctctgcattctgcataaatttcatggacagtagcttagcatgcgggcctttgaattcctcatcacagcttcgtcgcttcgattttgttgagcttcttcagcagcttgcgcttttctgatcagagtcctgttctttccaggattctcatcttccgactcagattcagagctggatcccaggtagtcgtcatcacctctagtcacacgcttgccttcgatgcgttgccgtaattcttcctcccgctgggctaactcaagagcaccatgtcgggcatcttcatcccaggcagttcggccagtctgtttcaggctctttgcccacttgctttccttgtgcttgttgcccattcgtgcctcggctcgtagtcgctcattcttctcccggtcctgctcatccaggtcgatgccggcatcaagcagagcttgacgctccttctcctccatgcgctcttgctccttgcgatggacacggcggtaggacttgctcttgatcttcttgatccgcttagctcggacttcctctctgaacatgaggtcgcggtgttgcgcaactcggcacgacgggctcggatttcttcgatcggtattttccgcgcctgcagctcttcgaattcctgcacttggtcttcggcagactttcctgcttatcagcaagtccactctccacgaggatatcttggattgtgttctcaaggctggtttgcggtttgatgacgcccatgcggtgcacaacttgcgcatctggatcaggcagtgggaacatcaggtgctcagccctgcggttggccttgaccgtctcaatccagcggctaagagtctctttgctcttctcatacgcggcttcacgttcgagacggtcctgttggcgcttggcaagaggagcatccagcttccctggaatgcctgatgaagtcttctgttcggatattgcggagtcgacatgtttgagtgagttcttaagccgagaatcagtgaccgacggaaggaggtcggcgactgttagttttcgtgtagatggcaatccaaactcggacgggttgagatgctcttcgccgctttttgttttctttgctggcttagcattttccgctctcatggaatccacaaagctttgaagttttgagaggccatcttcgtcttcaagatcgtcgtcggacaatgaaagttcggatccgtcttcgtcatctgactcactttcgtcttcgctttcggaggcctcctcatcagacccctcactctcgtcctgcttcttggatttggccgccttcttagcttcggcctcttcctcagcggcattcatatcccacgcagcaaccaagtcaatggcatcctcaccaagactgtcatcatcttccatatcttcatccgcatcagactcttctccctctgagagattaatctcccgctcatgcctcggcttttgttttttctttgcctttgactttccctggaacgtcgaacttccgcggaaagtgaagccctcaaacctctcctcgtcgctggaacccatagcttcatcactatccagctcactgtcattatcactgtcgacgccaatcttccatttgtggccttcaccatcactcccctcgttcgagtctatttcggaatcctcgtcatcgccagtgcggcgacgcttgttaccaggaccgtgtgaatcgtcctcgtctcgatcggtgtcccgcttgcgcttgaagtaatcatcatcgtctccaagccggttccgtcgaattttggccctcgtaggattttcggcttctgcgatcgaaagcgcgttgaggattttgccggattttctcttctgcgcgggttttttcttcgacacctcgtcgcgcggaccgcgctgttgggtaaactggcgaggcattgtgacgccgtacaagagaagcagagggcgctacgaaagaaaacctcagctatttattccttccgtgagagctgagttggtagcttgtggtgtgacaattttgcttatcgatggcggcagaaaaaaataatttcttggcaaggcggagagcttgaccgaccgccaactgacttcgatctccgcatctccgtcgatgataactgttattccaaggtgaatttgttcgtcatcatacagtaacgccaagatgagaccttctcaaccgatgatggcgcgtctgcgcttgacgacgaagcaggttaatggtggctactacaagggaaaccggacgggttcgatgggttactttgcgaagaacggatcatacgtgattgcttggaagaaggttcgcacatatgttgtgcctgagaatctgaacgagttcaaggtataccatattactgtgcgcacgtatatgtgcttcgaggctaatcgacgtccagctcaccccgttcgtcacgaaagtcatggcccccacaaagagcagatacacccacgagattgagaggaacggcaagattttcatagctgagaggggcctccaaggaaaggattttctagatctctgggcatcagagaacggcgaggaggttctcaagcaggaggagatggacaaggaggaggctgcgcgccaggccaaagcagccgccaaagccgcaaggcgcctcgtcaatagatgacagcgatgcatctgagaaagttgacgttaggtaggtttcagcatctgaacgttctgttaggttgttctgacaaattacagtatacccgtgatggacgtacaacgaccgacccgtgcgcggagccttgataatccatcggcagtgtcggattgattgtatcatatgtacagtattagcattgaaaggggacccatttcaactactggagcacagtactcctgacggggtacgtgttgctcaggttatattggttcactggcgcatatatggggtttcatgatagcatggctgctttccttttttgtctttggcgatgtgactgacacatagaacaatatacggataccctaaataccgacaatgggatttctggactgtacaagattcaccaaataaagtatcaacggcctaactgtatagatggagaaagatcggaactgagtaaccgaggtgcctgtatatgggacagcgtctgttccttgcggtgatgtctgcctggcatccaactccaatttaacgccctaatgcatcttgattcttacaaaatactctggacttctttcctgataaggcttttaactagcgcatagaacgattatgtcctggccattattggtgcccgcgtctcctcggttcatgccccatcacattcatgatcagctaacgacacgaactcttgactcatgcggggaagtcgaggcatatgatcaggctcgtcgagagagatcagcatgatagcacaggctatacaaggttaacagagtcaaatctagctcttgtcctccgctgccaacggctcctcggcttgtccagaagccttccgattgcttatattcatccgaagtcagatacctctactctccaaattattgagaaacttcagtctacatagtcaacttcactgtcttgactgaagagtcctaagatgccgggatcaaaatatgccattaaagatcctttctcctaccataccggcctcaattcataccatgagtacgcccccccagctcaacaacctatggcttttctaacatgggcgaccagatcaacagccatcgaagacgccctaccccgcccgcaaagtctcccccaacggcacggcttaggcctctaccctgaacgtatcagcggcacatccttcaccgcaaagcgcgccgtgaacaaacagacattcctctaccgcatcctcccatcgactgcacagtcctcgtggaacaggctctcggaccatccgctgaaccatcgctcgcattcagcagagctcaactttgtaccagaccaactcatatggcctcctgcccaagtacaggaggacaagacattccttgatggactacagatgataggaggtgcaggggacccaacggtcaaaaatggcgtggcgtattatgtctacacctgtggtctcagcatggacgagaaacaggccttctactccgcagatggggacatgcttatcgttgcccagacggggatccttgatatccagaccgaaatgggtgatatacgagtgcgcccccgtgagatctgtgttgttcccaggggtatcagattccgagtttctttgcccaaggggccgtctaggggtcatgttattgaggcgtactccgggcatttcgacctccctgagctagggcctatcgggtctctgggcctggcaaatgtgagggatttcgagattccacgcgcgagatacgtagatacggaagagattacagaggtcatcgcaaagtttggaggtggggtctacagcgcagagatgaaggggagtgcgtttaatgctgttgcatggcatgggacgtattatccattcaaatatgacctaggtaagtcctcccagcgtcccaataacaagttcgagagactcaatagctgcgtctaccaggaaaattcatgcctatgggctcaacgctctacgaccaccaggtccgtcttccctttagcagttctttgtccagcccaaataaccgccgcaggacccatcaatctacgtagtcctcacctgcccctccgacaagcccgatcatgcagccgtcgacttccttgtcctcgggccccgctggatggttatggaagacacattccaaatcccgtatttccatcgcaacaccatgtccgaattttcctccgtaatcagcgggggatttgacctctcgcgcgtgccgacgccgatgtacggaatgagcgggctgcacaacgtcctcagtccgcatgggctgtcggcgccggagacagaaaatgcaataaagaaggtgctgaggccggagcgagtgccggatgatacgatg

SEQ ID NO: 1020 - DNA, 3570 bp, Emericella nidulans
taaattgtatactgtacaaggcgagggtctgacaatgaataagttatgaaaacgcgcaccacctcgaaacacgcatgttcctgctcctagtctcttcgttagagaatatcgaataagcaatcttggacgagacaacaaagatacccttaacagatcttgaggctcgactgccgaggcatctagcctcgttggctgctcgtgcggggtacgatcccccgcagcagccactctaacaaagggcttagcgttgtggcccgttactccttcaggcaggtatactcgatggtgcgttctatctgggtaacgatcacagaacggtacagagctaagcctaatgcaggcgtgaaagtatatagtactagcgaacacaccactagatttttgttttttttttatactataagggctcagggacgggttatgaagggcgttttcaggcgggtcctgatgtaccttcagctgaaaatcgattgtctaggtacaagggagcgcgggtcaggggaatttttggcgaaggtctactatggcttgcctttggattctcgataggtggcgggtcacggagctagtatcagtctggaccgacagaagaaggcgggataaatgccactgtctctccgcttcccaatatcctaaaagtctctacctacctacctaggcatgatcgatatgctgccttttgtactttccggggggcctgtagcacgtcaatgatgcgcatgcctgtcacaacacagaccctcgtatactctgcataaactgctcttatgatctaagtcctactatatgagaataccataaaattcactttgcactacagtgttctcttgccttaaacacacactcaaatgagtaccgtcactcgccctgcatattccctattgacgggcaacagaaaactggcatgcatgttgcccctgtcctttacagaccaactctcatatatacctcatacccagaccatgagttcacaatagtcgcacgatgagggaaggcatttattcaagcttgctagcaagattctctacaatcctgccggcgacttcaactcgttagaccggaacacaaaaaaatgactgaattgggcgaacagactatttctcggcatctccccatcattgtcgatatcgatcttctcgaattcctttttggcatcgtgggccgaaaggccatgctgcttgcagatacggacaacctcctctttggagaccatgtcggtggagtcggttccctaaccggttgaaagggtgtgagtgaggttgatatttggggcttaagcagttgtagtacgaaccagcgactgcagcccggcgagcttttttgtcctgttttgtgaagcaaggtgttagaagttcttaggtttatgatggggttatataaaacagggtgtggcatgggcactgatgggctaaccatgatgatgattcgatgtcggaagctgacgactgagtgatatggaattatggagatagagctgtcgatcaatttcagcgggtttgacattaaacagcaggaaaatcgcgacagtacgaatgtgatttttatctgggtccgcaaccgatatttatcagctttcgaggatggtctaggccagacacgacatcaccatgtatggttctctgggtcgaatttggtggtgattagaacttaccatgactcttggtgaactctagttggctctccaatcggcgccttcacataaacccagtctgagtttcagaagaacggctatactgcgtggcttgcatctggatcctcctttccatctgcttttgataacaaggttaggttcttgtacgatctgcaaattcaatagtttgatgttttggtgcgctgaatgtcgctttattcataatatccaccaacccatgtggacagaaccatcagctattgcaacggtgtcaaccgggagacgctgattccagaatgcccatgaacatgctatttttgccgactagtcatctcgcgcctgtcgactcagtgcctctgctattcgtcgcgcttgggatcacaagtcacattgaccgtgagagtctgctccattatccaggcgcagctgcacaatcttctgacgacttcgcaacgaggcagcctgaagagccttgcgatatttgccgccccgcgcgttgatatctgctcccttgtccaggagcagttgtacaacctcttgatggccttcgtatgcagtagcctggagagcattgtaataatcaccccccgcccatgaagactacagtgattttatcggaggcgggcgacccctggcccaaaggtggagtaggctgcattaagtgcagatatatcaaactgaccactggtgcgttgagtcgttttatggaggcgcgctgtgctatggtcagacagccgccagctcgtgcccagtctcgatttagcgcccaggcaccagagctcgaaaggagggaagagtatgaaatggtaaagttcccttggactcgagtgtacgtccgatgagttaaaataataaatattatacgtagttgctactaggtattatttattgctgccaatctggctggccacttctcatcgtgggcagaagatcggcggacagtccgacaagactggcggaaaacctccaagtgctcggccactgtcagagctgccagcagtgcctaattgagaataaaaccagtgatatagaattagacattgacatttatgaaggtaatgttcttctaacaacggtgtataattgcttagataagtggtcggaggcctcaatatatgcggacgcggaccgggccaccaagggccaaggaaagcgtcgtatcccatatcctccattgccagtgtgttccttcattagtagcgtatgtagcaatcaaaagaggtgttgtactgcggctcttcacaatttggatgtatctttccgagaaagaacaagccttaaggagttttcatgaatttgggcaagctttcttgatataagcttctgttggcttggagatatgacgcctttttggcttagcattaaagccttgatggctttcaagttattacaagtaagaaaactaaataaataattgatctggtgaggtagcagatagagtaaatgaactcccgtattacagtaaaatatagctattggacgtgctctgtcgtacttgtgaaatgggcaggtcttctatgcgctagcatggacctaactgctgaccaaaaggtacaagacagctggttattctaatcagttacatctagcaccctatatagcggtgaaggccattcctgagccttgtcctgggttcattccataacaaccggggcgccatcaatgtggtcccggttggcctgttagggacttagtagtcaagttggcgatgagatgcttcttgtcttattttaatatgacttcaagcattcctgatttaacttgctttggggcacgggatattggtgttgattatgggctggacatgagaacttgccacctaggttgtacagttactggccatctgtagagcatcacatcatgctgataatgtcaacagaatgaagctcaatttaagatgaactttcctggacttcgggtgccggtcgagtcttagcaac

SEQ ID NO: 1021 - DNA, 1407 bp, Emericella nidulans
tatacggatatgagtgagtggctcagccatattgaatctcaccttaggagttagtctgttgagaaagtttcattgccgccatcatgtacccagggacatacatcactggctgagctagcctatcatcttgaagatgcccactactataagccttaccgcgggaaaaagggtcattagagtcttgaggtattggttcttttctgggtacgttaatctgggtttataccttatacacgaactcaggataaatcgcttgttgatcatgtaaccattgcacttgagtccgcaaaccctaatagattgtcctgatatatactttcaatgtgagctatgtatcggcagctccttgccacttctcagacctcatacttcagtaaaaacatagataatcatcaaacttctgggggcggccagactgtacttataatatcatggcaaccagtatattgtaagaacttagttcctcaaggagggttagcccttttggctgagtgggagttcaaaatatcaaaaccttcaatttagtgtttttgttgtgaatacgctcaaaggggaaaggacagaagaaacatatcaactacatgaacgtagcctataaaggatcggatgcaatatagcgattgactgtctgctgtgtcttgattacttgatatatcgaggtgccagaacctccggggctgggtatcgctatcggctgcttatatcacgtggcttagtagccagtgatttcatttcggacactgttgctcgagatgaaccgtcacaagaactttccgttcttcttgcctgttcttgagtctgtctcccttaaatttcctgctttatggcttgctcgtccgtgctggagtggaggggggagggtgcgaatgtgaactggcggaggtgtgccgctggcgcgacctcggagtcttgttcctaggtgctgccatggctgtggagtggttgcttggggcttagtaggggtgtcgtatgagggtcggaaggagcagcaaggctatggttttagggccgctcgcagttttgcgagtagcctatatgcggcctctttatccattgctgcttcaatatgggccaacgccttatcgcgcacgatggctttccatgatcgggtgttcaccaggacactttctgtggctcgtgtccaatttggagtatcccttgggaaacggcggagggggacgtgattgtggatgcaactccgagtgcttagctattgtattcgttatagacagaatcacctagcgttactagtgccaaacagcggaaactccaaattttttctttacaactgtactttgcaaaataacacatcacctgacatacctagtaattgaaggcaggcgctcattccgctggctgacccgcagttcccccagcacaatcttgcatagtgaatgctttgatgat

SEQ ID NO: 1022 - DNA, 9163 bp, Emericella nidulans
tcagttttgagtccccttcttgtgatccaatcccagtctccttacccgggtactctagttactcagcctccgccaccaacgcagcaaccgcctcctgttcccggcacagcgtcagggtctgcaccctatccgtcggcaagtcccagcgccgccaactaccaggcctacaggccaccgcaaggcggaatacctaaccataaccccgctgcattctatcagtagcgccttgacgtatgtcttcccaactgctgtacgctgggcgcttgcctggcttgtcgtatttgtgattcatgtcgccggggtcgtcctctcgacggaggtttgttgcttttgatgtgagccatggcgtacttgtagtcatattgtgtgtctatctattattctggccccaataaaaggcaccgcgagaccatattcgtctatctgctaccttagcctcctagcctgtataccgtaaaattgcacaaaacgaggtgccatatcattttatgcccaccaacacgtgacgcgtcttggcgtctgatcctctgcagttgcctcgttgataccacaagagaatcagtgacaatttgcgctttttctctctcctgcagtgttagtcccgatttacgggggagtgcccactctatattgatacggctccagatatatctcttccgcgtgcgcgcctagccccgaggcttacacccagttcatcccccgcactccacttaacgatgcctgcttttgcccgactttcgcattggcagagtcaggccactctctaaacagttacaccgagggcatgataacaccttaaagcttggatcaatttgggctttgctcccagatatccagtgccatggaggcggactggaacgagctgttacgaattccgcttccccctccgaatccgcatgggcttccgaccgttgcgacaaccattgcttttgacgatgtgtcggaacttttgtgggcggggaacgaatatgtctgttgtatctgaagtggattagcagcaatgtgctgattgaattattgtctctagggccggattacctcgttctatggccccgagctgcagaggtacacctccgttcgtgcccatcccgtcgccgaagggccggtgcgacaaatattattccacgagaggggagttatatctatttcatcgaggagtgtgcacatgattacacggcgtggtctgacacaatggcacatcacccacgatgagatcacggaccttcgctgtatgagcttcacggctcagacaaacaaaattatagttgcgggatgccagaaggcaatgtttaccatcgacattgacaaaggaactattgtcgataagctccggactgaacacaactatgtcttgatgaagagaagccgctacctgtgtgctgcgacagatacaggttctgtcaatgcgttaagcctgacggactttagcgtcgtaaagtcctggaaggctcatggggcggcggtcaatgacatggatgccaggggcgatcttttagtaacttgtggcttctcaatcagacaaacgggttctcccattgtcgatccactggcgaacgtgtatgatttaaaaacgctatctccattaccccctattccgttccacgcgggggctgcatatgttcgtatgcatccaaagctacagacaacaagttttgttgcatctcagagtggacagcttcaagttgtggacttgatgaatccgaacgcattcaagctccgccaagccactgtctccttcatgctaggtatagaaatctcgccatccggagaggcactggccatcaatgatgcagaatgcttcatccagctttggggttctccggcgaaaatccacttcaacgaaatgagcaaggaagttgaatttgcagacgtcactccgcggccgccccaggttgactggtcgccagagatacctttgaatgtgattggtatgccgtactaccacgaacggctgttatccgcatggccaagccatctcttgttcgaggtcggcagtccgccagctcctatagatccatcaatagtcccctatcttcgctctggggagatgggtcaatacgcagcgaacccgaagaaaacccgaagataccaagttgaaaacactcgcgcattagcctctacggaaccaacactgattgcgccgaaattcctgagcgaaaaggccagagagcagagcaagaaggcagatgaccctgtcggagataccgctgcgtcccttgctggcgcaaggattagcggagagtcagaagatgatcctcttctgaagtacagcaacgttgaaatcaagtatagtagatttggagtggatgactttgatttcaggtatgaatattgctattcagctactagctttagctaacttcaacagattctataatcagacttgtttctccgggttggagacgcatattgcgaactcctttactaattccctccttcaactcctcaagttcattcctctgatacggaacattgctcttcaccatgctgcgacgtcatgtatagctgaaagctgtctgctttgtgagatgggttatctcttcgatatgcttgaaaaggccaacggacaaaattgccaagctacaaatctgctcaaaaccttcagtagcttccgcgaagcttcaaatcttggtctactggaagaaaacctcacaaacaagtcgctgtcatcggcgattcaggctgtgaacaggttctttcttgggcagatcgcgcaggactaccgtagaatcgctccaaactcggaagaattggatatgagactggcaaccatcgcgtcagagtcgatacggtgcatgttctgtcagaacgagattgtgaggcctgggaatacactcgtcaacgagcttatgtaccccgcaatcgatatgaagcaagctcgtaggaaccatacattacgattctcgaatatcttgagggcgagcattgaacgagaggcgcagaaccggggatggtgccacatttgccggcgatatcaacaatctgtcatgcggaaaacagcgcaccgcatgccacatgtgctgatgcttaatgctgcaataaatagccctgcttgccgacgtctctggacaattcctgggtggctgccagaggaaattggaatcgtccttgaaggtggtcaggttctctgctttgaaggggaagatctgaggatgcgcatacagggacaaatgcctgggctaatcatctatgacctggttgggttggttgcagaaattaacataccggagcatcagaaggcgcatctagtatcgtttatcaatgtctccgtttcgtctcgtgagcgggagacccggagtaaatggcacctttttaatgacttcttggtcacagaagtggacaaggaagaagctctgcgattcaaccagtcgtggaagtcaccatgtgtgctggcttttcaggtcagagatgcgcggcatatggtcgatgatacatggaagaacttcttggacacgactctgcttttccgtgactggtccctgaagtaagcaaccctagacggtagttggtattgtctaactaacgttgatagtaatgggcgccccgtcgaatcgcgtgttatgctttctgacgaggagaaaccaacacctggaactccggttgctctcgacaccgagtttgtcgacctcgaaaaggctgaaataaacgtcaaagccgacggctcgcaggaaatcgtgcggccgagcaagagcggacttgccagggtgtcagtccttcgaggctctggggagcgagaaggcgttcctttcattgatgattatatctctgttaaagagcccattgttgactatgtaacgcaatattctggcatcaaaccaggtgatttggatccgcggaccaggccacacaacattgggccacttaaggttgcatacataaagctgtggttactgctcagcctaggctgcgtgttcgctggtcatgggttggcatcggactttcgacaagtcgatatgcaagtccctaggaagcaaactgtggatacacaatacttgttcttccacccctcaaagaaccgacggctcagtctccggtatcttgcgtgggctgtgtttaaagaatacatacaagaagaaccagccgacagcaaccagggccatgactcaatcgaggacgcacgcatggctctgcgcctatggaagaagttccaagagtacgaggacgccggtattgtgggacaaatcctggaagaaatcttccgcgagggctcaaaattgggattccgaccgccgcctcgcaacggcgtaactacagtgctttctcggcccggaacggccgtgacaatgcagaacaacagcggccgcaacacacccagtacacctgatgtcggtgctgcggcgagcgcacctacgaccccgcgacaggcgttccgacggtctattgcgttgacaccgagcaacggcacattctctggacctggatcgggggagttctttaccgggagtccactgaagtaaaactctgccctagcctgtatggagtgaacgcaccctaagtacctgaaacgatctaagaatgattggctgccattggaggcagatgcattggtcgatagaacttatcattaagaattgattctactttttctcgatatctagccttcctttccgcagtatgcttaaacagtatctttcccattgtcaagtcaagactggtgctgtctagaaaggtggctgcggttggttgacacggtggtttccaccttcgacaggaacatatatttctatctaaagacgacgtccttacagacatattatgccatacttcccactatctctacatagttcctctgaattagccctgaatccccccagtcctcaccatgtctgcagtctcgccagctgccggcgcccttgatagccaagacactgttgttagtttcgccttgtcgatagccaactgcgctctaacattgtctagccagccgctctcgagttgtcccagttgctacccacttcaatatgttcagggtcctggtcgttatcgacaaaccggctaggcgaggctctgctggccacgttcaggggtactattggcaatgaggccctcgctccatgtgcggtatcccgtctccctgaagcactcagagctgaccatatcagaacgaatagttatggcctgattcgaggtttctcgcttgttatccttgctgagtttttagtgctgacgcagcatgaacagaggcatcctttacgccatgagcagcttagaactggtcgatctcgtcggagaggatccatacagcgcacacaccctcagcagctatttactgaagcttcatctgttgttctttacgtatttcacttgtatgttacttccagactgtgtccagtgtatagtagccctagcacgggacaaccgaagcccccctaacagggccatttgtcatggaaagctctccacaaacctcacctacacattccactatgctatgcccaattgcaacattgctatgaaatgttgggaaagcacgagcacaagaagctgcacctactccatcacggtcgcggaagggctgcatggacagtttggcccgtcacggttgacgagttcttcaatcctcgcaaatcatcgggtcgtctacaggaacttggatataacctcatgtccttcgtagaagctagccctgggacaacaacaaagatggccaatatcgacggtaacggggcgacattgcgtttcgggatcataagaggcatttcttagttctctgcgagggatctatcagatgaagaattcagcttgatttcggcgctatcgaccccggatgcacagtgattacctggaaatcatgaagacactggctggccacggcctatttagaggacactgatctactccctgccatgccctgcataacctgttcaatctggatatgtgaagctggctcggttaagggttacgtttgaggctagggagctgtgggttgcatgttgactttcgagaggattaactaccttatgcagctgggagtagccacagggatcaatatcaaggggagggttgcggcttctcttctacgcatactgtatacttaaagggctgcggcagaaactgaggtatgtaaatagctgtatcctgtatatttcttctaaattttgtttatatatcagaataaacaaatgccgactgtataaaattatatcaatcgcacatagactttccagtaatctataccaactccacgctaccatacacccaatccaccacataaccatctcatgtccactagaaaccccactgccgtatccagttcaccatcaatgccccatccacccccttcaggcttgccatcgtcctactcgccttctgcgcgttaaccgtgctggtttccgcagacagcgtgtctccgttcgccaggtcccggaagaaggggaggagcttgagggctggcttgtcggagatatcgctgtccgtcggactcttgattttctcaagctcgttcatccaaatggtgagcggggctggtgtcacaggggctgtagacgtggacaacgaggactgaattgaggggaggagagaagaccagggtgtaattgcggggtttgtgagatggaagaatgcggcatttgattcggtctgagtttcgtgcagccgaatttgcagtatctcgagaatgattgttgcgagagtgtcctgtgagcacttagtaccttaattaccaaagaacaggtctgattatcaaagagtggacatacaacaggaatccaatcaacacccattcctcccaacgaatccggtacaacacccagccccttactagtcttcagcaagatcggcacccactcggtcggattccacagcccggcaacagtagtagggccagcaatctgcccaacacgcaatatactcgtcggaacaccagactgtctcgacgcttccagacagatccgctcgccaacgtgcttggattcgccgtagccttgctcgagggcgacatcaggtgtttccatgggaatttctgggacggagttgtcggtatctgtgggtttccagtttccaattgtgccgacagaagacacgaatgcgacatgtgcggtgtaacgactgttgatactgaagtcgatcaagcgccgcacgccgcagatttggctttcgaagaactcgacggggaggttgaagttgactgtccagccgttgtggataataagggttacggtttcgaggagggtggcgagtttctcttgttcgaggccgaggtttggttcgctgagggcggctgtcagaaattcgactctgccttcgtcggtgagcggcgtggcatcgagcgccttctcttcgaaagaggtggtttgtttcgtcttcgcagtgtctgagcggttgaggcagtagatcttggaaatgctgttatcttgcaggagcgtgttgaggaggtacgtccctaacgacccagttgagccggtgaggatgacggtttgactggatgagacgggccgttgtcgttgagggtcggatgggaggtcgtgtgtgtatttggtgaccaggttcgtaatctgttcagttcgtgatatttccgtggcaccgttgctggtgccattgaggatggaaaacaaggacgcagctaacttgtttatgcttggacgagcatagatctgctgctgcgtaatgtcggcagaaagcgctgaattcagggcttgtgcaagctgcacagtctgcaatgagtccatcccggccgcataaaagtcttcgtcgtctgcgatgtcaggtctgtcgagcaaagtcgtgatcttcacacggacccactgtgttaagctatgtaggttgagcgtcaatgggaggctctccatactattctccgctgatttggcgtatatggcctcaatttcctctgcatagtcgttgttgacaagccggcgttgcgttgtacctttcggagtcaacttgaaaggcttgctcggtgaggacagacgaatatggctgcgcatgacccggccgtaattgggtactacctcgttggcgcgctgaatagtaggccagaggttgtcgatgtattctttctcgtcgatagaattgttatcaggccagactggctcgataagcaacgcggactgaaacctcttctcaccaacaagcactactctcgaaaccgacggatgcgcctcaatcatcttctccagcgtaatggggttgagtttctcgccgttgctgaggacaataacgtcgtccagtcggccatggtacgcccaacagttgggattatctggatgctggacaaacaaatccttggtgtggtattcggtgaggtcggggaaagtgtggaagatgccctggaaagtctttgtattttctcctcggcggataactagttcatgaagaccatcgtttacatgctgcatgtcgattccgtataccgggttccactcgaaatagttccacttcgcctcgtcctcaggagcgagggaactaactagccctatctcgctggacccgaggaccgtgcggagggtcgtgtacttccgaaggcgctctcctgtttctaaggctagcggtgcaccgccgaaacaagtgtatttcacagtcttcagagcagccagtgcagcttctgagtgactcatatcttccaggagtgatggagggatcattacaaaatctggtcttgtagcattaatggtatcggtcagaagctggacggaaaggggcccatcaggaattgaaatgaacgggaatccatggaagattgatccgaatggcccgatgaggcccatcaaatgaaagttcggcgtgatagagagaagtagggcgcccgagcccacagaaaacccgttgtacagagcggatttcctgccggctgggatgatatgcggcgcgtggtcccaggttgcaaggaagccgtgggttaggggcactggctttggcatcccggttgtgccggagctgtggattatgaacgcgactgtgtcttccattgctgcatatggcgttgtgaacgggtaggtctcggaatttgagctaagaaggtctgctgttgccggcgcctcgaggtagaccgtgctcggtcgagatgctttgatctccatcgttcgtctctgcgtttcaggcgtaaagagcattacatggcagttggttgcgttgaggatatgctggtatgcctcgtctgagagacgggtagaaggcaggaaaggcgtatggccggtctttgcgcaagagagaaggaagatgtagt

SEQ ID NO: 1023 - DNA, 2460 bp, Emericella nidulans
ctggggcttcaggaaccgccgggtgaaaaacaaaagcaaggccttgggtccgtcctaagggatcaaaacagctcataccaacggataagtccctgtgcccagcaaaaaaaacaactttcatcatggaatgctttccatcattgttcacacatttctccgtcagaatgtccccgtgtgtcatctcttctaccgggaaacagggatgcttcattcccgtgcactaagcacaggccggtgcgctgcagccatcaagttgggccagattaatgagtcaccttgtccatgtcagaaagggatttttattgcgacttatcagtcaccctgcataagaagtgtcagcaatgcgaccatcttatgatagattacgaggactctcatcctaggtcacctccaactgagttatcagcatacacgggcaacaatattataccaaggagcacatcaccaaacgtaagtgtcagctgttttctcagaggacataactgaagctgacacatttgcgagggcggatatccactgttattccgacaagatgtttgcgcagggcacagtattaaaggtggcatctgctgtggattctcaaaacgtgattcacgtacgcgagacaccagcaagcgggaagacgatcctgtcccaactcctaagggaccattatctcgagaaccataggaatgtctttttacttgagatatggaagtcactggagttatttcctggcaatgactcctggctcgattcgtttgcttctgcggcaaaggtatcctgcatatagtattgaaaaaatttttgctcctcagactgtaatccttatggatgaggctcagggttcatacaccgactatggcttctggaacacgatcatcaaagagctaaggtctgccaaggtaaagacataaaaatatgtcttttctgtacctacggaagccctacgacaggcctggaggtagcccgcatatggtttactccagctacctttggcccctcgcagcgtactaaactgaccccaacctagcgaaacctctttgataaatgtcggtttattttttacaccagatgaattcgctgaggttgtgtggcttctatctacacatgcatatgacggaaagttcacaattgatggcgaggtcttgagatatttatacgagctcacagatgggcaccccggaggaatatcgtcattagttaattttctccactccgtatgtacctcagtgccaacctgggaggtgtagcgatcagctttaggcttgctttgtgcaactaacttaagcttaagtgcatcgtcgcaggtagccattgtagccatgattactctacctagaaaccttcaatgctatattatttaactcaataacagagaccaaaatctcaaaacccttgaccaaacagtaatataggccataatagggacctccagcaaaatgtctccaacgagggcattaacaagcccttaattacggatgatatgtataaaaacagacttgtttagccgtggcgggcttcagttagcctggaagtttagacgttttcacgccacctcagctcggcatagataggcccttaaatcacttaaagcacctgcagactgcctataggttcgcaacaataaatcaccgcgcggtgcctgctcttctggggttgaggagaatgatttacacagaccgaggaaggagcaccaacggatgtctggtgagcacagattccttgaatatgattgatatatgacggttaagataatgggcgttcgaattctcaacctcagccaatagttgggattcatgggatagtgaagaacgagtgaggaatttaccagtagccattatatgctagcggataaaaggcatccaaactgagactagatacctatgtatcttagccgcattaagggatttcgccgtttcagtgtctccaccctcgtatttgttgctgtagaggatacgtatacgtatggctaagtcaattttgacaccataagacgtgatctgaacattctgtatccctcaatccgctactctggtaccttttccttatagatcgcagatccaccagccagtacagagcaaaatggaacctctcctagctgcacatgaaattggtgaagggcttcctgttctgatcatccatggatggcagatggagggaaaagtcgaggagctagatttcgagccgattttgagtcaaactcagggagtccgccgaatttacgtcgaccttcctggcatgggcagcacccctgcgaacaatgtcagagatctggatgagatataccgtcgcttggtgcaattcatagattctcgcattgggaactcgggattcctagttgccggctcatcatgtggtggctaccttgcacgtgccatagctcagaaatatcgcgagcaagtcgacggtttactactacgcgtaccactcattgagccggaagatagcaagcgtgatctcgatgctttcaagcctctg

SEQ ID NO: 1024 - DNA, 7818 bp, Emericella nidulans
tccagactatatcgagagcaacgaagagagtcatattgcacacatggccacgtatacatcttccgtcccggtgggcgattatgcttacacaatgcataattctatgcttgcttatgatactgccaatgagggtaattcagtgtcagtgagcttaggttcggaaagtgcttttgcatacgatgtctctacctacccttcgtctacaacagctttgaactacgacctcaatcagttcgcttccctgcattcacacgctcccgggtctgacaatgcctcgacatattccagcgcgcaacgccattactggacccagccccatacatcaggcggcatggcctcttcaactcagactttgctttctcacccagcacagccctctcgcgccgctgagccttcagcggcccagaaaatacctcctggacagcttcaagatatcaacccttttcctcaagcatcggtatcagcgacctcccatcggcccatccagccaaaatctttggcaggaaagggtaagtatcttctggtaccagtccacttgcctaattgacacgagggaactaggtgccaggtcagaagcttctaggagcagcaccccgtatcccaatgtttattcacgaagtggatatgatatgatgggcatcttggtaggtcatggcttcatggttcttcttttccgttacttttcctctatctaatgtaatacataggccgaggtggtatcgagagataatcctaggattgaccttggcccggttgatctctcatgtgcctttgtactctgtgacctcacaatggaggacagtcctattgtttacgtatcccatgcctttgagcggctaacagggtacaatgagaaggaaattgttgggcgcaattgtcgcttccttcagagtcctgacgccaaggtggaaaaaggggagccccggaaatttgtcgactctcatacagtcagccgtttacgcagtgcggtcgatcgacgttctgaaattcaagtaagcatcatcaattaccgaaaaggagggcagccattcttgaacctggtgacgatgatcccggtgcgctggaacgctaaagattactacgtgggttttcaagtcgacctagtcgaacggccggaggctgtcacacgaagaaattcgggtatattttaactctcgtatctcggcttgagctaaactgactaaattgctagatgggacttacatgatagattaccaccggagccaactacctgcttatgtcgtccctgctgcggatatgtatcgggatggccatgttcctaccgccatgcttagtccgagacaagtgtcagtcattctgaacgactttgtcaaaggccagtcagtggcagtaaaccttttccaccatatgctagtcgagaacacagatgacctgatttttgtattgtcatttgagggtgaatttctctatttgtcgccgtcttgccaaacagtgttggagtacaagccgaacgatttgtgcggaaagacgttatcagcaatatgtcatccaagcgacattggccccgtgactcgcgacatgcggacttgcaccactggcgaccctattagcatactatatcgtattcggagaaaggaaagcggttatacctggttcgaaaaccatggaggatggcacatcacccaacgaggccggcaattcatggtcctcgtcggcagacttatccctatgtactcacctatccagcttgccaacgttgagagcggcgggctggccgagaacgacatctgggcgaagttatccttgtcagggatcatcctcttcatgtcctcaaaatctcgcgcagtcctcggccaaccgtccgacgacctcatagggaagcgtttacaagactttcttgtgaccgacaacttccactcggaaccggctgtccagcaagcgcttgaaacatcccgtcataatcaacaagctactttcacccacagaatccgccaccggaagggccatatcatttctgcccagatcactctatatccgggagacatagtatatggcgcttccaagcccgccttcttgatcgcacacctccgctttccaagggaactccaactacaagcatcaaccactgaagaccaaagcaatagccagagtcagagtcagacctcaagtgacaccggccctggagactacaagacaccccagaatcagcaacagacagccgaatcccatcaaaaaccgcacccgaacttcccgcaaccccccacttcctccgcaaccctagccgtgccgtcatcagcctcacccaactccgccgagccgcccactgaactcggcatgcacctcttcgaagaactcaacccaactcgcggctcaaactggcactttgagctgcgcgagctcgaaaagcagaataggcatttgaccgatgaagcgcagcgtcttcttgcccggagacgaaagcggaagaggaaacaaagcgctgctgctatggagaagagctgtgctatgtgtgggacacggacgacacctgagtggcggaggggtccgagtgggaatcgggacctatgtaatagctgtgggttgaggtgggcgaagcaggtgagaagtgcggccgcagtgcatagtcaggcaaagtctggcggtgagggttgatcatagatggtgctcctgaaacaactaggaagccgggccattgcaagaagtatgggtagagtattgtatgcgacttgcaattttaggtctacgttggtaacaattatggttgtcgggactctcgttacggatagtaattgatcagaccaaggtaggtatatgtactgtcgcagccaataccagtaatgattgaaaacaaaacgcaggggtatagaggtcagtcagccaaacaatcatcgtacgaaagaatatcacaaaccccagctcaacacccaacccgctaaagatgcattaacaatagccaacgaatatgtagcaagaaagaggatcaaacttcgatatcaactgtgatgccttccccctcactcgagctatgttcttcctcccgctccctgtacccctcgtccccggtagtaggttcagaaggaggtccatggccgccatcatcggtagaagtctctgttgagactccttggcggagacgctgtcggtccaactgcgcacggagccgtttattctcggcgtcgcgctcctccaggcgtctccgtgcgccattgcggtccaaaaggcgcgcttcccgttcggctttgagcctccgttccagctcgtgcagacgctttatccatacttcttgattgccgtggttatctgatggtttgaattgccgtgggcgagtgacagcaccggtgggttctgcaagatttgtcatttgggccggttggggaatactggatcttgcaggcgattcggctgctgtgttggcgcgtactagcgagccgcgttctgccaggtcaatagtggatgactgcggcgagcctgccacgccagctgtcgtgctgcggctgcgcgggtggttttgaagtaagttgagttcggccttcagcagtcggttttcaccgcgaagtttggataactctggcgagagccccgtctggtttcgagtctgtaactgggcgcgcatgttcattgtagtttcctccaaccggtctagcttcttgatccgcaaactaaacgcgtgctcaagggtttgatattgctttgtcaagttacgttcgacatccttgacacgggtcttgaagcttgatattacgttctccagcgtcttgaccgcgagaagaagattgcggctaaatcctggccagaacaggatattgccgataacttcctggcttggcaggtttccgttgatcaagctgttagaatgagcccagtctggcccacacatgccggacaggcgcttccagatagtcagcagcatggaattccgctcattgagctgctcgcgaaactgttgctcaaggctggtaaaacgcttacgatcttgatttcttgcattttcgagctccaggatacgggagttgttttgcgtgatggtacgcgatgcctgatggtgagatttgagcgcctgttcgaatgactgcttgtctgcgcgacgagcctggcgttcgcgttcaagcaattcagacagttttcgggactctagcccatgactctcgagtagcgcatcgcggtttcgtaataatgtttctttctcatccagcgtagagcgcgtgctctcgagctccagcgcagtgctttcgagctccttttgtaatttcatgatgttggcgatcaagctggaccgactgcccgtcaggtcaccaagagtctctcgcaggttgttctccagatcagtgagccgctccttccaggtattcgtctcgatttcttgcgccgaaaggttcttcttcaatttgcggcattcttccttggcggcggacacctcccgatttagctcgttcatgatccgctgtacctcttgcttttccttgcttccaacaacttcgcgctggtatctttcctcagctagacgtccctcaagttccttcgtcttgtccttttcgctctgaagactcattcgataggtcttgagctcagactctaggtcgccaatcttgatcttgtcgccatcttgttcctctcggagaaatgcaatctcattttggctcgactcaatttggacagtgagtcgttggactttggagttggcctcgtacaagctcttctccaaagattccatctcttcgttgcactgctcgagctcctgctgtacggccttgtagcgctgcagattattctgtgcatcctcttctagtcgaataatgccttcgctggcagagcgcatctccgcctgcagcgctcttaggttgtcatcctgcgttcgtaggtcttccgttaggcgttgacactcctcgatcttttggtccagttcgtcacctagagcgtccaactcttcctgggcttccgctctcaattcttggaaagcagcatcccgctcctcagctacttgcattgcctggtcgcgttcttgctgaagagttagtatatcttcctcagcttgctctacgtcagctgagtaagcgtttatctagctcctcgagttcctgtcgaatagcttgattttctaatttcagtgcggagacttggtcccggagttgcccgtttcgaagttcccagtcttcacgctccgcgtcgtcaatcggtgactgtccagtccggtcactgatgctggaagatggccgcccttgggccctgaaagcagaccgatctagtatgctgtcgccggcaatcgatcgatcacgacgttggccgagtttaagttcctcaatctcttggtataagcgttctttttctcggtttcgcgaggtcagcattgaggtctgcgcgctgacctccctccgcaattctgcgttctcctgtttcagtaattcaaattccatcacaagagtggaacttgaggagcttccggcagcagtattgcggtacagttctctgtccgaaacggccgaatgcgacaccagtgaatcaccacgattacggtggtcctgacctcaaaggcgccgcgggagctatggcgtaagtcgcctcgctcctgacacgcatcagttcttctcgtaatctcttgttttcctcatcagcctgttcgcgagctgcagtttctgcatcgagcatgtctttccacatatcctagaaagtatgtcagcgaacgtcctgtagctactaatcttgacttactctctcctctcttgctccagagtccgacccggttggcctgccatcattcagggatttcagcatctctgccagcctccgtttctcgctttccctcgcgatactctcagaccttagtcgttctatctcgagctcatacgtctccaccctttcacgcaaaaatagcagctcctcatcctgagcgtggtcacggtcttcttcatcggagccaccttccgggtcatggtttagcatcgactccttatctgactgctggtctttaagttgcttctccaaatcgcgaatcttccgcttcaacccttggttatccttctgtagcttcaacttatccgatttcaactcaacgttttctgagatcatctctttgatgccttcctcagaacggcggttcagcgcttcgttcaggaaatgtatccgcatcttcaagtcaaagttttctttcgagaggcggtcgatcgtactactttgctcttttagagtcatggatctgccactgcgagcaaaccccggggtcatcccagctccccgtttgtccggcgacagtccgttcccaaagtcttcccgaaactgcttcacaaaagcgctagggatctggacatctttgattcgttctgcaattgccgtgtcggtcggaaaagcctgttcagccttgggcgtcataggcccagaagtatcatcaacaggctctgccggcgattgctgctcgggctgtttctgttgagacgaagtggggcgcgattgtgcttcttcttcgtcaagaggggggagattgttctccgtagttccgtttatatcccgtctactcataacgttttcgtcgctatatcccgagatcccagatgccatacttcccaagctcacggatctggccaagttgttgcggcgggatcccgcagtcgagttcccaggggcagcaccaccggattgaagcgcaaagtcagcggcgcctagcgttgcatcactgttggtcatttccgtggcattgcttgtcgcagaagagtacgagagacgatgtgcggattggcgactagtcaaatacttggggcggctactccttcggctacctctgcgagatgcggcatccgcatcgctgacattgccatcactaaatagtttggtgtgcgtttcagatgtgggttggaactcctgggctgactgtaaagactggttggcgctttcgattgaactttgatcgactgagtagttttgagaaaactgactggactctttggcgctttcgggaaatgtagattgatttcggctccccatgcgagctgccgcggcggctgccggcgacgatggaagtgcttccagcatcgtagtattgtctacatattgttctgccccagccgccgtcgtcccctccgggttgattgtgtagtcttctgtaggtcccagactagggctgcgaggaatgagaactccatcatttgtggatgttatgtcatggctggactcatccggacccgtccaggctggttctgtgaagtctaaggcgtgttcactcggcacgccaacaacgtaggtgtcgtctgcaccagccgtttgattcgcagcagcaacttctagagtcgaaggctctggtaaaaagctggactccatttcagccaatttcttcttcatctcggtctctaggaaggtctggttatccacgctgccgtgatcgctgcgttcttcaagactactgtcatcctggtcaggtaaaggaggtagcaggtcgagactgtgttctgtgtcatcatgttcttgatgctcatcgatggcgaccgtatctccttcgtcgtcataatcgtgatccatggtgggagttgcggcttgcgatgtgttgtgacgacgatcatctccgccgtctgcggtcgcattcattattgtttgtggtaattctcgccgcgtatcctccaccatagaatccaatgggtcgcaaaattcctcgtctgcgtccaaggaatcgtcagggtctgtgatttcggtaccagtgaatgagaaaaataacgaccggcgcccttgatgcgcgttgttggcgggcgcgttgggttgggatgaggtcgacatggttacggagcagaaagcgtcagacaataataataccctacctagtctccaaacggttagcctgggttcccgcgctgttctgatatctcacattgttcctca

SEQ ID NO: 1025 - DNA, 2855 bp, Emericella nidulans
tccatttttcttgctcgaagcccagacttacagaccgttatagtcttcaaatatggccagtcccaggcttagtacgtctcctctagtctttccttttctcacctaccagtacgctaacgatatccagctcacggcgaacggagacacaaatgcgtccaccccggatgtaacaagagcttcactcggcctggtacgcttccctaaagttaccatcttccttcaccctcagcctagaccctctactaacttgcactagaccaactcaaacgacacatgcgctcgacacacaaaacagaactccagattcccaccccacttcttgggtccacgtctccaacagacagccaactcgcacttcaggctactttcggcatggcttaacgaaacaaaaacgactgatacccggagctaaggcgttatcaatggatgcatttactttgatgctgaattgggtttatgtctataccatcatatacatatatggagaggagtacctatgtagagcactttgattgacgaaacgatggcttatcattggatgccactctgctctctgccattcatcaatgagatacagctaaaaacgcctggtctaggtgataatgttctcaattagcagatgactcaaatctctctaggctcgactgttgtctcactggttaatgacacgaatatattccaattccgaagcaccatactgttaccgtggctattgtcgttccttctagggttgttgcgtgatggtctgttggggtatatacaggaaagttccaggaagacccagaccctaatggttgcagtagtacgtattgctaggctctacctcgaaaccaagcaattattcctctattcattcatactaggagattgtaatagtgtttacgaagtctggcactggatccggtaaatatattttcatatccccattgtgcaaatcactaatgatctgatttgatacttccagtggtttttaacagtcttttcttcctataggtttcataatagacataagctaatagatgctgcattgtttgggaattttacctaggcattgccccaaggtccaaccatctacaatactgactgctgaaattattatccatcttaggacaacatggcactcaacaacctgctccgtttatatcattaacaataggtacatactccacgatctctatccaagccctcaaagtagctcttattttaaaaatactatggaccctttcaaagagccgaaagagtagctcaatcaatcatgagccctcccctccaacgcctcaactgcactcttcagttccctaaccctctgcccaaccctcttcctcacctcctccctaacctcttcactcaactcggcaggatcaaactccagctttacgagccttccctcgtcttcttgctcttgctgctgcccttgatcctgtccttgctcatcctttttctcagccgccaagctcggagatgtgtacagctcgtaggcgacaatgaggttatttagggcgtcgcgagcggactcgcggtctgaggcagcgtatatggtggatgaatcggtggattcggtggcaatttcgaattcgtcggttgcttcttcgtagcttttgcttttgttagcaatatacaggttggagggcatgctggactttgaagcggattgggcatgaacgtacagctcttgtagttcttcaacgatgaggtccgcttgggatctgccggaagtggaacttgcgggagcggacgaaagaggtgttgaggagaattgtcgatgagaggtaatggcagtgcttctaaatgaagtgacaagaggcgttgaaaggaaattgggcttcggcgtctgcgagataatgacagaaatggagcggagaggtatccctgcgcggacagggcgaaatccccgggttctgagggaagatgttgaaagtctcactggtcgaggaggcatgttgttgatattgaaggttatctgatgtatgttcagaattgagccttgaatggagtagtgtcaattgagtgagcgtttgctggagaaattaaagaaaataatgatcgcttgttgatggcatgatgccggatgcgatgacgtttatctaatctagatcactcacgtgtcggcgatctatttacgagcctgctcggcacacttttcactatttcttccacaataaaagggattcatttaaagagtctatgattagtataatcaatgatctaaacagtgaatttatccccccattcgcgcaaaccacgctcccagtacaccaccccccatcagctgtacaaagcatccccaccacccccgcaacctcctccgtaaacgcgggcctccgcccccccatcttctctctaaccaaacgtttctgctcatcactcaaccctatctccttgagcacagggtcccgatcaacatcatcaacaagtttactcaacggcgtcccatcctgaaacccctggatctgcttccagaacccctcgccagtgttgaagtacatgtcgccgctaacagggccggggttcacggcattaacagtggcacggtctgcgagttcacgcgcccatgtccttgtcattgcttccagggcggcctttgtgccgccatacgcgctttgcccgatgaacccaagactcgaggagacggaggagatgttcactatgcggccagtgcggttgtttgggaggtgcggcgcaatggcttgggtaagtaaaagcggggcaagaacgttgatgttgtagtgccagttgaagtagtccgcgtcaatgggacctttctccgtatcattcaatgatcggtccgctgagacgcctgcattgttcatgagactgtcgatcgtggtgtatgggactcgctcggatgctgcagt

SEQ ID NO: 1026 - DNA, 747 bp, Emericella nidulans
cagtcgcgatattcgcatcttctcaaaatgaccgaccagttacctgaacccgattctttgcaagtaccggtgggctttagcaccagagacaccatatcgattctgccacctgggttactacagacatcagaagagcttcatgagaccacggaaacacagcagtgccactcagacgacaatcagaatcaggatcccgtatcccaaccttcggttcaaagtgtaccccaaattaacgaggcggcatttatcctagcctttctcggatgggactccgttgatggtactcagggcctggctgggtgtggtgcgtgctttcggcgactaggactctggatgtataagccaaagggcgacggagaggctgctgtcccactcgatgtagccagtgaacatatggagtattgtccatggatcaatgccagagctcaaagtggtacaggaagacccgctgggaagacggataaacttcatagtgggtgggaacttctggcccaggcgctcaaagtgaaatatctgcgacagatccgatcgagcacccctgtcgggagccgagccggatcagaagcgccatctgcagacgaaccggcgattgatgagcaggatgaggatgtaaagagagctaaagaccgagaatggtgggccaggattagacggatgagacaagtgttgaacgttaaatctccgaaaaggaaacagtctacagcatgataccagttattcccatttcacgtttgcattctggcgttt

SEQ ID NO: 1027 - DNA, 995 bp, Emericella nidulans
cagacgctcccgtgatcgacttagggagctgcgtatcggcatctcctcgaaagtttatcaggcctcgtggttaaaaccacaaggagcctcgcatgttgagcaaacaccttccaatctcgtgtccgggtggccaagggctggtggagttcttggggcgattttgggctggcccagtcgccatgcaaacgaatcctctttccaacaagaagatcccgttaaaggagacattggtgacattactgtagtaatggacgcagttacctcagttgatagtcccattgaagttctctctcctcaaactctcaatacgacgtcgactcaagatgtggccgaggcacaggatattgccgatgcagggaatagtccgcctattagctctcatgaaacgcaacaagtacaggttcttgggtccaaagctccgcgagagtctttgaggaagccttcaaaaacgatttattcattcacctctggttcagaccaagaactgctgaagttggaggtcctggaactggagcgtatccctatctctgcagcagtcttactagacacaatcgattggacccgagttaccacccttaccattcttcgctgcgaaggccacgaaaagttgtggagaagccttcgtcgtcggttctctccttcagcggcaccgcacactagtacaagacatggtagaagcgaggaagatagggcccagcctgaatacgccttgagaatcaagcacatccatacggatgccgtctcgccatatctcttgcttttcatcaaagatactcttcagcctaacaccctggagaccgtatttcttcatggatctccccttcatgactctgccgttcacattgaggggatatatcggaatgtgatacggacacataggtcgagcttgaggaaacttttagtagatagtaccgaacggtctccagcaggagtggagatcgtgaactcgcgatggcaaaaatggatgttcactcgcgaggtcatcacttttatac

SEQ ID NO: 1028 - DNA, 5855 bp, Emericella nidulans
tactactatatcatattaaaagctttatatcttctgcgtatgttttctgcagtaatttggactgcgtcatagcaaacccatctttctaccatgtgttagatatctgcttcaaaagactaaggtgttaaagattttttagccataccacagtttctctgtgtatctgttgatttggtgactgtatcctaatgttccctcaaacacaaaaagaagttcatgttcagcacgctaaaggagttagcaaccttgatatactttgccatgcagggaatatatgggtgcatagcaggataatatgtacagatatagtacttgagggcctattcttagtaacttgtattatatggacagattatatctaactaatctctacacttcacttcccttgactccgctacattgaatggatgcacgccaaaagcaaaatagaatatttagaattgaacagatgttactatggcatgcagctgcagcagggttgatatatactttgaataacgttataaagaggaactcgagtagatattagacactaaaacatatcaaaagttctataacgtagcaataatatatttccccattaatccgtgccattacatatgccaacttcagcgcctatccctattgtatctgtggtagcacaacacttaaccagcctggtacagcccgagagcccggacattggggtttaacatggtcaaattatacggcgtcacatagggattcgaatccgtcagcgcaataaacgccgtcccattcaatgcaggatccgtctcgtacacctcacttgccggctggaaggtaaaaccctcattcttcccggttgttgtcaactccgtataggtcgtgttcaactgactcacccaggcgacgaacttgggctcgccggcagtcgtcgatgtaatgtaactgttgtttgggccaacaggacgaccggggtcatcccaggtaaggaaaacttttcggccggggaaggtcaaaggttcgtacttgtcgcgcgagatggccggcccgcagttgtagcctgtttcattgacgtgcacgcaggactcattggctggaatgtgcgaggagctggggttgccggtgcggttgacgtgggaggcgtccgagatctcattaaattccgttgtgttggggttgattcggttcgggtttgcctgattggtgacgtagaggttggggaagttctgccacacgaggcgggtgttgttctcggggcaggaggagatgtactgggccaggagggtccaatgccacgattgcgggacgcctgagagtgttagtttagatggaaacgtgaggaaagtagcgcgttaaaggggctttaccaggagcaaaccagatcggcatcgggtgcaatcccaacagctgcctgaaaacggactgctggcgggcctcgatgttttttgcttggacgatcagagtggcaacctcgttagagtctaggtggctgaggaacccccagttaccgctctcgccccaacgagtgagcttaacattaaagtcgaggaactcgcgcacggtcgtgaacgggtagttgtaggtgcactgcttcggggccgactctcccagcatattgctcaggagcgttgcatgccctgcttcctggatggccatgtactcaatcaagcgccggtcctcgacggtcagtccggcgtcgaggaaatcctgctcgctaaaccgttccagtccatagtggaagaggtcaagttcgatatactcctgatgcacgcccagcgccacggactggtagtcaaagtcgctctgcaccatatacacaggaagggtcccattcatgccgacaccgccagccggcatatacggcatcggctggggctgcgtcagcctcccgtccgggttgtagtaagtcgcggtcgggtttggttgcggcgcaatcgattgggccaaagtcgactcggcctgcagagcaccagtagtggttggggtgccggtataaggcccatgagtggtagtgccagaagtcgcgctgttaaccagcgttggggcagcgccaggctcgctgccccggggcggctgggtctcgacagatgggatcttcaccacctctgttgggagagccggccgaagccgccaagtcaagtagacactcattcaatctgttagtatagttcgacgtcgcgatcgaccaaagctttaccatacatggacaacacgttcgcttaggaaggagagaaggcgaaccgttgccttgcggagtggtagttctctcactacgggaagcgagaccggctgcaagcggaatgacgtgggttgacgttacagcgataccggcgccccattcctggattctgcagcaaaccgatcggcgctgtcagcttggaagaaacgtatctagtgcgaccagaacttggtttagggctgactgcaacagccaagatgtcggcttcgatcagcgcaggggtccacttttgattagatcggaccgtttatcatgatgatgagccggttgcgtctgtccgtcatcgcagactgtgaattggactgaaaccagtcatgttacagaaaacactatgtcaccatgtcgaactctggcaccggaatcttcaaccattaaatgtgattggctagactcgttacggtactgactcggttgacctgacccgtagaaacgggcgcgtgtgccgtggcgctttcataccaccgagccgtccacgcggttttgttagcggaagtgtactacggggtaggagtcgcagacagttcctgtaccttgccttaaggctgcgatgcctgaggttgacagcatccggcttcactatcagacgtagtcgataccgctcccgtgcacttttgcagtgctctctgcatgccaaaaatagataataaaataaaataaatggtaaaaaattcaagtagtttcatcctgttcttggtcttcactgggtccacattttggcaataaaaagtcttcctggctggtagaaatcgctgagtgtatttgcaggtgaacaaagacggcttgaaacacaggctgtcttgggctgaagctccgctactaatgccacttgaattggaagctaatactgataataatatgcgttctggtatatgaaccacagtcggtattattcagggaatgcagggccccttgtattatgcagctagctaaaaggaggcctcgcaagtcccaagtactacctaccggtacgtattttccagtgacgcaattgtggtcaatcagcttcagctagttagcgcaatcaggttatagtgttctctttaatgccgacaaagagaagttcattatttttattattaaagttgccaccagtccaagcctcggccggttatgtcatgcaagtgaggcatttaaatctatgatgtacgcaggcttctctataatgagcctcataaaaatgtacaatgaagtcctatcgagcttgataataaagtgaagcctttgtatccattttctgaagcttttgacgcttctctatgcggtgctctcgtcgagaaaggcgctgaccttgatgtaacgtcaatggtagggtactcccaggataaatgcggtatagcctagccaaggtaatcagtctcagacttgaattatgcctgcataaaaattctaacttctgtcatctggtgagtgattctaccccccatatctagtaaataaactaccacaaggttaactccgccacattgccactgtagcttcgatgtcaccgagtgctgagctggggttattcgcccaccctagctactacacgtagaagtaagtatttgaaatgttaaatgattcaaattgacggacaacccaaactcctatatacaagaataatgcacacacaggtataagtcgtgaccataatttgccagcccctcaaacgtacacacttgatccatctggcgatgccttcttactgcatccacaggcgccagcatttgcagcaacctgcgatggcgtgcgcgcaaagctaggcggtacgtcaagaaccgggttgcgcgtgaagaagttccggggtcgcaaaagtacggtcatgggctctgccggcatgatggggtaatcctcaggagttggaaagtgtgtcaaaccgaaagtgtgccagaggacgacgtcggtgttgtcgatggagcagtcgggtcctgcttcttcgatccacatagggagaccctgggagggctcgcccgaggtttgaggaacgtggcggccggccgggtggagttggtcgtcggagtctgcgcaagtcagtctgggcttcccttgttttttggaaacagtagcttacattttgtgacgtgtaccgcgtgtctggcaaatccagcgcgcttccaaacaagactgccctccttggggaggagaggcgggacttcgcggctgacgagtttgtacgagacgggcttcttgctgtacgggttgagcttgtttgtgttttgaatttcccaggtacggctggtggcgccgttgtagtcagacacggcttcacggggcgtggtgaacttggtcttcttcgcgtagaaggcgtttccatacttgttctctgcgctgccaacctctccgtctccgcggactgcatcgacctggaagacggtgttgttcggtccgtcgacgttggcatcaacgcgtagacagaacaggtgctggtggttgtgagcgttgacgcctgggtaaacctcggtaccccagccgtgggtatcctcaccggggttcatggcataggtgttgaggataccggtcagcttgatatcgagctggatagtgccgtcttggtggaagatccagtaaacgcagtattcgtagttggcggcagtgaagatttgggagatgatgagcttgcggccacgggtgacgattgtggactcatcgcggaagtcggtgtgcttgaagaggataccggcgtcttcttcgtggatgcagatggcgttcttgacgattgtgctggcaccggcgcggttgacgaacgccgcgtccatgtagtggattgcgcctttgcagtcgcagccaagggaaagggagtttgtcatgtagccaccgccgtactctcctaggtcaaaagcatgcttgcgctggtgagggtgctcggggttaccgtatgggaccaccatttcagcaagcgaaagtcggtaaaagacgtcccgaatgttccccttgtcgttgtaggtgatgttgttcaggacaataccctcgcgatagttgaagcccacatggacgctccagttttgccatttgatcgtccgtccctcgatgctgaaagagacgccctccggctgggtaatatgaataggcttcaggtctgttctgtacccgccttctttctcaaccgaggcttggtggtagttgtttggcgccgctttgttgagcggtcgtcgcacgggtgggatatcaatgtggatgatctgcttcgtctctgcattgtagatagggcagaagtccaatgggaatgtgtattgcgaatcatcaacgtggggccggtaatacatcagagcctgctgcagacgaatgtcggtgccgaatctctcgtcgtaaccgatagtccacgctgcgagttgtcagtatcgagacgtagctgaagaattcgcaggaggctcaggattgagaaatgaggtgcgtagtgaaccagcaagcttttttctcaactcgaacagaataaggccgcactgggtgtggagcattactctgtcagccaaacgacactcgatcaggttttcttgacaattgtcgggaagcatcatattagcgagcaggattctggctaactgcttaccttcgaagagttgtgttgcgttgtcacgttcttttttcttttggaaagctcgtttagttagcattcttgtacatatagcatctagtatatatctgaccatctcaatcgtaattacttggaattaga

SEQ ID NO: 1029 - DNA, 1403 bp, Emericella nidulans
aggcatgcaatcgcactaaatgcccgtgaacatcctgttccggcccacaccgataagaagcgtggcgtgtttgatttctacaagcggcggaactcggctagcagggacactctttcagcgccttcagcagaagctgtccagttgggtaatgatcctctgaatgcatacagtcccttgttgtctgtatattatcttgtcaaggaaaagctggacagagaaagaagcgagtccaatccaggggctctcagcatcgcccaagcccctggggatatgcttcaagtacctgatcttgcacctccggaagccgctcatacaaaccagtatcaagtgcctggagagaaggatactggaaggcgatcacgaccgcgcgcgagaacccatggtgatgatgaaattacagaaggcatgaagaatgccagccttgcaccaaatcatgcccaagcctcccacagccctgccgcatctcaaccagacactccagccaaaaaagaaagcactgctgctggtcttttgagacgctttagcacgcgaagaacgaaggaccgcagccgtgaccgcgaacggtcaagactggcgagccctcatcagccgtcgctcaatgtgcagccgccagccgattctgcttccccactttcaagagggttcagcatgcggaaaaaccgccgtacagaaccgtcagcgaccgcgattccgtcaacgggtagtcagccccaacatcaagatctccttaagactcctggatcggtagagccggcctcgcgatccaacaagtacttggagaggtcaatcagtgtcagctcaggagaaccccggcatcggcggtcccgtcgaactgaaggcgattctgggagccagccgccgcaaaccagcggctcagaatactcggccgtgccaaaggactcaacagctgggcgcgaacagaagatagcaccgcgtacgcacgctagccggacaatgtctcttggccacgctcggcgtgaaagcatacaggcccgtagggctcgacgggacgctgcaagagaggcaaatgtccctgaagagacggacggagaaatttctggacccggggctgcattggagagtgcaaatgaagaggacctgtccaaaccagtctatctaaaaggcctatttagtgtttctaccaccagcagcaagccacttgcctttattagggccgatatcatccgggttctgaaacagcttgctgttgactatgttgaaatcaaaggcggcttcagctgccgtcatgcgaccagcattgacttggacccggttgttgataatggacctccaagtcctgagcgacagcgtcaagtctccagatcaccgtcgtcggatcagcttgggtggccttttgaactatgatgatggccgcgaggagctcgctcgaattacaactctcc

SEQ ID NO: 1030 - DNA, 3150 bp, Emericella nidulans
ctgtggctgtatcataggtagtctttccttcaattccacctattcttttcgtcaaaaccatcaattacctcgattgaagataccccgtagcagattatgctatctacctgataatgaatagacactgtctgctgcagtagcctcccaattctaggaagtaatggaaggcagtatgtatattaagttagggcctggattgtcttggcgccaagttgggtaatcaagacccactgtcgataaaccaaccaatagtggtattcctaagcgccagtccttcgtgcctgccggtttcggataacggggtagagcgtgagaaggtaatagctcttcacggaccaacctagcttctcacagatcatggtatacaatgccatccaagaaccccccaagctgcttcactacggccagagaatcactttttcattgtcatttgctgagcttcgtgaagcaaaatgcctccatggagacgcaaagaaagaccacgctcggacaaggatcactcaagctgcgctcagtcagacaccttaagcttgtcttcaaaaggccaagcctccgccatggtatcccttcgttcagtgaccagatgtttcaatgacgaaaacactgccgggacgaccgcagatctagccacaggccctgccgaaaacttgacaaaaaagcatgcagaatttggcccactgggtgatccatcccatctttataccagtgtggtctttggaggtgaaataccagacccggtggtcgatgagcctccatacttcatcatcttgacaacctatatcagtttccttgttcttatatttcttggccacttccaggactttgtctccagatggttccagccgcatacatacctgcgccttaggtcccaaaatggatatgcttctttgtacaacggtttcgagagcttcttttctcggcgtatgaagcaacgcatcaatgattgcttcgaacgacctaccactggagttcccggcaggcatgttgttctacttgaccggatctcaaaagacaatattcattttgaacttaccggtaaagcaacagacacgcttaatctgagctcatacaactatctggggtttgcgcaatcggaaggaccctgtgccgacacagtggaagagaccatttaccgagatggaataagtatggcggggccatatccaggaactacaaaactacttgtcgaggtggaggatcagatctcccggttggttggcaaggacgcggcaatcgtgttctcgattggctttgtgacgaattcgactgtttttcaagcgcttgtccagcgtgaatgtttgatcctgtcagacgaattcaatcatgcctctattcgattcggtgctaggctttcaggagcagccatagaggtctttgcacacaataatatgacgagtctcgatgagaagctgaggcaggccatttcccaaggccagccgcgaacacatcgaccgtggaagaagatcatggtcaccgttgaaggactatactcgatggaaggaacgatgtgcaaccttccacaaattctggagctcaagaaaaaatataaattttatctcttcattgacgaggcgcattcgattggagcaatcggcagtcgaggacgtggagtatgtgattacttcaaagttgaccctgctgatgttgacattttaatgggcacgttcaccaagtcattcggtgccaccggtggctatgtcgctgcgaaccagccgatcattgacaagctacgctgcaccaatgccggccaagcgtacagcgaagctccaacactcccagtacttgcccaaatttcttcttcacttcgattgatcgcagacgaggaccctctttacccgggtcagggtcttgagcgaatgcaacgcctgacattcaactcgaggtatctcaggctaggtttgaaaagacttggattcattgtttacggccatgatgactctccaatcgtgcccctaatgctgtatcatccggctaagatgccagccttctcaagagaaatgctgcgacgcaaaatctcggtggtcgttgttacctatcccgctacgccgttggaactttcccgtgcacgattgtgtgtatctgcagcgcataccaaggacgatctcgaccgcgtcttggaagcctgcgacgaagttggagaagcactacaactaaagttctcctctgggaaagctggtggattgaaacagccaagaccatgcgtgacgatatcaccagataaaattactgagcctccacgctggacattgacagagatcataaaatggggagttcgagatgcgaacgtgactttgtattgaagcgtcagaatgtcactttctgtatttatggcgccatcggcgggtgtttcttcgagtgaattatcagtcaacatcgggtccagaaatcttggtgtagactatgcttcaagtaatatgtagcatcgcgtagaaaattgtcaccctctacatactgatcttaagaggcgaactggttaatgggtgtggagcaaatcgccacttgtggttggtttaacttacaaaagttgggaggctgtctagagcagttcacgtgactaggccggctggttagggctgtggccctcctgggttctcccgcacaaaagtatcgccgccctcgcttagcgaccgccgagctgcgaaccacatccgactccgttgtgtgcgtcgaacctgcccacaacgacaacaaccgccgacaacatacatccccagggagtatcctagagcagtgctcttcctttcgctggatattttccttttgaaccggtgacaggatgtcctctatcgatccagtggtgcgtaccgccgtctccgatgaaacgaccgttatatctacacaacagggcaaaggcccatttgatgaaatacaggcgctgacgtgttggatgaattttaggtcgtcatcgacggcaagggacacctccttggtcgcctggccagcactgttgcgaagcagctgcttaacggccagaagatcgtcgtcgtgagatgtgaagcccttaacatctctggcgagttcttccgtgcgaagcgtacgttttatccgaccctttcgtttttgtttgtctttttttgcagcaaagttattttgttatggaaaatgggaggaaggcaaggaaaccgatgagaagtgggaataattgatatc

SEQ ID NO: 1031 - DNA, 5581 bp, Emericella nidulans
  unsure (1)..(5581): unsure at all n locations
tacgagttagaatggaaaccgcagcaatgttccccttacaacgcgattacgagagaagaggtcaagaagactagaaccagtcttagatctgagtgggtttatatcacgaaagaggagcacgatgtcgggttgaccctttaccgagcgttgaaaagccatgacgaatcttctggtggcagtggaagtaccagtctgtgggttagtcgagtcactcgttagacccatcttcatgatatatgctgtcagtcactttccctgtgtcacaattctcaccacgcactctctttttgttttaccatttatttccttatttatcattgcattatttagcccggtctatccttcatgttcattttgtccatttgtcacttttatgaatattcttatatttccatagtcaaggatataattcctaatcttaattcagtcacatcatcaaaaggcaacattcacctcactataattcacacctcccacagtaactacaactgaggcaaacaaagcaaaagggaggcattctcttgagcaaagtctgtttgtctagcacggctgtggacaaattgcgtgaaagtgttactataaaccttgggatgtgtcaccgcaccctgttaaaatatcgtatgccttgtctggtgggcaaagtcaggtattgctagcacattctcattccacactgtaggcgttgccttccgtgactggaccaataacaattccacccatcaaagcgttgtgtgggcagagacggcgagtcaggcggccggtcttgctaacacttattacattgtcagacagaggatgcgaagcggtagagggaggcaatggtgtcagggcaatgcatcctaggttgctgagcgcggtcccgtcagttaccgactcagaagggtatgcatggcatggtacgtcccatgggtcggacactcccccacccctctgatagggtgtagtgcagatgttgatgcgatgcgagcagctgctagtctgttggcacaaagttgataaagctcgaggtaatggcgacgagtatactgcgaaacctatgttgggtagcctttgactcgacctcggaagtgaacgaagctaccccaactaatggggcacgatggttatgccagaatattgctttgtgatctacctactatgtatctgccgctaattgatgaccgcagcgtaatagtatagcaggatgtcggacggttgacgcggaagagatggtatacctaagtctggtagttagtgcatagctgtactgttccccactgcctcgcctgctaattctaatgggtttgctcagccgtctccgtctgaaatgtgcgtccgccgtcagttcttcgtactgtgtgtataacagcttctccaactgcgggaaggttatagcttgctcatcgaatatttttggtgcgatgatgtaaattttagctaagatttgaatgattcatcatgtaatttaacagtcgttagcgacaagataatatttaccgaggctctcgatatagttcaacaggataatatagaaacacaatgctaatataattcataccgcccacggatcctcacactaaacattgaccacgatttttccccactaaatgaactgggcccgcttacaaattccatccctggatctcgtccagcgtatagaccaactcagaagcgtaaacagccttcttaaattccatcgggttcttcgtctctccccgaatgaagtccccattccaggtcacccagtatgcccactgcgcaccgtcctcccgcatcagctccggatccggaatattacccacctcgcccagggcaataagcttgctaaaattgcctgtcaggccttggagggcttggtacgcctccagctgggaggagtggtcgccgttgtcagcgtacacatccacactaacgacatccacatattcatttccgggataccaaagcgggtccttcgagttccacacccagagcagattattcagcccatgcttcttggtcaaccggtcgaacagcagccggtagagcgccttgcagggctcggcgccggtcgccccccaccaaaaccagccaccctccgcttcatggagaggccggaagagaacggggatgtccttgagccgggccagctgctcggcaatggcgtcaatgtcgcggagaatcagcttgtaatcacgtgaagccgggttcatggcggcggagaggttgaatgaggtagcctcggtgtaaaaattagaccaccacggttgctcggtggtgttatacgtgccagaaggagagcctagagtgagaagtgtcgttagcctctcgtcagtcatccagtcatggctgagctcaccccaatgccagcagatagtaatgatccccccttgcgtcgcgtatgtgatggcatcttcgatagacgtggacacggccccgaactccacgcgtgagggcgaataatccatcaggtcaactcctagaatcaccggcgagaagcccacattatcggtcacccagtctgcatccttcaattcttgttggcccgagagtgttgtgccgttgcccgcactccggaccaggtgtgccagcaggtttctcgcagggcgcgatgccctgggattcactggctttgtcgttggcgtcgctacaccggaccctacgaggctcagagcagcggagaatggcaggatcaactgagaaaacttcattgtggatgaaggctcgccctcgcacataggtgtgtattgtggtagggtttccaaggcgttatccagtcttttatatgcgcccaagcgcctgatagtggtcatctataggatcggaacttagtcgatgatctcctcccaaggactaccgcattcggaagaaacgacaaacaaccaaagcgcccagtccagtcttccgtacgccgagtgctctgtcatcacctggcagcagggccgtttcggtaattgtcgagcctctgctcaggtctcgtgtcgtctatgctccagaaaaggtaattccgcaacccaccaggaggctactgactgctgcgagtggctattgagatatggggtcgtgcatttacctcagactatctccaccgggcgtgtcgcattttggtttcaccaggcctgaggttttccttggcagggtctttcttcgctcctttgggcacggggaggtgggacaattcttagcgaggccggagaaatcgtagaatgcccgagcagaacaagataattttacgagatggtagtctgatgttcggcaggtcagaggacacaacttgtgcccccgactgggttctcggcgataggttccgcgaggtggtcaaaaaaaaggcatctctcctaccaaacgctcgatactcacccacggccctatcgttgcaactgccaatcacagcaagcagctcgccgtagagcacattgacagcgataccattattgatttgtgaaggatacaagttggacaacgcccttggaatgagccaatcgtcatggaagcaaagtcgcctagactttggcaacagttgctggctttggcgtgatgatggtgtttacatcatgccttgnnagtttggtgctgggagttctcagcacaaaatacgtggtgaaatctgatagaagagtcagaattgtaaaggcttcaaaccctaccatgtcaacctataaatggctaatcacacgacgcttatcccgggcactggtgcctagatgaagctctgtaatcatgttagctcatatcacagcacgtaggactgtgacaacctggacagaaaaccatccataggtttagcaaatgatttaacccaacctaaataacccaaacaacccaggtatgcaaatcactgctttgataggcaataatctctatcctataaaatgctaccctgattattactggccagggcaggaatgaacaggtagctgcttttcatcgtatatatagaagcatgtaatttaatgcaacttggcgcagaaagaacagaatttctatgcacaggcagaagtattctaaatgtctaggccatcagattcccatgtgcctctctttggctcctctaccaagcaacgctatctccggcaccgttttgcttgcaatagtagttcaactcgtcacctccaatatgctggccctgggactcacaatagtacaagaggtcccgctcactcttcaaaacacagtcggggcattgatcccattgattactaccggtgtttcgtttcttataagcctcacaggccttttcggtggccactctgttataaacttcctgataagcagttagaagtggacccttccgccatcggtgcttagatgagtaaggcttaccactcccgagccaggggtatcgatacagacaccctgaatgtgaaggtctgcaaaggcactggaaacatcagctcaggagtcagtcttgccggctgggcaaatggcttacgtagtggctagggcagcgataaccagaggtatagaggctatcattctgtcttctttatgaagtgtgattcgtggtatgagttgtcttttaggggtaggcttgcgaacgtaatgtcaactgctcaaacatggaaaagcagcctttaagaagtctcacaagcaggtccaacccattgaatcaacgtagctcggatgcccttctttgagctagaactgccaaggttgaaagtgccgaaaaatccncatacgtccaaggatctgagagcttcttttccaagtcgtatggggttcgcacaggggagtcatgtcttactcgtatatagtaccccaacaagtctgaatcctgaccgaccattcctgcagctgttggacgtctaatatagctagtcttaacgagctgtggcatttatcatccggtagattccgcttcggcgcgaatgggtctgcatagtggcgccgacggtccacgatctacatgatcttcaacggccgggcaatgtcaaatctattaatcccgcaatctttttacgtcatgtctcgatatattggtatctacaaatcaacagctgtttctcggtgtcatgtcggaacaataccggctgttgttagatgcgttccgagtctgccattgtgactattcccttgattcgtattcttctaccactagcatagtaatgtacgctagatctgcgtagcctagcaaaagtacagggcaattccctagcgtatcaactgccggacaaagaaggtattgctgacagatactatatataaagtaatcctcccatggtgtcctctgacatgccatctttccattgatcaattcacaagcgcagttactcggtaatcagcaatctgcgtcggacctggcacgatgaagataccattgcttttcctggcctttctctgcactcagagctcgcttgccactgctctaccctccgaagcgactgttggccttgagagtatcggacacgacaaagctgtcctccttctacacgatggcacgacaaagactatcgacaaaaaagatttggggctctatctgggtgccgctgcccactcgccccccgcggtccctggatcttttgagaccaacgatcatgagtccacctcgttacgacgtctcacgaagcgatctggtgccgaatttatcatcccacttcccgacgccgaatttctaggttgggat

SEQ ID NO: 1032 - DNA, 2684 bp, Emericella nidulans
gttgtaaaagtcattattggcggaatcagggtaatcggggtggtaagccaagacatgaacaggccaagctgctgacaaagcctcgagggcacagggctcacaaaaaaagcgacgtcaaacgcattagtctcacctgtcaccgtcctctctgagaaggaaaatctaagtcaggccaggcgtttgtcgcctactgtgcagggtacattaacggtccgcagctcttctgaagatgagtctcctagttaaccctctggctctgcgttaagctagtgtgtcacgggtgggggtgtttcttatcctaggggtgcggctgtatctcatttggaagaacagccgccgcggccacgcgcaatccgagctcacggagccgctctctgacagcgactccggaatctggtgctctttgaccagacagaccggcagatgcagcgataccggtatgtctattagagattgctggctcgcggactcctatatgctgtttcttttttttgaatcatttctcatgatcggaggcggtattatcgctctgcaccacgcattgctttcactcccttgatatcgccgcattggcagatccagtttttatctatgatcaagtttgcttgaagaagaaatttaccgtcatcgtaatagagaatcaatcgtcattgggcgtccgatccacagtaggctacgttcatgtagtcgatacagtttccttcttctctttccctattgggcatctacaacacatatcactactaaatgaacagaggaatacaaaagctcatgatctaaaatattctaggcgcattcctagtatttccaacctgccgatccttgatccaggcgctccaacaagaacgcatcattcttggcacaccagagaatttctggggcaactgtcagcactttgctgcacgatggcaggtgaactttctctattttcaccgcccttgagacttctaggtactcagtgacagtttgaacatggtccagttggatcatacactgtgctttcaacgacaatagatagcattgcaggtagtgctgtcggcttgaaagccagctctgcctccattagtctcagcccggccggcaacacatgcatatgcgcaaagtctcgaatatatccattcaatggctattcacttgtggcactacccctgctcgctctatgactgaatagcacctgcatttattcagcctgtctcacggtccttctttaactgcatatacattcctaatcagcagtacaatatcagtgatagtcagcatttgtaatgtctattgcattgtaaataatggctgtctgcaggcactgattcaagagcctaatatgagctacttatgttacatgtggccatgagcctaccaatcttggcagggaagtcgtcaaggtaatttataagcagtggaccagtcactattagaaaaatctacttactacggaggtgtgcaccaaaagtcatcgccgcgctagtgatatttgatgccaaatcctgtaattccattaccagccataagctgataggttgatgatatattgatcttccaaagcaaacatcaacatagcctcttcccatttttgaagctatccagctatctacattgcatattgacagatcaaattggtttttatagtattttgaagtgctttttctggtatatttgcctccctgcctctaattctgcctctgaactgtacacgccttcctgcctgcgatccttacaatgccagcacctcatccaaacaagcttcgagttcaagtcctttcttactgggccctagggattcagccacctgatatagccaagatgcttcagattaatgtctgtacaatacaggatatgatctagaagggcaaagatcatggctataatcctgctcagtgcatgagggttaagcttgaatatatagaagatggcaagtgctctggctgtccaaaggagatttctgaagctatagatatggcagttcttgcctctgttaagcagaataggaatagatataagaaatcttctgaaatccttgcctttgaagcaggtatctcttattcttctgttttacaaatcctccataagcatggctttataattgttaaaccttcttggaaacctggtctaactgaagctgcaaaggctgctcatcttaggttctgcttagattaccaacactggactctggaggactggaaagctgttatattcactgataagacttctgttatccttggccaccattgaggctctgtatgagtttggagaactgctggggatgtacatgatctaacatgtatccaaaggcgctggaagggatcatctgacttcttggtttggggatgctttatatataataagaagggacctctgcatatctttgaaccagaaactgcttactaatgcaagcagtcagaggtagagatagcagctctaaatgcagagctggagtctattcttagggaggaataggagatggagatgaggctaaagcatctgcatctttgtagggttcctgggcgtgttcctacatggagatggactgagaaaactgggaagcttgtacaaaagagcaaaggaggagttgactagtaccccataccagcaggggtattctcgtaatagcaattaacctgcttatattgggctaactagctcttctgattaggaaatcccccttccatatcttattccttttgcca

SEQ ID NO: 1033 - DNA, 3568 bp, Emericella nidulans
gagctctccgattcgacctactaggaagcaagtggtcaaaggcaagtaccttgcatgtaaatgaagtgatgttgggaatcggggcggatgcgtggcatacaacgtcgccagagcggagatggatcgggtcgatattggccaagtgtaggacgacgttttgaccggcaactgcccagtcgtttggctcttcatcaacctctaaacttcggattgttgcggtttctccgctcggcatggtgaggatttggtcccctacttgtaagctgcctgcgtcaattcggccagatattgatagagggttttgtatgctgccgcggaatacatcgccgattgtcattcggagcggcttgtcaagggcgtggaagtacggttttgtttcttcaagctcttccaccagagtacggccattgtaccaagacacatttggatcctcactccgtctggtgatgttgtcaccattgactccagaacaaggcacaaagcagatattcctagcctggaacccagcggtgatcaggaatgccgaaacttgttgctcaatctcttcaaatcgcccaaaatcccactgaacagtatccattttattcacggcgacaatgatcctctggacccccatactcctcacgagcaacgcatgctccttggtttggcccttcaacccggactcgtagttccctatgctggcgtcaataacgagcaccgcgaaatcagcctgactagcgcccgcaatcatgttcggaacaaagtctctatggccaggggaatctacaatcgtaaaaaccgtgttctcggtttcaaattttcttgtggcaatgtcgatagtcacacccctcgccctctcctcagagccctggtccaagacccacgccagggcaaaagaccctttgcctatcttctctgcctcccttcgatacttgtccagcgtgcgctggtcaacggctttcaagtccgcaagtaggcgtcccataagggtacttttccccgcatcaacgtggcctgacttgtcagcatactaattacgtcggacaaattaggttggtactaaccgataacacgaagttcatggcatttttccgcttagatttcttgtactctgagagcacatccagattcttactcttgacattgaccttctcggcaacgctgaggattacccatgtcaccagccaatcctgctgctttcctgtcaccttgtggcttcggagcaggctgtttcgacttaaagcctgcagactattagggaggttcatatgtttcgccgaatagccaaacctttagcggaactctgggcgtttagaattacatcgtctgggctgggtcctgagaagtcaaatggttcagcaagatcttgaccgtagattctaatcaaatccagagtgttcgtatacaagtggctgggctcggtcatctttgggcgtatgtcgtctccaacaatggtggcggcaaatgttgacggtggagcacggatattcacatgttgctccttttcctcttggtgtctgttatcctcgatctgaacgctctttatagagtcctccaggccagtagcagctgggacgcttggctttggctcgggtgacttcttcgggggctgcgactgctcggaacgtcgcttcagactttgtagcgagggtaagctctcttgcttgacctgcttgctcgccgcgagtctctctcgtagcgacaatgtagctcctttggcctcgcttggggattgcgcatcagttcctgtcgtagacgcgggcgacctgtcgccctctttcttctttcgcgccgctgccagggcagctagtttagacatctttcctccaccgctttccggagccccgcccagaagcccaagccgaggataaagtggttcaacgagaatatccgcctttcggtgagctggaatattgagccaaggcgagtcgcggaagaagtccgccgcggaaaagtgaggatgtgtcgtcgcagtagtaggggggatcggatacgctggcactagagcctgttagaacatattcaagcttaattgaagtcagtttagtcgcttgaaaaccgagtgtggcattacatacctactctcaccagtcgagaccggtttgcagactcgagcccagactacaagtacacgaaacaacaaacatggttcgcttacctgcgttcactttcgcctttgccgctgcggccttcttgtccgcctctttcgttttcttgcctgattcattctccattagcctaacacataacgactcggttatacagccctacccctcaaatagttcaccgacttgtccacatcgttgtaatagtgccacagcgcatcctggacttcatcgcgggtcgcgctcacaggggggtcgcctgcagccagctgattttgtacttcgcgagtacactcttcgaggaattcacgctcttcagggtcttgggagtcatagccatcatcgtagtcgtcataatcgtcgtcatcataactgacggccttgacacggtgtcgagacatcgtcgtttttcggggcggggtaggaggggctctgtcaccctggagttcgtccgccgagtggaaaggcggatagaaaggagaaaaatagaagataagggaatgagagaatggggaagagagaatggggaagtgagaatgtgatcaaagtagataactggagaggtgttggagtcgctcagagtcggcttcttcaaagacgtctctggtggaaggatgcgagacgttaaaaccaccacgtcattccccacctccacgcccacactaggatcgtgccctataaagccaagtgcagagtagtaaccaaacgactctttcatcggtgatagctaacttgcaaaattgtcaaattgtcaataaaattccatttctactttagtcaatatatttcaagtcaagatttatggtttggtattgaatgaagtccaacgcaatacaaatcagctgtatatctacccaagttcaataaataataactatcgagccagaaatggaagagctaatgaggaaagatcaaagccaaaacggacccggcaggtagtaatttcagggatatttggcggtcaataatgtaagcaagctgaatactcaggtagtagtcagcaaccaacgaggctataccggccggcactcggcacgcacagcagtgacgagccccaacactattacaaattaccgcttcctgcacgtatcgaaaccctccacagatcgtccttcctctgtactcctccatcaccgacctgcccgaaactgggaagtcaacaatgatccgaactgccgaatcccagtggggcgaactggggatcgtcatgatggaccagtatttaatccttcattcttgttgcccacgctccatatcaactgagactgggtgttatcatccctactcttgctctctcaatgacttctcctgtgggaaaccggctcctacccgccctggtggatgagggcgcacgctcgactccagaccgactctttggcatcatcccaaaagggaccgccttatcagaagggttcccgaatgtgactttagagagctggcctatgcagagacgcccctgcatggtgattcacagcatattg

SEQ ID NO: 1034 - DNA, 1571 bp, Emericella nidulans
atgttccaaattgagatcgtccagccgctcggccagttccctgtccgggaatgctgcacacttcatcatcggccttgtctgcagcccgaaaaacgagtcccgcgtggtgctcccttccgttcccgtggcgctatgcggtagacgttccttcgggcgcgatggaccacgttccgatgagtttccaggcactgaactctttaccgcagcaaatacaacccgggcgaaagaaattccagacgttgaacccagataccgcggatccgaggttccttggaccgaaaccatcccaatattcgaaacgaggttctgtatccgccagccatcttctgcgtcggagtcttgcttcacctccgggtcatggtcatatcgcgaagccttttccagcccaagaggcccattcttttccttcttgatccgcacggacttgtcattactcccatcctgcgcggctatttcgccggcagctggtccgtttgctgagcccgcatatgcttcataccccgcttcgattttgacagcttcctcctcatcgaatgccacagcttcattatactcaatcccgttatccatcagtaccttctcgaggtacgcgaccctcgactcaaggaagtagacatagctgcggggaatttcacgttttgttatcggatcgtaaccgacgcaacggacccctgccttctcgcaggcttggcatcgtggcagtcgttggtcacatctgtttttcctctgcctacatcgattgcaagcggagacgtttcggaaagaggacgaactcgctatcgacgggatagcggcactttcattggctggatgcggtagttgttgcgccgatggatctgaaggcatagcagaacccgaatcggctatagggtgtggtcgttttcttccatttccaacggccgtgggcgaggtgtggatatctgaggtactgggattcagcataacgaaaaaggatataatgaccggtggcgcggaggttccaccatgtctcaactgaaagacccgtaatgaatgtacgcagaaaagaacgctgctgtggtataccgaagttggtcagcacgcatgtaggcgattgattaggtatgtcgttcgttactcgctagtctagcgctcaaacacgagcctgtaaatagtgaggagatgaagattggcgcttgagagctcgagagatattgccgtaatatctcgtggctctttttattcacccctttaattctccgaaacaatggtcagggcagagagcgattctggcggcaatgtgaagcgcagacgcagcgcatgactggagaaagcctgcggtcaccaacagcagagacagattcggctaaaaaaagacgaagccaaagagctgagaagtggagagggatggagatacgcaggagcgaggaatgagagcgctgacactgagtctggcagttcgcgacagccctgctggtggagattttgattcgggagatctctctggcggcctgtaatctctggtgctaagatatgcgtgggggttgtctaaggcagtgcctcggttggcctcttccaagcttgaacgggcccccagagaaaagagggccccg

SEQ ID NO: 1035 - DNA, 2497 bp, Emericella nidulans
taacaatcacttcctgaacacgccgaactcgacctgttccaggatggtcttttatcatggtacaaccgcctctttcagaattcttcaggtgtcagtacaatgcagtgaactgaccggctacagttttcttggcgacgactggtctttattgtcttgacaggtatcggtgtcctgcatctcgtctcgctcttcttcattcccgagtcgccccgctggctcaccgagaaaggacgagaagacgagacgaaggttgttctggaatacctgcaccacgaagaacgatacccgtgctacttttgcctatgcggacgcgcagcagatcaaagcgcaagatctgagcggaatacacctcgcgggtacatgcatattattcggacccccacgtaccgcaagcgtgccctctgctctattcggctgtgggtgatgagccagagaacgggaatcacggcagttgcgaactccatccccacgcttatgggcaccctgggatctggcacaaccatgcagcttggccttggtgtcgtctggaccgtctgcgcggttatcgggtgcggtataaacgtcctgctgctggatcgggtcgggcgtgtaaagttgcttggttcgtgaccctttcgtcttctacagtacaggataaccgtgagctgactcagtacgttgttgaccagttgccggtggctttggcagcgctgccctgattgctatcatgggcgtgctctaaaagtattacctcaacagcacctaccacccgggtgtcaatgccgcggtggccttttacttcatcttcggggcctactttacctccacaatcgaatgcacggcatacgtgtacggctccgagatctgccccacccatatgcgcagtgaaggctcgactatcgctttcgccagtttctttggcaatgaagtactacatagtctttgtcgctgtcaccgtagtttcccctgtgatgattctcttttactttgaggaggtatgctctctcttatattttgttaaactgcggtggaatgctaatccatgatccagaccatgggcctgagtctagaggaaatcaactccaagttcggtgacaaggtcgaactcaagctgaaggatgcgctggacgcccagggcaacctcaagcttgagtgccaactctgccaatgcttagctgtgccgtcgtctgacagcgatggacacgaaatttccaattggggtaatctgctgtcgggatgacgattgcgcgaaggactgtggagaggcttagccgggtttgattctgtagaggttaccatataaaattttctcggaaatagtgatatgatatgattggcgatgtaaatacagcaatcccgacctctatctgccgctcatagaactgcatttagggcttgctctccgccagccgagttgaccggccgctgtcactcgcccgccgcgagtccacgacgagccggacccggcccgcgccgctgattgcactctcaaggcttgtctaggatcgtctagtggccttggctcaaacggtatgtgtttcgaattcacctgcggaagcatcgtaccaatccccggcagtcgtgcgaggcctaggtctggatggaccaaagtcagtcccagctggaccagtagcccattagatactgcagatatcgaagccgacatacgtattcctcggaaagaaagctatccccatccgaggtcgaacaatgcaatatctaagatgcaggctgtaagcccctcgggtatggacgcctcaaaaacggccaccaacaacgtccacttgcagatagactgatggatacttcttctgcctgctctgtaggtaaggtggagtcaactgagatggcttgccgagctcagacacagtatttcgtagccaacttgaccgtccactccatccccaaagaggcgcagctcacctgatgttccgaggaaattcctgcttcgaatccgaccaactgtcaagctagcaaaacttgatactagctaatgaatcctcagaccataatccatgccatccgatccttcggacttccatgggctggcttggtccacctgtccccacaagcgctaatctgagctgtgtcaggattccgagtggataagttagtcattttttacttcatctgtctaactgcagtagtaaatagcgtgctggatgttggaaacatccagtcacagttttccttgaagttctcatggagtggtacttggagccgtccccaaactgtctgtctggcagcatcctacctttctctggaggtttgtagtcctgtagcagcatcgtcgcgtctacctactctgctaagattatgcaggccctgggctatcatgcctctggctggatacttgcagtgtgtgttgcgagtgccgtgtgcactaattggcatgatatgcccagctagactgtttacaaagatctccgtgcacggaaactgtatgcacataccaggtgttttacactggcagacaatctgcaaaaatcagcctcgtgtttctatcgtcatgctaatt

SEQ ID NO: 1036 - DNA, 2558 bp, Emericella nidulans
gtccaagactgtgaagttgtgagctggcacgtaccctttccctggtcctcaggtgagcagatactgtctcggctatcttgcccagagtggatgtcgatgtggatgtgcttaggcttccttcggtggcttgagtttcgctgccacattcgaaggacgataaacctgagcttgagcttgatcctgaaggggtaagcgtaaactgggaggaggaggtcgaggtcagggaatggcttgtctgtgcagcagcaattccatcgcagattgcctcgacagtacgatctagctcgacgaggccggggcgatgcacgttaaatatagccttgattctggcttcgaactcggtaatggttagagagttcattcctagatctgccagggctgtttgaggcaatatctgctctgggggccagtccgtgagctcgtgcagtagattagcggtcactggccagatagtaggggtacagtcttcctcttcttggatttggaaaggagtggtggctatttcaggagttgttggcgcggagttggctcgcgcaatgatttgtttaagggtatgagttgaggtcctgagaaacctcaccccgagtagggctaggacgaggcgttccttgccctgatcctggttttggtcctggccttggtccaagctggcatcaaacacaaagatatcgtagacgatctctcggcgttgctcggatgattgtctgacatacactgaccagcttcggggccttcctgctgctcccacaaagctcgtcaaaatagttgcttcgttgaggccggaacaggcgaaaacctcggagcgtttgcagtcttccctactcaaggcgtggatctcagcaattgcaaggaattggtcgagaagaatcgggttacagcttgtcttgccagagtactttccagccctggcctctgtcggaagataaacacacgcagtggcttcatggtcgttcatgcggattgactcgatgccgcggtatgcaggctcatactctgcgactttttcgagcagcttgtaggctatgcttccaggacctgagaatatggatggagcagtagcttctttaagactataatagtcagagtttcggtagttaattgtcccaccggtgctggtacgctcatcgtcgaggataacggtgcccaaggcgtgctgtacgcaatcactctcgagggagaactcccacgcccacaagtcggactgctccaagcgcaagccgaggccgttaactggtttagcaccgagtggtgtttttattttgagcccaaagagccgtatgaacttagaagctggtgggaggctaggtgttagaagggcggcagcttgagcagccatttccatgtaaagggaaagcggccagagagattctcctagaactttgcgccctgctatgatgtgaacaagtctccgattttcctggttaagctcgaatctgcaaacatgaggctccggatacgagaggtatgcgggagaaaccagctcgtcaccttccaatgacgagtccattcctacctctggctcaacaaatgtaagccagtgagaactcgtatcaaactggtaacctggtaagccttctagacccttagattgaatcagatttctgggatggtacatccagcactggacagaagcaccctgattccatagctccaaagtggcatttacaaccgagtccaatgggttttttccatttgatgaccccagttgaagtccgcaaagcaagtttgacttgctgcgtacgactgcttcgccagcacaactgcgcccgagcctgagccagcctctaaccagacacatggtccaagttctccttctatccgctggaccgcgtcgcaaaagtagactgggctgcgggaatgctcggctaccagctgtgttgtgaacgtcctccaggttgtggtctcagaacaggtctcaatggcgatcacgggggctttgatagaaacagtcctgaccaggtccaagtacttagacataagaggatcgatgagatgagaatggaaactgtgagtggttttgagtcttcgggtacgcagtgaagatgataatgcccttctttccacgttcacgatggccctctcgctgcccacaagaacatgattggttggtccattgtagcatgctatttcgattcctggctctgactgcaccagggtttgtgcaccttctctgtcaatgttgacggagagcatacaacccttctcatctccccagcaatcccttatcagctttgctctccccacaacaagtctcagtgcatctcgaagagtaataatacccgagatacacatcgcagtcagttgtccaaagctatgaccgatcaccttgtaaactgaaagccctacgtcaagccaagctgctgcgcaggcatactgtatggaaaacaggcagcagtgaagcatcaccacgtcatcgatgggaccttggctgaagatctcagggaataggccggacagacccatctgccggataagagcatggcatttgtccacctgctgacggagagggtaaatcgcatcgtatactgctttgctgaagtggattgttgagccggcct

SEQ ID NO: 1037 - DNA, 1933 bp, Emericella nidulans
tactatgtagtatattagacttgttaaacccaacccgccaagaaacgggttggatcatgttttctgaatacccgctgggttttgggtcttagtaggctatcctgtggataactaaataacccgttagtttatattattaggtattatagccttttgggttatagagcaacccaaaatcctagatagctattactttatattccctatttagaatacttaaaggctatattactatagaggtgttagggatctactttgtcaggatagattagcctgttaaccaggtaaggattccatcaccatgtagaattaacaatagggcaatgaatagccagtgtaatacaagactaaaccctggggtagacttgttaaaccacgggttggggcgggctttcaggcctagctgatccgcccacgcggtttttggggtgggttactgttatgggtcctttgcctatacaaggaccttagaccttagtgactcggccaaggcctgcgctgtcctgaaggcggtgagccacctacaagacttccttgcaacaacaatccttctttctcatttcttctttagcgattccttcttgtacgtacggcacgtctagataggaagatccatctaaatacgtcccttaacattactgccatcactgcctccttctataatatactagtagacctactattatcttatattttatatactttaccccctagacctctgtaaagctactcctttttttttatatacttaagtactaatagctctgtgctcggagcttatcctagtattatataagtatatctgcaagtagacttgttcaacccaacccacaaaacccgacccaacccgacccaacctgccaagaaatgggctgggttagaccttctaattatctattaggttttggatatttttggctgccctaaagcccggcagagtaacctgctaggttgccaagatatctaaataaatatattactatatttatattatattttcttacttaaatagtttataatacagtatttaaatatagtattttattaactatgtagatcactgcttattatagtaataatatatataactaggttattttgggttatttaggttgggttcaaattatttgctatatccatgggcagtttactgttaaggtaacccaccccaaaacccgcgcgggcgggtcagctaggcctgaaaacccgccccaacccgtggtttaacaagtctatctgcaagctttatagtactgctggatagggctataagtagatctagaaatactattcttttatatctctatctagtatctaatatataattaaaaagaactgtgaacaacttggcagtattgtaaaataatatagtagatatctacaaaagctagataaggctgattaggggaaattgcttaatgctattactaagaatctataaattatatataaggatccacttgctgaggtattatataaagtgagtaatgcctttatatattattatatctactagcctgcttataggttaaatatatattaatataacagcttttaaatactaaagatatataaaagtggtgttgcttatagtagccttgagaaaaaccaaaattattatattatttagtcctggtatagaattaaacttagaacttgataattactagctgtattattaatctattaaagtaaaataatattctaactcttaatattataaatataatgtacaagccaaagccagccttgacagagaagctaagaattagtcttagttaggttatatatataatagatagcttcagattattagtgattcttgattccatagtaattctctattatacctaattaaccctcatccatctgtaactatcacgatagataaaaattgatctagttttttagccattcagctcagggttgtaaa

SEQ ID NO: 1038 - DNA, 4250 bp, Emericella nidulans
catcgcgtatcgttgctttctacgactgccggccggaacaggttagggaataacgtatttaacaagcgagcgacgcagccaagcgagtgacgcacctctgtatttcatataaaatgacgcctttccataccctgatatgtcaacaagtagattttaagtaacactatagcactgaggtagaatatatatccttctataataatatgtatcttattttagaagtttataacctgtcttctcacaatatatggaatacgaaggtgcgccactcgcttgtgaattacgtatttatgttcttagtaatctagagctacgtataatatgcagcttttatccatcagatcgccaccccgaaatccttcggactttaaacaagcaacagagaccacccacgtacaatgaattcgcctcaataacgcaaagctgtataagtcaccatgtatgttcgcataaatcccgatctgattcggactcattatatcattaaatggtctttgacgaactattacccgtatcacgaaacacatttatacctcttcgcgtccgtctttcttctcagataacctgatcacctcttaaactcataaacccatctcatcagcacaaataccttgagtgaaatgcccctcgtttggcttataactggaacatcctccggcttcggccacgaatttgtaacccagctgctatcccgcggcgataaggttatcgccacagcgcggattctgtctagaatctctgacctgaagcagctgggacctgatgtggtgaccttagagctggacgttacagcgtcgcagcgagagttgaatgacaaggctgcggaggcgattcaggtctttggcaaagtcgatgtgctcgtcaataacgcgggatttgttaagtttgggttcttagaggatctgaggttcgtctatgcgtcctatccttccttatatatgagagatgctaagcccagacagtgaagatgattatataaagcaattcaaaccaaacgtcttcggccccatcaacgtagcccgggcatttctgcctcactttcggtcccagaggagcggaactatcgtgaatatcggatcgatgtccgcgtgggagacgtatcccggagtggggccttactctgcctctaaggcagctttgcgttgtatgttttcatctctccagttcgtcattttttgtaatcattattaaggttagatacagatgccaccgaggccttgtcgcaagaacttggtccaaccgggataaaaaccctccttgtcgaaccaggccagtttcgcactgagctcttgggtccatcgaacagtgtgtttgttgagacgaagatccccgagtatcaagacgcagcgaatgcgtcgttcggggcgtttcggagtgcccatagtagacagaggggggatccggtgaagggggtggcaaggattattgatgtggtgaaaggggagggagaagctgctggaagagaatggccaggggagttggtcctaggacaggatgcaattagggttatcaaaaagaagtgtgacgggatgttgagattgttgagtgattgggaaggcttttctagttctactgatgtctgacccttgagaaaaaagagcgtgaggtacacggtagctggatatagtctggttatataatgtattctgttcagtgattagaggcacaaagactggaagcgtgtataaaactgtctcggacccatacccgccactccaggtaaggagggccttttccttataaatctccacttatgggcctaatctgagaaaggataccctcttccctatcgccgtgtctctcacatccctataaagcttattttcaaaaagcgtaaccgacacttactcttcacaggacaagtgaacaacagtcttaagaacacataccttcatctcgaactgcagacaagatgcttattgctcaggacatcttgaccagaggagacatgccaagacttggtgatatcttttgttgcatttatcgtttgtgagccggtcgaacagtagtggtattggtgtgggcggtttcacctcttggtcctttactatcaggtttaattgaagagtggaggtttctagttaagtcattgtgtgctgttagtatagaactgagggcattcatcatctgatttcgtagtcagtagataagtgagactgggcgctcagatgaatatgatttggatgtcgatgaggtgctgcaatggctttagaaggcagttaggttaatattctcccagatttacaaggccactgctcgaataaagtccatactacttcgttaatttccccatgctcactctctgtatattggccacagccctggcctcatgcataggaccctcctctttgaaaccctaattccaaggagcaggataaccaggcaaggcgaacttacctgttctacagtccagtgctcactgaaaaagtcaccaaggcatttcagtgatgcatttcactaattaaccctcgttttgtctcctcagccgcgcaagatcctccaggtcatccgctctatgacgtcacactgctctagacatccattagaataaagatgcatgacaaatttatggcattgccaatatcgttatctgttttcatttgaagagcaactattgtctcatcgcggttacagtgggcggttgtatctactgcgtgagggacgccaaactcatcttcatttgctgaaatatcaacggcttactgaagacactgtacaactggaaaatgctacaccacacaatgttaagaataaaaactaggctattcgcgaatacagcagcttaagtaccgtcttctcagccctcaaacagccagccgggtaatccctattgaaggccgttggggaagagatccggttcgaacagcaggtaaaatagaagcctcggcggtcaactgccggcccgagtacatattccctatttttccatgatctgttcatgatatgggtttaatagttaagcatctactggtaagatccaatataacaaatccacagcagtgttggccaggcccatctagccgtttcggttgtccaccaagaggtggagtagtgctaccagactaaaatatctccaacctgaggttttgtccgtatagcgactaactatagcggagtaccgaggtaatctttccagtactcctacaaccatgcagattccgccataacccctactctcacggatagattatgtacgtacagtcatgcactagcggaggctagagatccctagcacatctccaagtctaagaagtaacttcaactctggacatgcgggaagcgattggcagatcaagggaacagcattggcttgttatattttgctacgttgagtacgtccctgcccaactgaacttcgtcccctaccagtccccaaatatttacggcagggattgataagggtgcaggcctagtctttaacaccgagtatgcatactggttctctaaccaagatctgcacattgctattcgtcatcctcactggcttcgtcgtcctcggcgggaacaccaaattcaaaagcccaaaggcaaacttccaggatgcgtgatccggaagctcgacggatacggcgtatgggttcacgattgcttcgtactgaataatcttttcgtatggcgggtattacaatgcctttaatgttgctaatgaggtcaagttatgcaaccggcgtgtctgcttaacgcagcagaagtcactaaacggtatatggaaccctgtcaagtccctcaatatataccacggttgcattgacaacggtgtatctcctctatatgttagcaaatgtcgcgttttgcggccggttagtttctcctgcttttctcttggatgccaacaccagctaagatcatccagttcccaaagattaattcaagacctccagcctgaccgtcgcaagcctcttcttcagcaaagtctttggagatggtagctccatgcgcggcctaaacttcctcattgccctctcctcattcggcaacatcattgccgtacaagtcggtctctcgcgtcagatccgcgaatgcggcgacagggcgtgttgccattcaccaggttctgggtctcaacgcgcccattcggcacacctcttggtccctacgcggtggtctggttcatgattgcgctgatgacctcgctgttccggcgggcaatgcgttcaccttcgtcaatgatctcagtatgcttcctaaggcggcttttaattttgccatagcagtagggatctatgtgtgcgttggagacgaaaaaatgc

SEQ ID NO: 1039 - DNA, 5953 bp, Emericella nidulans
  unsure (1)..(5953): unsure at all n locations
gctaagcacgacctcgccagcctcccaggctttcagcgccgtatcgacaagttcctgggagtgggggaacgcttcctcaattctcggctcttttctccgcgagataagcatttgcttcacctctgatcctgggtgactagccggcacaagcttgagacgagcgtccgagggaatgagagaaatgctttcgtaaaatgtttgcagctcctgctggctccagtcgggatcgtcccagggtgcggtgtaagcgtggaacgtcttgccaagctctaccggggagtcgacgcgcttaggcattcccatcttggccggtatgagcgagaggaatgcgactgtccatgtggcggctcctaggccgaccacttgcgagtacatgaagtgcggaaggcagaccttcagcgcgataccaagcggtaggccgacgagagagccaaccaacagcggcttcagcgcatgagggccagtaaatattttcgtgtactggtaccagagcaagccggtgtacgccgcaacgtacgagaggaacatgaccattgcctccatgtgcgactggaacgtccatacaagggctgttgagaaagcaaggccccatgaatgccacataagatacttgccaagtgtcttccagtagacctttctcttgaacctcacgtctcgcttctgcgagtctcgaatatctttagcggttttgagaggcaccggggtatggcttccaacaaggctgtgaagctcttgagctttggtgtcaatcaacacagccccaatcaagtataggccaacgaaaaaccgactgccattcggtaagccgtcgtcaaggacgctgagagaccgataaggtggccaccgctgagaagttccacccacttgtccagaagggcgacgatgaagtagagcattccacagccgatttccctgcttgattgacgccaatggataaaagcgttgtgcaagcggataccccgttgggcagccttgagagactctagtgcaaccttggtctgcgtgttccaccccgagctatagggaatcggtctgggaacatctgcgtatctgcaataccactcgaggaggaagttcgtggcttcccagtcccgggcgagctcaagaacaagggtgctttttgtcgtaggcctgctgaagaaccagcggttacgctctgctgttacatctttcaggagtgcctccctcgacagcttcaacacggctgggtcgctgagacctccaaataccttctcatctccgtttccatatgtttcgacgtaccatttccggatttctgtgtcatctgttttcctcagtttttggtaccaggttacccattttgaagcgacacttcgcagacccaatatcagagctccgatgaaaacatagatgaccgcaatgtagatcgcagagtcgtggccggtaaaggtggtaacaatgggcgagatgaacagaatggggatgcatgcgaaaatgattttgcgcccagacaggaaagtagagccgggatagctgaagctcgcgagacaggcaaatccggagaagtaggtggtcaaggcgacaagatagaggtaaaagacaattccagcccgtgggccattcacgcctgacaccacaacaaatccaatgaggccaccggcgatagtgaatgctagaccggcaataagcctgatgaagacgaacatgttcgttgcagcaaaagccatcgaaatgaggtagtaggggccaccgcaagcaatccaggtaccaatgcctccagacaacagtagcgaaatcatcaaggcagtggtggcgctattttgctcttcgtaagtcatgaaggctgagaggtacagtccacgtccaatgagggtaaggagaatgatatcgatcaaggccgggaaggcaaagacactgaggaaggtgaaccgctgatatccgcgcattggcttgactttatcatcaggattgacatcgatctgggcgccggcatacgatgtagccatctctggagcgccgttgatccagtccggaaggtctccgtccttgtagctcttgcggaaccgatcagacagtaattttccgaaagcgctgggtgagatgtcaaaataggactcgcagcgagatccaagagcaaaggattcggcgaaggcagcggcctgatcggaatgagcattgaacaatgggttccgatcagtcacctcctgatagatttcatcaagggctccttttcgcgcagcgcaaaacagcgcaagggccaagatatcagtataagcgtcgacttgtttaccttgcatcaactggcacaaaccacgcgagatctgagcaagatcggcttcgcggcgctccttgaggatctgagggaaggtcgcctcgacctcacggaagagagacaggcataccgagggcgaaggatagctgcagccttgttctcggtaccatttcacgcgagaattcactaatgtctccggagatgcagacccttcaagatatgagactgtgttgacctgcttaagttgtacgagagatgtcccttctatgagctgctgctggaggtacgcgcaaatcgacttggttaggtcacttggtgcatctgtcagagataggtgctgcaggagcagaagtcgttcctcgggactcaggacgtcgatatcttgcaccaggcgacgaggcaagccaatttcttccacgagatctttggtccacttggccaatgcagtttctgctccaaagcaaacatgccgagggcagccttttgcagagagataagtatgcagaacagtgccagcgaggccttgcaccttcttcgacacaaatacgtcgaatccttcggagtccatgtgatatacaccccagaaacgaatatcggtatttttacggaacccagagtcgagcccgagatacacacgaagctgttcattggcagcaagattggaaagctctttgatatggccagggactggatctgaggagccccaggccgaaagcgcgaatccgtcgtgaaactgacgcaagagagtcgccagactttgcattttggcaagaggaactggatgaagcaggccgagcgatttgagacgctgctgggacttgaggatctcggcgaaggagcccgcagtggcttccgcgcctaatggaaagcaaccgaacgagttgtactctagtcctccgatagaagtagagagggggttggtttgggacttggtcaaagaaacccagtcaggagggtcacggattgccatggtaagatcctcgtgagcgccgttatcgcgttctgacgatgcaatgaggttactcaaggttgggaagaatggcagcaactcgtcccatccgctgctgacgacaccgttgacgtcttcgatggatgaattggccctccagcgatcgtgcgcgctcatgatttccggctctttaagccagctgaaggaagaaagaggctctggcagcttcgtattcagcttgacgtccttcaaggcagccctacagccgatccaagggatcgcgctgtagaaattgcaccattgcagcgaccttcggaccacggcattcgatagagaggcgtcgtcatcaatcgtttcccaagccacgactgtaaaatctctcatgcatgcctcagacacaaaagccttgattgttgatttcatgctctgtagctggaagtaatcccgcttctgaccattagggaggatgctggcgttcttaacgaccaagccggagatggcctggttctgtagcacaagccggtctgggaggaagtctggaggcgcagtctccaggaagactgacagccccagcttttggatggcttgaagcaggctggcccaacattcagaggagagcttgttctcccagttggcgagcaagataccgctgaaggcgantctctcaaagacctgactcagagcgctgtcgatcttctcgattgccgctagagccgcatcttccttggaagccacatcctgaagatcgagtcggccaagaatctgcttacctgcagccagttgcaacggcttcgactactcctgactgatagggatcgacaatcaacatatcccactcatctaggaagcgacgttgataatcgctcaaatgctcatccaggcctcccaagtagataccgacagacgagggcttttggcccgttgggcggttggccaagttgagatgcctgtttgccaacccatcgatctttgcggatactctgggggacaccttctcagggcgccgccttgactagacggaagtcagcaaggtccatgtggcagcggtatgcatgtaaaaaggtgtttagtttacctccaaataaattatgcatcgtagtactgaagaatatacaaggtatactgttccaactgtaacgctgcccagtagaataccaatcaaaacctagaagcattaacaaaagaaattggaggatgcatggatcagggggctcacaaactgccaccagtgatttttcatatgatcccacccgacgggcgagacatggaggatttgggtcatcctgattaaaaattaggtagtaaaagtcggccgtgacagaagcaagaacaccagcaccgaggtgagccgtctataaggggtgtcaaaggctcaatcgcaaagttaggacagtgagctggtctaggaggcgaccattgtttcaggctgcggagggtatatacgtcggcaagtatgtaaagcagcaggcgacagaactacggcgtaagcggcctcttttgcccgcgtgagctgcagaaaacgcagacaacagaaccgactgcaagactggcaacagaaataggtgactgtgctggccgcaagaagcggttgggtttgggacctctggcggttgcagagacaggcgaagttaggcgctgcaggtccgatggcaaaagtagcagaccctggagaccgttcagaggggtctagaaaagaagaaatggtttctcagtgattggatctgtctggagcagctgtccattcctttgagctcgctctattcaccgacgggggtggaccgacgggataatgggtcaatgattatggaaccaccaagacggtgccgccgagcctggagtaaaatgacagtgacaaaaatagaggcgaggtttgcaggcgagaccagactagaatggttcaggtctcagaacggcaggacgttgaggccaaagcaggacctcgctaaaagcgtggccgccatctggaggcaatatgaccgagccatgatggacggccagatggggacgaaaacgcccaaacgccgcactaaactggactgtttcattcgtggtcggcgattgcaggtggccaccggccacgaactaggattgtcgcgatgttgtggaatctgcacggtatgttgaccatgtccacatcagcagaatccagggagtctcccgcgcttgaaacaggatggggcctttaggctcaatggcggtgcggtaattggacaaagtgatgaaatcgctacgaatttagctattatagcgttctttcaacgagcgccgggcgggtcaagaggcgagagaaaaaagtcgatgtggaggaccaaattggttaggttgattcggtacgtgagcggaggttgtcatggaagagtaatattagaaatcgaaaatcgctgtacaaatgctcattgcaattaccgtcatccgtcatactgtttttcctatacttacaggtatagatcagttacggtatttccgtcttggcggtacatgttgttaccgtacataagatccgcatacggtacttctcacccgtcggctagagtcgacctttgtcgctgcccctgcagcgggatacctcgatggcggccatgtacgacagtggcccagtttccctcgcacagagggctcccactatcacatcctggcggcaacgcccgataaattgggattgctccccatacgtgctgcgcgaacgccatctcgcttgcacgcgacggatgcttcgttgccaaatgtttgccaggcaatagcgccgcccggacctagtaaggaagcccagg

SEQ ID NO: 1040 - DNA, 2131 bp, Emericella nidulans
gatggtataatcactgagacaatgtctaacaaggatgtctggggtaatgaggatcctttaaggaaggagagggaggtagcgcgcataaaccttaacgaccctctggctgcaatgaagaagggcattcgtcaactaaagtcagttgaggaacaacgaaagaaatggaacgaagaaagaagaagggagcttgatgcgttgaaatctgcggaggaaaccctgtcgcgccaccgtagagacgatctagctcaaagaatagccttgaggattttcgacttgatgattctccggatacaagcggaaaagaaaggagtcggaggggagaaaggcaccaccggcattctcacgatcgaagttccactaattcgcatcgacggcgttcgcattctagatctggctcacgttcccatcatcaccgcagtcataatcagcggcatcgccatcacagcagccgtgttggccgcaagcatgaaacgggaggtgacgcgaaagatcggacataagaatgagatacccgaaagttgtccgtatgggcgggcaccgtacaattacgagtttatggcttgaagcatagctgttgcgccaacaagaaatgacgttctggaagaggaaagcaaaacttttattttaaagcttaatatttactgtaacgcccagttctggcttcccctttcgccgactcccgcatcatattcaacggtgatgttcagagatctggagttcgaatccttcttctgatacccaaccttgcctttgatcagctggcctttcttcagcggggccgcgtgcttctttccatggtcgattaaaagaattgtttgctgccagtgagtctctttaccatcaggcccagtggtaaaagacacaatccctttcttctgcaggtccgctggagtggcattaggcggaagcgtagaatccctggacggcatgaaaaaaatgtcgaaccagatagcccaaccgtcgagagcgtcaacgtcttctttcagggtcaactcaaactctttcaagaaggacaattcctccacagtgattgtgtgtagtggaagggtgaggaagatctgagactctgcagcgataacagatgacggcacggtacggacaagtgcttcatcgtagataccagtgagcatactcttcatgttgaaaccgtatacatcgtgccagaagccaatgtgtgattggaccaagtcggggtcggctagcggtgcgatgcgaagggtagcgtgtgagggggccatgagtccacccggagcgaggtagcgatcgcgggcgtaaatgacagagtcaaacatcgcttcgaacagcaaaccataacccatccactcggagatgataatgtccacctgttcgacgggcaatgtgacttcctcaatcttgccgcggatgcatctgtacagtgaaactttagcagtggacgtatatacttgctgaagttttgttaacatacgttataacatcgccgaacccattttcatatacgatctctttggccctgtcgataatgtttgagttgtcgacagagataacctttcgggcacctgctttggcgcagaacatagacagaatttcggttccacagccaacatccaacacaaccttgtccttgaaaatgtgtttattctcatagacaaagtccctgtagaaatcggtacggatcgtgtccttgagcatagactcgtgaatacctaaacaatatattagcgaatgagagactccagtgagatgactgaacaccgcaccgttataggcgtaagaggtgaagtagtcagaatcaacttcttcagctttagtgctagtacgtccagcaggtgtcaacgggagcttctcgtcttcctttgtcaattgttcctccagtgatttctggacagcaagcctatactccgagaactgaatttgaaggcgctccagctcttcctgaagttcaactacctggcgctcggcctgggtttcgccaacggcttcccccggttcctcatcttcaatatcatccagactgtataaaagcgcatcgtcttccaaaacaggtttgagatagatctcgctctggaatttatccttggaagacagatcgggcgtcatgtttcctttctttacggaactgcgaatgtaattgacgagtttgattgtatcc

SEQ ID NO: 1041 - DNA, 1393 bp, Emericella nidulans
ctgcagtgcccttgttcctgcgcaccgtgcagaactcgacgcacaccgacaatcacaagcagggaaaggttgcgcttcggaaggagggtgttgatccggggttgactgggacgaaagttaaggggggtcagggggatcggtttttgtggctgagaccgggagacgagcagtatagggcatttggagcagaagagtggaaggcgattgttacgggaaaggtcaggttatagttgaacttctatcgtggtctgagtcgcgggtgatctgttgtggctggtaaacagcacggcatattactgtggacagagcggagatatagcgcaaatatagactctatgtctagtctaatatgattcaattggcgaaactaaaatcaaccgcaggctagctacataacacgcaacacagtgatatcattcataagcaagttgggaaggcaaaacagttactttttcaggccgagcaggttgatgctcttcggccgctcaatggggaggccaagcgcgcggtcccagatcagctgcacgaggggacccagagcacgcgacacaccgaatgtcacagtatagtagagcggctgctggaatccgtagtggtagaagagcacgcctgaggcggcgtcgacgttggggtgggggttcttggtctaagcacaatattagctgaagcgtcttgtgatagggacgatacggtacctttccatgctcagtgagcactccaggggcaatctctgagttcttcttgacgagctggaagaccgggttggcgaggacatccttcctcgtggcggcgaagtccatgagggcctggaagcggggatccggcttgcggagcacaccgtgaccgtatccaggaacaacacggccagacttaagcgtgtcccagaggtacgcgcggacgtcctcgtcggtgaatttggtgccaattttctcctgcatcgctaggatccagcgaagcacttcctgggctgcgagaccgtgcaggggcccggctagaccgagcagaccggcggagtaactgaggaacgggtcggaaagagcagaactgacaagatgggttgcgtgggcggaaacgttgccgccctcgtggtcgccgtggagagcgaggtaaagacggaggaggtcgtggaagtcggcgttgttcgcaccgcccttaccgaggagctcggcgaagttgtaggaccagtcctgggccgggtcgagtttctggcggccaacgacatcgatctcgttggggcggaagacgagcgccgcgacacggggaatctttgcgagaagcgagatggcgtcgtcaaaggtaggctccccctagtctgccttgttgatgcccttctcgatagaacttggcgaatttggactctgtgttaagcgcagcagtgatgatagtaatctgc

SEQ ID NO: 1042 - DNA, 1735 bp, Emericella nidulans
attatcgagttatctgtgagattctaataataacatttcttgtgcataggctcaactgtagatagaggttcgcaccctctgtgcttgaccccgtgctttccccattatcgcaacttgactctccctacgcgttcttctgtcaagtcctctatccccctattccaacaggaattccctctgtccggcctatcattagttgatcggtaatctaagaatattcacacagaacattttagttttctcttttgctgtaacggtcgcactccccgggctgcgctcttcgagttgcattaccttgtctagttgatcctgaagtgtctgtcgctccacacgcaaaccgcgcgctatttaggaactgagaaatatctgcagacaatgctaatgttcaggtcatcctcattctcaggtaactcttcggtgggtacgtacaagctggctaggaaccgctcccacgcatagattcattcgagtctaccgcagtcaatgatgcaacctccagttcatctgcggtttgattaagctcatggcctcctcgcatcttgcgtggcagattaagacgagcagcagctagatgagttgcctttctattgagcgatctttcctggaaatcaaattcctcaagtggccagtcatacttcggattttctactgacatcgagaggggcgttgcgggttgtggtcacgaggaaagaatgctttctcattacccagtgttttgagcacgatccgaggctcaactcataccgacccaggcagtttcgggtctcgctctaaaactagacgtgtactcatggggaaacaacttgtctaactacctgttagccgtctggcgtttgttgtcggggattgcgcagttacacgcgaccacccgcttagctaaaggaaggatttctgctcgcaaagcaagcctgggctgcgcaagtaggcagcttggcgattatcgttagcaggaaatgttaccgggctcacctacgggttgagcatcgagagtggcgtacggttggaatccatattctgtagaaggacgcaaaggagctggaagctacatagattatcccccggcttgcgtccggctttgacaatcagcgcagggcaggggttacaacagcactgctcactgcaaactaaaattaatattctgtggcttctcgtcatggggatacagaataccacttaagagcgttgttcagccgtcgtgcgcggccatcgacgggtatccgcaaacagcctgtagtcccattcctgcaacaaccctgaatcattcttggaatggagcctggacctacggctggtggagcattccaagtgtccttattcgttggatctcaaaattcaaacgagatgggttgagccaaagaaccaatgtccatactgtgggggatactggtaatacgaggaccactggaatatatatctccatcaactaatcacaaccgaaagacacggaacacaaatgacacaaaatatatctataagcaggagtgaaatccatatgcctattaggtctcgcaaagtaagctggtctcaaggaaagacaaccaagctgaacgccaaataccatagatgggtgacttcggatttattagcagctacctggtccagggccactacagccaggcaattgaaatatgacggagcaagacgattacaatttgacactctcttcacaaatcgatactactgtggacgcaaattaagtagacgcaaatacagattacacaacgcgccgctggac

SEQ ID NO: 1043 - DNA, 1401 bp, Emericella nidulans
atcggctccagttaatcatgttccgctgatcctgttagtcagacaagtaccagcatgcattgtatacccgcaaactcgacccgagacgaaacaagaggtgaagtatgaatgcaacttaccaagacgtcgtaaacgccgaaacaactagatcacccctctgcacagtcttcactgcatcaccgacctccacaacctcacctgttacttcatggcccatgacaaaccctgttccggcgggttcaatgccgcggtacacatggagatcgctgtatcaattaatcaggacgctctgatctcagtcgaaaagggcttgaaatagaggttgattatctaccttccgcagagcgcggtatatgttgccttgatgataatatcctctggattctgaatcttaggaattggacgctcttcgacggcgactttgtaggggcccttgaagaccacggcgcgcattatctggcctggcattttgctctggaccgaagtttctgttgtatgatgatcccttcttccctttctttttatttcgacgcggggtgcaggagaagctggataaatctcggcatcatatacgatacacggctactccaaaagctgggcaggtggggctattatgactgatcggacggttcaccgatctgaagagcaagcaagttatctcccgaggttaacttaaggtctgagcatttccaggtgtcattgaatgaggtacgtatttgctagggtctttgatatcagcgaggctgtggttggaaaagtgaatggattgagatgaactgcctaactatctgacgaaaaccacagcaaaaggaatcaacagatctgactctcaaagcctaaaagctatgaagataagcatgcgtaaaatgtataagacatccaaatttaaccgccggggttcaaccttgcctcagtgaaatctgtagtgctgcatagatggcaaaattcccattctgaaccaaaccggaagaccgataacgccctgataacgccattcactccgcgccatgtcaaaaagatgctcttggtaacgtccattccgcaagcatagccgtactagccgtgctcaggaggaaacccgttgccctgatgatgtgcctgctgatatgcttggagcatggccacgcctaagaccgtccctagcacaccacgcacaggagttcctcctccaagatgaatttcccttctttgtacttctcgctgctctcgtacgccttgtcgtacttccatcctaccgtttctttgcattgcctgcatgagatgtcgcgaacgatgtgtcttccggtggtcatgctacgctccacagcatccgacgtgttgatgttgacaacgaaattgaataggtacgctttaccatgctgaccccggcaattctgcaaacggagtcaatatatacgtaga

SEQ ID NO: 1044 - DNA, 1622 bp, Emericella nidulans
agatggtcgaattgtttgtcgacaaaggcgtttccatcaatgattacaacgcggagagctatcgccatgccgtccatgaggtggatctaagaggtggttaggatcctacaccagtggaaaactgagtgatgatttagcgacggaccttttcggcgagatctacaaaacaaagtacggtagttcaatcccgaacgaaaagtggcgagcgcttgccgagctcttacttaatcagggtgccacggggcaggtcgtcgacgaagcgctgatagaacgggtcagggctagagacctcgcaagtgtgaagctattgctacgagaaggcgcctctgtagattatgacaacgccgctgctcttgatgatgccgttgcctcgcacaatgaagagttcattgacgctctactgcaatatcagccggcagccgagtccgttaactctgtcttctggcgcgtagaagatcttcctcatagtgtccaagtgcgcatcgcgcgcaagttgctcgacgctggtgcgaatggggagcaagtggatagagtactgaaggtggccatagcccccttggctggtgaacggaaccgtgaacttatcaaggtgcttgtggatggtggtgcagacgtcaaccagcgaaatggcgagctacttcacctagctgctcaatctgccgacatcgagacactacagatcttgctgctcgggtttccttcgcccacaattctttcaacatgcgtaccgcttgccatgaaacattgcgaagcccagagatacaaaataatccacatgcttcttcacgcaggtgctcgtggcgatgagatctcgcaagcattggtagatagtatcgacgggaccacatccgggcttgatctagccctactgctgctcactaccggggaagcaaacactggcttcgagaacgggagatctttcaagaaagcaatagagtcgagcaatatcggattcctagaactcgttgcccaatataaccatctccgggattccgatttctgctcttgtctccttgctgcgatagacctccaccagcgggatagaactcgtctggagaaaattcgcattcttctcttgagcggtccagatctctcagggaataccgggaccgccgcacttcgccatgaaatggaaggtttaaagcgacgatccgaatcgacgctaggagttttgcacatgatacttgaggcaggagcggatgtcaactaccaacagggacgcatcttcgttgacgccattgcattggacatgtttgactgcttcaagttgttcctaggcgtccatccctcatttcaatcgctggagctggctttcgacaaagctctgttatacgccactcctaccaacgaccgcgcggccgacttacgatacctccaagaattgctcgctacgggtgtgccccaggcaactctggacaaggcgttattgcacagtaccgataagcaaagcgaacaactggttcttctcctcctgcgatacggtgcatctgtcaattatcaagatggagccgcagtgcgcaaagctatccagaaactggacgttgagctgcttgcgcatctgtgcgccacgagccgaccgtggaaacgttgaatagcggattcggattgtgcatggccgttca

SEQ ID NO: 1045 - DNA, 1855 bp, Emericella nidulans
aaaactacccgggacgagtattctcattatatcgtgcatgagtgggattttttctagttccaaagtgaggcctcaactgcccgagggccaccgcacacaatcaacacacaaggagcccctcaacattatgaggtatgctcgcccaaatgctatggattaaggcacgctactaacagtggattaggttcctgaaccaagtccagcagggacactgcctattcaacagtcgatagaacctcaaacgaacacacgtgaccgatatctgtctcctacatctcaattatcacccttccactatgaagaggatgaagatggagactactatgatgtggaatcggacgaggaaccggcgcaagcggccatgcaagattttaaccagctaaacatggttctggcatctgcaaacagggatgcaactcaacatcgttctttcaccacgtacttgaatgaggccaatatgctggcaacctatcagccggactttggctcttccccttttaataatcccaagacggcccgaatcttcttgcatttcatccacgccaccggtccagtactgtccatatttgagcgtcacgggacggatcaatccaccatgctcggtgctccagttcctatggcgcagcaaggattgtggacatacactcttcccctcaagtctttccaacatcaggcactacagcaagctattctagcactgggtagcttacatatcgcgtatcttcaacaagccccatctacttcctcgctcaaacattaccagtttgcgcttaaacgcataggaaaggcggttggactccctatgcaacgaaagcagttgggcacactggcagctacgctgcttctagcatactatgaagtgatgatagccgatcatttcaaatggaacaatcatcttgcaggatcagctcaactaatccgcgagattgattgggccggtttaactcgcgacctccgcgctcaacgacgcagacgatggattgagcgtagcaacacccatagcttttttcaggatatctatatgttcaacaacccgacagttgaagatgatcctttcgctgaactagaagccaatattgacgagaatctcataggatgttttttagggcgtgccgtcaactatgaccagtttggacaaatcgaaggggagcacacccagacccggaacaaacatcttacccgcaaggatatcgagactttccggactcaatgtgatctttactggtggtattgtaaacaggactggttacaaagtcttattagtggaggcccattatgtctaccttactctcagtggggtcagtgtcctccacgtgcgcgtatagggctcaggaacgatctttacggcactgcagatcacttgactctgctgatgggtcgacttgcggattttgcagtacgggataggaagcgaaagataaaaacggccaagtctgccgggtccgagtggagaccagacgcaaagttcgggcaattcatgggtcggtttgtacccagaccgggagggccaggtcaaggaccagctaattctggtggtcttcctcccggacagcccgggcctcctggatttcctggtgcttcaaccacccctgggcatactggtcccggtccacagccttccaatacagaatcggggcaaggatccaatcaatctcaaggaggccgccgagtctcgcggcagtcttctagtgcctcttcgcctcaaatgcctcccttctatggtatgattcctgcaagcgggcccacgcggttacctgctgctttcgccacttcatcaaaaataagcgagacacactctcaacatgacgaggacgtcgatatgtcgtatgaaaaagcagaacgtgagtgggaaagc

SEQ ID NO: 1046 - DNA, 2213 bp, Emericella nidulans
  unsure (1)..(2213): unsure at all n locations
gatatcaacatgatcctgcagccaatatcaagcctcctaatgcctttagtgattctgattggggtgggccttatttaaaagcacgggggggtgttagcagatatgttttcaaacttgccggaggaccaattgcttggcaatcaaagcgccaaacctgcgtagcaaccagctccaatgaagctgaatatattgctgcatctgaagcctcgcgcgaagcctattagatatactctcctcaaacttcaaaggacagacaataagttcatcaaaatccagagactcgcgaaattatgaaggatctttaattatttgatgaccagcatgcacctggtatcctattatatatagacaacaaaggagctattgatcttacaatgtccaacatacaaaccaaaagatcaaagcatattgacatccgctaccattacacccgtgatatggtcgaccaaggcatcatccatatcaagcagatccctactgccgaaatggttgcagatggctgtacgaagcctctgggatctgaagctcactcccatttcattcgtttattaggtctccacaacgatgattgatattttcatgtaattaggcccgctggtgatgacaatctcgctcgagggggggtgccggggcatactgccctccggtaccgcctgcccctaaggttcgacctcgattagtcatcatttagtaagctagttatttagataggctgaccttaccggccacccaataagacaacgatccatctcttcccatattatggctctggctgtgctcaggcctctgcttgatccttcttgacaacttgtaaaattacattctcccgtcaggttacggagaataacctggaatgagacttttccggagtctacagtgatgatctctcagctcttgtctgtgcgcaaggtccgttcctttgccggctattccgccggcatacccgaaggcatctcgccaggccaggtcttttacccagcagagaggtactgcccagctatacaaccttggtcgaggttgaattgaatgtgtctaaagcagtatgtctcgcgtgattgcggtaacactcagagatttcgttcgccacgaagcggaatggatccagttcgtggtttgatccaattcggcggcgccatcgatggccagtctagaggtagccataatctctttctgaatggataattaaagtcatttctctgccttttcgagagtaaaaccaacatggaggctcagcgtctcaccgagaggatttcaatctatccgctagggctgatctacaaagacggacgccatctgaggattctaccgttctgaacggagtgatgccttggcattttagtcactgcaaatggaatgggattacgggcatatgtcggtggtaagtaccttagatcatctaaagcgctggctgaagcaaggcttagggtgttggaggtaatcggtgggtccgtgtatccggggtggccaagtagtggtattagttgctgtgagagcagctggtcagcggctccctatcatttacaggcagaaagcaacgctactatagatttgccagagtcgggactttgcagcggaaatcgtcctctcatcgtaatcagtatgggtatataatgtagatcggcaggtaagaaaagaaagttctgacgacccagttcagagacgttttatgaataaatgggaggtgagaagagctcgccgcgattcaaccgaggttgctcaagagtaaggctgcttacattccgaagaagtgtctcgcagtcccaaaagcatcagaacagagcgccggcagcgcacttaagagtagcaccattgttactatgattaaatgatggccaacatgaacgtcatctgtaggcatattcagtcaaccttacttgacatcgcttcaatcttgccacaaatcatagaatggttcgcaatgtagacgcaattaaaagagacatatagaactggttgacacgtggaataccagaaagtttgcgtcatccgttatggaaggttatcgttccgatatcctagtcttatttatgggtagtggtctatatggctgacataggatgttgtgaaaggcatcgatcctttgcaggctaagccgtgtacttgcccggctacatactgtccgtctgccttgtgcattcggcagtaggttattttcaaggaaacatgtgccggtacagctggatcgttatggagttctgtcncagaacaggtgt

SEQ ID NO: 1047 - DNA, 2226 bp, Emericella nidulans
gagagatggggagtgggagaatgggaggagaggaggagattgagaggaagaggatgggcaaggaggagtgggggaaggggtagaaagagaggagcaaggttgggggagggaggaggggagggtggaagggagggaggaagggaggggggaggagggaagaaggggaaaggatggatggaggatgggagggttagggtgaaagatagaagagggagagaggaaggggaaggaaggagaggagaagggagaggaatagggagagagggggatggaagggtagagaggggtagggagtgggagagaatatagggatggaataggggtatgtagtggagggagagggggaaaagaggacaagggagttggaaggagggtggggtcaagaaaaggggctggcgaacggaggggtggggatggctttgaggtgaaggagtgattagggactatggtatggggagcagagtgtggagaacggatggtcggctagactgaaggagaggaagctagctagcggaagtcatgaaggatctgtctaattgaggcagatggtgaagaagataagggcgcaaaagcgtctggtttctggagctgggaagcttcgctgtgcttgggatgctgccttggcgagcatgaatggcacgaaaaattcaaagtctcgtctgagctttgttgatttctggacagaaattgtcgatagtgagtatccccagcgaggtaatcatcgtgcgtctaacatattttagatgggctatttgcagccgcctcatcggaagaaaggaaatactggggcttctcccttttcatcaaagtgctcaacgagcatagtctgcaactggcttctctcgtgttcactaaaaatctgatccggtgtcttacaaaccaactggctgttgaggaccgctatctccatcgcatggctgtaaaggctgcaaaggccatccaggcccgcgtagccaaggagccagcttttgccgcggcgtcggtcaaaggcctcatgggttccgccggcgcagtgaattttgaccaaataaccaagacgaagacggtagagaaaattgtgtccgaagctaacttggatgccctgaacacgattttgcctcttttcgagcaactggtcgcctcccctggaacaacagacagcaaagccgctgcgtcgaaccgccaggtcctggcgagcttgctgttatcgatggttcgggctcgtgtgtctgctagcgatgcagcggatgaggcctcggaagctgcgcttgagaggatcctcttcatatttgctcgctttgcatacttcacaagcgaaggtggtaaaggtagtgctcagccactgttcacgcagcaaagccaggaactgttccggagcaggattaattcctctctgaacagcattatcgcggctcagaaacatgcggctacactaccgtacgcgattgtgcgtaagattcgcgacgcggcaaagtcggaggagtttggcaagttcattattggtatggacggcgccctaaaagattcagtgaagggggctttcaaagcgctgaagaggctatcaagcatggtaattaccattctgcacaaaatgaaaagtttgtactgacggtattcaggagaagaaggaaaccgcagctggcgtggaggcattcaagctcctttactctatgacaatactgcaggtttacaatggcgacgcagatgctgcgtcaatgctggatgaactagacttttgctataacaaatttttcgcagacaagaagtccaataaggaagaagagacctctgaagcctcggatgccctcgttgaaattcttttgagttttgcctcgaagcagtctcagcttttccgtcgtatgagtgagcaggtctttaccgcgttcgctccgaatgtcactgcaactgggctggagtctttgacctcggtatgcatcccgttatttctgccctttccagtttcgagactaaccgactcgctaaggttctggaagccaaagaaagtctggcaggccaacaagagatgttcgaccagcaagacgacgaagacgctgaggaagacgaagacgaagacatgatggacgtcgacgaaatggacagcgacgttgaagttgtagagcctgaagacaacgacaaggacgacgacgcctccctcccttcagaccaagaagcccaagaagacgacgacgacgacggcgaagacgcggccgagattgccgccttcgaggccaaactcgcctcaggcct

SEQ ID NO: 1048 - DNA, 3339 bp, Emericella nidulans
ctcactaagtagacgaagctcggatcaggccaagccatccggacctgcagatcaggacggagactccactgtcttttgctgtggaaaaaggagacgaggagatagtccacatgttactgaaagctagggccaacccggacctagctgacaacagtgggagggtgccactatcgctcgccgcagaaaacgggaaccatgagatagtgcagctgttgttgaaagcaaaggcaaaacccgacatgagggacaaaaaaggcaggacgccacttctatgggcagccgacaaaggccacaaggacgtggcttgggttctgcttgccacagaaaaagtcgacgtcaactccacagatgagtatggctgcacaccactatggtgggcagctcgacatgggcatttgccggttgtgcggctgctcgttcggaagggagcagatattgaagtacaacccagaatcaccgacaggagcaaatttggaaaccctttgttccaggccggtcgaaagggtcatttggaagtggtgagatatctactgaagaagggcgctgatgtcaacgcgacgaatggcgagaatgagacctcactgctgctagcactgttgaatgatcgaaccaagcacgggagggaggtcattggcttgatattgcagaagggagcggacgtcaatgctgcggacaagtctggacaaacgccactcgacatagctaccaagcagaacgatctggaattgatgaacgttttaatggaacatggagccgagatcgactccgtaacggaagaaggcgcgaccccgttgcaccaagcaataatcaacgagcgcgaagatatagcggaggtattgctggagcacggggccgaccccgaggcgcaagattcgcacggggatgcgcctctccattttgcagcagcaagtggtcgccgcaagatggccgagttgctcctggacaagggcgtagatatcgacatcaccaactacactggagacactcctcttcataaagccgccagcaacggacatcgaaaaatggtggagttcctactctcaaggggagccacccttgagatacggaacgattatcgacagacaccgttgcacaaggcggttggagctaaacaccatatcttgaggctgctggtcaaccgagatgccgacgtcctcgcaaaagacatgtacggcaagacagccctccatctagctgcggaagctggtctgaaggaggatgtgcactttttgatgggtcatggggccgcaactgacggaagagatggtaacggacgcacagcacaggacttggctcgagtagagggacacgacgatgttgctgaactgtttaacaagatggcgttggttctcgcggagcaatctgggtctgattagtggtctggaaaaatacgttgcatccttagactgtactatttattaacatacccacgaggagaatgaaaagttggcatgagtttgcacagacagtcaaccagaaagaaagaatagactgcacggctgagtcgcaagagaagttctgaaggtaagcggtctgcctctgtacctacgttattgccaggtaggtagtctttgtctataagccatcccacgtagaacacagcacatgttgacaaatgagctgggactctttacattatctcaagctatgaatacatataagataatttcccacttaccagttgaaccgcgccagcgccgtacaaattccgtcatttcaactgctgattttatgcaagatacatcgcttctttaagtccacgcctttccagtccaaccttctttagaccggacggacgacacctttcgagaactcctatttttcgcccatcaactccttcctcatctcctctctctgtatcctagcttgctccttggtttggttctgaatagcctgctgctcggcaagcctcttctcctccatctcttttgccgcgaaccaaactatacccaccaacgtcagctatacgaactcagctcatgggttgataaacagagacgcactcgacttatcagacttggaccattccttcaattttgtgacatagtcgtcgaattcttgtgcgcgccggtcaccttcccgcatactgcgctctcggagctccggattatatcgctggatgagttcggcatctgtggggcgaagtttctcgacgagtgcagggccgccaacgcatatgacgatgccactagaaagcgcgttccggagttagcatgtcggtatggtaagcacaacagaagtctcacactcccagcattttgagccatgttcccgctcgtgacatgttgccgatcgttccgcacgcttgtggacaaggtctagtgagacaatgatgtcaggatacggatgtacgagttccgccttcgcttcgatcccggcaactgaggacgaggttactgtggattgtcgtattatcctggagcaggagtgcgatgcgatcacttggatcaaccaacagtttgccgatctgtggctctctagtgtggcgcagcatctcatatgtggctttgacatcatccctcgggactcctgcagtggctttgcgggtcaacatagccaatgggcggtctcaatctgaaaatagcaaaagccccggacttgggccagggttcggtctgacccttgtcttgcattctcaaaagaaaaggatcaatgacgagaaggactattgtcccttcttccagcaatatggcatgccgacgctgccgagtaatgtgggcggcgccgagattagccgtctatacttctatggacggtaatacctcggccagtagagaaggctcgagacatgattgtcggtaggggcctgggaagtcaatttgaattcttcccaagtgccaatcgtcattcactgtaacggtttatggcaatcatgagcggcagccatcacgaagtgtactctgcagcaaacaagcaagggcgcgttcctctcacctctggtctcccgcacagagcagtctactgtgagacctgggaatggtaatacagactactgagtacggtctctgcaggggtatgaacatctcggaataatgctatagtcgtctgtttatgagcggctgcaccgtattcgtgtttgcctatttgcccaggaagagcatttgattgattgattccccagaggtggatttagtgccgtcactatcgtagggccaatccacagcggagatctgataaaggccaataagaaacaagcctggatcgctgcccctgcgtttcaagtggaaattggcctcgaatcggacgctcccgtgcatctaatgtaggtacgggcgtggcctatcatcagtgtcagcttcgtgctttcaagctcggaggctttgcggagagattgctaca

SEQ ID NO: 1049 - DNA, 825 bp, Emericella nidulans
tagcgaaactggtccatccatggaatggacctcccacgaaatctgccaactcaacacacctgtccccacggcctctctggacattactggcaatggcttcaatgatttgatcgtaggctataattttggtcctaccatgatcaactccaatcctgatggtggtgatattatatggctggagaacccgggcaacaaccccaacgcggagtggaagcaacattttattgggagatggccaacggtccaccgccttgcagtcggttactttacccaaaggacgttccctgaggtcattgccgcgccggtagtacatgggccatacgataaggcaagatcccagtggcatagagataccccggttactaacttgctatagagcacccctatccccttgattatcttccagaagccggatcggaagatagttaaagaagtgtatgctcctggcgagaccgtattcaaataaacagtgcccaaaattaacgtcttcttattcgcgcagaaaggagtggaggaaagacatcgtggatgatggtcatttcagggtagtccacgagatctacgcaaaaaggtaactcacgccaggcccggtcatatatcttattggtaacagcatactagcttgggatggcccgcatggccttgactcactgctcgtcgcatcgatggacggtgttgcccgtctgtactacgaggacggccattggaagcgagagttcatcggccaaggggaaatgaagacgcgttggcaaaaaaaaaataccttctttcctgcagctggtaacctctggggcgctgggacggcagatgcaaagaaaataggga

SEQ ID NO: 1050 - DNA, 1486 bp, Emericella nidulans
tcagtccagcagaagctcagctcactagcagactcagttgatgaagatggtgagcgcgataattatgcgttccgcacttgtcgcgcgtcgtctatcgttggtcggcctcgctctgaaggttggtccattgtttaattactagcccagctgtctttagtcccctccatgcaaatcttccttcggtaaatacttcacagggcgcctctagtccgtagtttgatcatcatagttctctcttctactgtacatacccatcatccatgtctatcttgtgcacttcgccgccaaaaccgccacatccagatagccatgtcggttgtttctcttctcggggttaaagtcctcaacaaccctgccccattcacctcttcctaccagttcgagatcacgtttgagtgcttggagcagcttcagaaaggtttgtcgtctcgctactacgcttaaatatcccatgctcatttcgaaattctgcagatctggaatggaaactcacctacgtcggctctgcaacttcgtaagaacgagatgacccccgaacttcgcgaccactaacatgtctagttctgagtacgaccaagaacttgactcccttcttgtcggacctattcctgttggcgtgaataaattcatcttcgaagccgacccaccagacctccgacggatccctacatcagaaatccttggcgtgaccgtgatcctcctcacctgcagctacgatggcagggagtttgtgcgtgttggatactatgtgaacaatgaatacgactcagaggagcttactgccgaccctcctgccaaacccatcattgaacggatccgccgcaacatcctcgcagaaaagcccagagtgaccagatttgccatcaaatggtattttctttacgtgcgctgtaatgagttgtggatgctaattcttgtttcctagggatacggaggaatctgctccagctgaatacccgccagaccagcccgaagcggatggccttgacgacgatggtgctgcttacggtcaagaggaggcggaacttgaggctgcacttctgaaggagctgcaagaggctgaaaagaacgagtcaaccaagggcgaggaccacgacatggagggcgcagacatggggaagaagacatctccgacgcagaaagtgaggatatcgaagacgagagggatgacgatgaggacgaggtcgacgaagaagaaggtatcgatgccgacgaggacgtcgaaatgggcgatgactcggaaccgaaagacgacaacgcaaacccggccgcgcaccattcgcagcaggaagttatggtccattaactcagggcctgagcttttttcttggagttgatgtcttggttcttcctattatctatcccatcagttgcatgattttatgatttgtcactatgttcttacgatccgcccacatgttacctataaaccaaacgtggtatttatctctcggcctagttttacgataatagacagacatgagcc

SEQ ID NO: 1051 - DNA, 3453 bp, Emericella nidulans
aaaccggcttcgtccgctgacgatgcagtaccgtcctatgtcgacgagctacctttagataatagtcatcattgctaggcgagtgatggagaattggttgatatggggcgtgctgcaagcagtgtattttccctgcattatcaggtaatccagtgaccttagtattcttcctttttccttttcttttttcttttccttttttttttttctttctctttttcctcttagcgcagggcaaaaaaagcatgtacttggatggcgaatcgacgtcaccattctttcttttgcgcctgcgggaaggtcaaacgggcaattccttttgaactcctctgacccaaggattgtgattgcgagtaattccggccagcgtctggttcagccgcagaaggctcttattcagccacttcgaatagacgtccctctggtacggcagtccggccgacgaggtgcatctcgcctcctcgtaccacgaagctaaagagaaaaagcccggcgccctacatgattggatcgatatcgccgagaaggtgctctacctttatccttcatctcgacatcgagacttttgcgggccagcgcaccctagggggagacggccgtcgccatttctgtccccaagcacgctgtagacaagagccagaatcaagagcgacggttagagaggcgtatatgtactcagtcctaactattcgactaagggtctctccatttggctcagcgacaatccttgagtgatgtataatcattgcactggggcgtttccaccaagcagtcagcgagaccaggagtttgtgcattaagatgtatttgtgcatcaatgaagccgtgattagtcctcgctcttcgccccaaatgcctgtatcgcctccgtgcaatgtgcaactgtccacctgcttcgatctcgccatctgcattccactccatacaccagtacactccccgcatctaaacccatcccagctgtagcccagctccagctcaaatcataaacagaccggccccactatgataacggcgtcccgagaggttacacttgaaggctgcaccgttgacagcccgggctcctgttccggtctgtatctttagttgccctcgagacgtattccatgcacgataaccatatggtctatggtctacagcgtgctctttcagagaacgagtgccccgaacacgaaagctccggtggcgctgcataatacagccccgatctgtcaccaaaaccgtatctgaagaaggccgactgatcaagaacggttgcttattccgcagctcgatatggtctttgaaggagggtgtccgtatccatgaccgaggaacaccatttttgcaccttacattgtctgcgcatcattgatttcgcaagttgatggaccgagagccggaaggtagttctgggaccataccagtccgccactttggacactatcaagaaacggagcactatttacctcttatggatgttctcggccgagagaacatgcccgacatagtgcacctcacaccatacagcgcatcttcaacagcatcaagagacaagacggtcagcgcgctcgtggcgtatcagacattgaaatcatgacgaggagagaatgagtgattttcgtaaccggccgacctcctgctcttcacggcgactatggcccaagcccagcggtccctactcagcgtggctccctcctcaaccacctaaagagacgggccgcacagccgcaactagacaaatccagtgcactcatcccagctagttagcggactctactaccgagctcagaaggcataaaagatcccagaaattcgcaggtgttgctctattctatcgtattgtatatattcactgatctatatatcactctattcaaatacacttcaaatacacttcaaatacgcggtgtgctgagcctacaacttcgttcgttaccgtgcatactctggcgcaaggatctgttttccctgatccagggtcccaacacgatctctcaatgccctcttgagtattttcccggacgcgctctttgggatctggtcgatccagatcacgccccctcgcaggtgcttataatgcaccaccttccctctcaggtacgccataaccgacagcgccgcagtctcgcgctcccgctccgccatactctcctttgctaccaggtaagccaacggtacttctgagtgcatctccccattccagaccccaatcacagcaacgtctcgaacagccggatgctcaattaggatatcctccagctccgtcggtgcaatctggaatcccttaaatttgatcatgtccttggcgcggtcggtgatgtgcagattccccatcgcgtcttcgtacccaatatcgccggtcttgaaccacttgcttgcagtcaagcaggcgtctgtggaggcgcggtcgttcatgtatccggtgaaaactgtcggaccgcggatccagagctcgccttcttcttctttgacggcggccttcttggacgggtcgttgttgagaacgatcctggcttcaaggcccgggaggacggcgccgttggagccgatggccgtgttccaactgtcccagcgctggtggagtcagtatataatagattcagactgggcgaggcagggggctcggatggacgggctaacctggatgtgtgagacggaggttgtctcagagagcccgtacgcctgtcggatgggaaccttccagcggtcgtaggtttctcgaatgagggcttcgccgagaggtgctccgccggaagtgagcatacgtagcgaagatagatctcgtttatcgatagagggattctttgctagatggaggacaattggcggggctacataggcgtgcgcgatggagtgttcccggatgagcttgcagaatctctgcaggtcaaacttgtccatgaagaccgttgttgtgccgagccagaccggcaggtgtacgaggcagatcaggcctaggggatcagtacttgtgcgacttggtccagatgggctcgtaccgtatatgtgatacgtcgggaggacggccaatgtccggtccttcttccagtggacatgggggctctctatcgccgcctggagcacgacagctgcgacaacgttccggtgcgaaaccatgacacctggatggcaacggtcagtagtcgatcaccaggacagcctcaggaactgtatctaataggatgtctccacctttaggaagccccgtagttccagacgagtaaaccaagaatgcaatatcatcaggctcgatatgaacaggcccaacaggctccgagggtacagagctcataaactggacagttgtcgtcgccgcgccgcccgggttcgttgcgcccaacaccaagacccgctcactggcaagaccagcccgcttggctgcttttaacgccgtgcctaaacagctcgggtgaacaccattcctttcgcctggctgcgctccaactgcagctgaagctcgcgtgcagagag

SEQ ID NO: 1052 - DNA, 2854 bp, Emericella nidulans
cgggagatggcggaagacacgggcgtcttctgccgggaagagggcattgatggcttgaagttttggagcaattttatcatctttgacccgacacctgacgatcctagcaatttggctgtttccctcctggaagtttgaggagctcgctgttatagatctgatgatttaatgacctatagagtaatgcgtgacttgctatttaaacagctcttccggtggtgctctacggagtagaatatcccatagacgtcattcgcgagtgaccccgcattcccgtccactgataagcgaccactccgcatcgaacgggccacctacagctgcaattatccttagcctacacacctcctaagttctgtcccagatcattctattccttccaaccgccaatgtgacctactatttgttcgccgtctgagcacgtgcgactttccgtttagatgaaacatggccgtggctcaaacgagaacaagcatacgcaggctatcgaaagcctcaggcgtaaacgcccgatacctgtctctttcagcccaaatccgcgaactctggacctgttctcatcgatatcataatagcaacgacctccataggaagcatacccgccttatattccacaatcatcatcgatcacaaagaccccatcatcccccgcgaagtcaacggattatatacccaaaataccagtaccagtcatggtggagtcctggttggggctggggctggggtggcttcaactccggctttttgggctttcaggacacgccaacgagatacagatatgggcaagatgatgataagggtggctgggaagaccgcgcgaagcgccggatggaatggatcaaaaaggagatcgaagctgatccatacgcagctctttttgggaggagatctcagccgctcggattaaattggggcaataagcttgagagtgggcttatgtccttgtggcggtcggttttcggactcggtgaagatatgtcgaacacaaataaaggtaaaggcgcgaaagtcatcgattcgacgctgaaagggcaagatgactctggccgcacatcagttgacgagaaggtgcgagagccaatgaccagagatggggatatgcagcgtcggccatcaacggactttaggggagctgggttcgagttcgatcctatcagtggccgtatggttcccgtgcgatctgagccttgggggacacccgaagaaagaggcaaggaacgacaaggagatgggcagtacgttgaaaataagtccatccctgcgggtgatgacttacctcaagagaaggctgaggcggattcaaacaccctttcagagccgaacgtcctcgactccgcaaccaaaaaggactcgactgtgcctgaatctagtgagcggttccagggcgcttctgggccttcgattgtctctgaaagtcaaatctacgcatcggcaccaactcaggaagcctccaactgcctaaatgagactgtgcaggccgctaaagatgaaataaatgctgagactcaaacacatgctcaggttgagcgaccagtaccaccacaaaatgacaatcatgaagctgtaacccctgctactatgccatttacgcagagtccctactcccaaaaacacaacactactgaaagatcgttggccgagcattcagtctcgaaagccgggcctgaccgggcagggtttctgtcaagacgtgagaaccaaatgcctaaattggtcacggctgaaagtcagccatatactgcagttgataacagagacaaagatattgagctactcagtgcgcgcgatattcgggctgcctatgagcccagacggctaagcattgaagccgagattgaagccgaaacacctaaacagttggatgagccctctgcttcacaaactgatcttaaggatacacacggcaaatctccagtgaataaattggggggctcagtcaatatgcctggcgggccgaccgctcctttttcaggccttccggacgggcaagccttaaatgaagatctattacaaaatgaaccatcaacggcgacccaatcctcagtcacggagacgtatcgcatattcgcgtatgatccatcttccgcgaaagtcaccgaggctgaaacgatctcatcactccaagagccgagcgagcatcttcatccaacagaagtgctcacgcgcctagcaaatcccgccaagttctcaccatgtctgaaccagatgcatgcggagggatacgaaattgtgtcgggtggaggagatatcctagtattccgaaaggctccggcaggaagctcgaaaactattgataggctggcaagtccttcccaagagccttccactgagtcagctcaactcgcagataaagacgtccaaggtgggaacttctctggtcaagatgcaccccgcaaacaatctcgcaagagccctcagaaggccacggtttcaaaggtattccggcgaatgctggtgggaggacttgccaccggaggtacctgctacgcattgggtgttgtgagtgagtattttagaaccgggggtaaggacggattcggcattgatggtttcacggaattcgagtcagaaagacgacatctggagcgataacctgcgggtgtacggatatgcaaacgtgttggttattttgaatatctccgctactatgtaagtaaagaccaatctcaacttgggctctcctatccacatcaacgcgtgctccaatatccatagccccaagtatcaatacgggccgccaactatcaaggcttcctccccatctctttcaccagtatcacaccctttatcctcccacacccagtcgcaccaaggctgtctcaacccctgggtaagaccgccaatcttatccttc

SEQ ID NO: 1053 - DNA, 614 bp, Emericella nidulans
atttcgagttcgattgatgatcaatcaaatacttagaacagttctccttgctttctcgatacatcaattgcccaagtttgttcttattggcagatcaatcgtcccgtcatggaggcggccttgatcgcttccaatcactccagtacagaacaaggcggcatggacgaattccctgcgcgactcccagttgaatctcctacgttgctcgtggtgtcggtctcttcagcagctcaggttaaaaataccttgtcaatttcctcccagtgggccagtgaactttgctcgtctattcctgcgtagtaggtcctatgattccatcccagtttagcgtgaaatatccgcctctcgtcaattcctgatatccctcctttatggcgttcacctcaaacccgttgcgccgttagttttcatcctgctttgtgtgaaatcgtggatgctttgcggacaagctccgagctccccgcatatctcattgattggctcgagcgccccgatccgatcgatcgatcgggcttttcatcatggccaatcgagatatcaacgactttggggggttcgacgacaggcagcgtcctgcaattcgatctctagactatatcgagagcacgaagaga

SEQ ID NO: 1054 - DNA, 6593 bp, Emericella nidulans
accgtaagaaaacgtagctacaggctgtgaaaggctcgccaacgctaggaatcacgccgagctgcgcagccatcatcccgcttagcaaattggcctttcttcttgtcacatattaacatcctggttcttcatcaatggccaaaaagtagaaccactggcttcgcttcgagaacgtgtaccatttgactagttctgattcttatcgtgggcacccaggttaatggcattcttggctcttgtccataggcagcgatgctaacgtgctcaccttgattgactctgaaaaaaagagccgtcaccgtgtgttaagagtgaacagttgttatccagtataaaccagcaggtagaatatactagagatatgaatctggcccgtgttgatagatcttctcccaaactttgtatggatcaagtatacgaggctgttgaatagattattatatttttagagcgagaggctgggtagcgttggatgtacatgctcggccagaccggtgaattgcctttggcgcgaaagatattgctgggatgtaaaaagcagggatcgggcgtttgcctgctatagaggcgccacgttgccgatgtcggcattcacttttgcatgatgatactgtatgaaaattagtctggcatcgctcttaagacagtaggaatgaccacgtctgtacgataggtgaatataatgtgaagatagatagggctacgacatccgtatatctatacgatacaagcaacttgacaagttcactgatataggctcacagtcctcgatattctatacatttagaattagtaagaaagcgatcgctctggcaatcaggtataggatgaaacgagaagacagaagagagaaccatcctcggagggaaagcagtaagtacagtatattataaaagtagtagaccatacggattgcctacaacgtcgcgctgatcgttctgacttcagctgtttgcttcgaacaatctcagccgcaagccagaccgttaccatcactaccgctgctgcggaacgtcgcgcacagttgacagtattgatgggtgaggtctagaacgtgctggggcaggttcgtggcctgaacgatgctgcggactttgacggcgccctcgtcttcgatcaacttgcggatcatatataatagctcaggggagaacttaaggccgttagcatgtattcaaacatcagcgaagagggaaacgaacctcagagtaccatcggtactgccaggcgatgaggcgaatcaaagcactgagcatccccctggtgtcattctgcttttcatgtagcttgagaatgccacgcatggcttttggcgagaaacggattgacaaacaggcttggtaggcttcgatggcctcatcaaagtggtgcagccgctctgccagctcaccaagaatctcccattcagtagctgatttcttgtactccatcgcttgttgccggtactgggctacctccgtacgccagattgtatatatgcggagatcctcatataagaccataaagagattatccagccatctttcgcatagtcgtttattcttgaactgtgtatatgatgcgtgtgacgggtcgggctgtaaagtcagtaatgccttctctcgtgaagagccggtacttacatcgtcattgccagacttaacaacttccgatgccattgtctgctcgggcctctcgattgagttctcgccttgtgtgtggtcgtcgccattgacaatctccgtgacagattccactgggcgaccgtctccattttcctgctcgcgactaccatttgtctccgcggtttccgcgggctctgttgactctgctgactctgcggggctatcaccatgcgaatggattgatggctttgtggagtgctggcgctctgagcgatattcctcttctcatgacgaaaacctcgctgcgcaccttaaggagctggtcccagccgatcgcggcggcaatcttggtcagcaggttgtaggctttcagaaatgttccctggtatgtggccgcatgcagcctccgcaacgacggatgtacataatcatgagggtctccctgtttcggctgaccttcgtcgatctcgtctaacatgctctctgctagaatgggcagcatgatccgagacggctggggcatgcgtggtgtgtctttgtcctggtaggtgaacatcgggcaggagttcagcgtcaaaagagccaaatcccatttctctaggcacacgtaaacctcagccaaccgagcccaggtgctgaattcgctgggggcagcggttacggcgcgcttagcacactccaacgccatttcgccttctcctttgctagcgcagaaggcagactggcagtcaagtaacgcgtagtccatgggaacatcttgcagagcgtcgtacataagccgcactgcttgaacctcttcatccgccatcctgaaaacttgagcgagcaaagacgagacctccacgtcccttgtgcgcagtttctcgaataagttgataccagaagcataccggcccgtggtctgaatgtacttgagaagaccggccgtgaggtggttgctcactgtgttcggaacttgggtttcggggtcggaactgagttgtcttcctacaggtttgtcagctaaatccatcccgaagtcaaagagtgaagtcgaatagttgtacctaagaagaataatttctcggcagcatctaagaatctatgctccatttcggtgttcgtaacggggttgaaacgacgaaccccgacaatcttcctaatagcatcgccgctgccgtcgtccgcatatgaatatgctcgcaagactccgcaaagaaaagtttccagccataatgcatcggtcgcaacacgtttatctccgcgttcgtcgatacagtagctttcgaggcttccagggatcttcacttcgactcgcatgtccaaatgggagaacgcattgtagcaactgcacaagttaactcagcccatcactaatacaccagatggaaagctaaccagtagattcctgataccactttattcgccttatcgaggggggatgccactagggtgttcacgtaggcagccaagcttgcggaggaagatgcatcaataccggtgacatggtgataaacgccagtctagacatcagaaaacccgttagctacttccaatcatccctggactcaaatgatgaaataaatagaagagagagatacctgacgtgttgaaccagtctttggctgcttgatcaagtacaccaagtctggagggcccaattcccttaggttctgtagtgactctgtacgcgcatcaacggcagcaagtatgtcctcctcctcataaatcctagaatatattccaatggttagcagtctatcccggacggtgtaagcactgcaattgcattgcaccgcagctctcaggagcaacagaggggaaacaaatactcgggaacagctggcgcgaccatggcgcactatgaggggcgcaagaagcctgcgcagaaacgaagaagggaagcaaaggaataagcagagtgcgagttagttgtccgttccgactggaggacagaaagtcctttcaatgatcaggagtggctgtagctcgctgtcgtcgtcactcttgcctttcatgttcctgaggcacggtcggaggcggaaggagccattcttctttgggattgggatctccaccgtggagcaacgcgtgagcggcgtgacgggcatctcatctcaagagtccagactctccgtcggtattcgaacagcaagtctcaattcccctttcttgacgggatcgggttgcatctccgcgagatctccctgagatgttgtcagcgaccgcgactccattgccacggccagcacatccttctgcggcctgataatcccgcgcaccatgtcgacatgggtggccctcaacatcgagcccgacgaggcaatcgaggaggaggtcgatgatacaaaagaaatccagatcgaggaagcgctgaagctatatcagaacgcgctgaaacttcactctcagggtccgcgatactacaagcaagctggcgaggcatacgaggccctcctagattcggagatcttcaaataccccgagtcgctttctatcacaagagagctgcgttgcaggatgcggacctcaagttggtggcacaacaaacgacgcagtggtaggagaagcagcgttggatttcaatataaatgatactacctcgagcactttgcaacagacaatctatctctcttacaagaaccacggacaatacgttctcgacgctctacgtgcatcccttcaggagctctccaagttgtctgaagactcatctcacctttcatctaaaattgccgagagttctaccactgctttggcacagtttgcggaagcgttagaacgcgatgacaccgacctgaacctgtggaggcagagcgcgagactgtgtagtgcgttgcagagctaccggcttactcgtttctgtctggagagtgtcttggctgatgatgataaccggttggaggtgcggtcagagcaattggggctggaggaaacatttgcagaagagggcctcagaaagacgttgcattcagtgcaggatcgtttgtctgtgtcgcttgttcctatcaaaaagccgaagaaggctctcctaaaattcttcaagcagcaaagcgatccgtacccctatttgccttcgctaccagataacctacaggacctggactcctcgagaaacccattggcgttccgtgcttctacgcatgagatcaaaattgactccctgacatgggccgctattggtcaggctatcttgactttcttagacgacaagaatggaacaccctcgcttgcccctggaacgtctatcactatttcgttaccagcagacagtcctgaactgaaaacagcctcaatcacagcgcagcggcgaccctcgaaggctcaagtcgacgaaaataacaatcaggatgtacaaatggatgatgcgcaaagtgtcggtgcccgttcggtcaccggagcccagggacgagagctcgccatggaacacggagacgaccagtcttcagtcgaccagcgagcagagaaacaattgatcgaatctcttgaagtccaatcaattcagcaccagcaaagtacagacccacaagaggatataaaagccgaggaagacgacttgaagtatcctgaaaatacgagtcgcaaacgttcttctggttctgctatcaccgaagatcaggcagagcgattgagggtcaaaagcaggagcgactcgttgcgcgactcactcgctgaagcctcaacacatactgacgacgttgtgtttgatcaggccaagtattatgaagatcttttagaaccctatattcaaaccgacgaaggggtatttggcacagttggggccttattgtcgaaacttggtgttgaggatctggggacatttgaagagttacggagatcagtggcatctgcaggtgaacgaaaggactcgccggttactccagtcaacattgataatgccgaggtgcttttacaggatcttaggaatgtcctcactcagggggatgaaagatcgtattaggtaatgcaacatagcgacagcctgccgggtcttcaagatataaaaagtatgggcagatctgggctggcagtctttcttgaacattcgaaaaagacgacacacaagttgaaattgaaacaaacgttcagcggagaggatgagttgtttgattttattcgagcagtcaatggtagccgccttcacctccatgatgttgttttcgagtggttgggatgccttttgaggccggattataagaatttcttaacccatgataaccagttcaatgactggtcgctggtcgaatcatcctatgtcgcttaccaatggccaactacccttaaggatgttgtgctgcagcttttatcccttgaagacgaatatatccacggcaaattggaagaaggaatgcaaactctagagcatcatatccttgaagctcagtccggaaccccattccgctatacagcaaaacactttgcagacttggagatgatacaggctatctatgaacttcacctcgatttatatgcacctatgaatgctccaaacaacgagacagaccaccgaacaaggactctgcagcaggatcgtttggcaagatggtccatgctagcacgtagtgcactgactcactttattgactgctgtcctgagcgagtaaatcgagagcggataacgattcgccatatctgggcgtccacgttccactcgaatatgggggttgatgctcagcgggaacacattttactctgtcttgaagatctcaaacgtctcttcagttgtctcaatgagcctgtgctctcactcgctaacagctccatcatgtccgaactgtcttgtgaggcaatcgatcaagagatctcaaaattgaactccatggattttttcacgcgaattttcaaccccgactctgaagaccccgttgggcttatcgagacaatcgagcctatcgttgaaccctcggcggttcaattcgaggaagggtctgaggatcgacaaagcctacaacgccgtgaaatgggctctttctggatcgaggcgacgccactctcaggcttttctatggc

SEQ ID NO: 1055 - DNA, 6824 bp, Emericella nidulans
cactacttccccaatctctcgcacgatccgtcatcgctcgcctggctgcaaccaccatcctctgaaccagacgaacctggcgcccctccttcctccgcttaccaccctggcagcagcgctgaagccgttcatcccgcatctctacggttctctttagttggcaccattctatccccctcaacatccctttctctaccaacaacactgggactccatcatcacggtaaagatcctcatgccgccgggtacacaattcccgaactcgctatgctcagccgctcctcgttccccgcgcaacgctgcatcgcatggcaggttctgggccgcattttatatcgtctagggagaggacagttcggcgaacgtgggagtaccttggttgaagggctctggtctgtcattgaacgcgaaggggtcgtcgctggtatgttacaggaggcggattcgtcgaatgtttcgtctactcgtacagacaggggatttggagccgagggagacgaaccacaagagtactctggtgtaaataggagtggcgttggacgtcacgccagcgcttcggcttgggctgtggaagccgtttggttatggcaaatgggcggtgctggcgataggggaatcctgaagcccggtgctgttcgatcgcaataatgctttcctgtcgaataagaactctttggatatacttctcatttcaaggtttagcatatactaccttggtggttagtacacgtcttaacgacgaacgacttttagattactaagataattacagaatgccatacctgacgaaaccaagccagagagggagaagcggtcctagtaagatacccagtaaacatatgagccttttactcccgatacctgtaacgcctattgtggttgtacagttaaagcatattaccactccctaaggacgctaagagccttcagaacccctagcctgaacgccccaaatcttccacctcaagtcctcaacatagtccctccttagccagtgcccgcttgaaggcatggatccagtttcctgtctgtcccgcttctcctcgtcgctctcagacgggaaggaagagccagcatcaatccaagcgaaaagcagcctcagctgccaaagccggtctcgtacttcgtccgggttaccgccgcggccggtggccgattgtataacgttttgcgcgatgctttcggcaagaagcttgctatccacagcggattgacggagccagggcgcatcgtggggcgtggaagacggacgtggtcgtgccgggaatgaggatgggaggacgagctccttctcacgcgcgtctaggatgccatgcaaagaatctaactggaagatccagtcccaaatgctttgtgctgcaggttttggtgtaaatctgtgggattctttggaaaggagcgcggagacgttcgggagggcggatggcgatagacccttgccctggttggaagccgaggtcgaagctgatgggaggatgtcttgcgcgctgcttagcccggccagtgtggaagagaagaaggatgagcctgttggattgtaggttgctttgcgtcgtaggtaaatggattggtcgccctgctggaatttctcgcgcactcccgggttggagtcaaaatctaggaccaagggccagtaatcaggactgagaacttcaacctttgctatgcgattaaggtcaggaagtaagcagggggcagtcaaagtgccgctgacaccatcggagtctgttacggttattggcattgaaattggtcgtctggaatcaaggtcccgggggacaatgcagcgtggttctgcggcaaggacccataagtgacggaatgcttgcaaatggcattcgttgtcaagaaccgttgttggaaaaatgggatagagggagcagattagtgaggcaactgcaaggttggaagtgcctaatgtatagctccctccgcccaagaataacatcccaatagccatgtgagcagccatgtgacttccgtatggtgtatcagggtccacacgaccgtgaagagagcgcaggcgccggaacagagccaggtcaccagttcctgccatgacggcggctaaggacaacgcgacgacatcttggcaatgacgaacggagttacgcgccagccttgcatcataattgggtgccggcagccgagaaatgcggatgaactggtcaaggtaagaaaggaggatatcgcggactgttgggtccggtgagccagcgaagcgaagcccaagggcgaaacaaaggccggcaatgatgttgaaaaatggcatatcattgctcttcagccgccgcaccccagtcagccggtaacggcggcggtatacctccgggagactccctataaaccattcgtcacaggcctggatacgatcccacatgatgatgtgccgcgcgagagtgcggaggaggaaaagatccggccgcacatagtcaaaccgaaccgtggtgtcaggaatgtctaccttttgtgccagggtctcatcgttagtcttcatgaagatgattgctagagcaattgtcgctccagccgttgcccggtcaaggacatgggctaggtcaacgtttttagtacccacggcgacggcgagcaatctctcaactatatgcatatcccgcattcccttcagatccttgcctttgccgaggttgatgaatccaagcgcaaatcctgcagctagacgatatccttcattacgtagatagtcgttggtggcagagccttcctcctgatccgcgttctcaatctccgagagcataacttcactcattcgtcggtgttgagaattgcaatacaagagaccaatgcccataattcccgcggtctgcgtcagcggagacaggttaagctctgccgctcccatagggagcatcctggttacgtgtacggacagcagtcgggtgaccagagtatccattgtaccgaggtaggacgctgatagaccaagtaatagaccgatcgaagtcatcgtgtgtttgggtgttaggtatttgaaagcgacccatttggcaagagatctcaagtgcccgttaagacccagtgctagcaagaaaccggcatgccggtttgtcaactcctggggcttgttaaagagaatccaggaggtgtcaatccccttggaattttttgatatagctagaccagttgatacgccgttatgaaagaaagcccagcaaattttttcctcatggaaagaagctctgtctgcgcttatagtgacattggaaggtttcatcacgcactgcaacgagaacgaggggatggggagcttctcggtcaggagaggaagacggccgctaaaggcgagcatggcccgtccagtggggatggataacgtccgcaatgtaactaattgtaccacttctttctgcgcttcgagaagatctgagtcagtccactcaggttctgggtggcactctgcggcaggggctttggattgattcagcaatcgcgctgcttcaataaagcgcttgtcttcgcggaagatcagtcttgttacagagaagcgatcagcttcagcagaagcctcaaaggagtttattgcatcgatatccagggtagaattgctgatttggtggtagtcgcgtatagcatcgtgggagacattcagggacaagggtggtgggggccgagtagtgcttgattggcttgaaatattgaggtcgtctcgatcaatcagtcccaagaatgatgagctccatgaagtcgaagcatgcgtctgcgattctataatggcctcgtataatggcgtgctaatgccagctgggaaggtctcaatgacactgcgcgtcaatccccagcgatgaagaagttgtattcgttcaagaacgcttaatttgtggcgcatttcgctaacgaagccttcaagggccaaagtccgaggagtcagggtggaacaccactgccacaaccttcctctccttgggtgaccatcgaagttgacaagattgagcaaagtccagaattgacaagactctccacgccaggccttttccaagtacgcgaaaatggaaggaggtggaagtggttcagcagggagatctggacccgccatacgagtattttcaaactgccatcggtttatgctagcgatttcactgccatagtaggaatcctcagcccaattccaggacggccatccaagccatccgcccagttgtgctagaactggggcaagaagacctaaggttttgtgtgactgttcttcgtcgcaagctgatagcttctgctcttcccggagaaggtgcaaagcgactagaatggtacatagaggagtgtgtattgaatgttcgctattggagagagctttgcgaaggtggccatcacaaccgacagccgcaataccttgtggtgttcgcaaaaattccctggtcagcgtagcgcatcggagaagataggtgtttttgcggcaagttgaccgactagaagacaacggttctttgttaggctttctcccgtagcttgccgtgctttcgtcttcggcatcctgctcgacaacccacccccaggaagctgtgttcatccaagaggctactactccagcagatccggattcttgttccaacattgattcccaactctctgtgtccacatagctaccactgcttgaccgtaatagacctctttttctgcgagttagtctggtcgtcccaccggattgatcaccctcaatgaatgggatagcctgcgcaaatagagtaaccactagagcagtccactcaaggtcattttcgcatacttctcgttcctgaagccatttcaaggttttccaccagcccatcaacaggccgtctgccactttatcagggaagtagccacataaagcgaatctgcacacaccaaacgctcttcgtacgaggggatttgtaggttccatacaaagctgaagtttatgtcttcgcttcgccgagtcaactacgtcgaacttgccgtcaacggcgggatggtccagcccggtcatcgtcattgaaaaatcagccataacacggttcacgctcccctctctcgacgtattgacagtcatgattgaggaaagcgcatccatctcatgtaacatgaatttacaaggtaattcgatgattataggatcgttccatggcatctgcaaatgcaggaccgtggccccggcgtcgttgaccgtgagggtgataatccgcgaaaggcctccatcgaccaccttgcaaacatctaatgtcccggaaacatgctgaatgccggacgcttgtactagaagagcgcgttcatcggaggttgccttattcttcgaccgctttaaaaataccacatctttggccggctttttgacgctctccactcgtatattgaccacggtcaatgattttgcctcttgatctaccagataaagagccattgaggttgactctccgacgtgggaggaagcgtagtctgttggacatagtgtgaccactttcaacctcttggacgattttatttttgaaggggctaggaaactccctgagaactttgaagaaaagctttcgaccttggacaaaaagacctcttctggaagacccgcggcggattccttgaggtccatgttttcgatcccctcgaacaaactttcgttgttcaattcctcgagcagtttgtccacaggagggtccacaaaactgcttgtggtactgtaaatggaacctgctccagggggtaaggaactccttgggttgaagccaaagctgccgcgagtgctgcctgctcctattgattgtcgcaagcctcctggatggattgtgctcgactggcttcccgtgaccagatcagagaatgtaatcctatcttgactggttgctaggtctgcacgagctagcattgagctaactcgcctagaagtcttcgagggaacaccaatttcgccaaagtcctgacccaacttagaagcgaaatcatcctcgtcatcatcaggtcttccctcggtggagtattgcgaatgagacatgacagatgcgttccaattgtcacctctcggaccgaaactctctcttccagcagaggggcgcgcaccgggcgtagttgttcctgtggccattccaaaatgagaacttcgtcttttagaccgtgtgccaccagtatcacgacgctttttctttctgtgtgatgggatactctcattgtctcggtaccgcgctgtccagagcgtatataagcccgtaatcgtattgacggtcaacacgagtataagaggactttttggatcggctcgaaatgttcccgctagttcatctcggggagagacgtagactatctcgtctgcgggatcgaggacatcaaatccagaaggtctgcccgacaagcttgtgtgtaaccatcgagaagcctggttagtcaccactaggcccatctctgaatggggatccataagagagaatactctaggtagatctgcgcgcttgtttggtcgggatttccagctaggactctgagctggaatagtgctcagtgatggtcgttgcaccttgccggaagtatagtcgaggaactgagaagcgcagaagtcctgggagaacgacatgaaagaattcggtggcaccattggataagagctagtattactttcgtccgcgactttcctctgaaacagtaaaccgcgaggtgtcgcaaacacggagtcaacctcgaatggcagaggaacgacatggctgttgccctccaggaagaagatatgagcttgtgttttgagaacgacaactacggctcgtgagcagtgcttgctggttaaacgtccccgtgactctttcccgtctagtggctctgacccgctgggtcgaaatgattgttggcacgtggtctgcggtattgcgagggcg

SEQ ID NO: 1056 - DNA, 1754 bp, Emericella nidulans
attatgcttctcttattgctaagatatactagagtggttcaatagacctccattgctgtatccattccagttcacttagagcctagagtctccttcatttgccaattaacatatatatgtttataggaaatgaattaggattaggatcagcgactcctgagccgctgactggttaagatctgaggttagctgagccccgggacaaggcgttatacagtctgagagttgaccgaagatctcacaaatggcagacaggcagacaaccctagcacagttatcaagcccgcgttacccaggcctctttcgtgtttgggctagttggcctgcacgttctctttgcacatgcctccttgcaggttgtttctttgtttcatccacagctcccagtggagttgatatcacctgggtacatgagctgacggcatggaaagctgtctctggttgcttgcgtctagttctgattcaaaggcacaaagttgttgaaagacttgacaacaaagcgctgctgctggggaattgcacctggttagacctcgccacagcccgcccgtgggcagggagaagccgcccacagcccgcccgccagagcccacgggcgggtaagctccgcccacagtggcccgccgggcccttggcgggcgcccgcgggctgcccgtttatgcccatctaatgcataactttccacatttggacgtataacttgatgattaagccggttaaatacctgttatttacacctgttatggtttctacagcagcaccagcaatgaattcatctcacgacgaggggaaaacagcaccccctactgctctaataactgatctctcacacttggctcattgctcattccctcctccccatggaggtggatatcttccccccaggcggagccccgcccggggactccgctcctgggtgaaaactcttgaccccccctcaggacctaccaccctgacccccctaccccggaactccctgaagagaagggccttattctccctataaaagactcccactgcagctctggtccctgtatcctatttactgcaagtcctattaatctgcaagcaggtcagcatggtagcagacaaccagctagtccttcttaataattagaaactagcaatgacctctcttgccaaagctctagatctaactgtctcctctctacagggctgcccaagagacctggcctgggggcttgcagccagatttgtttccctagcaaaacaggactcccctcagcagattcctctgataatagtagttgcacccccacagccatccaggtagatagaacagctaaactaacctcctactcttgaagcttgcaaaggccccctaaagaggcaaaccttgcagcctataacctgggcattcctgacagccctaagagctggttaggggaactggcaaattattaccccagaatactgtatacaagctaaataaccagcataataaaagctgaagtagttaaacaagactaactactatatcttcctctgcctcccagcctcctctagcctctaggctattagactatatagtatctaggtcacccttgcagggaaagttctggataggattatataagtataagtaatattaataggatatataattactataactaaacaaggcaaggtcttcttactatcagagaaagctataagcctagctaggaataaatactttaaaatactaataaagtattactagattattattttctagatcctgaaacaaatc

SEQ ID NO: 1057 - DNA, 3671 bp, Emericella nidulans
cgggccgcataatacgactcactatagggatcaatcggctacaggatataaatcacgaagtccccctgaaagtaccggcaccaaccacctagcccctacaaccagagttgaagaaccgcagcaggagaatgagacagctcttaagcggaaacggagatctttcgatggtaacagcagtcccctacgcgcatctccagacccccaacccagctcagtcaagcggaaaaggttgatcgatagcttctcaaataatgatgcttccgttgcaaagcgcaagaataggccacctggtcatcgatcaaacgactcgcagtcccaggattccagtacgcgcctaccgaagagcacaccgtcatcggccctaaagaacgactacaaggtgtctccatctccagcactcagcgtaggcggcactcagacaaaggggcggcttaatcgatcgaatggaaccgtcaatgcgaaaggtacaacaggcgccttccttccacatgaagtcgaagctttggaggacttcaaggttgaattctgcaacgcaaatgcctgttccacaacggttttcgatcttatggtacagcatgggaaagagggacccttccctggtccaagtgggattgggaaaagggccttttggcagcaggtccacaagatcttgccgggtcgggacagacgttctgtatacaggtttatgaagcgccatttccaggcttctggccagaagccccatgagtggaccgaagagcaagaagacgaacttgtggtactatatcaacagcatgggcctaaatgggctcacatcgcggagatgctgggcaggagcggagacgatgttgttcaaagatggaaaaatcgccttgagcaccgcgacacgatgaggaccggaccctggtccgacgaagaaacgaatcaattgaaggatgccttgcgcgccgcctgggacaagttgagaagcgaagggatcaatgtcggcgaaaacatctacgagatggacgagtcactgattctatggagtcaaatcagcaagagcatgcggcatgttagatcacggcagcagtgcgcagacaagtggcgcaggctcaagcttactgcagctggatcctctcaggcgaattcccgagcgaattctcgaatgaattcccgcagcgtaactcctcattcagctaaaccagaattccataagaactacaagagtgccgcatacgttttctccagcgaggatgaatctgagtctgattcgaagcctgaagagaagaccaaaaccaattcccagctcaaactgtcaacatccgaccatggctccaaggaacatgctagtcgggaagcctcagaagcagcaagctctgacaaatcaggtgacacatcctcatcagaagaagagagcgacagcgaagaggtcgactcttcggatgtcccgtctgtatctaaacaaaagcgtgcaaagagccctactagaaggtcggggacaccagacgataaacgagtgaaattgaaaaaggaatctagccctactccatccgctgtttcgtctcaggagagcagcagtggaagcgagagcgagagcgaaaacgatagtgatgacgagtcgtcgcggagcagcagcagcgagtctgattctggctctgaggttgattcagatgtcaacgaagaggtagcggttaacagctcgcccaataagttgaaggcccaaaaaagggctgctgtcagaaagtccagttcaccagcggaccacactggctcagattcatctgttacaaactctagcgagtccagtgactcggaagacgaaccccaggcaaagagaccgatagccagggacgaaacagagcgtgttgataacgttcaaaatctcaagactggcgcgagaggcgtcagcgaaaacagcgaaaccagggactcaagcagcgaagagtctggctcaggttctgaatccgaatccagctctgactcagagtgaacgggagagtatggttgattaacgatctgatttctttattaagataccatctatgttctatcattgtgatttcaggtgtttatcttttttttttttgggcgttggcgtttcatcaaccagcgctgagcggtacgaaatgcatcctggggacgaactgcataccagagttagacctggctgtctagcggagacatgatctacacgtataaaaaccagagaagtttctgctacttagcaggcaatgattagcgatggctcgaaacctggcgagactgggttgaagtatggaggtgatgggactacaggactggctgggttgattttatgcttatacgaacgttgagaacgaaggccatactgtatagcgtgactagcgccgtacgatctctatgttccagcttttgacaaaatcatgtaacctccatacttggatcatttcataagagtcggatattatgctgcatagatgtgctgctcgttccgggctatacagattatatttcgttcaacatccaagcaactgcggtactagaacagacattttccagttgcccaattacgttagtgcacagtgagctatgtatacgacgacattcgcatactctatctaaatgatgatgtgggatgaatggcctggccgacttcgatgaagaatggctggctgtccaggctgctagggagtgacggcgtttagatatactatgacagtgcaggtacaatgcagatgctgttgcatttcccgatttgatccccacatttacagaatcttccttgtcctgcttatttgctgaactgaggcattggcactaagcaaacatggttgactgtgtaaaacctcgcgatcgtgaaagaaaacagcgaatatgaattaaccttcacggctccaaatggcaacgccagctaagctagattcaacagccgcaactatagccgatctggagtcttgcttattcgtaatgacactatcatcgtccatagaagctagcaggtgagaccggaacgcaatagagctcaactcgatgcttcagtggtaaggtagcctgttgaactttgacgcatagtctgtcaattacgaaacttgggaaacgagcacctgggtctctgttctctagtctactactaggattgcctgctagagctccagtatactctcagagtctcgttagggaagatattgggcgctgtgagatgaagcagttactacatttcatagctggtcattgcgttgtgtgactgctggggaaggtggtaaatggaaacatgccacgaggcaaactgcccctacgtatgaaaaagtcttacgaggtcatatagggttgtatggggtcgtgttgtaggttcagttcttgattttaggataggatttgttatatttcagttagagctaggtgcaggaatagccccagtcaagattcataacagtggagccactaatccagctcaaagactgtttgttacgtggaaaactgaataacaagctgagtctcgagcgtttcattcaatatctgctacttttagcattgttagaatcctcgggatacttgactgctaaagcacatataagcatagcgagattacacggaagaaaagagtcaagaagagagcagccgatgtttggcagatgctgcctccatgagaaagctgtttgtaggatgccactttgaaaatgaaagtcccgcggtatatgagctatatgacttggaacttctggcaatcatcc

SEQ ID NO: 1058 - DNA, 4250 bp, Emericella nidulans
cggaatcagaaactattcggaagccgaaaggaactgggcatcattcgcataaacgtgagacatacctctcgtaggcgtactgtgagctattgagccattagtatcgagagtaatgccaggctgcagaggggaactcatacacaagaccggctcgcaactcgaacgtctctccttttctgggcaccgcaaaggcgccgcgaattctgttcatcgccatggctgaggacgggcttcagcgacgacaaagtcgcgcctccgcaaattcaatgcagactggggtgaagaagcaaagtcgtagtgctgccaaccactgcgggggagttgggcaacggggaagtttgcttcagagatatgtggactgcctggagcgagctgcgaggggacggtactgagcagtaagggcgcctagctaattattctgtcattatatccccgatatagggtttaaaaggaagaaggaacaacaacgacaacaacagggggtagaagagtcgacagatggagctgggggagatgtgaggtcggtctggaccgaaaagagttggttgtccacaaagcggccgatctcaaccacaccagactccggagtcgcgctgcctcatttccatctccttttccttcccctgtccacaacaatccatggtgagttgattgaagtcctgaaatgacttcttctattcaaatacgaaggctcctctctcataccgtttacaggcgaacctccccaatttacggcgtctattcgtcgaggccagatccgaagcggaagaaaatgaatactcacgaaatgcagtacgctcatctccatgatggtctgagaaatacccactaactccattacagttttacaaccttgttctgttcatatcatccgtcgccgtcttcagtttggctgcccaacgcatgagcggatcaaagctggggaagtgatgcgctggacacttgacgcaggtcatattgtgcccctactagctcttcagtcatacggacgttatactttgcataatttggagacatttcgacagcattgcaagagcatgtggttgtgcaacatcaatcggtttcttctccatcactctctaggaatgcgagggcctttcggcctcgattcatgcgccgacgacgaccgctgtcactgtcatcatttgcagtgtctttaccccagcgcttcgctccttcttgaaccatctcaaggtcctcccgcagttcacgttcctccttgatctgcctggccttctccaacgagtaccgcccttccatacccacgtctttcagcatgtccttgagatgcttgatcttcgccttgggtgtatcgtatggagccagttcccgtgcccacattttacggataccacacttgatcagccaaccttgcaggcgtttgatctctgcctggttgggatcaacgtccgcatcctttgctttcgtgggcgccttcttcctcccctttgcagatgtcgtcccggtgctctttttttgtcgttgacgctttggttgaggctcttcatctaagacaactgacatctcactctctgaatcgccatccgcttctgcctctggtttcgatgactttgtgtttttactacttgcattagagtcatctgcagcctttttcttggccaagctagactcgggtttcggcgttgttttaagctttgtttctgtggttgtcacgccctctgtatcctcgtcatcaacatcgctatttccatcgctatttccatcgctctctgtactcgtcttgcggcgtttacgggatttcgaggaggccattggtttggctcgtttagtaggctttgaggggaacgtttttgctctcttgtttcccccctcgtctgcgtctgaatcctgcgctgcggcatcttgtgcttcctacagacgcgtcgaaaatcagtacgcatcctatatacgtctttgaacgatcacctaccacttcatctttaattatcgtgtcgctcctggctttccaatcgtcattcgatttaaagaagccttcttgtaattttaaagctttctcagccgccaatcgaacgcgtttaaccgtcaattcctccatcttgcctgtcttgaagattctggcgactgcctcgcgtaaagctctctccagttccttgtcggaggggtgcggcggtgtcgccgactggtcaggctctgactctgaatcagaatcggcgacggtatatcgtggagacatgtttcgcgcctttcaataaacttgtggctctataaatggcgttgtcgcgagaggctgtaatatcaaacccgcgcggagcttcgagaacacgtgctggatacggaaaggagcttgaagggagcttaaccagaatgccagtgaacaagctgtagccaggctgaaattagtcgataacaaataagaatcgtataagttagtattaagtcaaaaaggtcaataatcttcaagctgtcttcccgccaatcctgacatagcgtctacagcaataatgctccggaatggcctcggatcctccactagatgcggctcggttcgaatcggccttgggtgccgctgacaaagccacagcttattgtcctcgactctttctgagccccatctataaacgtccgccagcagcttaataactattgaatcagaattagctatagaaaatacgactgtgatcttctagacactcactcacagagtcaacagataactcacgcaattcgccgctcatatacagatagagaccatggcagacgagccgcagtcgcaaccgcattcgcggccaaatcctacgacactcttcccccataccacaacaggaaccccagagagcccatcatcatcctctgataacaagaatgatggctcgaagttgccggtgatacggcgcgatgaggacgggaaatcatacgtcctagacaagaatgggaaaccgtacgtcttgttcagatacaagctatgcatttcccctggatttttccaacacaatacaaatggagacatgaaaaaataaaccactaacgtgagacatcccttgaacagatgccgtctctgcacttccgccgccgcatggcgtaacttgacaaaaaaatccaaagcctcaacggccgccgcttccaccacgacgaccactcagccccaatctcagagtaatagcaccggcgccagcaccgaatgcccacctgacgtcgaagccctcggccgctcaacctggaccctccttcacagtctcacagcgacataccccgaaaaggcctcaccaagcgaacagaccgagatgaagtcgttcctcacattgttgtcaaagttatatccatgctgggtctgcgcagacgatttccggaactggatggcggagccaagtggtaagaaccagccgcgactcggcgggagaagtgagtttgggaattggatgtgcgaggcgcataatgaagtgaatcgaaagctggggaagaaggaattcgattgtcgtttttgggaagaaaggtggaaggatgggtggaaggatgggaggtgtgattgagtctaatcactgggtatgagtgaggtttgcttgctgggtgtgtaccggcctgagctgtgagaggctttctgccatgaattatgtatcttttacgtggagtgtacaatagatagactagacatctcccaatccttgcttacatgcattgcattcgcataaaaaactatttaattacaacgctcaagaattatagaagacaggcaacagatccatatatctatgtaacagaccttaggaccatgattaagtccataagaagatagaagtccacttttctatctttaagcataacccatcacacgtcgtcaggggattagagttggctagggacatacaaccgcagtccactcgccggcgcgccaatttcagtcacttcagatatccgatcgacgctacccttatattgttcatgatatttggcaccggtgaacggatctgagacgctgggggatccgctatagataggcgtatgggacgccgcgcaaatgtcgaactccgcaaactggtcgaattcaatctcaatactatcctgagggttacgctcgcattgagccttgaccttcttagcctgcaataaaaagttagaacctaattcagacaaaccaaaacccaaatgatagaataaaaaaactaacctgatccaagagcttagcagaaccaccattggccagcatgcggttggtgaagctgtgggcagacaagtattcttgggagtaaacgcaagtttcattgctgccatgagagccaggtgcctgtgggcaa

SEQ ID NO: 1059 - DNA, 4014 bp, Emericella nidulans
aactgacgattcgcggccgcataatacgactcactatagggatctttaagtcggccgggaaatcccttgactaatttctgtcctttgacacttggctcgctgtcacatcctcgcttttgagttcgggcagacgtgcgcaggtcgagacgagtggccatcaatttttgcgcggtatgaggctgggaacgtcccatccgacggaaagactctccggatccagtcatatgtgccacgatgagctggaactggccatatgaacagcttgagtctctgggttgacgattgagacgtcaagctctattggcttgatgctttacggcatctgaaatgaaaggcgctacaactctcatgctgctagccaggccattaatcgaaccctacgcgtttttaaatagatatcaacaggtcttaccaaccagaaaatgataacacaagtcgcgaagacaactaggcatgtactgctagttaaaaactaggggagttaagtaggtgaatcactcatgattatcctctggcgtcgaccaagggtgcagccggttttcaagtatgttgacaagttttgactggtcatagaaataaatcagagtgagactcagggggtgaaactgttgtgatggtctcgaggcatagggggagaggagtgttctgttgcattgcgattcctgatgagtccaaccctcaatcaaaaaaatcccaaagtagaatcaccactgaattgatgaggatattgagcctgttatacctggaaagtttttaatgttcaggggaagctatatacatatgtttgacacaatctaagcgctgtggatattcatgtacaatgtcaagctattataagggtggagaagtgaaagtcctacgtggaattttcactagacggtgatgtatcctttgacaatgcaatatctgcatgtctcgattgtagtctagctaagcgatgcacactctctcagttccttccattgtacaccgtatctaaactaaactcactaacctgccgcgcaacactaccaacgatagacctcacttcaataaccagtaccaatagtgctatattcaagagattgagttcagttaacggtttaagcctacaggaaatagatcataagaggatcctcgaattcaaaagcggcgacatgccacgacaccgttagacgcccatttcgccgaagtcccatcaggtcatcatcactcgatataggttattgttggatatgttggatatgttgatattcatgctccttcgctctcgggcctgtaggtcccgttactgccaatgaggcctctccgccgctggtcgcggtcaacttcctgacagcaaaggttccctgtgcgtctgacagtacctgcctataattgagccgacataaccaggcacaaggtatctataggctgttctttgagcgattgtctcgtattgcaagttcttcataggcactaggttaaccaggtctatccaatggagtctcatgtaggggacgagtcagtcattccactgtctcttcaaggcagttcaaatacccttaaatcgtggctttattactcttctaatcatattttgaatcttaagcgcgcttttctctcaatcccgtcccgtattgaactgcccgtaacgccgtccattcgaaacataacgggcagctttgcccattgtctttgtaccactgcagtacgtgccttcactaccttatctaagttcattctggtcaaatggttagatatagggctttcaaggcccgcggcctagccccttcccaccatccagtactgtcggcaaacaggatcctgagtccgccctggcacgcaagacaaccattataaaaaccacgaaatatcaattatcgttatagcaacttctgctactaccttacttaaccaatttacgattaactgtgatactaacctcgatataaatgcattcgtgtctgggttaaacctgcaattttatacctgctcccttcaacacaaccagagatgcgatggtatattggcggtttctcaagggctgattaactcaccaaatgtaatgcaacaagctacaaaaggcattagtcacactgaatactttggacaagtggtacaccgattggccactcaagaatctccgggtattgagctggagccgggtacctaactgctcattagccgaatgagcataccatccactctgctatcagggcaaaagagaacgaagatataaacacagtcgacaacgcttataatatcggcttcttatttaagtcgaacatcatcttcatctcgactgcttagagcacatcattctctcccccaacgaacgacagcgtccgccaaaatgtccataccaaaggtctcagcctccgacatcaaagtcgtcaagtccggtgatacctatcaggtcgaagggtgagttctctaagcactttaggccttaagaagctaacagcagattctacgcaagacgaccccgcgaatcgtttgaaataatcaaaatataccatccctcgaatttgcccggaaagcaaattgtcgttggccgggttctcatggatccgagagctgcaacccctccgcacacccacagcggtgcagccatcgttgctgttgtcactgaaggcaccgtcctaaaccagatgaacgaggataatccgattctcacgagcaagggagaggtcttctacgagagtccaggctgtcatcacgtcttgtcggagaacaatacgcaggaaaaggcctcctttattgtggtgctgattgtggatgatgaggtcgtgaaggatgggtatgagagtctcgttgtgttggatgcggagaaacaggacggaaattgagggttgatacgacccgtattgaccatattgagcgctatgcagacctcggggtaccattcgtagcatagttgacgaaataattgatgcctcattctgtctgttcatggactggctatatctactgctttttttatccaaaactccgttgaagctagtgtgtaagagcaacaacgtagcctgagtctttgaaatgacataatttgccgctttgaatccagaatatatgcataatcccatagtaagggggtgcttgcggtccgagcctttgctactaaagttgctattagatggagtgctgtctgggattgtctgttgtggcgcatttggctgctaacgcaatctaaggcaatagccaggccggccagtctgatatagccgcccgagatttaatactgactgagttcccttaatgacgaaagggaaagacaaattacgattaggtaaggtcgaaaccgaacacgatcaatagaaaggcctagataacacaagaagtcgttgtatctgacggggtgcatctccacagtaactgtaggctatcgaggtaggctgggctggataggctattgaaattgagaatcccgctacttaaagaggcaggtcctcgattccagcgcacagatgactaaccgcactctacgccaaggtcaaattgactcactttgttcaggccacatatcgccatgaactcgtctttcccgtctcggtttaacgtagagtcccgactatgggctgctgattttcgcatgatgttatggcaaaagtatccattgaagaactggtagcgagtaagcaaggtcttgaggccgacggcaattcaaactatgactccgcgagggcaacatatatacgcaaacccgccggtcctttccttcatggattatcgctgctccaggcacattacacagtttatgacaagatgagcgaaggagtgctggccgcccaatctgcagggagacgcaggcgaggatgacacagaaagactacccagttaaccattgcttcgttatgcctctttttcgtcctcctcgcagtgagacccaatgcgcatgccgatgaagacgagtgggaacgcgagaagtactttggagagaagggtacgttaatctttttctttacaccgcagcactaacgcctcgaactagtaattgcaatccacatgggagcttttgagtttcgtgtaggcgttattgaaaacaaccaagtc

SEQ ID NO: 1060 - DNA, 797 bp, Emericella nidulans
caccgcgtaaaccgttgccgacatactgtcatctcgccaaagcctcctcgctcctggtcgcgctccccgatcaacaaacttgagggggtcccggtttcgacaaaaactgcactgcacatctggatccgcccgcccatttgccgacaagagtctccaaggaaccagtcctcgctgattgagaacccagggtgatgctccagcgtcttttgaagaaagtcgcgatcccagagcgagatcgccccatgtggaaatgtggcactgcccaccttagccgcaaaacagcgctgcagcccagcgagcttgtactccagatcctgtgctttttgacaccacgttccctcgtcttcactgatcccagccgatttaatcgtatatccaatgcagcgagtagtatcagacaagcgcgaggcgacgactatgaagttcgacggaaggatacagtcgtcgtccatgacgaggaccgaacgaaacggtttgaccgcgtagcatccgacgaagagggctactatcttcgaaccaaccgggctccagatatgattcactccgtaccgccgacagatctcctctgtattgtccagcggcgtcgaggagttcccgttcgcaatgatatagatgttctgcgcagggaacaccctcagggccgccgtgagcgtccggtcgaggatgggggccgatttgtaggttgggatcaggagggcagtgttgagcgctcggggctcgatgttgcgttgctcgtaatactctggccctggggcattatcctcaaagatggccagtagcgggatataagtataact

SEQ ID NO: 1061 - DNA, 2036 bp, Emericella nidulans
aaggagggcaagaaggactacaccaaggcccccaagatccagcgtctggtgactccccagcgtctccagcgcaacgtcacaggattgctctcaagcgccgccgcctgaggctgcccgcgaactgcgtaagtaaactcgaccagctatcatcgtacgatttagctaacatatacagtaacgactacgccaagctcctcgccagccgcgtccacgaagagaaggccaagaaggacgagctccgcaagcgacgggcgtcttccatgaggaagtagagggtgttttggtttctattctttctttctccgaggggtttctaatggtcgggttacgtacgtctctctgttatggctagggaaaggaaaggaaatgcacaaaaaggattaagaaatctcaagacatcgacggtcatacctacctcctatgttcactgcatctttcttttcatattctagtaaaaagaaacatcagggtagcgtgtcgcatcgagtcggagcaagatactcttttggagggaagagtgtcttttttccggagctcagggagaagaaaggagcaaacgaacgaagcaagtcgtgttgtgccgatctatcttaggactcatcactttatctcttttgttttcctcatgctggactgtggattaaaagaattaaaatgctctttcatgatctatccagccgcagctagcttattgttcggagtatgtttctatgctaaccacatccataacttgatttcctttcaaccaaatgcattggtcgcaaaccaattcaaccctaggtccccagggtactagctgatggtcgatgcgcaaatcgggttattcctcagtatattctgcattgagacttttttattccgccagacaaagcgcggggcgcgacaacctgattagatcttcgttctgccgggagttcaggctgaagcattatgtttattaaaattaacggagcccgatttatctcggtaaatacaagagacatggtctgtccaaggctatatgccaacagatttctagaatggaaaatcaagtggtccttatgatagcgactagtaggattatacggttaaagagaaacgtcaagactattgggacccgtcactcggtaaaccagaatcgtctaaacgtgaacaagtccatcctaaaacaatgaactccgacggcataataaggtatatacacatatgcatgaactcaacgtttctgagaaaataaaaagataaagacgccgtcaacttttcgacctgatcaaacagactcctgaaaaaatttgtttctggttcatgcttcattacttgcagttgtatcatatcaaagagaaatcaagagatgtaatgcacaatatttcggaaaatcccccacaaaaaccccacatgaggacgagaaaaaaaactctaggcaaccgtgtgggaaaacaggaagctcacggactcgccgttgtgagttcggcggcaagcctcggcgagcgtgggactgatatcaatggtctcaatcttgtcacagagctccttcttctccttatgagggacagtattggtcacgacaatgcgcttcaagcagctgttgttcacattgtcaatggctttgcccgaaaggatcccatggacaacaattgcattgacttcctttgcgccgtgctgcatcactgtgtcggcggccttgacaaagtgtttcgcatgtttcggccttatatcaacattgatggcaacttttttttcacgctgtcgactggacccatgcggagactttgttgggcgtgggacttctttttgttttttggctttcttatatatagttcttcttttttttccttttttttttcttttctatctttctcctttttttatctttttcttctctatctccttttctttcttttcatctttttatttcttttcattcattttttctctttttctgttatcgtttttttatctctctattctattcttctttactttttcttttttttctttcattctatcttccttatctccttctttcccctttttctccatttttctatttctttatt

SEQ ID NO: 1062 - DNA, 7867 bp, Emericella nidulans
ggggcccatatccattgagaaaatctgaactttcaacagaagcatgacctccaattagggttcagtatggtcggcaacaggttagctcgcgttaacaaattggtgacagcggccatgggttgcagaaagaatatgaaaaggtacacctaagaaaaggggttctggatggcaacgtactaactgggcagagcaaatatggtaattgccgatttaaaaagttgattggagaaggaatgaaaaagcagcctcataatatgcggtggtaaatattcaaaagtgctactctagtcaaccaacaaagaaatatagacaccagagtttataccgttcgtgccttagtggtgtacgatccagctcacaatgatcattcaatattgagactgatctccccatcacttcgttaagagtgtaactaaaggactctgtaatctttgagacgcagagggccctgttggagaggcaaggcaacattgtatctttggcaggctaaccactctaccactaaggttggctaccgattccatggatgagatcagtcccatgcgggagctaaaacgacctgatagcgtttccgatgccggcccgccggcgcctcagaaaccctgcacagtacatgttaggtcttgagtaccaatgactattaagtgttgaaagtaattcaccttgagaacactagcaatcacctaaagtacaggtagacgaattgcccggaaacctcagcctcctttgcagcaatatccgagtcgggcagaaagcaggcgctcattagttgagatgggctaaagcttgctaaggctaagtactattttacatttgccgagggagactggattgcttagtgaattcggttaaatgggaaattcgtctaatgagatgtaaaatattacacatagattcttcagatatatgataatcttcaaaatttcactgataaatacattatgtacatatcgaagccagatttctttatactgaattagaaattgattaaatatacagagggaccaacgcaatgatgaaagctttgtgtcagaaattgcgacccatgaagatatattttagggatgagtggataagacaccgcctacgcagacataagaacagtctggctgagccgatacagccaacctctgggaagacggaaagttatgtaaagcctcccatgccactgtacctagctttctatgttcaaaggaaatgcaacttgggattccttatttatcttggaagcagcaactcgtctgtacttaactccaatgtatatatacatacatcagctcaccctgctttccctgagctcagcccttgaacagtgagtaattatcgtactagttggatatcgctgcttgaaaagggaccagaggttcattcgtgactgcgtaatttactagaagagtcagattcagaaaagatcaaaagtcaatctttgtaaatagctagcttggattcgacatctatagctgctaattactctctatctagcaagggaaattagacgtcttcatttttcctgttcagcctagtttccctaccctacaatcgaagttgtcaatctatatggccgacacgaatgacccttatttatctgctgccatcccgctgtcctgagacattagccctccagacctcacgaccgaccaagttttgcgttctgcaagatctttgcatgatccaacccatgtgtcgtcccccgctccaagatcctctggcgaacccactcccctctgggccgcataacagccctaaacggcttcggaagcgtaacgaacccttcggtacaatccatatcgtcaacattgtgcctcctccccgtcttctcatcgacaaccccggcgtcgacgtcaaacgcccagagcatacgcgccatctggataaatagctgattgcgcgcaatgaagcgacctgtgcagatgcgacgtccccaaccgaagccgatgtgcgggagatccttaagggcggaagtgttgaagccgcaggcgtcgatcgagggttcggacggtggatcctcggcgagccagcgctcagggataaaggaatctacgtcttcgccaaagattgactcgtcatgggagatggcaaaggcgttggggaggacggtggagttcgctgggatatggtagcccatatattcatcttggacctttgtgaagtgggggacgccggatacaacaacggggcgccagcggagggtttcgctcgctgtattgtcagtaagatactgttggttccatggaaatgacaaaggaagcataccaatggcatcgatatatgctagcttcggacgatcctcaaaggtaggcattcgatccttgccgacgacctcgtcgagaagctgctgtgccttcttcacccacgtcgagcccgaggtgatccaagcgacaataaaccagtctagcgcaacggtcgaagtatccaaacctgcatccgcgagaatgcccaggtcgaacgcgagctcttcctcgggcatagtgacagcttcgggagagtccttcatatacttggtgaagttccagccgcggttactcaaccctttcttgaggttcccgacgtgcaactgtcgctccagctcgtacagcccctcgccctccttcttccagggcgcgaggaatttcggcaggtagttcagtgaaggaaacgagtcgacaaggtacgcgccgacctggcccgtccgggcgaactcggcctgcaccttcttgccgtccatgagctctttctcatagcctgtctgtaatcggtacccgtagttgaggcagtagatggtactcgccatggctcgctcgaaatggtggtggaagtcgacacccttctcgccaaacttatcccactctcccagcacatcgaatagcagctgctgcgactcgagatcctggagagggcggtagttgctcgccgagcggagcaccaggagaggggcttccatgcgctggtgtagcttgtatcgctcgtcatagggccgaagcagcatgtgcatattcttcgtcaccagctcaccggccatgaccatgcgcggccgatcagagtagcgtccactccgccggttgagcagatcgtgcgcgacttgatgcgtcgacaggataatgaggggctgaccggccatgctgaagtgcatgattggtccatattccttgctcaagtggtatagatgcagccactggaggctcttagggagctggtgaatattcccaatcaacagggccggtttcggccccgggggtaagggcagcgacgagcgtttgccaaacgattgagccagccaagcaactgcgaccgcgccgagggcggccaaaagcagtgtcttgatgtcggctgtcatcctttcgcggtaaaagaagctgcccagaggcggcgatgatgaagacgacactgaagacgacagacgacagacaacgagggtaaatggaggtctcgccaacttaagtacacctcccttaatctcctacctagtgtgccatttgctggcatcctgtctccaacagcctgaccaagcatatcgtgctattggccaatggctgcagagatgagcagatcaggaatccctgacgactcattgggagatggggactcctcgaggggtttttattcgggggagttcgttccggctgcaccagcacaccacagaacagactactacgcagtagttcttagcgggggggagcgctcgagccgcgccgtttcgaggcttggctggcccctgcctgacggggaaacgaaggggcagattcaaaattgggatgaggagaatattaacgtatgggacggggccggaccgtaatttgataccagctcggactaggttcggagcctgggccatttcagcagcctacagaccggcccccaacgatcctgggggttggccaagtagtagctaagtggtgcctaaaggtggctaagtggaggatgagtagagaccaagtggagaccgtcaactgtcaacgccgttagccgtacttttattggcaggtcatgaacgttccaggattggcgtacttttgccgctgcgtcgattccttcggtgaggcaagaagcccactccaatggacacggcgtagatggcgcccagacaaaaggtcaagcagggtacaggggtacgacttttgtcagtgtaagatttcttgggactgctgcggcagtcggtatttacgttctgacgaaacaagaattatatcatgcttagactggagttgactctcatctctatccttcttcactcgctctctttctatctcttttattgagaaaatgaacgagtaacgataggcataatatctagcagctcccgaccagtctactgtagtctcgaagggccttttccccttcctgttcttaacattggagaaccggtccgttgtgggcctgacggctaagggtcattaatgtgtcatatcctccaaagggaaaaattgatcaatcatagcggcgcagagttctcaggggttggagttggaaatgacaagatctgcataccaggtgctctgcaaatggaaaaaagaaataatgctcgcctcagtatatggaggctacggtacatataccgattgtgcctggtaacttgcacacgtttgagcaaacagcccttctacttcatcctcctcccgcctgtttctttgtgtttttgtacactgacagatttcccaactgcctccagagacggcttaaagacgagtatcaggtgaaggtctcagaatgcggttcgcactctggggtttagggctcgcttccctggcagccggtgtctcggcgcagacaatgccgcagtgtgccgtatgattaaacccagagagagagaaacctcacctgcacatccagctaacaaacctcagagtgactgcctcgctacaagtcttgagagttcatcatgccctgccacagacgcagaatgtatctgcgccgaccaggttctgatggcaaatgtgcaaagctgcgttctcggaagctgtacggtagtcgaagggctttgtacggaaccccagtccctttcctctatcctcttattctataattgatctaactaactctcggccccgccaaaccgatagcggcccaaaatgccacggcgacgatgtgcaagcagcctgttcgggacaagagctgggtcgctccagctgcgactatcgtgacgggttctctagccctgatttgcgttctcgtgagagtacacgattgtctatctcggaaggagttcaagtgggccgatgtgtgcgcagtttgtgcgatggtgggcagaccacaacgcgtgagagctttaaggaacgctgtgagctgacctcgagatctaggccttttccatcccgatggatgtgttcgaattctacagtacgcccttctgcaagttcccagacagccgtcgtgcctgctgactactgcaatagtgaagagcgccgggatgggcaaggacgtctggacattgacaccaacgcagatcaccaatgccgccaaggcaagcaccagcccccgagacagctggccagaatccatcctttctaacagcgttgcagtatacttgggtgacccaagtaacctatatacccgccattatcctcaccaaagtcgccatcgtctgcttcttcatgcaggtcttccccggccccaaattccgcatgctatgctacggcactatcgtctggtgcttcctgtttatgatttcgacaaccatcgctgcaattctagcctgtgtgcctgtcgagaagctgtggacgaactggatgggaaataatgaaggggtgtgctatgataacaatgcgttctggtggacccattcggtgggtcgctggtctcttcaacaggtattcgatgggcggcaggttgacttttggtgaacaggcaatcaacatcgccacggatctgtggattctgggaatgccgattccgctgctactgaagctgcagctgaaactgaagaagaagatatacttgcttctgatgttttcagttggtactgtgtaagtgacattctttgtccgttacgttacaagtgaagttacagtctgactgtatggtagcattacggtcatcagtatcgtccgcttttccggtcttttaaaatactcgacttcagcgaacatcacctgtaagccgcaccccgttctcatactttacaatacactgactcgctcagacaacaatgtaatggtcgcgacgtacagtgtcatcgaatgcaacatctcaatagtgtgctgctgcatgcccgcgatcctctccgctcttcgccgcacatttccgggcgtcttcgatagccagaaccagtcactccgctacaatagctctcccttctcgagtaatgcgatccagaagatggttacccacgaggttacttatatgccccgcgccgcgaactcggatgacgcgattgagcttgtcagccgcggaaatgggtcgggaccgaagaattcttggtagtagagggcgtaactctgagtattagagatttcctttgtattgaatcttgttgggttattatctggccctcttcagcaaggtaatgcgtgtccagccgtcttatttctgcaatccactccacactaaggaaacgcggctgggacggcgagagagtataacaagccttcgtggtatcaacctcgccacgccgctgggcgccggtttggccttcccgttaaacggaatcttcgccggtcagcgcagttcgcgtgagtgcaggttttctcacttcgttctgacttgctcaacctgagcaagacctgtcttcatacaaatcgggcattatacgcaaccaggcaagtcaggctttagtggagcagtggccggcatgttcacggtaggagaggcttgacaggtcaaccctccggtggcattgttgccctatcagaagatctatgttcggaatatataatagagaactaatgcaacaacggagattcgcgtagtaactgacctttggcttgcgtctgtacgctctagttaatgtcctgcctattcttccggcattctagagtctggcggcccatttttccaggctgttttagacttgaatttgcttgataaccagatatagaattctactttcgttgagagagctgatagaagtgagtgttctattctcagtttcagcgaggatggaagttttcggtaaattatcaatgctgagatgctctcgtctcatcaagcgctagatttgctcttggtctactgtggcgtgcgacgttcccgtccggcgccctgattagtcgcccgtggtgctgcgtttatacttgcgccaatcagcatcaggcactggccagcccagctcacagacaattaatcaatactgatcgatcaattgatctatcaatcgagagcatagatgacatcttcattggagtgggccccgccacgccaagtcatcacccgcgtaggatcaggattgcaatgctaaggtcatccacaagtggtaaagctccacgcaggttggtgtccaaccaggggtattaaggaagggtaagtcccatgccagaggtctctggcagagcatctcacccaaaagcagttgacttgctaccttactgtagtaccggcaatttatactcctgttgctcttgggcgggcctgtcgcaacccaagtatataaatatccctgttcagccaccaccaacctacataccttcatcggtgtatataacaatagtaccggtgatgaatcctagccagagaatggggtatcaatagcaccaactgatcttgtcaaaggagaacctcttaatgctggtagctcttccccagccggccacgcgaggacaacgcgacgccgtcggcagcctgacactagagcgcttgctagtaaaggcgggtctaagcccacccacaatggctgaactcgcgaggtgtgggtcaagagcaacaggatacgcaacttgaaatgccaggacgccaacat

SEQ ID NO: 1063 - DNA, 8512 bp, Emericella nidulans
cctatccagtatcaatctacatcccttgatgtcttcgtcatagcagatctctccgacgtcgctccctccatcaagttcgatttttcccaccataccccaccacacgctgcgcgcaggatttacccctctaaattatattgtaagtgcatttggtttgctctttggcatcctaccacctccctttcatgatgatctttccgttttttatagatgttagacttcctaagcatattgcggacactttccggcctgacctaaactataacatatcgcatattcttttatctcgcttgagctgggtgcgcgtttgctgataaatcacactggcctgcagtaacctgatccgcgaatcaagatgtgtggtattatcgcattgattcaggcgaatccgacctcctccgctgccatcgaccttcatgaggccctgtacctcttacaacgtgagtccagaatacctacgctactggcactgcttgaatagatcaatgtgactaatcatgatattattattagatcgaggtcaggatgctgctggaattgcaacatgcgcggcaggtggtcgcatcttccagctcaaagccaacggaatggccgccaaagtcttctcggacggcgctagggtggccgacctcccaggttacatgggaatcggtcatttgagatatcccactgcggggagcagtgcaaatgccgaggcccagcctttctacgtgaacagtccgtacggcatctgcctcgcccacaatggaaatctcatcaacgcgcccgagctgaagagatacctggattttgaggctcatcgccacatcaacaccgacagtgacagcgagctgatgttgaacgtctttgctgatgagttgagcgagaccaagaaggcgcgtgtaaaccaggaagatgttttcgccgccctcagcagaatgtatgagaggtgcgaaggtggctgggcatgcacagcaatgctcgctggtaagcgcatagaggcataacctttcctaagtaattacttacgccgttaggtttcggtatcctgggtttccgtgattcgtacggtatccgtcccctggttcttggctccagaaagtcgcttgatggccagggtacggactacatgatggcgtccgagtctgttgctcttcaccagctaggcttcacagacattcgcgacattctacctggagaggccgtcttaattgagaagggcggccagcccgttttccgtcaggtcgctcctcgcaaggcatacgctcctgacatcttgaatatgtctactttgctcgtcctgactccgtcattgatggtatcagcgtctaccgcagtggtcaacgtatgggtgatcgcctcgccgcgaagatactcaagagccttggtcccgaggttgtcaaggacattgacgtggtcatccccatcccggagacgtcaacaacctcggctgccgctgttgcccgttatctcgacaagccttactgccagggcttcgtcaagaaccgttacgtcttccgcactttcattatgccggaacaaaagacccgtcagaagggtgttcgccgtaagctgaatgctatgcaaaccgaattcaaggaccgaaatgtccttctcgtcgacgatagtattgttcggggaacaacgagtcgggaaattgttacaatggctcgtgaagctggtgccaagaaggtttactttgccagctgctctccggaaatcacgtatgtccaatgtacctatcatgttattcctgggtcatctgctaatatttgacagtcacgctcacatctatggtatcgaccttgcatctcctaacgagctagttgcacataaccgtgacactgagaccatcgccaagcacatcggtgcggacagcgtcatctaccagacgcttgaagacctcaagggtgcctgcgctgagattgctcaagaaaacggcctggagcatccgcgtaatttcgaagttggcgtcttttgcggcaattatatcaccccagtttctgaaggctacttcgatcacctggaaaaaatccggggtgaggggcggaaggttaaggcggttgatcgtgccaaggaggctgttacccacggatttgccagtgaaaaggacttccagattgctgccaatggcgttaagatgtctagtaacggtgatcttgtgcctgcggagaaccccgcagagtccgaggtccctcaggttggcgtctacggctccaacaaaccagctcctctagagatggaagagcctcccaaggtcaaggaccgcatggacattagtatccataatattgcggatcattcctagtcattttttttgattgtcaatcattttcgacatctggagtcttggagtttgtaaaggctagaaaaaaggttagggaggccgtttgacgatatccacacctacgaaagatatgactagagatgtacatattcaatgtctattgcatagagcaatttattgatgttcctacgatgtcgaatatgatgttaaggttgagatcaaggtttcgctatcctgcagtactacgtagacttacagctttagattgccaggatcggagaatgcttccgcctgcgtcattgtactcaccgtggttttcggccgtctcatttcactttcccaccatccatggaatcatgactcgttctcaagcggcccgtgaaaccgcattaatcgctgctggaatagagaaaattgcacctcagatgcaagattcggccgttggcccgccagcgtcgcagataaatggcagggtgactcgatcaaagactgcagctcttcaacatcataatccagcactccagaaagaaggtgccaaccaactgcgaaaaaagaaggaacaaagaaaaggaaagagaaaaagtgtactgatacctggcgatgtgaacgaactccctcacaacctcggctttctgcctccgctttctaagatcgaggatgtggcgaacggcgatattaagacggaagtcgaagaagagggtgtagacgcccttacaaaggagcttcaagctaccgtcaacaaagctacagaggtactcgctggtcccccaccggaggacagcaagaagaagacgaagaagccaaagaaagcaaacacctacggcctgacaccgggcattacaccctttcctgattgggcccgtccaacacctgaggaatgcgaagaagtcaatagactattatcgtctatccatggggaaattgttgccccgaccacaatccctgagccgtcgctgaccgtgactggctgcggtgaggtcccatccgtacttgatgccctcatccgcaccctgctcagcggtgctacgactgggaataattctgctttggcatttaacggcctcgtgcagaagttcggtatcctccacgatgggattggcaagggcagtgtgaactgggatgctgttcgccgggcaccagtgaaagatgtgttcgaggcaattaagtccggcgggctggcggatagcaaaagcaagaatataaaggctatactggatatggtatataaggagaaccaggagcggaggaatatccttgtcaaaggccaggataccaacagcgacagcggtaagtttgttcagcagctcaacgacaagccggaaggagagaagcagtacgagattgcatgcgccgaccagaactttctttcgctcaactatcttcatggtcttcccacagaagaggtcatgacggagctcatgaagtaccccgggattggacccaaaaccgcagcttgcgtcttgttgttttgtctgcaaagaccgtgctttgcagtcgacacgcatatcttccgcatatgcaagtggctcaattgggtgcccccggatagagctacggaaatcacggccttcagtcacctggaggtgcgcattccggatcatttgaagtatccgcttcatcagctgcttatccgccatgggaagtcttgcccccggtgtcgagctatcacgggacactcttctgccgggtgggagaaagggtgtgtgattgatcaccttgtgacgagaacagggaaacgaaagaatgctatcgaaggggagaaggggaagagcaagagacctaaggggtgaaggtatttaaacaatctatttcgttgcgcatagaaacacctggctttacttcatagcccggtgtctatgcttgcctggtatcaacagggacctattacaaacaacactaaactttttagatcacacaccaagacagtatatctaaatatctacaaggtagttaatgaatgtgtcgagtacctagagaccggcacgtgcccggcgcgacggagcgcagatcaaaagatcggaccacttttttatctactccgcaacaaccaacgctggcctcacacaagcccttcttccgttcaattacccttgtgtgcgtcagaatggagtgtctagcgccatatatccctccagctcttttgtcgctcgtagagcgtgcccaggagcaagttcaaaaccaaacacacacgttgagtatcgccgttctttcgctcagcgccgtgctcctgggctacctcttcgttgcaggtagcagggaatcacccgtgtcttttactgtacctaatccgcctgagattaatccacactgggaggggtcgaaatgggaggatctgccccaggggagtgaggagagaaatgttattgagggccagattcgcggggtgagtgctgcttcatggcttgacatacgtgcatcttcaggggtcaatctaacttagtacttcgtactgcctatagcaatggaacgagaacctgattatgagctattgccccgcggacggacgagtacttggttccggaatcaagcctgcgacagcggatgatgttgatcgcgcgatacaagcggcgagcagagcgcaggaacaatgggctaccactacctttgcggaaaggcggcgggtgctgaagactctactcaagtgcgttccaactttcctatcatgaacttacggattgggagaattgaccttgataggtacgtgctggaacatcaagatgagatcgtgatcgcctgctgcttggattcagggaaaaccaaggtcgatgcaacatttggggagacgctcgtcactgcagagaaactgaaatggacgatcgatcacggtgaaagggcgctgagcccggagtcgcgacccacgaatttccttatgatgtacaagaagaaccaagtcatctacgagcccctgggtgttgtgtcggcttgtgtctcttggaattatccgtttcataactttatttcgccggtgatcagcgccatcttcgccggtaacggaattgttgtaaagccatctgagcagactgcctggtcttctgtatacttcctcaacatcatcaggggcgctctagaaaactgtggccatccccgtgatctcgttcagagcgttgtctgtctgcctaaggtcgccgaccatttaacctcgcaccctggaattgcccagatcacattcatcggctcgcgtccggtggcgcacaaagtatgcgagtctgcagcaaaggcattgacaccagtaacagtcgaactcggtgggaaagatccctctgtcatcctcgatgacagcagaactatcagcgaagtaacctctgtcgcatctgtcctcatgcgcggcgttttccaatccgccggtcaaaactgcatccgcgttgagcgcgtcattgccctccctggcgtatacgacaaactccttgacaccgtcacctcccgcattaaagccctccgcctcggttcagtcttactagacacaaagcccaacaacccaaacaacaagtcaggtgccccagacgtgggggccatgatctccccggcctctttctcccgcttggagtttctcattcagcgcgccgtcagccaaggtgctcgcctcgtcgctggtgggaaacaattcgaacacccaacctatccgctcggtcactatttcacaccgaccctccttgcagacgtcacgccctccatggaaattgcccaaacagagctcttcgcccccgtcttcctcatgatgcgtgcatcttccgtctccgacgcaatcaccatcgcaaattctacccaatacgcgctaggtgcctcggtatttggctacaacacgcgcgacgtgaatgcttgtgtctcaggaataaaggcaggcatggtctctgttaacgattttggcagctactacacagtacagctgccattcggcggcgtcaagggatctgggtatggccggtttgcgggcgaagaaggtctgcggggcgtaagtaatatcaaagcgatttgcgttgacaggttcccgcgccttatggcgacgaggattccgccgcgcgtggattatccgattatgaagggagaagcggagaaagagaatggggatggtgcatttgagatgtgcaagggggttgttgagacggggtatcagatcacgctggctgggagggtcagaggtattctgaggttgattgggaatatgtagttctacttctctggggcgtacatctagagttccaatgatttaataaatatgctgatataatttaaagaagccaaaaaagagagaaaaaaaagcttctccatttcatagagattaaaaaataattattaaataattttagaacaaacatcttgtaagtacgaatatgagagctcacctaagaatcccaaacatcaaccccgtccaacaaggccagcgccattcctcccatttgatgggacgcaatatgacaatgcaagatacttgggaacttgtcctgcacaaaataccgaataactatccatgccccatccatgagccgcgaatcaaaaaaatccgtgacaaatgtatcccgcaacgccgcagtctcgttgacgtaaaacaaatccggtacttctgcctctgcagcactcacattctcccatctgaatttgccaaccccgttgccaattatatatgctctgttaccgtgcttatggatcggatgtggcgggtggatgaggtcgcgcgggtcggcagtgatttcgaggacaatgtcgacccaggtgttgttttctgtcgtgagggcgtactttggtgcgatgacggctagcggatccggttcgaagaggagcggtgtcgaggaggtcatttcgggctcgtacagcacgttgtttcccaatgaccaagagtaggagttgtttacgcggatcatgccggtacgtagggttgttgagacctcgctcgaaggtgggggaggcgggacgccaaaggccggcagattttctgtgaagagaagctggcgtacatctgcagatgtgttgccaccgccgtagttcatgtagcccactgtatctgtatgcggtccgatagcggccttgggcacattctccctgtggatccaatcctgattgacatacgagaggatggcgtaaacgctcataacctgatcgccgccattgacggcaatccgaatcgcgtagtcgcctggtgtctggtctagcttgatcatgacggcgtaccgagctcccgagtatacgccaaccatttcgacttcacgcggttcaacaaactgtccgtcaacttcatatacccacattgggtgattgtcgacagaaaaagttatggccttttgcgcagcgccgccaatgaaattaaggctgacccaaccgttgaattcgggatcaacgtagatcaccgggggctcgacactggacggggtgcaattaaagacgacttctgtgggaacagcagagaggttccaggggccgtagtcgccttggacattatgtaggtccggttggaggcagctatgtatcatacaatatcagtatttatataatcttgactgggcgtagcgcgtgcagagacttaccctttctcggtcagatgtgttccttcgaggacggcagtaaggccgtcgtcgctcacttcctcaaggtattggtatccgggacagtagactgagcctcgaccattgatgaggagactatccacgcagcttttgcaattgaattagttcgcaacaggaagtaaaggaaaaatcgagcttacaagacgttatagccagactcaacctcgatgttatgatactccgccgaagtaagatatgtccagtccgtagcaagcatcaaataaggattatcttctgcgtactgtatttctgctaactctctcgggtcttccgttataaccgcgtagggtcgcaaagcatcaggcttgcggctattgagacatgatcaataagactgcctcaatgggcttcatcgtgcagataaggtgtaatctgatcagacgtaccgaatatacattgctcctacctgcccatcttgcatgagccccttgtaatgcgagtgataccagaacgtaccagctggatacgctctgaaccgatacgtgaacgtcgcaccgggctctattggtgtttgcgtaaggcccgggacaccgtccgcttcaggtgtttctcgcattctagagagagtgtgtgagaatgcaagaatttttaggtccatgcagaaatgggacgcggaaagggcacacactctaaaccatgccagtgaacggttgtattgaagggaaggttattgatgacaagaacctgtgat

SEQ ID NO: 1064 - DNA, 2081 bp, Emericella nidulans
tacttgactccttgcgaattcctcttgtgctggaatagtctctgtctcttgatattattttaaacttatatgtcttacatgatataccctccatgaacctggatacgacgtcttggagcaaaaatcgttttggactgggattcacagcaatttagatattataagaattatcagtataacaggaagaaaacaagctcgaattggtcgtctcatgtacgatttatgccttaatgtggttagatgcgagtttgtgcaggtagtctacagagatctatcagatgggacactatcagcgtcagctggatatcctcgattttcttattactactcaacaggagcgccacataacaccgtttgaatacctacaagtactactgaaattctcatttgacttcaggtaccgtaaacccgagaccagaggccgctgcgaccactccatcgactcctgctagtatttgtcctcgctaactattatcaaaccgcctcagcccagaacaactgattcaagttctcggagagctgagagaatatatgttcatggtctactttcccaatcacaggatgcgggctgattgttctaaattgccacgaacatccgtgctcaagcgtgccggcaaatgcatcatcaatataccccgcggaatcagtcaggctgccgagcagtgtcctggcgtggccaccagtcacgtaagttctgaattgtacggtagctcctgcgctgcaccatgagtcgaccattaatggaatgtcatgatacgggatgatctcgtcttctacgctgtggtaaaccagcacaggagccattggtgcctcttctggcctcccaccgagaagattctcgagtagaacggagtgaatcgttggttcgaggagcagagtgggcccgaggggtttggatatctggggatagcatcgactggtttggccaattggcaaggtctgcgggaacgcaatgcgagtttgcgtagtccaagagtgctcggcctttctcagtgacgattctatctatgataggtagcaactgtgtgccgtatgcgctcggcttggacagcccatttacggccgctgggatgaagccgctatacaactttccatcaagatagtagaatgtcccggtcagattggcaggtgtgccacccatggcccagcctttgacgtttaactcgggcgcatagacgtaatggagagatgctgcccaaccagttgcaatggccccgccagagtatcctgttgcggcgatcatagggcgggaagtcgagaatccgagagtctcgttaaagttgttgacagcacgcatcccatccagcaccgtcattcctgctaatcggcctgagccgagggccgcatctggcccttcatgatccggagaggcaacgatatagccatgtaaaaggtggcgctggaggaagaggaactcgaacgtggatatcaggtcagtctgagggacgccaagttggtactggtaacttgggtcacaggttacagacgcactgtcataagcagtatgaaaagaaacataacggtctgttatcgcatgcagaggcttgaataccgtggtgatcgacgcgatggctgatccgttgatggccgtggtacggtagaggagctgatgtgcttcgacgggatctgggaccaaaccgaagaaggaagtagtgacgaggcgcttgcgaaagattgtgccggggggggctctctcgaatccaggtggaggttggtagaaagggtcggttcgaggatcctgggctgcaggaatggattgtgctacatccagagataggctcacggccagtgaccacagcaagtgccagagcggagagtacatggctcaggaatgtcttcacctgggaaataagagctgattgataggacttttctcttggaaagaatgcacagattacgttaatgggaggtgcaaaaggccaaagatgattggcaggaagcaggtgcagccgtgaattatgccttcctcacgcatgtctgaggcgtatatatacaaaaatggatgatgctacatcaactgagaatctcataaatcacttgcttgtctatgtacattcaagtaaagaagcatgccattaggt

SEQ ID NO: 1065 - DNA, 2754 bp, Emericella nidulans
agcgtgcgttcaaaaacgccgccgcaagatgcgatttcctgcacgcaagggaaaaggaagcaggcgagtgagccccagaagtaggaggggagggagaaagtgtctagggtgttcaggagggcaattagcaggttatttctcgatgcagtaacagactcagtagaatcttgggattttgagacttgtgggaggcaaggatgggatgggggcttgatggtgctcaggattgcttcgagactgtggatgtcctggcagcgggcggagatatccgagagggttttgtcgagggtcgggagcatggttaaggcgcgagagaggttattgagagaggcgaccatggtcgtttggatgtagccctgcagcgtggagaggaggaggtccggggtgaagtctttggggctcgatgatttcggcggtaggggggagaggagatagagcgtattgacgccagatacgagacgggctcgtgcgtcgcgggctagcttatagcctgattgggaggataccccattgcttgtacttgttgaggagatggagaaccggttgatggcttgttgtgctctggccctgacaaggttctcggccggcattagaagatcagactttagggtccggatgaccttgacccgatccagaccgtaaccttcctcgcccgcacccgtatcggagagcagccggcgcagagtcacgattgttgatgcagcgcgctcgagcgcacgcgcgtcgtctcggcctggtgcaggcccagttccagaagaagctatctctcctccaggcccagatccaatcccagagctgggcccagataacccaccacgcccagtaacctcgaccatctggctgtccagctggcgacctagcgcgatgcaccttgcaacggctcgtgcgagacgcacggtggccagggaattctccgcagcgaccctcgcctcctcggcagcctcccacctacggaggacctcgcgctccagccgctcatacccctgtgagacagcgacaatttgctcgtctgtttctttaagaatcttgcccgcagctgcggtttggtcccccgtgtgcgtcagcagggggagagctgatttggtggtcagcgtgtggatatgcgtgtcaatttcttggagatcgaacaatacccgggaaagcggggttgacagatccagtggtgtgtctgtggcattgttggtggccactaccagcgaattggcaaatgcggccggtgagaaggccgggtctaggaaggcctcgtagtctatgtacgagggttcggaggccatactgtcccgattgtccgccttcaagccagtaagaatgactcgaattggcggttctggcccggtatcagaaagccaaatgaatggaatcaaggaaatgctggctttaagtggccactttgtatatccagcaaaaccagccgagctaatcgattaagaggtgatgtcttcaatggccgtctcgtgagggcaacactcaattcgcagctgtgcaatccccatgtgacaggtctaatcaatgcagagctaatattcctgcttgacaagcagcatagactgtcagttgtgcaatcgttgacgcctgtccaggtgttgcagttgttgcgatgttttgaagccgcctacagggtggccgttgacgggattagtcagcatatactacaggttcaggggagaattgctggtctggctacgacgaagtcgaggataacgcgagttgattgcttcttattcaggcagtttatctcgttgttaaagtggtgtgtcgtggcgttgaaatgctaggcaatggatttccacgtagtcgtccatcctcagcaaagcgactacagaggacttattacgccgtacagtgctaggaccggaggtgcgaattaaagaaactagtcttccttcagacgaagatcgggtatcgctatgcattcgtggcacttttgtgaccttgtctttatatgtccaagggtttctaactagtctacctgaaagtaaagctccgtccaggcaattctttcttctcctttttaacaccagtccgaggagcctcgagcgccttcttgtatggatcgaatgggcgtttggatggaagaccagacgtaggctgaggattggcgttgagaatagaatccgctgtgtcgtagttgaacggtgttgagtcttctgcattttgggactgattttgcttcgcttttatcttttcgcgcttctccttccgacgttgtttcttggacggaggtgaaccgatttcgatggggatctcgtcaaggtcaagctcagctatggggctcttccgattgtgaggaagtttcgacttccgcagaggttgtggtgcagccttgcgtttgcgcggcccgccgagctctttgacagtgaagatcttgtttttgtcttcttcctcctttttgggcgctggggtgggagatgtaggtttgggtggttgcgcaacttggacttcagcgactgttctcggcataggcggtataggaagagagaggcgaagggcctctgccgatgctgcaagagagtactccggagaaagagggggtgtctgagtatccagcacagcgccccaaaactgggaggtctcgtagcgagaagcggtagggaaagacccatccttgtgcggtgggaggcgatggaggagcttctacttgtggaagacctctggtgggtttgacatacacgtcgcgccactcagggtccggtggcaccttcagcctttgctgttttgaatgacttgcagaaggtccggcgcgcgatcttttgc

SEQ ID NO: 1066 - DNA, 1379 bp, Emericella nidulans
ccctggaccgttggtatttcctcgtagccttctccaattgtggtgtactgatgggctagaacggctttcgcaagagtttatgtcctgtacttcagtgatttcgtgggacttgttctagatatttctctcaaatcctccatacacctcaaataaattagaagtattcgacggcaatccaataatcagtctccatatgtcctctgtaacaggtctcactcacaccagccccggcattaaggggtaatatcctattacaagttagatcctaggttttctctcatttcctcgatagtgacatagcctttaagtattctaaataggcaatacaaagtaatagctatctaggattttaggttgctctataacccaaaagcccatattacctaataatttaaaccaatgggttatttggttatccacaggatagcctactatgacccaaaacccagcgggttttcagaaagcatgatccaaccaatttcttggcgggttgggtttaacaagtctaggccgcggtgccggggtcgacggggccatcctgttggcgaaggagatggggattcgccagggcagctcccacgaagagggaacaggacagagtgtcgcagacccatggtgactggtgtttgaaatgaatggagaaggtgggattggcgtccccttttgagctatgggatattcactagctgcatgacatgtttcaggtcaagacctgtacaagcctactgtgaatggctttgtcctatctgtaacgggcgtaggcagtattattttcaactggctgtcctgtataaacgagtatcacaagcttagagaaagaaacaaaagatagaagcgcagatatcttcctcctccctttatcaacctttctgactttccggacctgtatgccgacggatcccttttccgaagttatgaggacggatctcctttcctaagcttcgaggctgcaattccgaagctgtacgctgatattgcagaaaccttgtttagaaccaggttgagggcatggccgacaaccaagatccaggccatagcctgtgacactatctgccaaggaatcctttgaccagggcgtgttagcttaagttcttggagaagaatatatcacagatctttcaaccccgctcctactcctcttctctctcactcctcatttgaacaccctccacttctcgtcctgcacccaatgtccggcgtaatactagaagaagaggccgactatggctgcttcccatttgatatctttgtctcagttagtttttctaatctcccgttcggctcagtgctgatttggcaagcaggaccggtgggatcacaatcacaatgccaccagagacggtcaggaacagtgggagcagctcgtctgggaatgggag

SEQ ID NO: 1067 - DNA, 7304 bp, Emericella nidulans
aagcactcccttctctgctagctacacgcccgtgtctcccatgtccaatctcttcccatcgtgcgccacatggtggaaaccttcaagcatatccttgcaccccgaattccttatctcctggtgatcgctcctgacttgctattctggatgcttgttattggagggctaggatctaagggctacaacactcactcatggtttgttgatcacactgcgtatgtggcacagcatgttggccttagcgacaggcatcaggcacgacgcctgctcggggagttcttttacactgatcagcctgaggatacatggtagagcacttgaaacgaagccttgacggcatcacatactaccaggatacagcaccggatctgttattctggattctccttcttggcgggatggcttcgcggggacaccgctcgcacccgtggtttgtgtttcagctcgcggaagtcgcggactctttagctctaaaggaatggctcgacgttcaggcgctgctgggagaatttttctatacagatcagcctgggaagacggcgggggaggatttgtggaatgaggttttgacgagttcgtttcggtgtatagcgccgaatcggacgacttctgttgttcgattataaggacaactggccgggggaatacacggcatggctaatccagccctgtattacctctgaaagcggcgttggatggctaggagactatgtgctttaagtaagacctgcctggggagcagctagtgaaaatgcacaatcatggccacttcgattcgattggctccgctgaagcgtctgacattgccacctaatcatctccaccgcgccgaagcctatattaatcatcgcgaaaactataactaaacaccacagggacagcggtggccgccggcgactaccagatccttggaacagagagtctggagatacttccggcgaggctaagttaatcaactctaaactgggcagccgagctagagcagaaccagcaagtccatgcacgattctttccgctaaaaccacgcttgctagattcttgttccgtttcgcaatcaagactagccataaggcaacgtcactgacagcgcctggggccttggtagatatacttatggggtctccaagagcgtctacaaactaaatggtctaggcccatcaacctagattccaacgcgatcatagaagaattgtgcttgcttatgctatacaccgcgccctcctgaccactcatacaagaagagtggtggcgtggtcgtccatgtgcaaaacagtgtgtctatttgagaacccagtctcagggatatccatcgttcttttggtggaaacatggtccagacgcgcggcagaaacccacgtatttcaaagcgcccaactccctgcggtaggtttgttatagttaaggctgcaattccctacaataactatgaagtggaattttagatacttggcgaatttcagggcgccggttgcgtagggaaagaatggataatctccgctgacactgtgtcctcgtcgaggcggtataaagattggacgtgagcagtgacgacgtggtgaagcgcggaaatgctaagacctgttgtaagatccctactgattggaccggttttgcgattctctagccacgggtcgtgggggaatagtgcgccctggggattaccggtgctgagggcaacgaatgaaaaggccagcaagaagccaaagaacctgtgggacattgctgtacgtatgtggtggcgaaaatgaaagacaaatgggactgtaatggccgagtctgagtacctggattttgatatgatgcacaagtcctttatgcacaggcccagctctggactatgcaaagccaagatcatagcacgcggtctacagaccaagagatctcgtatcgcaatagtcagtaaactggtaataatgacgcatcagcattcctggaccctgggtattcaggcctggagcggtacttgtatacccaacaagggctcctacaagcagaagagtataggtgattgaatatcggtgaatctcccaattcatgggcccggtaaatattcagcaagggtatggtgttgacagagattcttgatgtagatccaagatcgattgcgggaagctctggcccttgaagaacacgactacatgagtggatagtagctaccgtcgcacagggtccttggcataaagatgccgtggtatcgattcctccaagtgatctccactctctctcttactctatccgacgtcacccgaacaagccccatccagatatgacagcagataatgaaggtcggagtcggctagtacgcccactagtccgcggcatgaggaaaaatggctgctgcctaaattttttctaaacatattcgtgagtatcaatgagtgcttctggggatcaaagtttaatgattcacgtcttttggatcttgccactcgcgcgacgcggaagagactgcgtgacaggatgagtatggggcgctagaactttgtggaaggccgaatacttcatccatgaacatgcgccgcataaaaagtgccagatgaaacctagatatattgttgcattccagggagtctgttcttctgctcctcggcgtctaatcatcagcagtcccaccgtttaatttagcacgaaggagtagactagccagatccagggccgccacaaccaaatttgattggcaagtaatgaatcctgcaatcaaagggacttggagggaaagcttcatggggagtgcttgtcttgggcttgagcttgatcctcattgggccctggaagaaacagagcccttgcgacacagacttccgagatataaaattgatttgccacccatcatagtcatacaaaaaataaacacaatcgtcgttgaacagctttcgagcgcgccaagtccgtgtgaattataaccacaatggaagatttctactggagttcacaagtctccagcccttccagccatatctcgggagccgagtatgatgagataccatggcgattagcgaatgatcaggtaagatgaaggcccattaatacccactgtcaatccccatcgaagctcaagttctttttagggccatcccagcaaacatcaccagttccacgttacgcaaacatctctcaacaactcaggcttttacctgcctgaagatcacaacacagctccacaccactccaggtcatatcacggcccggatttaagtctcgtcgatcatttagcgtcaacaacgttcaaccccgcgtccacgttgttactgggtccggcccctgggtcggatctggagccgcaaaaaagcggatggagtgtcatgtcgcatcagagtacgccgagtgctggagaagatgtaccgcctcgagtaagtgcatgcataccctttctctagagacccaggctcaagccaaggcgatttgacagacgacaaggcggcgagcgcaaaatcgggaagcgcagcggcgatttcgacagaagaaggaagacgcacaaaaagtgcttgaggagagaattagcagcctggacgccaaatgcaaagaggtttccaagcaactggcgcagaaatgcgaggcagccctcgagctggagcgcgagcggaaagagctggaggagcaggtccaggaactacgcaggcacgggcagatgctggccggggtggtccgccaaccggcgctcgtcgaatcgttcatctcgctcctcacgcctgctcttactcagcactgacaaaggcgctcatcactacgattgatacactatgatactccggatagacgaccgctaaacattccttctttctcttcccctgctcttcctgccatttcaccggattaagaccgcttacggcctgtggcttggccccatcatttcgtagctcgcttctctctggacatttcaatgaaccttctgtaccttcagctgatgattctaatatagtttgccgtgcaccgtgacgctgctgatttgtcttctcttctagtaccattgagaactcggagtgcactttccttatggacaatgaggctgtttacgatatctgtaagcgcaagcttgacatcccccgccctggttataataacctcaaccgtctcaacgcctgggtcggtagctctcttaccaccagcctgcatttcaatagtgaccttaacattgacttgaatgagttccagactaatcttgtgccattcccgtgtatttactaccctctaatcttgtatactcctgtcatctctagtagctgcagtacttacaagagcttcaaggtcaaggatctcaccttgcagtgtatgtatcctgtcttttcttccaaaatatcccttcagtctaaccatctggcaggctttgaacctaggaaccagatggttgtctataatcctcaaactggaaagtatatagcagtggctctcttgtaccagggtgacatgatgcctcacaattatgcccgggctgttactgatatcaaggccaaggcctcttttaacctggtcaagtggtgtccaactggttttaaacttggcattaacaaccagaagcctatatttgttcctaacagcaagcttacttctatcaactgttcagtcaccatactctccaattcaactgccattgccgaggcctggagttgccttggccacaaattcgacctcatgtactctaaacatgctttcatttattagtacatgggtgagggtatggaagagggcaaattctcagaggcccgcgagaacctagcagttctagagaaggactacgaggagattgccggcgatactatgggcttggatagctatatagaacacgagtattaagcaacagttcctcttcctggttaaataatactattactggtcgtgcaatcagctagagaaagcataaagttgccagattttaagctaaaatatgattctttcttacagttctttattatcacacgttaaagtatacaacacaattctgtcgaccgaagtcaaaagtatgatacagccagcagacgaactggaatagtgacttcagtatacaaccaaggacacaaagtctggcttgatgtagcagaaaccatggtttgtcttgatgttcaacaaacaaaactatcagtctaccttgatattctaaagagaatgatttgcagggaccacctgaatagaacatagcacgggagcgagactcgaatctagcctttttcgatgaggaacgctgtctctgacgctctcttgaattcctatgcagactcaaagggattcaatatcccaattctcaagcttgtgcgctcttgtgctctgtgtttccttagctcgttctatctcgctatcctagtttgatttcgataagcgtacagtgccatcgcgagaacgatatgcccgcctcgagcaatacatccagtcgctcgaatcggcactcgtgagcaatagtatcgagctaccacagcagcccgacccatatcccaccccccgctccacgtccatgccgcagaatagattcgagcgagcttcaacttccatcgaaagggaagtctactctcccgcggctgcgcaaatcgactactctgcagggctagactcgttaagcgaccggtttggttcgctgcagctggcggaggacggccagatgcggttctttggagcgacctcgaatcttcatatcctgcatgtcggcatgtttcctctgaacgattccaagatccgctcggtatacggcaaagagaatgatatcctccagcgggccggtctgagcgcgcacatcccagaggggctggaggaccaccttctgcagctgtacttctgttgggagaatcccaatatcccagtcgtcgaccaagatgtgttttacgcagagcgagccaagtacagagcgactggccgactgactgaccggtattctgaagccctggccaatgccatgtgggtgaccgagctttgcattttctcaccatgattccaatgctgacagtgactcggagccaagtgcgccgtcggagcagccctcacccagcgacattcccacggcctcccggaacccctcagcgagctcttcagccgccgagcacaggccctgctggatgttgagatggacgctccggctctgtgcaccgttcagtccttggtcatcctcagcggcgtggaggccttcctgacgcgcgacgctaggggctggctctacagtggtatgtggccatgttttccaacctactcatactcgttgtggcacggttgtattcccagcggaggtaaaatggcttgaacaaaagcatgataggtatttgagtaacagcaagcaacaataggataacctgtacgactgcctgaccgggatagagttgttcttgaacctcgccaggggacaaaaaataagagatcaacatattcagaagacttggtggggactggccacgacactcccaatcaatagaccacttatagataatcgcaaaggcaaggtagccaaaaattgactgaaagaaaatcatttgcgggataaaattacctaaaatgtcggccttgcactggaaatgccgggcgttggcatattgcaagcagagggcatatgtcatctgggacgtgttattaatctatctcttaaagaaatatcgcacgcacatgtgcccaacctatgagaatactcatcttcattttcaaactgttagtgaaaaggagggtattctcggcatcatgccagttccagtccactccaaacgggaaacgatagccgtcccttagtgaggccttgactgtctggccttgccgaatgttgtcaggccacttccactggctctgaaagatggtgaacgacctagagaaaatatcacagtagattagaccagtgtacatggagaataaacccatcatcagcatgatgtagcgacccaagaaagccatctcaatcatctcttcaagctttgtgcttcccagcttcgtctcccaatagatcaaaacagtagcaaccatagttattaatgcaccgtggccaaagtcaccaaacatgacagcaaaaatgaaggggaaagtaacaaccatatataatccaggattggattccgaatattttggaataccatatgcgtcgacaattgtctggaaacatttggtgaacttattcgttctgacaaaggtgggcggtgtcttattcgtccagatctgattaacaatggtgggcacggtcactccggcgcggccattaatacccccaaagtcgtcttgatcaatggaagggagctggtagggcaccatgcttccgcgacgtgtatgctcctcgcctggtcataggaaaattcatttagtgtgccgtaaatagccttctccttcttgataatagtcacccaaagcgc

SEQ ID NO: 1068 - DNA, 3475 bp, Emericella nidulans
  unsure (1)..(3475): unsure at all n locations
tttcaaaataaagaatcagtcagacttggtatcttggttgcatagacagctgctggtgaagtaaatgtaaaagcaacaagcctctcagtatctcgaaatattgattaccttcagcctcacggccagtctcgtgacatgatcctcgtgtcggggcatactgccctctggtaccgcctgcccctggggtcgagctcgcttagtcatcattcagtaagctaagttagatatagataggcggccatgtcggccatccaataatgacagttgtccatccctttccacacctcgccaaccagatatctgcattagccgcttggaggaggggtaatcacgagatgtacaagcaacttggctttgcaaccaaaaaaatagaggaacttcatatatattgtgaaatatcttgtggcttgatctttcggaaactaaagacaaacacatgaaggagaatgatatcgtatgaagccggtcgatgaatcaccaggcaatgactggcattactcggagcgtccagagctgacggttgcagtgccgtacagcaggaaaggtacaaaggccaccacctcagtgctgtggttcaataaaatactcgcgctaaggccttggtagtggggcagagtaagaactgtcatatgttcaatggtgaaagcaatttcgagaacgactgtatgaagacagcactaacaggaccgttacccttgtaagttcagtcctctctgccttcacatgtgtgaaggttaccgattctagactatgctcactatgcaaggcagttacagtactttatatcctagtccttgtatctttatatctcgccgccagctcttgccaggttatcctcaagggtgtgggatagcagagtgcctagagggccaattagtatagttcatggactggcagaatatacctaccaagtcttcttgggatggaaaccaatggtcatttgagttgaatatacggatctgtccattttttcttaaccgaactactaacatgatatctgcatcacattcttgactgaattcaaaggctttccgaaacagagtgtctcctcgtcgccggtgttgttggcctcttgctttgggagtattggacatgcgacaacggattgcctttgcctttgccattatagggtgattctagacactgttgtttcaaagtagataaaagggtggctatgcctggtctaagaccgcgtaatgtcctgccttatatgtctttcgcgctcgccccccgcaatgtgagtatcttacacttgaaggtgagtattacgcgactgactttaattaggtaaaaacacaaaagcaattcctaagttctacaaagaaagctatgtctgttcagggtaagtgcacctgccaagcctctattagtagtctactggggtgagagcagggtgagtagggtgatttgtgggtgatcaattagtgtttaaagtatagttacaaatcaaccatttggaaagtgttcaaaccatcagcaggagaagaacctctgttagtttcatcatggaagttgaacatcatgttgaacgggtaaatatcgctatcaacgtactaaatggagacgtagccttagcagctgtaaaaacagatgcatgtgacattcgtgcttcccgggcccccttgtctgcaactcttgtctgcggaccgccttcgtcccctgatttctccttgtctgcggacctgttttgtatccagatctccttcgtccccagtcatcgtctgtctccagactaaaatattatagctgtttacagctttcctacgccctgtaccgatcaaccgacagcggtcgtacgaccggcacggtgggaggcccgccaactggcagctactctccaaggtcatttgcttcacacgattccagctcttgttcgatcgacctcatccatcgcaagctcttccccaaagtgcataaagattgttaacatcctctggcttgctgtgaacagcatttaaaccatagcagctttgaagaagacatgacataatatatcacgtcatgattttttagtctcatgtgggtggatgtacgatatatttattcattattccctggatttgactgtgtttattttgcaaggtcctgctatatacggctgagattaaacattgaattcaccaatatcaacatgtccaactatgaacccaatgatgaaggccagttccaaagctcgcttgccgcccaagccaggcagataactctacaagtaggagagtgtcgatttgttaaagcactagctagatatagaggttgtaagaagtttgcatgcagactgtagaggtattttccacaactccggccatattgatcaaccttgcctattcctaaaggctggagagaagcttcctgatagaggaaggcaaatagcatgctctggctccatatcacatagatacaatgcagataggtagttatgccgtgattgaatctgtattttggcaggtagtaccctccctgatggtttcagcgggaagacagacggatacgttcgaagacaaaaccaaagaggcagaactcgactggcaggccctcaggaaatcgctaaacttggagatatcaaaacccttccttgttttctcattcacagcttgaaggttttgtcaattgcatctggctcagcaaagatgcaatgaccagagcgcgctttgcaggggtgttgaaacaaacaagaagctaaacatgtagatattgtaaaggaaattgttgaggcagcaaaagcaaggggatttggggtccataggtgctttngctcggagaagcagagaaaatctatatcgggcccagggcggacaacgggcggcgtgagacagtcccatgcatcctctcagcatggtttagtaatgctgccttgctctccaactcctcctggcagatgctgcatctaacccgcatatcttctggatatggcacgacatggatgtcgacaaagtgacgggtaagggatccaggggtattgtagtttttaaatcgcttattttctggcattcgaggatttccaaggcaaagaaagcaaattgtcggccgttcgtctcgattcttcacgcagacagatgcaactgcttgagaaagagtggttgtttccctgtcaggcaaagggcaatgttgcctttttgcaggtggagtagatggtaaagcatctacagcaggacgcttccgcaaagcatttggtcgtctgacaggtgatccctcttccacgtcacagaaagcaatgacagcattgatagcagcaatccgacgctgatattctttttcaacagttgagcctggcgcggtcaagatggtatcgattagaatcatatgctgcggggtcatatacccggttcgctccagagcccccttcacctcactatccaataacttcccagaaagctgcctctcgctgtcaatcaccggctgctcattcttatatctttccagattcttacgaacttagcgntttcggtggccgtggcatcatttcgaaacacacgct

SEQ ID NO: 1069 - DNA, 2525 bp, Emericella nidulans
ggagggggtagggaggtgaatgagaagaagggtaggaaggggattaggaaggtgaaagatggaggattgggtggagaattgggtggggctatcgaaggaaggggggtttgagatgaggtaaggtgaatgatttatggaagagaggggtaaaaagaggtggtattaccgggggggagaaaaagcaagggattattggtcttgacaggggtgggagttcggctagtgatgggggcaagttgatatgatccccgtgcagaggcagatccgggacggtagagagcattccgaaagagaggaaggggcccccgcattcatggggaacgggggatgggaaagaggtattgggctggtccaccgggtgagggggtgttcaatacaaaagggaggcttcttgccggggtggcaatgggcagaagcctcttgtcgtcttcccctggaacagtcggtgggcggccgtcaccatgggattaagccaagggtcaggataaattcggaaagtttcgcgatccaaggaagggtagatagttcatgccgcatagcgaccatgtcgtagtacgtctgcttgaggctccttcttggtcgcctccagggtgtaaggcggagggtcgatctcgtaagtctcgaagctctcatcaaaaaggcggacagtgaaaggcttgttctcgtcctatcgaacgcgcatcagtatcaaattcgatcccgttgcgcaagattttcagctcgggatagctgatgccggcctgtgggatatccccagcatgcgacgaagcggcgaccgtggtgacggagcggcgagcaaggggagcaaatgcctgacgcctcagaggcgcagcctgacgggcccacgcagttcggaacaacatgatggacggtaatcaagcaatggacggaggagggagaaggaggagtgagacggagatgttatctttcaacaacagctggagatgttgggaaaccacgaaggaactttccggtcccgctatgcctgatcgggaccgtctcttagataagcctgattgcttcggtcgccggtgtgtagactgcaaacactacaaactcatcatcaagtactccaaagtctccactttcttgttgttattgtggatactcaatggggaatggacagaagctgtatcaactacacgaacgtagcgtactaaggttcgggcgttaaaacgattgattctcttatcttgatgacgatagatagatcttcaatctctcttgtgatcgatacaatacacagaggggtcagattaggggtcacatattaggccgcttatatcatgtagtgtaaaccagccccaaaggttttggtttggttttattatttaacgtcactcggcgatcacgggacccacgtgatctgcggcctcccagggggcatctggacgagctgtctaaacaggaacccctaaaactagctggatacaggtttgaagcagcaactatggacaatatatgttggaaatgagcggaagaagcatccggcgctaccctggccaggtcttcgagggcagatgcccgttttgactacaaccagctccagaggctcatcgtgtacaccgtgtacacgatgaaggttacatgatatttccatcagttgtgacttactgtattctatatctgcttcgctcattccacgattcacgacttgcggaggactcaaaggactacacagagtatatctcagcaagcttcacctatgctcgaatagacgcgtcttaagaacgctatgacaagctgaattctcaatccggacaaattgggacatcggaatatcttccgtgcagttcagcacccgtatttcgccagcaggtcaggctatgcttatctcattttacctctgaagtgtcagtcatcgccctgaattgatgggaaccggcgctgttcagtccagctgatcggaatggtaattcagcatgctttcgtgcctcgggcttggtaaacgcgagaggaggtcccaggcttctaccctgagattcaaaaaaaaaattttgcagtcaacatgatacggccatctacctaggctctaacagtcccgtaggttcggagagttggtagaaatatcacagacgttccagaattgagtcccctcaatgccctccacagttgctgcgcaaaggctactaatgcgctacatcgtcgtcttcttaccctcaacatggaatttacgatctggcaagatgcaatgcttcttaatgacctgccaagtactttatgcgactggccgatcatagaacggtatttgacactagccttcgctggaagatccggtcaatgtgtcgcctatgggccgttttatattccaaagagctactgtcaaccgcgttgacacaatttagccctagtttccttcaagactgcagcaactctcaacaggcgttatcaaaaatacttctacaaagttgcgcttggcgcacgcagtgttcccactgtcaactttatagcttggattgtgatgcaattgagacgatgacagaatgcggattagggtcaatcgcggtgcccattttcttcctccc

SEQ ID NO: 1070 - DNA, 1613 bp, Emericella nidulans
acgcttgaatttaccgaggatcgtgtggtatttcgcgcagaaatatcaacttgacaactacttacaagccattgttgcacgaggatcaaatgaaatgaagtcctcggctcgattccttttcctaagatcctctgtattgcatgattccatcatcagaatcctgccgaccactcagtggaccagcacagccacagccacagtcaagaacgcgaagattcccgttcagtgcctgatggccccgtgccagtggactgaggaggggtaaacctgcaataataggctatagtagccatcatacagcgtacctggatgacttggctatgagatatagcattatattgttgcttgagggatcgaggtcttgaagtatacctggtaatttcactacgttcagccatactatacaaacataccaaactgtatcaaccaaaccaaaacgagtgttgtgaaacgaggacggaaatatatttttgtttagatatatcagattgacgctaccgctattcttgcgtttgggtagatagaaattactggcttgtccataccgccaacgagctgaaaattgcacgtaaatattgtaactcagacagatgatgcgaagacttgagagatagggaaagattaaagcagcaacgagcttctgctggatatttaactgaaacgcaacccagagcatatatcatgaatacttcatttcccgaatgagtgaaaaataaaagaaactagcagaccgaagatgctttcctggtagcagagcgatgcaacttaccatgcagtctacacctcagctagacttacgaagatctccccaaactcgtatcggaccccgtcgtctgcgttgctttggtcttggtattcatcctggcgcactttaaggaagcccttggtggctagagcaaggatatgcatgagaccctgcgtagcgacagtggcagacgtgtcctgatacggcaataatgtagagaatgtgatttcggtggcggaagcgccttctgctggtttcagcgactggatcttcgcagccatgaaaccgaggaagttgagaccctcctggtccatgactgactcggtgagactgttctgaagctcctggcttctatgtgatggacctgctacgtccgcgttggagttgtcatcccccataacattttcgtcgaggtaatttcccaagtcgaaaccttccagtttgtcaaggtcgtcatcgtagtgaccaggaatagacaaattgtctaaatcgtaagggaaccctcgccctgcaagagggcttgcgctagtcaatcggttgcgcgaccgtcctatacctgagggacctacgctgggagctcggccgaaggaggcaactgactcagggagaccacgggatgaaaggtcgctcacacttccaaggcctccaaaaatgtttgctacggatgccccgtgacgagagctctgcacagaggcggttatgttccagggcatttgggaggaattgtcatcgtaaagaggtggtgattggtgacgtccaagctcaacgtcctagagaagtcaggcttcctgctatgaagagttgcgatttttgaacgcccctcgtaacaaagattagtgtcatccacaatatccattctgccctgttc

SEQ ID NO: 1071 - DNA, 2427 bp, Emericella nidulans
  unsure (1)..(2427): unsure at all n locations
atttaacgacggtaaaacaaccaacaaggccaatacgaccgcaaccaggcctggaccaagtgtcccaaacaagcacatgggtgacggcgtctggggtgcaatgcatggctactctgctgttgagcaaatccgctctccgtggttcgttcttatcacggtctttaccgtcttgcaaatgctccggatcgattacttcgttgcatccatcagacagcagtacgaatatttattcggctcggctgaggacgcgcggcatattaatgaactatttgacttcctgatgccacttggcggtctttgcgccgttccgttcattgggaccatcctcgacaacgctagcactccgtttgtccttttcgtcctggccgcaacggcaactgtaatcggcgcgctaggttgcatcccaaatagttacctagcggcctacgccaatattatcctcttcgtcatctaccgcccattctactatacggcagtgtcggactacgccgccaaagtctttggttttcacacatttggtaaagtatacgggctgattatctgtgtcgcgggcctgggaaacttcgctcaggctggcctggacgccctcacatttacggtattcaatcgcaatccaatcccagtcaacctcatacttactagcttcacggccgtggcggtttcgcgctcatgctattcgttgggcgcaaagcggctgttatgtctgcgtcgaatgaatctgagacgcgggcggacccggaagttgcctccttaatccacaattatgacggcgtcgcggcccgagactgggagcgggacggcnagcctcttctttcgccacgttcagtgcctagaccgcagccacaatctgcgtcttatgggagcatgaggtctccttgacgcgtccctgtactgttttgcaacaatgagccggactgactgtgctctcgtcagttctgttcttacgacgaatcatggtaaagacctcctgatgctgcttcctcgatggggtcgcgcagcagagacttggggcccctttgactgatcaacagccgaaaggagagatcgcacgatacttcagaccacggccagccttgtggccggcgcggatcactgttatcatcagtaactacaatgagcaacgaccgctatctgttaatgaattagacgattaatttccctgctttatgaccttttgcccttgctatcctatcacgtggctatgctacacccgcacttctgtactccggtgataggaatctagaagtcaatctatgaaaatgcagcttcgacatttacgaactaactgaccatcgccatgatgcacagtctttttttattatccctttgctccttctcgagcctggataacatattattgcaagtataatcacctttacgactcctgccttatcacttaccctgtcaggtaatacccccatatctgcatttggacactgtatgtagtctctgccgactgtagaaagtaagtacgtgattagggtcaatgtatcctacgtcagcctccaactggtgttcttctgtatggtttggtttagcggatacttgagctccaagtctctaaatacagtataaagctcacagttccagtgctatagctcacgctcatgttaaaattgacaaggttccctaactgggcaagtaaaatatcactaaccacccagttcaccgtcaaagttatcatcactatacatgtattacagaaggcgggctcgaaatcctgcatagagagttacagaatgtactagagcctcgcctcagtctgaactacctttggcacaagagggcccttccctatcattatttgctcacttcttggttccgatcaatgtatgtatcaacataaacgttgttttagacgttaagacagtcgccacacttttatttcatgtactccatatagtctcttcttcccaggggagacgatgccttattcagaattaaatggaaaagacaaatcctctcttgatcgaagcgttttctgagaattcccgtcatcctccttcttccttttcaggtcacgccagcatcaagcccatctacctaccgtacccacaaacacacctacctgcctactgagccccgagaagcaagactccccctggcccgcaactcccatcagacctagaatgacatcgatcgcatttttctcgtccgtcgggcgataaactcgatgaggcattagcggaaggaagacaaggctcgtcggagaagttctcgaaaaccgcgtccaggtcccacgggagtgacaagcggagggttgaccggaacgacagcagaaccagcggctctgttcctggtctggattgagatctgtagtgcgtaccatgcgtttgatgctcagtcgctctgtctccggttccgtcgcgcgttgatgaagtgaagggtgtcgttcttgtgttgtgtccttgagaaccggggattggg

SEQ ID NO: 1072 - DNA, 1926 bp, Emericella nidulans
agtcctcaacatctcagagttgatgaggtcttggaatcttggactgtgttaaaggatattgaaactgatagtttgaccctaggcatgaaagtacaaggcgcgttttggcgcgctgaggttcacgaagtcacatgctccactgaagttattagaccagtaagagcaattcaccattaagagagcagcacttttggttatatattatttttcttttccaaacaacacctattatatgtatttacttggagtcatgctccggggtatagttaatggcaattatcgctacctggcgcgcgtgtctagtgacagtcgatcagcatgctcgagacggaccgctgacttgagctgctcccgaagcccaaataaatgctgagaggccgttctcatcagttcttggttactgccatcttggactgtgatggcagcttgcaggatatagctcccggttttttccaaaggagccaggtctcggaacgagtggcagctgtcgccgcggttcatgtggttcctggccagtggccggatattgtaaaacacgatgcaggaaaattacgatgtcgttgtaaatgaacatatctccttccaccacatactcggttacgaaactgtagaaccgtcaacaacccatgtcgcccatccgaatgagcccgaataatagctgcggagtactaacctatatccccaggcattcatagaaggcacaacatcccctttcggtagagcagcgctagccgccagccgagccgtgatggtcgaccggaagcctgcctcaggagtgtctctaaattcgagcctccacggctggctgtcgtagtcgtaggagctacctgcagcttcatgtgtccccgacatggaaacatcctggctatcagatgacgacggttttccgtcgaaatctgcctcggatagagggccgacgacctgcgtgtagaacatctgcccattcagcattttattgagccgtacaatatcaggaccctggccagtgccgctgcgcatgttggcgagatcaggttttctagtggccttgaagatcaaacgccgttctagacagtgacggggctgcatggctgtcagcccagtaagctgctgcaacagctcatggtgttggtgcgacggaaccgaggcgaagagcagaagctcgtgcatattaggtagcagttgaccgcaaagacagctcgtatccgaagatggtcgcaagatcgtcaaggcccaatctcggtcggggtgggcagccgagcgggaaaagccgggacggtgactggtttcacaggttccgagccaagcgcaattggacttgaagagtttgaagctggcggtttcggattggtatggttcgatgtcgaaccatcgatgtcgagccccggatttggcaaaaagtagatcccgacgtgactcctatcacataagctccaattggtactctgcacgctgcaggatcgcgtgattggcttcggatttttagaatcacggcgcgcagcgtctccaaggctctggcgttttattaccgtttcggcggagctctctgagagtcacgtgaaaagatggaagttgtcggagacggggcggaggactgtggcgcccggattctggactagcaacgccgacttgacttgtccctccccatctacatccgagtggtcagtaatgcttggaggcgccaggggaatcccgaatggaggagagatgcgggaagaaaggtagagtgtagcagtcctccactttatctcctcaccggtgatgcgggttgggtaaagtcacttcggcgcatccagcgatccccctctaagcagttggagaaggcaggttccgccctgacatttaccccgaaagcgttatcaccccgccacaccgactgcagtttgcgggtatacttagtagtttgtcacacagccggtacatataccaacacagactatcgcgctc

SEQ ID NO: 1073 - DNA, 1942 bp, Emericella nidulans
catgagccaaaatgggttagggtggtatatgtaaggaaatgatcagcagataaacgtatcttttggataccaagttcaagggatcatcagacactgagatccagaaacattctgagaaggccacgaaacaaacatagtaagtgaaggggaaaaagtaaacgagcttgcaagagcgagggccagaaaccatggaattctgctacggagagctccttaccactttctcgctggcctgtgtggtcttagggttctaaggcttttcctgcaacctcgcccttttgtcatcgccctcttccgtatgctagttgcagctctgcagttctcgtttgcagctacacaatgtctgataatatcgtaccaccacccgcggtcagctctcgctcgtgttgtaacgggcgtaggcagtatgttttcaactggctgtcctgtattcacgagtatcacaagcttagagaaagaaacgaaagatagaagcgcagatatcttcctcttccctttatcaacctttccgacttcccggacctgtacgccgaaggatccctttcctaagcttctaggccgcaatccaggctgtaactgatgttgcagaaaccttatttagaactgggttgagggcatggccgacaaccaaaattcaggctatctccttccatccaaagacggatacttggcgagctatagcctgtgacacgcgtgtcttaatccccacccttcttacctctgcgcttgccttgagctgcagcaagatggacacactaacgctatgttgctgtatagtatgtgccccgtgattcaagaacagcagaataaatcagggttattactgtagccgagggcaaaatgcttgtttgccaatttggcagttttatcacgcagttcctacgagcgtgaacgggcaccattgaagtagatattatatttattactaataataataatataattgaaggtgctgtgacactcttgaatgacatgattactctcctgcccatcttccacaagtacatactgctcggtagtagacttgttaaaccacgggttggggcaggttttcaggcctagctgatccgcccacgcggtttttggggtgggttacctgaacagtaaggcgcccatgggtttagcaaataagtctaacccaaccagataatcaaaataacccagttatgcaagtcactgcttaaataggcagtgatctttaaatctaaataaaatactgtattagaatacagtaatctaaattatctaagtaaacaaatgtaatctaaatacagttaatatacctgtttagataagaagaataaggcgaggaaaaaacagtttgtactgggaacaattgttagtttaggttgaatggggctggtgtaagtcgtgttcaagttctaagtatatcttgaagtatgtttgactatccagattggtttgcacacatcacggtgttaaccgtggttggtaagcgagctgcgcatgtaagcgagctgcgcacccaaccacttttttacatgctgacgcggtcatctatcttccaacagccaccatgccccgagttcgcgttagttcaagccaaaattgccatgagaaggaaggtcggctcctactagctgtacaggctataaaaaaaaggagattatattaatacgcgaggcagcacatcactttaatatgcctgaatctatactacatacgcgacaacgcgggactacaaatcgcgcggaatctcgcgcaaatagccataaattgactgagattacagaggaagtacttaagcagtagattctttctttagatctatgcagagcagctcctacaaaagctcctgtataagatatggctaatattctgcttgcaaagcataggttccaccccaatccagactgtcggccagaaataggtacataattaaactcaacgacacctggagcttgagtcttgcttgttaagg

SEQ ID NO: 1074 - DNA, 2438 bp, Emericella nidulans
cccatacccacccgcattatcatttccaaacagaccagaccgcacaaatgtcattcggacactctacacccataacgtatgttcttacacctcagggcccagaattagaattgggggtttagctaaccttgaatcttgcagccaacgcctcgctcgacgaccctcatcgctctagcaaagctccacaacctcgacgtcaaaatcatacacgcagaaaagaagaataaagaggcatttgaggagctttgcagatataatccactcgggcaagtccctacttttgtaggcgcagacgggttcgtgctgagtgaatgtattccattgactctttactgtactcagccccgacactccctggttaatgaaagaggactgaaaagtcctgctgagcagttgcatcccagagtcaggacccgataacaaaatccctcctaggcaatgacgaacgctcctcgctcaggatcctccaatggatgtcttttgcaaactccgacctctttccagcagtcggcggcgtcttcctcccacgcattgggcaacggcaaataatccagcaagatgacggggactcactgcgtgcgatgctgcagcggtgcaagtacctagatgagcatctgaagcgcagcagatatcttgtgggggaaagtataacgattgcggattttttcgccgcgagtctgctcatgggagcgtttgcggcgtttaggagatccatgcaggagaggtttggagcactgtgcagctggtatgatggggtccttgagattggctggtttaagaaggttgcgggaggtgtcccggatttgggacttgagttagagattccagaggatataaaatggtaatgattagaatgtctaatgggacaacccgagtcggctagttggagccatgtcttgacgtcttgagtgatctgatgtacgatttcggtggcgttaagaatagcatattgagacgccctcagcacacaatccatctataggtagggttctatctactggtaggctcagtctgcaaataggccagcatagccccctccacatccccacgagcaatcttatgcgtcccattaaccggaaaccttttcagtcccaactggtgcagataaattactccgctcaacgcattgctcttcccaagtgcccgcacaacatgttttctgatctgggcttctttcttgccggtatatcgtgccaggacagcaaaggggccgccagcatttaccacacatgtctggtatgcttgtttagatctcagatctgaggcaaatgtggtggaggtatgggggaagaataaagaaagaaaacatacctgaacagaagtatatttctcaaggcaactctcaatcggggcaggcatcactttcccattaatcatatccttcatccggccaaggataaaaacaacgccctgcttgtccatcaagcccacatcacctgttttgaaccatcttcgcccatcctcgtcgtgaaacgactgggctgaaactccacccagataccccgggataatacttgggcaggagacatggagctcgcccagctctcctcttgccactgtcgcgtttgcgccacggatcctgacagcagcgcctcgtgcaacggatccaacaggactcatctcaccatagaacggaatatctctgggcctgttgaaaggccaaacaaacgcccctccaccctccgtcatcccgtgattcacgacaactctcgctttcggaaacaatcgcgtacatatctcaagtgcgcctcttgtcaccgcatcgccaccgatttgaactgtcctgacagaatcagctgcgccatttctacccttcaactcgtctgcaactggatgaaccatcgccggcgtgagcaccacgaaactaaccgcgtgcctttttaccgcatgcaccaaatcgcccgcattgaagccattccccgtcatgactactgtcccaccttccctccatgtctggagtgtctgtgcaatggcaatgccccgacacggatgcgcttgttgcagtgcccgcgtgcagttctctgcgttgaccagccacgactgggattggagaacgtagctcattcccgaaatatgcaacgggcaccctttagggaccccggatgttcctgacgtatagaggatggagtatgtacgggctgcgttggaagagtcccagcgagcagaagatagaagagactcggtttcagaagctgaaagagctggtgtcagagatagggacagaagggatctccaggctgagtctggttgacttcccgcaagctcggatagagtgatcttgaggatatccgggtcaagcggtagattccgcaacgcgacatcgatcacatccgcgccttttacgtcttgcacaacaataacccttggattgatagtctttagcattctgcgtaactcatcatgctgctcaacgttaagcagttcctcatcgagacaga

SEQ ID NO: 1075 - DNA, 3752 bp, Emericella nidulans
gatacgaaatgcggtttacacatgcatccacaagctgcagaggaagcttggccatatggcttctgcagcctccttcttgtcttgcagagaaggaagcttatgaaaggcgcctggatacattctctattcctggttgattagaattcctatccctgcttttcctgaacaacaacacttgtgcgcacatggactgtaacccgctatgccagcttgatacagccatctgagacatcgtgatgacagccatatactgaggtgatatagcagaatacgtgtatctgtccttggaggtatccccctgcagtgccacatgcacactcatccttcaggagtcatgcatgcaccactctgacaagtccaggaagacaagacgtaactgccaacaatgcatgcaaagaaggctgagacaacgtacgcagactcattgtggcacagaagaacatgaaattgacctggacctcgacggccatcgggatacgggatctctatatcggagctctctcttttctcccgtactctcgactcggcctgcgtctgaattcacaactgaggcccttgaatgtttttggtaactctatccgaactgacgacgtatagttctgtacccaatctacggcccgttaaggtcctacgacgcaaacagcaaagttggtccgactttcatcaaacaccaaaagatacaagaactttccgcagaagacggctgcaagagtaagaaacaatttctattattcacagacggcgagagccgcgaggctgtcatattactagaaacaacagatagagaaccacccaacgcctataatcattatataacccgggctcagtttttaacagcatcataaagtaacaccgctaacttccaagaacttgcacagacttccacatgcgtccgtaagtgatttttcagtcttccatcggagctcctgctgcgatctggtagcaacggcaacgcaggatccaacatccccagggcgacgaggggctgctctaacagggatttgtttgcgcgacacgctttccatagcgtccactacctccttgactgagtgtccgcgcccagttcccaagttgaaggcgcggaagttctcagctaactttctttcgttggcagcgtcaagagcagctatatgccctcgggctaagtcggttacgtggatgaagtcacgtacggcggtgccatcttccgtctcccagtcagtgccgaacattgagagttcattgtactctccggtcatgacctttacgaccaccggcaaaagattcgtaggggtctgtttcggatcctcaccgagcaatcccgactcgtcgcagccgattgggttgaaataccggagcgcaacaatcgtccactccggatcagaagctgcaagatccgccagtatggcttcgcacatccacttggtgcgcccatagggattggtaattcccgtagaccctgctctgatggtttgagcgactccatctgcgtcgtggtaaatttcatccttgtgggcgcagagctcttccttgagtggaagaccagaagtggctaaagtgccataaacggttgccgatgaggaaaatatgaatgttttgatgccgtactttccgagtgtcgaggcaaagtcaatgagaccactaacgttgtttgcatagtacttcaacggattttttatgctctcctcgactgctttatacgcagcaaagtggatcacgccggaaattttggacttgggagtgccccatctagaatcgacctgatactggtcgagaagctgcctgagagcggcagtgtctcggtagtcgtgagcagccagatgcagagctggcatttcagttcctcgctcgtcatggtgcttctgcgccaagtgcttgatgcggtcgaagacactttggaaagaattgctgagattgtcgatcacaaccacgttatagctggccttcagcagctctaatgttgtgtgacttccgataaacccgagcccgccagtgaccaggatgtactgacgaagagggaagttccgcaacaagtcatccagattgccgtcgaacaggacagaggactgtgtcgctggtgtgtccacgcataccggagagcagggctccgcaggagagcttgcatctgatcgtcgaggactatccattgttgatggcacttcaaacaagtgcgcagatactgaacaaaaccaagatgtggcacaagggaatgcggttggtcaaatgcaacaacggatccagagaaaacgaggagatttatacaaacaaactgtgatcaagagagagtgtgactggaaggtgaccagcttgagacaggagtttacaaattattatactccgtcagagcctggctcgaacagactggggggctcttttcgatgtaaccaccacggtttcgagtcaaggcaggcgatggtatactgggtcgtgactcgcctattactttcaacaacatataactgtggaaagcgaacagatgcaggtagggtcagatgtggcagagaatggaacccgagagaaaaaagaaaacacagattgagaataaattaagaaaagtcagctctttttcctgcaatgggagggaacggtgctcaacccgcccccggttggctaatatcggacgaccttctgggcgcctccacaggattgcagtcttcgaggcaggaaggagagacaactagcattattcgcttcagtaacggctacaattactaacttagagaactgctgcatggtctaaaccccgatccactctattctgggcgcgctcagttgacgaaagaagcaagcctgattccctacagatcacctcattcaagtcgaggcctagagggcgagaaggactatgggccagcggggccacctttttaaacttgctctggcacgccccctttgtcgcgtcatttctgatgcgctactcgtttagtatcattgcccttcatcgactgtggccatggggatcgaaaaacacgtgagggagcgacggtgtctccacagccggcgctctcgactcattatggccgtcctcatatttgtcgctattcttgcaatcgttctcccgacatcaattatagtaacccgacgcaagaataataatatgggcccgaaagcaaaggtctttgtccctctctatgtgtaccctgctcccggtgcgtgggatcccctagtgaatgtgtaagtttcctttgacctgggtgcgtttttattttgcccctcgcgtttttgcgaacgaacccgaacccctgtaggtcagacaggttgacctagattctggaatcatgcgaacgccatcagccgcctgcagaggcaccggcgtgggacagaaggcgcctttgttttttcgggggctgcaactaaacgccgctgtaggatcacggcacaccccgatgtcaacttcacggtcgtggaaaccctggcatgggccgggcccaatcccctggccgtttgaaatttcccaggaaattcctcttgtgctgccttgtatatggcccttttccgtttgttggcccttcatctctctgcgcactttcttcgggcccatgctttaaacctacccctctgcttacatagacttacccctagttggctccgggatttttgacaacccccacatccaatctggatttgctccttggagtcacctccgtaaaacactgggttgcccccctttttagttcactgtttatgcccctctctgttttctggtggcttttcgggttttacacctcccattcattattttctttgcgggttcttactttccctccctccct

SEQ ID NO: 1076 - DNA, 4513 bp, Emericella nidulans
ctatgaattattgaagagaaccaccgtggagggaatgacaacgagatctgaacatattgaaccgcgctagttcagcaaatctctcttctatggcagcggcgttgattatgctcgagttgtggcccaaatacagatacctggagtcttgcagagtcagttctcactcgggtttgggatgtgatctggtgttgctttcgtcaggttgcgcggcaagaaattctgattggatttgaataaagcgatgaggcttccataggtcggttgaagcgaagcaaaaagcagttaactggaagttcatgggatgtttgttgagattgtagtctacttcgtacagagcggcaatgtcactggcgttcttatgtcatccatcaacggccatttcggttttctaatgcctggttcccccactttgcttaacacaacactttcaccatagatctctcagacaaaggcatgcaaaggaaattcgaactacatctacgccgaatagtgagcgattcagacgatggttgagaacaatgaggctacgttgaaagtcagtctggctcttcatccctgtttggaggtagcgtcgcatctatgctggcgctatctgcctcaactggttgaagtctaacccgcgtcctccgagactataggaactagaaaaaagttattgcccacctctcgatgctgctttgattaccgcaattgctctcgactatgaccttgcggaccaggtgcaacttcagcaacttcgcgaggcgcttgacgccctcgcacttacggcatgggaacaagatgatctaccattcgatccttcggggacaagcggcctgaactcaagcagtgagctaggactatcccaggctgacacaaatacaaacccgtcgcgagcgaccgataccacaagcgaattctcgtctcttagtctgagcgacaggagccaatcgacgtgttctccaggattgacatacactacaggcccagatgagagaccattgttatctggcgacccagaggagaataagatactatatctatgtgaaatgtttcctaacactgaacgtttcacgatcgagtatacactgagaaagtcaaacggagacgtcgatcgggccatggatgagttgctcaacttcgctttcctaaaaaatgagtcgcctaatgccgtaccgaaaggcgtcgaaggctttgggaatgaagatgctggccgaaagaagagtcgcaagcgcaaagggaaaaataagcacggtcgaaaccaagattcaggattaaccgtcagtcttgacagtgagcttgtgttgcaagattccagcaatacagtcaacaagtgggacgctgctcagaaggatgttgacttcatctgtgcccggacttttcctaccctcaccagggaaacggtcacgtcgacataccacgcaaatggggcctctttgtctgctactatccattttctagcgaattcaaatgcgcctaaggacaaatcgagcattgataaacatccggtcatggtccgccaagtcgacgagttgatgcaggatttcccggacatcgcaccagaaatccttgctggtttacttgtaatcacgagagattcaatttcggctgcacacgagttggcaaaggcctacatgacaaacccggcaccaagatctgctgttgaactgatcaagtttacaagctcgccccctccacatgaagttgaagaagtacccaagcgccggactgccgactcaagatcatatgagcaggcgaccgcttccgcagggtaccactcctatgctgcaccagaggcgcttacgaaggcttcggctgcctacaagacgcggcaagtctgatagactgatgggaggagctgccgcttattattcagcggttggctgtgaacaccttgagcgtcgcgaagagggaggcagtcgcctcggctgatgctcttgtcagccatgcagtcatcgtggaacgagcttgacttgcacggcgtttccgtacaggatgcagtccgcatagcgaacgagcgcgtgggaatatggtgggaatcgcttggggattccaagtacatgaggggcagcgacggcgacgttgctcgcggaggttatcgcatcatcactggcatgggacggcacagtcacgacgggacttcgcgcatcggcccagcggtcgcgaagtcattagcgcgcggagggtggagagtagaggttgaccagggttttttgagggtagtaggagttgttcggcgtcgctaattgctgagatacccttttagcatttgcctgttttagtgattccagattattttaattatatcagcatggatatatcgacatttacagagtgatcctatgccattatttatgtcattcattatttccatcattgcgtaagactcccgcacacttggcctccccgccctaccgtaaattttcatttctctaccccaagatccaccgccattaaagcaatcaatgataaacttcctcccaatctcaccgtctttgaccctatccatcttcaagaaatgcccgacatacccagtgacgaagaagactcgagaaacgcctccctagccgcccagcgcaaccgcggatccgcaagcgcaagcgctagtaacccttcctccagacacgcctcgcgcgagccgcccagcaagcgacgacgacgtggtcgaggcaaacaggatgtcgacgtgcaggattttgtcccgaaaggcgcgacattcagtgcgacttcattagagatcgatccggagagtgagagtacgtcggcctcagaatctgaatcttcatctggaagtgaaagcgaaagtgagagcgaaagtgagagcgagagtgagagcggaagtgacagcgagaaagaaattgagcctgaaatcgaatcacgcggtggtggactgagcgcgcctgcgccgaattggaataaaacggggaaaagcgtgatcaggacgtctttgcatggtcggcaagctgccaacgcgaacctgaacggaaatggaaaaaatgatgctgagtcagagtctgctgcggcaaagaaattcgaagctgtgaatgggatgtattggcgaagtcgaagctcgtctgcttcaccaggctggaaggaaagaaaaacggtagaagaaggaaagagtgaaacggcggtaactgatgataacgatgttcagatagaggatggagaggtgaacggggtccaggaggtctctgcagactctcagtcagacgactccggttccttggactcggaagcggacgattccatcatgctgaacattggctcccggggccagaaccgcagccaacacgacgtaattcagatttcggatgacgatagcgacagcgagggtgacggctatgatcctgagtctttatcggtttcgcagacgcctgctacggttaacatccttgatggctctaatggagacggggtagacggggaatccatagccgactcggaatcaaaagagagggcacttctccgcttcgcgcagaaataccctacctcgccttctattcttgcggatctgacccgcgaggacatggaattgcaagctaggtttattttctacaaccgcgatatcaacgacatcaacctccagctccctattacgtgtatggaatgtttgcaggaaggccatctcgctgaggtctgtcctactagggaggtaagtaccgtccagcagatcctttgacagacggataagaaccgccggctaaaaaaaattactagtgcgtccactgcggcgcttggaacaaacatcaaagcagcctctgccccaaatttcgccgctgtcagcgctgccgcggacgcgttcacgacgcaaaagattgcccttcagccctgaaaagctccgcgtctgaaatcccctgtgacctgtgcggatctgctgatcatcttgaatatgactgcgactatctctggaagttgccgaggcaggatacaacctccctcccggtcctggtctccatatcctgtgcgcattgcacgagtaaccgccatttaataggcgactgtccgtctctcagccgtcctttcctctcgtcatctttcacagtccgtggaattgaccctaatctgatcacgaatatcaactctgttgtgaatcctaggcgtggcggtgcgggtgctttgagcggtcgccccaggtcgtcagcgcggtaatggtctaaagattcgaggccgagcagatcaaacatgctcattctccgtcttcagacagcggacgacatgatgtccatgtccttgacacgtggcggtcaaggaagaagagccggcgctggtggcaaccggagcggtaacaggggaagtatcaatattcgaattggtggagatagaagtaacgggggaccgccgccgtcatctgcaagagattaccgggaccgtgatgatccgtactttaggggcggcttcaattctcggcaacgctctatgtctcctgggagggacagggggagacctggtcgcagcagaggaaaggaaaggcagcagccgcctaggtctccgcctcgaggccagggccgtccgcctggtagtcaaccaggcc

SEQ ID NO: 1077 - DNA, 5024 bp, Emericella nidulans
  unsure (1)..(5024): unsure at all n locations
tcagctggacatcagaaattgactgcagctctaacctgtgaataggtataccgctgatcagacgcggggaatggcatcgtttgtcagacctgcattctagacttccatgatgaacattacaacgtcaatatccggataagcatactcaatcgcctttattcagggaatcccattatcaaatctactctagcaccggagaccctagctcctcggaaatatacctggccccgttctcttttaccgtgaaacggccgtgaccggcgtgccaatgtctcgcccaacgagcatttcgcttccatccgactcgcagagaaatatttccatttgccgatagatgcgcagtgtgtcaagttacttcgacttggtcaattctgacaaacaagagcgtaatcacgactgttgcaggccgcagtcggttgatactgtagacctcaaaagatatagcaacgaaacctacgactcaatctaacccatttttgtccataacccacgttattactgatagtctagatggcttacgaggtccattggacgacaaatgccgagtgaagagtaatcaacgcgactggttctaggtaaagtaaaccggttgcaaaatatatattcgagccgcatctacgattctttgaccggtcagccagggagctcgtacccattaatcgggctgtcccccagataccaacgagtgcagattagtgaaataaaatcttttaagctctgaacatgtattcgatctttccagccttgcgacagtggaaaatcagcttcagcgatgccaagaatagtgcacgggccacttggacttttctccagcgcgaatccgccgaaaggacgaatgcagagttgcagacataagaccagtctctctctctcgtggaccaccattcgcttcttaagtgtcactgatctgtgacagtgtttctgctcacacaatagcccttgagtcgataattggatctcctatttgagttggacttccgttgatttttgtcgcggtgttaagagctgcgcagccgtcgcaatgtataatccttaccaacgtacgctgccgcactcgttaaagcaaacttcatatgaatttggatgatgctaactggttagatagcccccggcatgtatggccgtccgccggattatggtgtctatcctggagcacctccaggtatgggtaagttcgaacccgcctctgtcttttgcttcacgcgtcacagatctaacttgatgtgtagcacctccaccaggattggctgctcctggcacagctcccccgggattacagcaagccaatatgcaacagcctggccgaccggccggattccccccaaacttccaaccgccaccaaacatgcccaacatcaatttctccgctccggtaattcgactcggcacctcgggcccatcgaaatcagctactccggatgctagtaaagagcgtggcggagatgcgggtagacgggcgggcttgggggcttcaagcttggagtctcagcgccagaacgtgcgggatgcgatgatgcagctacagccccctactagggatgaaatagtcaggactatattcgtcggagggatcacagagggcttgggcggtgacgaaggtgttgaaagaatcctgcggtcagcggggaatctaagacgctggatccgtgccacggatgccgatgacaagccgtgcaagttcggtttcgcagagtacgaggaccctgagagtctaggtacagctgtggaagtgctaaaggacgtgcaagtccctgtgaaaaggcagacgccgtccgactcagaggttaaagaagaacgtgaagtggaaaagagcacacttttggtatgatccgtccttaggttacagggccaagctaattatatatactaggttgttgttgatgagagctcgcttacgtacttggaacagtacgaagcttccagaggcagtcaagatccggccgagcgccagtctaagctggatgccgcaaaaaaggcgctggaaggtgtgctacatgacctttttcatcctacatcgcctactcagagagagaatgcttcggccgttgatcgggaaggagacacctcgatgaaggatgccgagggccaggacggtacgtccgctgaagttgtcaccataccaattactgtcgaggatgaattgtccgatatcccacccgacatgcgagaaacagttgccaaagagattgccgcctttcgcgacagaagtaatcgccgagatatcgaacgtctgaagagagaggaagaaattgagtctctggagagagctcgcaattctggtggcagagtcaatcgtctcgcctccccgcctgcttcagcaccaagtgggcctgctgccggagcaaatgggattcccctgggtgggcgagaccgcgggatgcccaatgcaccatctggtccaaagggattcggcgttcaaattccaaaggactaccagaagggtgtttcattcgttaacgggggttcggtgaacggcgctcctacagtttatattgatcatgaagatgagaatacggacgccgacgatgaggaacttgaacgacgacgccaggccaagcgcgaagcggaactcgaaaagcaattcctcgatcaggagcggcgctggcttaaccgcgagaggagtcgaactgccgccttggagcgtgagaagaagcgagatcaggaggaagaggacagagctcaagaagtgcgcgatgaagcagacaagcggctgagtgagtggaacgacgatgttgaggctagccggaaatctagcgagtactacgccgaccggggtgcttggctgcgtagtcgagcagccttccgagcgcgcgagatcagcatggacgaggcggaccgtgcagcagaagagcgggaacgagcacgatctatccagcagagagaacaggctcgcggtatggcggacgacttccttgcgcgccaggcggaagagctggaaaccaggatggaagccccgcgggagccacagcgcttcaagctttcccttggagctgccgcccagaaggcccaggccgccaccagccgccgcactgttgccgaagtcgaaggattattggaggacgaagaagagcctcaagctacggccagacgacctcttattccgatcaaattcgacagcgcagccgaagcggctggacttaccgaggaagagagagcccaagccgcgcgacaactcgctgcagagatccccacggacaaagacggactatggaagtgggaaatcaagtgggagtttgtggacgagtctgttgtcagcgagcagctcaagccattcgtggagaagaagatcgtggagtatctgggtgttcaggagcagatgctggtggatgtagtagaagagcatgttcgcaagcgtggaaatcctcaggagcttgtggaacagctggaagaggcaagttcattcattcgggctcatttcttcagcaactaactaaatctctaggcactcgacgaagaagccgaagtccttgtccggaagctatggcggatgatcattttcttttccgaaagcgagaagagaggcctcaagggataattgcgatgcgctgggttttgtctacagcgatgcgttggtggtggaatatgaattttcgagcccccccatgctacttcgatcttttcataacttcatgcagcgcatgaagttataactccagaagctgtcaggggatatactctgtacttacgtagtagtatatcggagagggtccgatagcctggaacctcgcgggattatttctcagtgctggaaatagttcttccaccaataatattgtcgtcttctccccccacgcctggataatagctgccagtagtaatttttgatcggctcattctccattgacagccagactatcccgtttgtacagccggattgccttgaacactgaggggagccatggtaattgttccgcggggttttctgcccttagcctgacggggaggggtatattttacttatatcatgactctccctgttcaactcgcattgaccttgaaaacaatcatcattgaatacttcaggacggatcactgtttgactgtcgttgattgctcttgatgtgagtttgatttgatggcccttgatgaagattgcgtattctgacactgcagccagccaaatttctacaggatacagacagcacaatggtgaagatcacaggtttcatcacgcgagacgtgagatttccggtaaggctcaactcttccgactataggaactggtactaagcagataccagacctccctcgacaagactggctccgatgccatgaatgccgcgggcgactactcctcagcctactgcatcctctacacagactctccctactccggacatggaatggtacggtgacccatcctagaacctatctatatatctgtctgacatctctgcagacatttactattggccgcggtaacgaaatcgtctgctcagccatctccctcctagccccgctggtagtcggcaaagacctcgacgagttgacctcaaactggggcgcgacatggcgctacctcgtctctgacagtcaactgcgctggatcggacccgaaaagggagtcattcatcttgcgcttggcgctgtcatcaatgccctctgggatctatgggccaagatcctcaacangcctgttggaggatcgttgctgatatgaccccgaagagtacgtgcgctgcattgactttcgctatatcactgatgcaattacgccctgagaggcgggtgccctattgaggangtgaaggtggcaaggcaanagaattaaggaagcgaccaagcaagggtgtcccgttatcgactagtggcggtgcttgggtatggggggaacttaaggccttttaagcaatgttgccaggggatagcttaaggcgaaggtgccgaactggagggcagagggttttaattcatgtggcatgtttataggggcaacttcttcctcccccatttaaattttttttctcaaaataaataatatctacctcgtttctccaaccatgtactcacacttcctatcactc

SEQ ID NO: 1078 - DNA, 561 bp, Emericella nidulans
tgacgtcctcgcatggcaatcaaaaggctttagaagaactcaagcgggaagcgagcgctgtattggtgccgccgaacgctgacactcccaaaattagcgcccagtgtcgccctggatgtcaatttctaatctaggtcgttgtagggcagacgaacatttgtcaacctccataatcatactatcgtggccctactagtccctaggaatcctgtggcgaatgtgttcagcgacgttccggccttccagatgtgctagtaacatcgtcgggtcgctctggtctttcactgtgacatatctgccaggaatgcaggcggcttggtaccgtggacgtattatttaaggtggtctaacgggatggatgcttcgggactcccacatagtcattgtggaatcatatcttaggccattcattttcccaggatctggtacttgattaaattggtagatccaactagtaaggtgtcatgtagtatatattggaccgtcgttgtgacaatatagggcttagatgaaaggataaaagctattattcccttattataacggcgccaactaagttgc

SEQ ID NO: 1079 - DNA, 2923 bp, Emericella nidulans
tgtggccaccggccttatgactggaactggaattggaatcgaaatctgaagtatctcaacttctctgggaacaaacggctggagattaagccgaatgtctcgtctttgggatctcagccgccgaacggagcagatttaaccgatttcaattcactcactcacctccgggtacttggattgatggacgtcacactcacgacgtccaatattccggaagagaatgaagatcgccgagtgaggacgtctgcctctttggcaggttcactcgcctacggtatggcagatttcttaggtcgaagcgaacatctttctatcatcgacatgatcgtgcctcgaatgagacaggataatgtcgaaaccgttgtcggcatgtttgatggccagcctagctctactggaggctctagggttgccaagttcctgcatgagaatttccttcatactttttctgctgagcttaagcgcctccggcgggacgagcaagagacacccttggatgccttcaggcggacgttcctgactctcaacaggaatatggcttttgcttgctacaagtccatcgaccaagatgtcagattatttcaagaggactcatccgatcaaaagaaagtccggctcaataaggaagaccttcagtctggcggcgtcgcgaccgttctgtacctgaacaatacggatttatatgctgccaatatcggtgacgctcaggctatactcgtcaagtcagatggtagtatgagatatctgacacggaaccatgatccggcagaagcaggagaaagggcgcgcatccgagcggcaggcggatttgtctcccgcaacggaagactgaatgattaccttcctgtctcccggtcatttgggtacttcaatctaatgcctgcagtgatcgcagcaccgcatacgatgcacgtcagcttgaccgagcaggatgagatgattattctggcctcaaaagaactttgggattacgtgactccagaccttgtcgtggatgttacgagagctgaacgaagggacctgatggttgctgcgcaaaagataagggatcttgcactgtcattcggagccaacaataagcttatggtgatgattcttggagttggagatctcagtaaacgtgataggcgcccgccgcgcttcccaagcatgaatagctttagtcaggtcgatgactcgatcctacccagcccgaagcgcaccaaaaaaccgcgtgatatgcctggagactccagactagctcgatttgactatgttgacgctccaaccggagaactggctataattttcacggatatcaagcagtccacaggtctttgggagacgtgccccgacgcaatgcgctcagctatccagatccacaatgatatcctccgccgccaattaggtattattggtggttatgaggtgaagactgaaggtgacgctttcatggtcgcgttttcaacaacaacagctgctttgctctggtgtttcaactgccaataccaacttttggaagctgaatggccgacggaaattcttgagcagcctcagtgccaagttcaattcgacatggaaaataacataatcttccgaggtctgtcagttcggatgggaattcactggggtgagcctgtctgcgaaaaggatcccattactaaccgcatggattactttggaccaatggtaaaccgcgcatcacgaatctcggccgttgctgacggcgggcaaatatttgtttcgtcggatttcatgaacgacatgcagcgtaacctcgagctcttcgccgacagtgaacgtgctgcttctactggttcggaagaaagttatgcactcgatttgggggacaatatccggcgcgaacttcaacaactaaatagccagggatttgtgataaaagatcaaggcgagcggaagttgaaaggccttgagaatcccgaacctctatatctgatttaccctcatgctctatcgggacgcttgtcgacccaggaccaaatgtccggtgaagaaagcacccccaccactattagtcaacactctcaactccagatccaaacagaagctatatggcgattatgggagatcacactccggctagaaaggctatgtggagcgttagaacacccatgcgaaccgggcctagataaacctacccaggcatttttcgatataatcaagaagcacggcggaggcactggtggattcaagtgtggtcagcctgatcgaccagcaaagtaactcggatcgaggtctgtaaccccgtgggcttgatatatgcattactaactcctgccaggtcgcgataagtacccttgctctgcgacatatgctacgacctttcaagccaggcgaccggcttgacgaccacgccgcgccgattggagatgtgctgcaagaattacgaacccagcttgcggagtatagagccctcaaggagcagattgctaccaatggtgctggcatcactggcgcatcccctagttccaccgcaacggatctacattacactccagatttccactccagcgcttcctcttcgtccttcacctagatacccgctcttttactctcatcataccccatgacatctatcctgcctacccgtctaatcatgttctgtgtatactgcaagcatctgtccatctggctgtctacattgtcatcatcttggtatacactttttacgtcttgtttccagggctgctgttttgctcgttttgcgcgggcgtcttgggctgttctgttggcatggggagcagatccagggaggcgcttgatcttttttttttttttctcaaattcttggttgattttattggcactttgtctgatggtgcatgaaaggtgataggttgtatatttgcatttcaatagctggaatatactaatattcgacttcgacctgctcacaatgtagtaaagatgagtgactcgcgcg

SEQ ID NO: 1080 - DNA, 1100 bp, Emericella nidulans
ggcggaagtcgagggccttgggaaaccatacttgttcaaggctgtcgtgatctgtggcaccaccttgtccttgtggattaagtatgtcagagtcatttctcatcacgatatcacaagaaaagcagcgccgtgcgagatatcaaagaggcgtcattgcgaagatgacggaccggaatctgagatggacgcgccgcagcggttatcgacgcgtctcggcctcggtgtcttgtattattgtttgtcgatacgcgctaaaatcgcttaggcgcctacagataagaagcgctagttatgttctgagcctaaggcatgaatatagtcccgtgactgcggcagactccagtcagagcgtcaaacactcattatttttcccctccttctttcacactgccagtcgccccgcgaaggcttttccatctcccttatctgactataatttgcttgtctgcttgggatttttcattttctcgtctttcaactatcttcatcaccttctttccacccttcattccgcttcacagcttctcttttccctgaagtaactcgttgtggtgggttttgtttttgttccctcacctcagcaaccatggccgaacgctatatcccagagcatcgccgcacccaatacaaggctcgaaaccagtttcggcctgatgaactccgccgtcgtcgtgaggagcagcaagtcgaaattcgaaagcagaagagagaagaaaacttggccaagcgacgtggtatccagactcgggatggcggaattggtgtaggaggtggcatgctgccgccgagagtgacgacgaggcgagcgctattgaaagtgaggtatgtatgattctacttatactcttatgtcgtcctattttatgctggtgtaccgttgcccataaacttcatgtgcttctcctttgtccctttgaggcagatgctcaccgccctaacatggtcttatcatcgcggggcaatatatggccggcgttctagtttttgcgctggttcattcgacaccatgtccgaaaagcgaaatgtgctaatatggccctccttagctcaatgtcgagttaccagagatggtcaagggtgttttctccgaccaaatcgaa

SEQ ID NO: 1081 - DNA, 1223 bp, Emericella nidulans
gacgctgtctgcgtaaaatatcactgggtgttttgacatcaggcgcgggagtaaggccgagtgaaccgcacttcgtgagtggtccgagatagagacactgaggctgcttgttgagagccatcccaaaataaagaccgtagacacattattggctataatgcctggctttggcgagcgcacatattaaactattcaaatgactcatatggtaactctaacaggacaccgaaccctgatcgaccgaaaattaaagggcctcgaggacatcatttcatacacatcggtgcactggcacttgggcgagaaaggtgggagccgcgactcaacctcctttagacgccattaacccaaataactatataggctggcgctttgccacccctgatgaagatatcccaggcgcaaatacaacccctgacccagtccactcctcgtacagtcacctccgcgacatctacttcgccaacgaacccaactacactggccgctttactgtccccgtcctctacgataagaaaacgaagcgtatcgtcagcaacgagtcttccgagatcatccgcatgttctactacgaattcgacgacctcttacctgcacagtatcagaaagtcgacctcttcccacctcatctccgcgagcaaatcgacgccacgaacgactgggtatataacgacgttaacaatggggtctacaagtctggttttgcaactacccaggaagcatatgagagaaatgtcacgacgctttttgcctcactcgataggattgaaaagcatctcgcggattccaagtcggcttatttttttggagatgacatcaccgaggcggatataaggctcttcacgacgatcgttcgatttgatcccgtatatgtacaacacttcaagtgcaatattcgcgatatcagatctgggtatccggctattcatgcttggttgaggaggctgtactgggatgtcccagcgttccgggagacgacccagttcgaacatattaagaagcactacacgaagagtcattcgcagatcaaccccttcggcatcacacctgtagggccgacaccggatatcctgcccaaagataaggaggtgaatgctgtaaagcactaagcgggttgccatgtattttatctacggttgatatatcggataggtgaataaactttgttcaaagtgctattttctcacttgcaaatatgttgacgtgatattaaaccacttatg

SEQ ID NO: 1082 - DNA, 3328 bp, Emericella nidulans
tgccatttgtgatctcagtaacgaccttcttgctatacgtcatcaggtcctcgcgagcgtttccatcgcctccttgcgcacggctagcgattgtctgttcgataggtttgtaaagcgaatcctcagggagcttaaagtcaccgaagtacgtctgtcccattgtcttgaccgcgccggtgacgaccgataggacgcgaacgtggaaaggcgccagttcgagacggagggtttcagcgatgagttcgatggagcgtttggagccggcgtacgtgcctgatatcatgcgagagtcagcttccaacccttacccacggtgagagacatggtcccttccaataattttcaagcaatatagataagcgacgacgtacccatgtagggaacattgaggtagcccgctattgatgtaataaaggcgattgtgccgcgagctgcgatcagtaatggggcaaaagcctgggtcaaggcgaccggcccccagacgttagtttcgtagagcttcttggtaacctcgatatcctcatcgaggatcggcatgaagtgattgcgtcggcattgttgaccaggtagtcaagcttgccgccagtatgtttggtaacagcttccactgctgcagtgatatggtccttgttgcagacatccagagtgagcagggtaacgttaggaaggccgtggagcttgctcatcttctggatattgcgagccgttgcaaagacatggtagtctcgctgctgaaaggtcaaagcaagaccagagccaatgccgtcatcgctgcaaccggtgatcaggacggtttttctagacgccatctggacttttcagttgatttggagtcgctccaaaatggaatgtgcttcgatgtgttaagagtagaaccagggcgctcaggaacagactggagggcagaaggattaccggaatgggcccgcggtctttgttcgataccctagccccaatccgaaatacagtcagaaagacaaagagctgcgttacacaaccaataaggttaccatggatcggcggatttgctgcacgagcatacgttgcttactcgggtctgtccagccactcaacggttatctttacgcaagggggaggggtgaaggaggggtggagggaggggattctgctggtccggacaccacactgaagatggggtacccaaggcgcacgacccgagtcatatgatgattcgtcagctagcaggctgcgacgcagcttagcaatcaacttgtaccctccgggcaccgcactctgaaatacgccctcccggtcatatttacgactggcagcctggagtgcagccctggcctgttccccatacccacctatcacatcctggctgtcatcggcataattcaagtacttgaacgggcgatacacgccggccgccctagtaatctcctcaatcgaccggatcaggtcattggctgcgtttcgcactactgtactgtcctctggacttgggaagaaggcgaccaggatgatgatattcagccgctcatccctgggatccaatccaagactattctcaccgttcagcgccgcgctgggctggaaactcatgtaccagttcatgttttcgacggcggaaacggcgtggcaggatctgttgaactcagaaacgatgggtgcatagaccgacgggtcgtgggcaaaggtcgtggtaaagtatagggtactgtagctattaacatctggcgcagtcaatttgatatctcggagagaatgacctactataagcctggaatctgataccgatcctcctcctcagcaaagtccgccattgtggtgattcgcagagtgctgtgaagcgtggtcgtgttgtttatgaaggactgcaagactggagggtggggatgaggcttcgcgtacaggaggatattggtgccgaacaatacccgccgattcgaggtccagccgtagctctggatcgggtccgctagactgtcaacgcttcttgattgcatgaaatctgaataggccctgatctggcgcggcacctcgctctcagggtaagccatgaacccgccccagatcccgttggacggatgagcagccatggtgaacttggtgaccacgccaaagttgttggatccgccgcgaagagcaacgaatagatcaggatatgacgtacgcgaagcctggacaatttcaccacttgcaaggaccacctcgacttacaggacattgtcacagccccaaccggttgctggaccaagcgcagagagaccgccgccagtcagatacccgccgaccccgatcaagacagcccgtccaccggtaacggtaatgttgagcggatcgagcaccttgtatacctggccccaggttgcgccggttccaatctgcactttcgatcggtcgctgctcaggtctatatcgttcatagcgcgaagatcgatcgtcacgccgccatggatatttgcggcgccgccggggatcatatggccgccgctgcggatggcgaactgctggccatggtcatgataatcgcgcgccaggagcacgattgctgcagatagctcttgcgcggttgttggctggacgacacaagccggctggaggttctgctcttgaaaactgaagtaagaggagaccgactccttgtattctgcagagctggaggcgaagactcggttgtctaaaatggaggctaagttatcgcaagtatcatggtggcggtaaaaagggtgctgagtgaaggtgatggctgcccatacaccgaggacgccgacggcatacgggacgtaggaggccatagatcttactagtttggcaataaaagtgaattttctacccaagttgctctgcataacgggcgcctgaacggaaaaaatgctgcttacggtgctgtttgccctccttcccccccctcgacaggccccttgcctaccgtatatgcaattactaattacatgataattcgctattgggtccgcggacgtgttgtgcaacgtaggggcgatgcaacattgctgatctaaaaatgggaccctgtcggctcctctctgctgaccctaatgctcacccctccttccgttgtcaactcagtggcggctgaaattcggcaggatataatctgcagcaggggctgagccaagtagaaatattgagtagtcccggcttatcatcaacataagccctcctctatctccatatcgcgatgtggaacaggatctgggacaggaagcttatactgtggatattttaaaatggatgcagcgtttgcgaacatgaaagcagagcacatggcacgcacgccccgtgggcgtgccgccggctggagtcgtccaaaatcaaattgatccaccgtcaataggacacc

SEQ ID NO: 1083 - DNA, 6524 bp, Emericella nidulans
ctagaattcaccacattttatatgagatactcataaagtattagttcgataagataaaacctctctctttacctggttctaggagggttccacgaagttcttcagcttcctaactggctgggtccagctggtctttttcaaacgtacggtggcaaatgtgtgatttgaggcagggaaactagctgtctgctcaaggtggatgataaaggacagttgagacacagaaagtatgcttgatagcgtcatgatacactttttctgaagtttgtgattgatactattagaaactcggcaagcattcatggtttatataggtttgtaaaaagcaattttgatatcagaggtattaaactcatgattcgcctattttatatttaaaccgaacatataatattaggattacgttgcctgttgtgttcactgacagtacacctagctgtcgacccatcttatattattgcctaatactagaattatgccttaattctggaattcgcgtaggtaatatacatgagattatcataaaatgggagacaagcccgaaagtcattagggcgaagagaacaattgtgctgcgttgaggcttctagttcggaagtttttttacccatgtacggggcgcaggagaagtgagctgttgccggcaacaggcatgacacatatgacaattggtttgcgtaccgtagatgggcgtcattggaggttagctctagcttggctctgctgctacatggcggcagtgctaataccgcgacgaggctgaacgatcatcagtgggaaactgagaccagagcacggtatgacttacatcggtgggcgactgattgtccaaatgacatactctcaatgacatggtgcggaacaaggactatactatatccagtagcagagactggcctgtatgagggaaggccccgaatatcaagcacgacagttcttggttagacgaggctgaacgaggttgaatcgaaggatcactcaagttagacgttagtggcggagctttgccacctatgcaacatcgccataatactaaaagggccccatgcagtgaggcacgaaaggttagccacgcgatgtgtaatagactgcgcgtattcggttcttattatatatctaccagatatttatcaaccttgggtattccctctccttgctaaaatttttttttttttttattttaattcattattattctttccagacattgcactattgcggccggctcgggcttgtcgtgaaccttactatcatgtttatgacactgtaaacatatgagatgaagggggaaaaagactgacttggacggtgctgttagcaacaacagttcgcgatgaacgaaatcatagcaaatgatcctaatcgcgcagcttacttgaacgacctttgccgccatctttacactcttcatgagcggactaggaatctgcaagacccagacgttagtagcacggctgcgccggctactcttgaagacaatcctgatcgagcagtctacctaaaaaacctctcgaatgatcttgccgagaaacatgagcgtactggagatctgcaagctttggacgctgccatcaagaaggctagcctagcagtggctgccacgtctaaaaaccatgctcttcatgcaatgtgtctgaataatctttctatttatctatatagacgctatgaagagaccggagagctgcccgatctggacgctactattaccaacctcaacctagaagtttccgtcagtcctagtgacaaaccagatcatgcaggccatttgaaaaatctttctgttcacctattccgtcggtataagaggacaggggacccgcaagatctgaacgctgccatcacccacaccagccaagcattgtctgccactcctgagagcaattctaaccgtccaggccgcttgaacatcctttccagctacattgcccgtcggtatgagcgggctcggaacctgcaggatctggaagctgccatgcctaatgccagcctagcagtggctactaatcctgacgaccatcctgatagggtgggctatctgagcaaccattcgatccaccttgccaatcgctacaagcagactgggagcccagaggatttgcaggctgctatagctaacactggactagctgtggctgccactactcataataaacaacctgattatgcaatctgcctgtataacatatccaaacacctcttcagcctctttgagcggactgggaacctgcaggacttggagacagctgtcacattcgccaacctggccgtgggctttacccttgatgatcaccctgatcgagcgttatacctaaacaatctctccatgcatctctgcattcgtaacctgcagaccggaaacatgcaagatttggcgatggcgctccaacattttcgtgcctctgccaatctgccaaatgcagtacctctctaccgtatccgatctgcacgtggagccatacgcatgcttcaaaagcttcagcaggattggcggcaagaagccgcagtccttgctgaggaggccgtgcagcttctgccacttgtatgtacccgttatctcaactgtgaggaccagcagcatgtggtctcgcaaactgcaggactagccgccgacgcctgttccatcttcctccagctgcgacaacctgaaaaagcactccagatactagagtacggccgcgcgttgatccttggctaccttgttgacagctgcagcgatgttgaccggcttcaagaggactacccagacctagcaaaagaatatgatcagcttctttttatcttatggcaacgcctcgactcagtccacgcggaaaacagataccagctgctgcaacagaagagaaaagtgccacttgagctggagaagtgcataaataagatccgtcagcaagaaggttatgaacaattccttctcgagccttcgattcaggacctcatgagccaggctacagaagggccaattgttattatcaatatcactgattttggtagccacgccatcatcgtccaggatcaagatatatgctctctacacctaccagaaatgctgcagacgccgaaatttgcattagatgaccagctacgccaatttcgcaatgtgggagagcgcgggtggaatctccgagatattgaaaatgaaccggggtcattttatgccacgcattataatgacaactcccttaattggctctggactcactgtgtcaagccggttatcagagaactgaatcttgaagtacctctttcaggcgctctgtctcgcatatggtggattggtactggggttgccagctcccttccatttcatgcagctggagattacggtcaggtaaccgagaataccatgagccgtgccatttcctcgtacataccgactatcaagtcactcgcctattctagatctcagttggcaaaactcactccgaaaaacaacccgacgtctatctatatagccgccatgcctactactgcaaacgagcagccactcccatgcgttgagtcagaggttaatgcgattcagcaggcctgcagcaatatctgtactgttactctgcagaaatacccaacacctgaagcagtcttaaatgcaatggaagacacagatatcatccactttgcttgccatggctcatctaatcctttcaacccgtccgacagtcatcttcttcttcattgcggcggatcgaccacccctgccgtaggtatactgacggtccaacaagtagctaatcgtgctttcagcaacgcccgagttgcctatctctcagcatgctcaacatcccacgtgaccgcttccaagttcactgatgaagcaatccacctggccagtgtctttcaactcgcaggatttgcgcacgtcattgggtcgttgtggccagtaggtgatgcaacctgtgcgcaactggccggaagcttctacagttatcttgtaaaacatcaaacaccaactccatctaacagattaattgcagaatcattgcatacagctgtgttagaggttcgtagccagggaggcagagaccccagtgcttgggcgtgtttcattcaccacggtgcataagtggtgcttgccttgggaatattcttccgcactcaaccttgcttctgtgctaaatattcaagggccaaaaaaaaagcctcatgatatttacactcaataaggcctgcatatcattgcttaccttttgtaagctcgttcattgagcgtgtggacggcacaagtaggtttattgctatgaatgggaagacgtatacacagattggattatgaatgaatgatatagtgacaaatggcaagctgacacgaaagaggcatatccattcggaagcttaatagttaagagaattcaatcttggtatatgatctgctacctagctatcagaaaactagcgtttcttctaggggtaagtcacggctatcccgcccaacaaatatcttgtatgtcccccgctggagggaccattcttgggcgtttgcatcccaagtactcaaatcccggcgggtcaagctgaaagtaacggtcgcagagctaccagactcgatgagaaccttgtcgaagccgcgaagctgccgcactggtccatctggaatacccacatacagctgggcgacttcctgaccgtcgacattgccagtattccttatctttgctgtcactgtcaccagttcgtcaaagagatgtgggtttccaccagggagtattgatgccttagctgggtagattgaggggaccccatcagagtttttcgagatcttaaggtcagagtactcgaatgtggtgtaggaaagcccgtatccgaacgcgtattggggcacgatcccgtccttgtcaaacgcgcgatagtctatataaaccccttcggagaaatcggactgcgggaagtactggtatttcccttccggttgcgatggctccaacagggaaccatagtctgagctattcttggccacggtgtatggcaaccgccctgagaagttggactctccgtacagaagcctgaccaatgcgcgaccaatatcttggccagggaggtgggcgtagataatagcagtgacgttggcatggtcaacccatgcctcggcggtgcggataccagcgttgtggacaactacaatagtgttcgaacagttgcctgcaatgttttcaacaactgagtcactgtgggtgtcggacagagcctgacgatcgtaaccttccgtggcgtatgcattgatgaagacaaggcacacgtctgaagtgtagtctaccgaggggttctcggaggtgaagtcccaaaggacagatgaaccgtcctcataagcacgacgcttgatagcatcaataggagcatcgatatatgccggagagttgagccccgagccaccgccaacgtacagagttccgttcttgtaaagatctgatctgactctggtggagctaaaatcgaaattgttaccaagatcatatgtcaacggggcatatgcgtcgtagccaaaaacggatatcagcttgggagacttgagaggcagggcgccatcggtattcttcaccagcacgtggctctcgatggccgactggaggaggatgggctttgcctctggcgaggtggcaatgacggcctggtgggctgcgctcgggctgctgggcatgcccacaccaggagatgggaattccgtgtcctggtcgagataataccacgtcgccatcagtctggtaggtcagattagtaggatacactgatcagtacccacttgatacccatacctggtaatcatgtcatctaaccgcgaggcttccatggtcccattcgcaatggcagtggttaggttgctgttccacgtgctggaccggggcatcactacatcgagtccagcgttggcactggcaatacccgcatgctgagcaccccaatcggtaacaacataacctaaagcgggtactttagctcccgggtagaggtcttgggcatggaggggataataccttgaaaacccagctcagttttcaacactccgttgaggagcttgctgttctgacaggcgtaggagttgtttacacggttataagagcacatcagattagtagcaccagcgagaacagcgtcttggaatggccaaaggtagagttcgtgcatagttttgtcatcgatattagatgaaactgactggacaacatttctctccgagtccgtggttggattgcggttcgtctcttgctcgttggcaatgaagtgctaggtttgcgtatcagtgcactttcaatcaagattataagaaagttagtaccttaacagatgtagccaccttctgagattgaagacccttgaccgattcagagaccaaaactccgctcagatatgggtcggcagcataaccttcccagttgcggcctcccagcgccaccctacccagagggccgacaacagggccgagaatcatgttgacacccttcttgcggtactcttgacccatataggctccgcgggaatgggcgagatcctagtattctatagtgtcacctaaatcgtatgtgtatatacat

SEQ ID NO: 1084 - DNA, 1733 bp, Emericella nidulans
caccccatgagccgtactccggatgctcgggcacacccagcccgttctgaatcaagtacaagaacgtggccgtatcgccctcaggaatgaagagatagtcggggtacgcggagcccaactcgcctatctggatattctcacggatccattccttggtcattttggtgaaatctggcccgccttggtcgaaattgtagtatctatctcccgatatcccagtccacgcggccatgccgtagtagttccagccgtgaacagaagcaatgtagaagacgtctggataccggtgacgaatccagggtcctgtgtcatcctgatccgatatagcataaacgcgaatcctcgaccgcagccgggcggcttcctccttggagtgaagtttctcgatgcggaaaagcacttgtgccagaacgttggtgccgccccagcagagaatccacaggggctgatcgctggaatgctgcattcgctcgaggagcagctcgccgccttcgctgagaggtatgtcatctcctactgcctgcataccataaacctccgcgcctttgcgcacgagacctctaaagtggcttgccggctggtatctggcattgggatgaacgtgggcattgaggttgtcgacgactttctcgtaggcgtcgatgatcttatgcatatcttgcggacagaccttgttcttcatccatgtggacgtgcacgcaaccagaccctccgtctggaattgatggctatagagtaggtaacgaacgagtgattcggcgtcgtcgggctcattggatatatctgacacaataaagacgcgaggtttggtgggaaagctttggagagtgctgggacgatcagtcatcttgaatcaatagtaggacttgcggcgacgagaatcctgattccttccttcattctgacaacggctattattatggagggagaggttgatcattgccttaagcacgaccgaaagagaaggcgtaagcggaaagcacatgcaatggagagacccgttaggctagtgtttagtagtctaaaagctccccagccattaaattatccccgcccacaggcgcgggggtttcccggcatcaaccgcccagctctgaagtcagccgaagattatccgacccaagatctcaatcaacgagtcaacagggacggccttgttgaccccacagctgatagcatgtggacaaaactccaagccggaaaacggaccgatatgtctggaaatactcgacataaagctcctcgatgtctcccaacgaaagaagtggcttaaccttccacatacgcaccgtaaccaaacatcatcgtcatgagcttccaaaaggtcgatcctgcgcagatagagagcgtgctctctaagctgactctggaagagaaggtaaacaacgtccctggggctgaagaacacgtcaataacagaaggtaacagatctccctgctggcggggaagaacttctgggaaacacaagactatccagaaaagggggtgctcacctgtcaaggttagtctagcgctacttgggaaaaatcctgtttggaaaaactctcttgaattgatgaggaacagacttcagatggtcccaacttggcgcgcgttgccacatttaagggaagagcaacagctggctgtttcccagcgtactttctcttagctgcgacttgtgaatcttgacgtcggaaagcacattgcagaagccttggctgaccagacgcgctctaaaggcgcaagggct

SEQ ID NO: 1085 - DNA, 2534 bp, Emericella nidulans
aaacggggacagtcattcgccgcggccggagaggaggatacctgcctcattcggttcatggctgggccgccttatgaagatatcgcgttccgcattgtcgacaaagaatgggattacagtgcgaaacgagagcggggattcaaaagcacattcgaaaaggtatgtttgcggaccccttctaagcaacaccttcgctgacccacccaggggattttacaactgcacttccaattcaaacgggtaggtcactccactccattatataaccgttcctacaggctgacagccccagatctactatcgcaaatgaaagaaagcctatatgtggctcgcgcgcattattcaaagcatgtttatccacccaagacgcaagaaacatacgatgcgtaggcggctcttaaaagcctgcaggtcccggcgtctgtcgcgcttctccgccttttcgcacggcaatacggacggttggcgcacgattgggctagaaacattaaccgtctgttaaaggattgggctgagtctggcgagagtgctcggacatatgatatcagataccagagcaactccgagagcatggtttccacgtgccttgcgtgaatatagaatgcttatttcacttttcagacaccctcctaattatcctccgatggttccatctccgcccggtcggggactgcgtgtttcgtctcgccgggatggcctcgtcacgtgtccagtgaaatcgcctccatgtgcgagacaaaaagctttcttcattgttgtcttttattttatttccttttttttcttccacttggaggagggactattccggtgctacctgactgcatgcctgttccggggttccggctggtcggggaaagcgggaaagggccccggcctcagactgcaggatgcaccgaaagggcgatttaggaggtcaacaagtccagttccagaagggtcttgcaagggctgttaagacagagagtctggccagtacaatggccgacccacaggatgtgctgcaggtggccgcccgctttcccccctgtcccagctacacgctcaatcccagtccgtcaggcattgtagactgctcatgtagacccattgcgtagcacgagatccagcctctagcggtaatcgaagagatcattggccgtctgtgagcatgatcgcgttccacgacgccgaaatggccgtctgcgaggacaaccccggggcgaagggcttggaggaacctgtcttatttttagcggattgtgggaaaaagaaaagtagaccctcttttccagcagtggatgtttgtctggagcttcagaaatctgcaggcagtttgcagcagaagaagaaagaattggagcgtgtctgtgttggcagcggccttgtagaactgtgtggtattgagtggtcacacgtagtggacatgacagtacgcgagaagcaggaagcgaaaagcaggtactagacggcttgcagtacttctctttcacttcagcacactcgcagccccattctgtttttgcctgatcggagccttatggtcttatatgtcttcctacttcccttgccacttctcaattggcctcctatactcgtccatactcagaagatgcaccactctctataccaaccttcatactccagctgcaaccgcacgacgcccgagacccccccttctcttgttgaccagtggtcggaatccagctccagcagtcccgaagcaatgttaccttatcaacaaccatgggctgtcgagcccgccatgaactgctcgtcctttcagtcccaatcgccggtcgagccctcaccagacggcctgcctcgtatagtgccttccgtgggcggccgtctccttgagtggcccgcgcctctgatggcgtctagctactcctcgtccaggcaattgaagcccgagatgcggcggctccctgctggcaagcacctgccggattgggcgcacgcaaagtcatcagaagtagcctcgttctccatgtacaaggcttcacattcacttcccccgcattcacactcgtcatcatcctctacagatccggccgcagccacaatatctcctacatcgacaagcatgccctaccactcgctcccattgagcattgtgagcccacctggcaagctcgaaatgaaccgtgacagtgcaccgacagcaaatgcggacgagaatgaggacaccaacgcagatcctccatattcgcaactcatctacgaagctctctcagccgcgcccgggaagaaattacctcttcagggtatctatttatggtttgaaaagaacacagccaaggggaaggatcggagctcgaagggttggcagaacagcatccgacacaatctgtccatgaatgcagtaagtccgctttcgtttatttctgaagtgtctgctgacctggttgacaagggctttgaagctgttcgggaagagtctacgccagggaagaaggcagtaaactattggcgcctgacggatgaggccgtaagcaacggcatccaatctacaacccggtatagaaaacaggcgaattacaaaaagccag

SEQ ID NO: 1086 - DNA, 4541 bp, Emericella nidulans
tactctcccacgcaccttcccaacctctcaaccaacgcggcatttcctcctggggtcatcgcaggcacagtcctggatcgatctcctcgatcctcagagcaggtcgccgggtgaagttaattcgggacctcaaggaggatgtttgggtgtgcctgctgggcatccggccgtgtgcgagttcagcgttccagaggtcgagccgaagccctcgacggtaaccgtcccgttggcatgggcgtggtcgtacagtggcgaggcctcggggtcgaagaggatgcagtcttcctcgtctagctcgtttgggctctcggagtggcggcggaggtattttctctggattcggtagagttctggttgctgttagctgtcttcgagcctatagaatgtgccaggtagtgtagctctatataccaaacgacggatgctccgcctccacgaacccgtgctccgccctcgacatcttcgtcaagccggccggctttccatagggcccgtccccttgtttctcgccaaaccgatgcacatccaccgcgatgcacgggcgataagcggttgcaacctggacggtaaacaccaaactgccctcccgttcgtctttgaggaacatccgtgcggcagcgaggccactgtcaacattcgcggcattggaattggctggcgcattcttccggccttcgtctggcgtcctctccgccgaggctgcggcgtctgtctttccacttgtattgggatccttcccggtccgacctattgacatcctcttgaatcgggctttgatgctgttcatctttgctgtgagatggggcgtggaaagcctattgcctgaggtgaagtggaggagttactctgcgaggttgggacgaccgtcctgctttagaataccgtaacgccatgcgctaatgcaattggatatgagccgcacgagaactcgctcatcttactgactatatgccaagagggccattcgcggggttctatggccgaatgtctgggcgggacacttggcagtttctgggcgtctaaacacggggttggtgggatctatgtaagtcggggtaagcgcagggttaggcattaccttgtctggtatatgtgagtgatgttattgacgaacattcatggacggagggggatgctgcagctgtggccttgcttctatgcttgattatatcttttgacatcaatattgacccgactttctagatattatcctggctgtatgcgttcccatcatacctcgcgggacaaatatccagcaacggtttgagcacatgttggcaaaccgacttctgatctgagaaatcattccaccccggtttcggcgccgaggtagtaaatgtgcagctggcttgattctctggaaaaccgaatatgggcaggaagatagtcataccactcatctagctggcgttccagttcaagggcgatcctgggtgcgtatctgggccgaccgtctggcgagtgcgtggccgccgacttacagcggtggagcatgcgccgcattgcgatgttcgcgaggaagaatgactgagcctggtccgctgtggagctggcgctgtcggtggagtggacgcttgttggggagacgccggaaagggtactggcaggccgtgggagcgaatacccaggtgcgatgacagttgggaaatgagacgtactcgtctaggttccagatgtcgctttgggcaacgtcgagctggacgcttagttcgctaggcgaggttagtacgcgatgtgggtgagaacaagtctgggactggcttacctctccagcaataatattgcccagtatactctgtgagttagttcaagggtgtcactgcccgtagcctggagaccgctggagaccattagcctagagacagctcccagaaatgcacgggtccaccatttgaagagattctgaatttttaaggaagctatcaaacagtagtcgtgggcccggcagggcttgaggaggcaacagtagcagatactgatgaggattaggcattgtatgctcgtcatgtgcacatcccaaggacgagcggcagcgacgtgagagctgcttcgaagtacaggtttcctgcggcgagatcctgggcaacacacccaattgctgcgacgaccggagccaagcatgtctggcacgagggcgctaaaaggcccgacaagatggtgaagtaagtgtcgaggaaatctagagggagtatgggaccatagccatggatccgctggaggaaagccgccaatgcgtgggtgacctgctggtgggatgtagaacatccgcaatggagtcgtcgtaccgaggaggacactgccgaaaatcctcatcaagatgtactgggatgattccagaccccgaacgtcctggcgccgattggatttcttctgcctgggccactcgattgccgcaaaccgaaccctcccaaggacacgctgtactttccacgctcactggcggcgcaagaacccgacgaacggctggaccccgtcgcgcatccagaatacagcctggagactcaggtagagagcctcgaagggaagaacagctatgtcattctcgaaactgaaggcgcaggccagtaatttggctgcaaccactccgtctggcacgcccagcgcacctggtggggagagggagacgacatgatcttaacgacacctggccgccgagcatgcacggcaccggcagcgaagacttcttctcgcagggatggggtatgcagaagaacgcctatccgttctgcggcgcgatccacgaggaagacgtgcccaacacgcaagtgagctatcgctggcacttggccgaccctgtgcgcttcagcaagaagatcaaagtcactttggagtccggccacgcgaaccacctgcgtggttattggtcgaccagcgcgtattggtatcagactttgccggggccgaagctggatattctgcctgtgggcgatcgactacccccgaaacccacgatgcacttgattccagagccgactgaggtcaagatcgcctcgatgagtgcggaaaagatggggaagctagctcagcaccgggagagatacgcagtgtttgtgaatgattggaacgagtggctggagcgtcgggcgagggaatcggagcgttgaacaatgtgcagatctgcgagggcatccgctagcggttcttgaagggtctcgaggagtaggtgctcattaatatgttagtacaatacacaggtttcatgacgacgaaagatggagagcgtaaaacatggtccattgcagccattgatggtattttcgaagtgaacgacgctctacagccctaaagcatattcgcccgtatcgggctcattttgaagagaaagtgagctgctatctaccctaacagtttggtagtcgtagacctaaagttgacattctcacagtcagatattatggtaccggtccctcaagtgtagcctattgagcgcatttcgatcactgcacccagtcccccaccccaccacttgatctctccccagttcagaatctctcgccaaccaccccgattgtctgtcatccagaaaggggaacaatagcgattaaagatggcttctctggttctgtcttccatttcatcctggagtcttcaccgtcttcactttccccatcctcttcaccacgttttttcctgagcttcaactgtcatatttgtgcatgcggtacggaactcgctgtggaaacgggtactattcactgaaagtgagtcacgctctgaaaggagttaaagtatgcttcatatcttgcactacttggtcatggataggatagctaacgtggctattagtcgaactgtcacaatgaaaagctacagagtcaccaagcctactctaaggtcttctaggaaggtgcctagaaggctgcaaaaaagtgagatctctttgctttggcgtaaatgatgtactgaccctacataggaaaagcccctcccagacaggatagccccaatgcaaacgaccctcgaaaccgcacctcttaccacccggaccaagcccattggtcgtgggagaacctgccagacattctttaccaactgagccccgacgaagacgaaaaaaagctgaaagatccggggctcatgagctatccaatacacggaaagtatctgcgaaacctccctgctctcccagacaacatctcttctaccgtagaggagttccgcgtcgaagcatggcagcgcatggacccgcgcatttgccttgaggacattacagctcgcatgcatcccgacttccgcataaagaataatgcgcttcaacaacggggcgtgcgcttccgacaggcgttcaaccttaaggcgtggcgttcgggaaataaacgcagtgcacacctcgaagccgaccttcttagaaggatgaaggagctaggtctggacatcaactcaaactccacccgcggcatcaccccaggtctagtcaatcctcaattaggtgaacagggtggccgtgtgccaattcccaagggttggcggattaggaagatggggaataaatccaccgccaacgggaccgcgtagtacatatagtgagcaccctgcctgct

SEQ ID NO: 1087 - DNA, 3433 bp, Emericella nidulans
cgtattatggtccagtgctgacaaaggatcgtcaagcagcaatatcctagccgtgctgtaaaccgccctagcgagggcaacgcgtgccttctgtcctccagaaagccctatcccattctcaccaacaaatgacaggtcgccgtgcttgaaattggacagatccggaagtagtgcacaagcgtctaatactcgcttgtatcgctgctcatcgtacggagaggagaacaaaatgttatcccggatactcatactctgcagccaaggtgtctgcgcacaatatcccatcatttcactggatatacaggaagttccttttgttctgtctagctcgcccaggagcgcttggaggagagctgtcttcccagatcccaccttaccgtagataacagtgagacccggagagaagctcaggtcgatatcagataggacaggtgaggtttttccaggccaagcaaaggagcaagactgcagccgtagtggagcggaatctccgaacgatgtgacagccctgctttccttatcaggctcagtcataaagtcttctatccgctccatagcaatagacgcattgattaacacagtgatcaaactcggtatttcgctaagccgagcctcaagcatagtgaagagttgtagtgcgggaaatataatgtcaatgcttagcggatggccggccaacagcgtataggcataaagagccacgacgggaaagaggccgctagcaaaggtactgacaaaggtaatggcaagaccccatagcctagttatgacgcgaagtcttaactcgacattacgagcctccatgacttgctgaagccagtggtcttgccaaccataccaacggagatggcggagtgcttccacaaactgagacgagacctgaagcctcgcgtccgttgcaacccttcgcactctctcccagcgaagaagcgtgcgagtgattagtgcattaatagactgcgccactaatattaccaagattccaaggaagcaggacggtccaagcactttccagacaagaaccactgctatcaccaagcccagtggttgatttagcaatgtgtcaatctcccagaaccgctgagccacctcatatacatcaccgcgaaggagattgaaaatttttcccatcgaaactggagctttggacttttctttacgaggtgctcgccacgaggtcaaaaatctccagagccaagatactttcggggaagtaccagcttgctcttcgtgttgctgctcatcttccgcaggcttatcaccgggggcttggtcgaatacatttttcctcaccaaagctttctcgtacaccatcatcatcatttcaccacgactgcgttcgtagcatcttcttccgtaccacagattcaacactcgcgactgcgcagctactaatctgagcacaagtgataacagcgcataaactagcgcaacgcgattagagcggttctccgctttcattgcccgtaggagttgctggaagagtaggggtgtcgagaattctgcgctagattagcgaccgcttcgcccacatagggagggtgtcagaccacatatcatttgcacgattgaaattgcgctaataataaaaatatcgatgccgttggcctgaagtaggcggctaaggacacttccctggagctgccgaaacttctcgtgcagcctcttgtgctgaaactcgaacccgagataccaaacgtcatcttcgtctagctgccgctttttacctatggccatcaagggagccatccaggatactgtgaagaattgccagagccgcagattgtcctccggacttcgaaaattactggacggtttctgccccacggcactgatatcaatgcagggaagcgacgcgggcgaaggggcattgcaagcgtgacagcgcaacccaataaagcgaccgttgctgccagctaaaaaccaaacaagttagatactgcataagcatcgcggtttacgatgaaagcacattctatgatccctgtagtcaggaagtatgggaaaagtactgtcggacacttcctcgggcgctcaatagccgtcagtagtacagcccccgactgtataaacaatatcagcctcgttcgtttagcgagcattctacttacccaagaaaaaagaagaataaaactagcaagatccgggtcattaagcacgagtttaatgacttgcgcagcggcaccaatggatgaaaccaccaagagacatatgacccagcccagacgatgctttgcatgctccaaaggcaggtctgcacctgggggaacttctttaacaaaaggcgtggcccattttggccggcggacaaaaggcagtttctgaagacacatggctcagtgaagcccatagaatgatagccgctgggaccaggcaaaaatatgcgactgcgcatggcgatagtcgagcattgggcgagtcctatcagcacgacttttgttaaaataggcgtgtaaatggagggtgtaacctacccagatgactcgacacccacccagtctgccatactccattctgaatggcactgactggataatcaaggataagaataagcaaccatctggaaggatgagttctgagaggggaggttggacaacctccaacgaccggccagaccgattggtggaggaattcatgcctgaggccctcatttgcttcaccacgccctaatcatgatcgaggaggcactaaaagtatttaaccacaagtctacatggtagagatcatgctttacagactgctacttatggctttgagctcaaagggtggagctaacaagtaagatattcggcaagttaagtagaaaaccttcaatgttaggttttatatatatttctggtctcatcttagtactggcccatggctcagattagccttccgcattatgatcatagcgacagaatgagctttagcgtagattttacttcttagggtctttctgatggctatagcttaggcatcaagggacgttggagatataatagtcgccagagggcaataccgtatactaacgagggcagttggaaattccattcaacttgaactgtcaaaaaaaaggaagaaaaagtcaagccgcagttcgcagacaacataattccgatggagtatgtaaagggcatgctctcgaggttctgccttgtcatcataatcaacagtgaaaggtcgttgcatccagacgaagctctagagagctctttaagtgaaaccttcaacatagcatcgcgaaccatatacggacccaactcgcgtgatggttgtacttttagcgacgggagtaggcgcctgagcccgaattgagctttaacagttgcggacttctataagatatggactggattctcgaaggtcgtaaaccagagagtatggagagtttatcgagaccttttattttgggtgtttagattctgaataataatgagataatgagattttc

SEQ ID NO: 1088 - DNA, 8184 bp, Emericella nidulans
aaataatataaagaaaagaaaaagcaaaaaataataaaaagaataagtaaaaaaaattaaaaagatagaagataatgaaattatgagagaatacaaaaagaaaaaaaagaataataagaggaagtaataagaaaatataaataataaacataaggtacagcgaaaaaatagaattaaagaattaagatgaaatgaaataagaaaaaggaagagaaaataaggaagattttaaaattgtaaaagaaaataatagaaaaataaaaaatatattttaaagaataagaggaaaaaagataaaatgtaaagaaatgacagagaaagaagaaggattttgtaaaattcaaaaagagatattaagaaaatcaacatataggaaatgaacttgaacaaagaataaagaagaatacaaagtgtgcagtataaatgaaaaggtgaggaagaacagttcaaatgaaagaccatatataagaaactttgataacatggaggcaaaggagtgaaaacatcaaacgctaaaataaatgtttagggaatcgggaacaaccatatgcctcggaaaatagcaaccaactaccatctcaaaggcctctacaccacgaatcggcttggctaacatcagaaaactaaagagtgtctcgttgaactggaattgcagatctgggggtaaccgtttatggattgtcaacagctcaccagttgaccacgcacgttccgaatctttcaaatctatatcgcagttttcttcaagaagatgccatatgaagctctcgcatgctggatacctgtccaactcgtgcttcttaacaaggttatttaagtagattagaaagcgctgtgttttgccgggtgaatcttgaaagtcccagagcgccgcagtgatgtagatgagcgccgcagtgcgagtaatttcttgggtgggcacgttgcgaacaacgtatatgcgagagtcgtggggcacgcgggaagggcggggcccgctcgagagaagagagaaaagggggctttccatctggaaagctatacggcgttgggggcaagttgtcaggtaatcgtcgttgttgtgcgagagcataaggccttctgccgcgcgaagaaaggttacgagccaaccttgactgttttctgaacgggtcaaagtctgaggagaaggtatcataacatatcgaacgtaatggaggaagacttccgcgagcccactggaacgagcaccggcgcgaaagatctgaactgcctgctcttcgtactccccagctttctctttgcttccaaaacggtcttcttgaagggcgaggcctgcgaatgccattgctaagctgtcgccatcaatctggatgcggccgttgacagcatcctcgactcctttcctggcattggtgagatggtaatcaatttctctagcgttgctatggtcgtataattgagccttccatcgagcgcagtatgcgagtatgaccgctcgaaatgataacgggtgcgccatggcggttttgaaagcgcagtccttgatgtgtttattctggccagaccaataggtcagtttgttggtccagtaatccgcaagctccatatcagacgacgttatcggaaggacgtcgaaagggtcttttcttgaggcgccgagcatagtggtgggcgatggcaggggtgggcttgctgatgcgacgggctttagtcgggagactttggtttctttagtacccggctagtcgagttagcgcatacaaccaggcagagtttcatatccggtgacctactgagtccagaaccggtgtgctaatccgaggaggagatatatcgaccgatccgtcatctgcgccttctggtacctctgccctccgctcccaagggagacatggatatagccccccactgggccttacctcgctgccattgcgggaatgcgaataccgttgctgcctgcgcttctcttggacatggtgtcgcattacatgtgcgcgcttttcccgggacgaggagttcgaatcgacaaagtagaatgtctggcttttggactggcttctggggccctcgtcggccgagattcgcttctgccgcttaagcctgagattctggaggtcttcgctagcgctccctggcgagatgacatgttaggatcatgaatggagaagaacaaaagtgtaaatgctcggtgaccaacgccgtagaggagactcagggaagctggcacgtggtgcagcgactatctcagtgtgaatggggtcggcagaaagacacctgttggcggccataatgcggggaaacgatcgaaactgaaggcgaagggccgtcaggacctcatagcgggggacgttacggggtaaagaaggatagcattgacagagtagcgcccaaggtcgcaggcgcaggtagttcgcttatctgtctctgcattccagcagtgcgccccttccatccactccgcccagggacgatggcttgacaagtggggggcggattcgacagctcagagccttgaatcgcaaacaattcccgcatggtttattggccctttggtcgagtctccatccgctcagaccttgtcggggctgccagttgcagtctagcggcattggtgagaagggccgtgcacctggccagttgctgagtcagaaaccacttaacgcgtcggtgtaaagtatttccggactagacgcgtttcgtgtgaacgcgtgaaagaaatattgatttaggcgggcagtcaccccctacagtttggtactattgctgcgaccacacatttgactcgacaccacctccagtttgataaatacatccgacgattacgatagtttacggttggcctcgttggccgcacgcctttcaccatgtcctccctttttgacgccgttctccagtccgaattgggctcaaccgccggctctcgagatgaccggggactccattcagatgctttgcccagttcacgacctcaaccaatgtccgagagcaacgctccaatgagtgatgccaatgcgtttcctgacgatcaggtccccgagacaagcagatcgacgtctacccggctgcgaaatccctatgttgctggagcaccgccggtggtcgacttggctggtgaaaaggtacagcaggctttcgaagaacttctggaaaactatcaggaggaagctccaccaaagtcatcacacaccccgcagtcatcagcgccaatgaccaacaaatactacatcgcgcaaatccacggcatggcgaaatgggaactgtcgacattgtatgtggactttacacacctcacctcgctagacaaccctattcttgcggatcaatcgcgaatcagtactatcgatttcagccattcctcgtgaaggctctccataacctgatcgcgaagtacgagcccgaatactttgtctcgcaccgtcaagccactagcagagttatcgtcacaagctggcacgtctttaatggcgggcaactctagcgtggccgacgaccctaagctagatcggacgatccgtgagaagacacggcaccagcagacagataagctgtttgccctggcgttttacaacctgcctctggtctctagacttcgacagcttcgaacatcgcaaattggaaaactgctgtctgtgtctggcacagttacccgcacgtccgaaattcgacctgagctttccctcggaactttcatttgtgaggcttgcagaaccgtcatcacgaacgtagagcagacattccgttacaccgagcccacgagatgcccgaataccctctgtggaaccagagtcgggtggcgtctggacattggcaaaagtacgtttgtagattggcagaaggtgaaactgcaggagtcctcacatgaaattccaaccggcagcatgccccggactatggatgtgatattgcgcggtgagatggtcgaccgtgtcaaggctggtgaacggtgcatcttcaccggtacgcttattgttattcccgacgtcagtcagctaggactgccgggtgttcgccccgaggccgttcgtgacaatagcggtttccgcagcaatgatgttggaggtggaggagtcagtggcctcaaggcgcttggtgtgcgggatctcacctaccgcctggctttcctgacttgtatggttactcctgatacaacgacccccggccagcaatccaaccagcaactgagcggccagtccaatcgaatcctcggctcgctaaaccaaaaccccgatcctgagcccgacgacgacaaggcacaggaggcatttcttcagagtctgagtccggcagaagtcgaggacctaaagaccatggttcactccgaatacatttattctcgtctagtagactctatggcgccgatgatttacggccaccgacagattaagaagggtttgcttctgcagctcgtaggaggagtggctaagtcgacagaacaagaaagcctgcagctccgtggtgacatcaatatttgcatcgttggtgatccatcaactagcaagagtcaattcctcaagtaagttacttgcttattaaaatgttccttgctgactagtcagatacatttgctctcttcacccccgcgccgtctacacaagcggcaaagcttcatccgctgccggtttaaccgcatcggttgtcaaagacgcggagacgggcgagttcaccatcgaggccggagctctcatgctggcgaacggtggtggtatttgcgccattgacgaattcgacaaaatggacatcagcgaccaagtggccatccacgaagcaatggaacagcaaacgatctccatcgctaaagcaggcattcacacaaccctcaatgcccgtgcctctattctcgccgccgcgaaccccatcggcggccgctacaaccctaagaccaccctccgtggcaacctgaacttcagcgcacctatcatgtcccgattcgatttgttcttcgtcatacgcgacgagcctaacgaggacgtcgaccgcaatctggcggatcatattgtcaacgtgcacatgaaccgcgacgcgccagtcgagccggaattcagcactgagcagctgcaacggtatatccgttttgcgcggacattccgccccgtcttccgggaggaagccaaggctgtgcttgttgagaagtacaaagagcttcgcgcgaacgatgcacaaggggggatgggacggtcatcataccgtatcacagtccgtcaattggagtctttgatacgtctctctgaggccatcgcaaaggtcaactgcgttgaggagattgtccccaagtttgtgcgagaagcctacgatctcctccgccagagtatcgtcacggtcgagaaggacgatgtcgaagtggaggacgatgaaggcgccgccaacgcagatgaggacatgcccgaccgcgaccgagacggcgacagcccgatgcgcgaggagccccagtcggccgccgcagctgagcccgttgaaccacgcgccaagacaaagattacctatgacaaatacatgaagattctgaacctggttgtgcgccggattcgcgaagacgaggcccaagcgggcgagggtgtcgagcaggaagacttacttgtctggtacctcgagcagattgaggccgagctgaacaatgaggaggatctgcagcgggagcgcagccttgctgttaaagtcctcaagcgcatggttaaagataacattctcatgccgattcgtggggagggccttgttgatgaggcttctgaggtgcagactgacaggacgatctatgtgctgcatcctaattgtgcgattgatgaggaatagtcgtcgtatgatgaaatggcacggcctggcatctggatggcttggggttgcacggatggagtcgaggagcatgtttggtggtaatgagtgatgatacctattttcatacaagtaatctgctttatcatagaattttgacgatttttgggtctggtatttgtcttcccaaggagagacataatcttccgcgttcttcatgaggagctagagctcaatgcatttcctgtgcggtccccgcctagctattctcgcgtctcgagatatcagtctcagaatgtcatgcagccgcagcagtaaaccattcaaaggcctgcagcggtgtgcaggtgtgtatgttacatcagcagtcgtgataagaacaggtagcataatagttacccttcccaaaaggactcttcctctgcaatatccaagccagcccatgctgcgaatctagaatctgaggccacaagcaccgccaataccatctgaaactattctatgctatcctcacatccagagcagggaagggttaactgcgtctatggttccaacagtaaacctcccttacacatctctattgtcctgatattccgcctaaatcttccacctatgctaaaccccacggcgcctcctttgaacccgctatcagttctctagacccattctttccccatccctccaagtcttgacatcctccagctacctattctacttatgctctcctcgctagtaacacgctcaaagttatttgtgtatcaaatccagagagaagttcgcctcgttatctctccatcctggaagacgagcactaaactggcttttggctggtgagggaaggtcagggcgggaagtagggagcatgaatagtggaagatgttgtctgtagatgacagggaatggagggtgaaagagctggatatgtgggtctggttttcttagggattcgtggtgtatatagtggggaggatcaagaggttatggaagaagaatctggggattctggagtgaggtgtagataattgtgttgatgctgggtcatgtatatggccgccaatccagcactcttacttagaataggcaagtcaatcagcactacaccgtccggcgatgaatcttggtaaaacagtcatattattatgattagacatccgcatataggtatggacaacacatccaaacctgccagatattgctgcgtgcatcaaccgtggtccataaagacgctgggtatcaagcatatcgaaagataagagaaagacaacactttaaagtgagagcatttgcaagggtatacaggccgtttagtagtagatcttctcttcgaaaatcggaggaacacccttttcaacattccaaacgatatggttcttctcatccaaccaggcgtcctcgtctgtgatggggataacgcggctcgtgtgagccacttcctgagcactgatgcccatttcgtcacggggtatccagagaagtggtgcctgagcactaatggcagggtggtagtaagcgttccgctcgacctcgggagggtaggagacagtttccgtgccgttgggtacgagtgtgcgcagctgacggtatcccgagtacttgtcaggtcggagatacttagtcaggaagttggtcttgggttcagcggggttggcttgagtgagacccttctcagcagagtcaacattatccgcggtttgaccgtcagcggcggaagggctggcgcatgccgtcgtattcatccttcgccccgttggtttcctgtgaaagcaaagcttcctcttccgcttccagattccttgggaggtagttgatgagcgggtccagggctgcattgagcgaaacgtgatagatgatcatggtcacgagaagaatgattgtgagaatcataggtccaagagcgattgggtcagtaccagttccaatggcgaaaagaccgataaggcagaccaccaataggtagcatccgaccagaatctgttgcaacgcccgcgcaaaggtcttgccctgagtgtcaatatcggcattggacacgtacagcaagttgtaccggtaggcaaagtagaagagatacaagccgatggtggcgaagccgagaaccagcggtgcgatgcacgaataggtaattgctagatcggtcagttgagctgattacttaaatgagcagggatacgcaccaatgaccgccaggagagtgaaaacgggatacacagttccccagcccaaaccagcaagattcgaccagcggctgtacattttccggggggtgttatccaaaagacggccaagaattttcccaagaatcaacccggagatctgcagaagagcaccagagctgaaggacaatccttgcaagacaatgtaagagatgtagaagttcgcggagagcggaaggttgttggccagcagcgaggtagcagaagtagggttactgacaatcttggtcacgacactcgtggccgc

SEQ ID NO: 1089 - DNA, 2638 bp, Emericella nidulans
tgctattgctgcggtgaggagaagcaaatgccacggcaataggtgattggaaacggttcaagtttgcgcagagggggatggcaggtttggcaccctttggggagatggatgttcgaagggctcgaaggagctggagcgaaggtggatgcattttagatgctaatgcttcgattgatagtattattagatgcaaagaagggtttaatgtagtgaatgaagggcaaaaggcgcacgttcttgagacaaaacaatgttgtaatagcaaatgcgggaagtgatgaaagacaagaccctgaaactgcgctaagaagagatctgagagcctggcgattcaggcatagaaagttcgaccaatggctgatatcacgattaccagttgcagcaagattatggattcctgctatggataaatatcccacattatcgcaatattcccaagcatagctatcaaggggaacccctgctaccctttgctgcagcggtcgagttcccgtcaaatgaaaaatgtcatacaagtcgtgtatcacccccaaacgccttttggcccagaagagaaatatttgaagcagataaacaattaaacagcaaccaccgctcaaatctacaagagcaacgttccgcccaccattctaactcagatatttcgttataatagataatgcataaggtagattgcccggttcagcgcgcagctacgctggacaagaactctatgggtgatggaactgtgcttgtcggtttgcattcggaccgcggttagtgttccgatcctcatcggactggctggagctatcctccgcggccgccgaagtggatgcactgcgcaatcgctgggctcggtcttgcagcacctgagcctctgcagcagctttctgagcgcgtatttgtttgcgccacatgcttgcataccgacccttcattgcaagcagttgatcatgtgttccgctttctgtaaccttgccctcgctcaggaccaggatgcggtccgccgtcgtgatggtactcagtcggtgtgcaatgacgagcatcgtgcggccacgggatagcgtagacagagcaccctggatgtgctcttcggtctcagtgtcaagtgccgcagtggcttcgtccaggagaataattcgcgggttcttaaggatcgtccgagcaattgccactcgctgtttctccccaccactgagtcgcagaccacgctcaccaactttggtgttgtagccatccgggaatgacatgattttatcatggatactagatgcccgacatgcctcatagacgtcttcgtctgtagcacttgggttggcatatttcaggttatacatcagagtctcattaaagagaactgtgtcctgcggcaccactccaatatgtcttcggagggagtcaatggtgatactttccacatcatgcccgtcgaccagaattcggcctctttcagaattgtagaatcggaagagcagacggaaaacagtcgactttcctccaccggattcaccgaccagagcagttgtggtgccgggctcgcagtggaatgtaaggccgttcaacgccggcttacgggcgtcgtaggagaattcaacattgtcaaatttgatgtctcccttgcaaaccgccaatggtcgggcgttgggtcggtcgacaaccgtaggctgttccctgaacaattccagcaagcgctccgaattgatcagggctgactgaatggaacgatagaatgttccgaaaaagttgagcgggccctgcaattgggccatatacgtgagaagcgaaacaaactgacctacatcccgttgtccgagcgagacttgataagcggcaataaagcaggcgatcagaaggccgagcataaaaatggtgttctgcgaagtgttcatcaggttcagcgagaaaagaacgtggtattcggccctttggaagtcggatactgcgcctcgatatcgtccaaactcatactcttccgcgttgaaatatttcaccgtctcataagagaccatcgagtcattcctaaaagcgttatatgagtaaatccaaaaagatgaagagaattaggctgtttaactcacttcaccgcatcttcttgacgagatgaattaaccatctgtcgccgaatctccgctctccactgagccatacgaatagtcacgtaaagataacagaaagtcacaatggtgacgacaagagcataatacgcgtctagcgcaacaaggaaatagacaatggcgacacataaatcgactagcattggaacaacctggaaggtaacttgctccaaaaaggtgttgatggagctacccttactaagggccgagagaacttcacctgtcttcttcccaagatggaagtccaagctgagaccatggacatgctcaaaagcagcggttgaaagctccatgtacgaatactggctaacagggatccagagggtggaacggagagacccaatgagcccctggttgccctgaagccaccgaaacagaatgtataagcagatctcaaaccatggcacgcggaattcgtcaccctgtttagataatttgttggtgattatcccaacttgaagaggaacgaggacattgacgacgcgttgaaggataattagcaaaaagcaaacgagcaccaccaactgcaaacggcggggctt

SEQ ID NO: 1090 - DNA, 3758 bp, Emericella nidulans
agtttgcatgctttctcgtcagtaacaatcctgggctggggtagcgtatccaagtctgtatatctttatcgtcaccctcactgagggcaggatgtccgcatctaaacagtcactaccttaacttgacttgacgtcagaagcgagcttgtgagagtaataccgatcgttgatatctcggatcatgtacgcgatctatgcgctgctcgtctttatctaggacaggatagtctcaatccagctatgcggatgaccttgtagttgtttttcgagtatagtgtagcagctctggttgagcaggttcctgtgaaatcccctcaatcttgcttaccatttcttcatccttcgcttcacattaaccaccctacatctaccctttgacttgagacacctcgctgcatttcatgttcttcacttgccgcagtgtggctactcaatgagcaccagatccatgaaggcaagtgactccgcctgaactgcccgaatcgatcaatcacactccctctacctgaaatcattcatctctacctttacccatgtcgtccatgcagtactctatgatcagccctcactttcacattagcccatcgcctgttaacaagcacctccgtccagaaacacagcaacaagaacaagacatcaacatgatggatgaaatcgaactccagctttgtctgagcattgacccaaccccaatatcgaccccaattgtgagtcacctacgccgcaaatattcgagctatccctcaataatcaactaacacgtgctacccaaccggcagaaagagaccgataaccagaaggaaaagcagaaaaggacttcacagcaaggtcagacccagcagcttcagatcctaggggcgaaacgtctggcggagaacttggtgaatcatggtgaaagtggcactggagaagagggaagagggttaacccatcgggacatctcaccgaacttcggagatggagatggagatggagatggggataataacaggataccaaacggactatggagtgaagaaagcaatgaccacctaggctacttacaactcccgccgcggaagaaagtccggacgttattcgcctgggacccagaatcaacatgtcaaaccatgtccgaaggtagtgccagcgctgaatctgatacggacaaggataagaaccatacaccaaaccatgcagcacaaagcgcggacgtatttgaccctatgtctttatgccatcctcttggcgacactaaacctccttcaagcgaggaaccaggggaatacatgcacgccttgatagccagccttcagctattgaaccatccgcatccgcatccagacccaccggatatcccgcgacggcctcaacggttcgagatctacgaagatccagacgacatggatactgatggggtggggtttttcaatgtcgatctcaacactgcatggtatctatcgccggatgagaacaaagagaacgccgaggaagatgctaacggcaatcgccagcacaatcacgggaatctcagtcgggttcaaagtcagagacatcgtcaggttacataagtccaagaatgccgcaggccatgattattgtcggctgcagtgtcttagtatcatgcttgtagtccaaggcagtccttaatgtgtagacatgaaagagttaatggttaatgaccagcttgattgatggatgtcggttcttaaagcaaagtaaggtaatacgcgttgctggaatcaaaggatgaaaaaattactttctcatgttactgtggcatggcgctttccaaggcacacctacaccttacctccaccccgttttcaccacctttaacttcctctctcttccttttctttccttgggtttcttttcctgcaaacgaaatttcaaatcaagtctattatgatagcgaacaattctacagtgactggatagggaagaaaatggaggtcgagtccttgtcccatttatatccacctggttcctggacaaataaacatgccgcgaaaaccccagaagattgtagcatccactcgtgcaaaccatgattgccggacacgactaaatgcatactgtggcttttaaattactataagaactcttggtcaaggccgaggaagtcctcaatagacccttcctatctcatgactgcccttggagaatctcatcttcgctggttatattgtggaacggacgacagttcaagccagaagccaggctgggacatccactgtaacaatcgatggataaggaattttcgttgaaacaggtaacttaatcacaaccacggaggccttctggctccttgtcaacacgaacggtcaatcagggctacgaaagtacatgacgacgccttatcgtcagctgggttaggggcaactgaactgaaaaggaacagactgtttcattgcactaattgggtctatctttcatgcaatgaattaaggattgcctaagacgtttggcaatctttttatcctcagtcgactgttcacttcaatcctcgctgcagagcatcgtccttggtttgctacgttacaaatgttgaatgcatatatttcatattcaatatatttctgaaccagtacgcaacaacctactccaatggcgtaaaatatctcttgaaccgatccgtcttcgtcaatcccagttcaacaatcacccaatgacaactcatcagcaaactcgggaaacgcacggtccagaaattcaagtaaccctccggcagcccaccaatatgagctttcaaatgctccggcatatcattgtagtggttgcgcttgttccgcagggctcgcatcaagtccagcattttggagccggtgtattttcgctgcttcccgagactgtctttgaagtcctttggcaggagtttgaggaagtccatctcagggccaatgacatcagaggctacagactctagacacagaagagcgtcagatggaggatctctcggttcgaactcgaagtggtccgaaacgtcacagaggaagctaaggcggtcggacggattccagaagaaaggatgggttaacacagcgcttgcgtcggggctgtggagattagtacgctacgccacaaggcaaaggaagatgttgttgggacataccgttgacgtggatcaagtgccaacattgatcggataagatcgtctgcttcaaacgcatactctcctagacgctgtaactcatcgagattgaaattccccttgacgatatttgcttcgcgcatgaacttgccattcttgtcaaaaggatgacatcctcgagttaggacgtagtagaagacacatcccagggagaagatatcaatggctcgggtggctcgtcgattcgtctggggatcgacgaccgccggctcagatgactccgtatgttgagactctgaaccctggattaccgggctcttgtcgtcatccacaagcagttcgggagccctccacccggacgtaccagcagcatgggccgtggttgccctgaatgaactctggttatcctcaagtttcttgcacaagccaaagtccgaaatcagaagccggatggcccgagaaccgatacggcctcgaggagcggcgaccaggatattttgaggcttcaagtcacggtgtacgattttgagagagtgtaggtaccggacaccggcgacaatttgacgcaagacgtccggcatatccaagccaccattgactaactgcgggaacgcgtctggtcgttctaaaacaacctgcaaagaagccggacacagttcaagggcgatgtgaagggagctttcgc

SEQ ID NO: 1091 - DNA, 3338 bp, Emericella nidulans
accttctgagttcctggtatccgcgttacgaactacaaaaacggaatgctgctttctacctcattggtagcacagtatctggatttggaggcattctggcgtacgggctgatgcaaatgagcggcattggagggcttgagggttggcggtggatcttcatcgtacgccactgaacaatggtccggaacgaatatttatctctaaccaaagcagatcgaaggtatcctcacctgcgttctcggcttggggtcatacttaatcttagttgatttccccgagcaatcacccaattcatggcacttcctcaacgagtccgaagccacgtatattattgccagtatcgaaaacgaccgatcagatgtctatgcggaaccgttcacattgaagggttacctccgtaacaccaaggatagcaaggtctggctgtatgctatcctttacatgctaaccacaacaaatacgtactcgattgcgtactttcttccgatcatcctgcaggatagcatgggattctctgtcgtcaaggcacagtgccttgtcgcgccgccgtatgttgccgctgcaatagtgatgtttatccaaggcgtcgttgctgataagtggcgaatccgagggccaattgtggctatcaatgctgcgatgggattgctgggcttgggactactccggttatctggataatccagcgccccgttacttcggagtctttctggctaccattggaggtatgtgatgacctgtactggtaaggatgatactgaatgctttaggcaacgccaactgccccgctcttgtatcatggcagaggtaaactcctcctttccctagcattgaaaacaacagctaagcctctttcagcaataatattcgcgggcagtggaaacgagccctaacgtcggcaactttgatcggcggtggcagcattggaggcattctcggaaccaccgtctttcgtgcccaagacgcgccgaactaccgtcccggcctgttgacaaccatgttggcaaatgcaatcatgattctgattgtgggtgtgttaacattgaagttttatcgtgcgaataaacgggttgatgctgggggaaagccggttgagggattggctggattcaaatatacgctttgaccttctaagccaaggggtaatttggcaaccgtcaaaagatattcggcagttgagaattgcgaccataccgtaggataaatggttttgtgccttaatggatagagttagacggattgatagtcagtactaaatggctatacaatgacagatatatgacagcagttcatttgcatagtttcaggtttagtaccaccggtcggaaaggctcagcggcagattcggaaagtccaaataacagattctctcggagattacggattagtcccacaggaatgcggacctccatctattggttgttagtgattatacatcattgttgatcaggttcactctagcaatacagcagaactgagtgggcgatgaagggtaacgtattggacgaagccaggaacagggagcggtcaagaatagaacatgttttagcacagccagggccttgcggtcaacgcctttaggcttcgccgcttggcaaaaatcatctagcgccacataaagaggaaaaagaaatacttccgatgcggggaatcgaaccccgagctgccgtgtgagagacggcgatgttaaccattacaccacatcggattgttgttgaaactagctttttaacttggaaatatatacccagaacattgaatacatgtccagattggctgcaaaacttctcaagtaacatcacggatatcagagaagagtcctctagtcttgacataccagtgagcgataagcaggtaaatgtaattcatatgttcctgctatagtattgcttgatgaatggtcgtgttggcgaacgatgatatacctctgacaaacgccagatcaccgccagaccacagcagccactcagaaccccaagccagtcccattgtcatacctcgcttggttctctgtccactaattgcacgcattgctctttcgtattgccgttgccaaacttccagcaagtatagtacgcccgtctgagcatctagaatcaactctacaaaacccccaaacctcgggatctagcataataaccatggtagtcattcccggcttcgagcacaagagccgattgatcattgagctcaatgctcacaaatgaaatgaaaggctatgtttaacagatgtacagtacgatccttctttgacttcttcatatctcacagcacggccgagcggcaaagaaatgcaatggtacgcgaatggctctaaaaggacaaaagccgattcaccgggcgcgctgcttgacaatatggcttactggcgaaaggttctagacagcaggacgatatcagacccgattattattatatcatttgtttcatatgggaaaaatacagtcttctgtataaactcgcagcagctcacgcagcagcatgcaaatttctgtgcatctcggggggtgctttgttctaagggatttcgaaagagtcggaactcgcttttccctccaaagtgtcgcaggttaggaagagaagcttcaggatctacccaatgcaagatatgcttctggccccgcggagaagattacagtaccatggactggatgatagcaattgatcgtcagcttcgatagactagttcagtggaatacttgagcttatactattactaaagttttgatcattacgttctttcgatccatgcccgttggcccagccgccaacgttgtgtagaaaaggcgtgttataaaccattacattcaaattcgatttgagcaatcagaattaatagcgatcaaccagacccagggttctcaacctggtaagacttccaacaactagactgaagttccatggtccgccaaattgagtttataactgtatctttagagaaggcttgtccaaccgcagtattggcaataaaatcacctaactctcacctaaccttggtcggaatgtttgacaatcagcaccagtttttgacatgggaatgcgatcgccgctgacatcaacggatgggattggatactcaaaagggatagtgacgcgtaaagaaacaaatcgagaaaaaatgatctgaagaaataacggcacgatgaccttgtacagccaaaacacacccgaccagcgcggaaaaaaatcttcgaggaggtccttcaatgactagaacccatgaggattgaatttccaatccttcgtcgtcccagacatcggtcctcgtcgttccagattgtgattggggggttgaaccgctggttggagactctagtcctctagccccttggccctgg

SEQ ID NO: 1092 - DNA, 1609 bp, Emericella nidulans
caatgacagcaccttgaagtgcaacttatccatcgcccaccacttttagacggcccgttatattattgttgacggaagcttgacataacaggtgtcttctcagcgatttttcttgggcatctcctactagctccctccttccctccgtcgtaacaaagccgtcgtgacaactcaccatgaactgcccctcgcgaaccgacgacaccctggggcatccaggctggaaccagaacccgccgcctctgaacgccgacgcaacaacccgggaggacttcaatggaatggccaattccaaggtccgcagaggacatatatccggcctgggcgaaggaggcggcatctcagtgctagaaagcccggtcccagtccccaatagtagggacgagtcggccctcaaggcgggcgcagccggcggggcggtctctgcatactccaggcaccagcctgagagaaacagtgattcgcctcgccgttcttttccagcctttccgcatatctcttccattccagctcgcgtctcccagagcctcctcaagttcgcccgtttcgtcgggccaggttttcttgttgctgtcgcctatatcgacccaggaaactatgccaccgatgttgcagccggtgcggactttcgatacgcgctcctctttatcgtcctcctgtcgaacctgttcgcgatcttcctgcagtcgctatgtataaagcttgggacagtgacagggttgaacctcgcggagaattgcagggagcatcttcccaaatggttgacgatcatcctgtatatcttcgctgaggcagctattgttgcaacggatatagcagaggtacgggcactatatttcacttttgaccaaatttactaaatatcggtttaggtcgtgggctctgcaatctccctcaacctcctccttaatatcccacttgttgcgggctgcgccatcaccctggcagatgttctctttatcctgatcttctacagaccgaatggctcaatgtggggtctgcggctgtttgagttctttgtcatggccttggtgctgggagtagtcatatgcttctgcatccagctatctctcatcaaagagcagtcgatcggagacgtgttccgcggctacctcccgtccccggccgtagttcaatctaatgggtacaccatcattctctccatcgtagggacatactgaccttcataggttataccaaagctgcggcatcctcggcgcaactgtcatgccccactccatgttcttaggcagtggtattgtacaggcccgcctcaaagaattcgacgtcatctccggctacgccgacccaaccgtctgcattggcagtacaaacggtgaagtcgagtaccgcccatctctccgtgcaattcgcggctgcatgaaatactcaatcattgagctcgctctgtccctattcaccttcgcactctttgtgaatagctccatcctcattgttgctggtgcttccctctacaacaccccctctgcaacagacgacgcagacctcttcggtatctacaaccttttatcgtctgtaatctccaaagcggcggggacggtcttcgcactggcccttcttctttccggtctttctgacggcattgtct

SEQ ID NO: 1093 - DNA, 1944 bp, Emericella nidulans
tggtgctgaccataattagcgtaagtagctcgtcttttactcagcgtgatctactaactcgatgcaggacacgaaaggcaaactagcaaccgagcagaagcaggtgagtctattgctttcgaaccacaaaacagtcgctaaccggaaaagcattttgaggagatgcttaagagcgtgggacgacgtagctagagaatgcacaccggtgctattcatagcacctcaaaatatctggatatagacacgcgacttactagaatgcggctgatggcttacgtgtataatactggatgcttgactatagactagccgagctgtaaataatacatatacccattgttattgttgtttagctgctgctaccagtagctggtcacccacgtatacagcactcggaacgaaccccgactccactttctccaacttttaagctcatcaccaccacgcttcctatgttcgtcggttcacacagaatacaaattagaaatcatcacgccatccatcttcttaagtgccattattcaaaatctctccacttccaatggcttctcgagcgagcctttttttgcggcgtagtaaccccttccgacgccaattttcctccacccgtgcctcctccgcagacgtcactcacgcagtaagcctcgttcctcctacacatattgctcttcatagctgattaacctgttactactgcgtaggtgattggcggcggtgtcgtcggtctcgcagttgcgcgtcagttagcgtcgcgaccaaatacaactaccattcttcttgagcgccacgatgcgccggggacagagacaagtagccgcaattcagaggtattttatcattctatcagccacccatatccgcccaccacttgcttttttttttttttttgaacttcatgcagctactgaactatcatctcccaggtaatccacgccggcctttactatgggaaagacacgctaaaggcgtccctctgcatccgcggcaagcaactcctgtattctctttgtgcagagcagggaatcccataccgcaacacgaagaaatgggtcgtcgcgcagaacgaagagcaatgggacgtaacgatgaaggttcacgagctcgcgaaacaactcggcatcccaacacggctaatctcgcaaaatgaggctcgagagcgagaacccgaggtgcgggggcgcgcgggaatcctggagagtacgtccacgggaatagtggatagtcatgcgctcatgacgtatttgcagggcgactttgaggataagggcggcgactgtgcgttccttactgaagttacaggcattgaaccactgggtgggggaagaggcgggtatagaattactgcacgctcaggatcagggccagagagcgaaacgacgtctatcgtcgccgagacggtcatcaacagcgcgggtaactactcctgcaacattaataatatgcttctcccgcccgagcgccacaggacaccatactacgcgaagggcacatatttttcttactcggcctcctttccaacccgggctccctccgtgctcgtctaccccgccaccctcccaggaactggcgggctgggcacacacttaacgctcgacttgggcggccaaatccggttcgggccagatgtggaatgggtagacgatcccaatgatctcaaaccatcccctgcacgcatggaacttgctatccctgagatccaggcatatttgccgaatgttgatccggctgccctgactctcagctattgcgggatacgcccaaagttgtcgaaaggtggctcggtgaatacgggcaaggggttccaggactttgttattcaggaagaggaggggttcccgggttttgtgaatctattgggaatcgaccagtcctgggttgacgagttctttagcgattaaaaaaatggttgagggtattctttataagtagcaagatgttttgggt

SEQ ID NO: 1094 - DNA, 3248 bp, Emericella nidulans
gaatcatgcatcagccagtagctagcgccaatacagcaaatgatattggcgatgctattgaaactcgacgaacgagttggaggctcactgtatgcgaggaaagcttgcttacgccttcagatcagatgccagacttcaaacaactcttaacgctctacaaagatgacacattagagctcgtgacagcaaagttacgcttggacttgcattcatggctcgccttcatgttatggcaatgagtccgcagactgcaccgtgctcgcgtaggaggatatgtaatcaagggacttgtggaccgaaaggctgcattttgctttatgattcggccatcacctgctttgttgaagatcatatgcactcgtcccggaagcgttgatgcagtgagtgctgatctggggcacgagattgagatcagatactaaaagagtcacactatgaccagatctgagctctgtcccacctttatccctctttttctccctaggatagccgctcattataatcagcccgacggattcagactgcaaacaagcactctcgtcagagaatttgaccaggaaaagggggctgcaggttaaacttctgaagtatgtttgtatgttgcagagctactacaccgaatactgactgcacttatcccaggggactcggcttggaagtatgtgacagcatcttcacaaacacggctctttattttacctagacttgctagcattcatcccgccggcattcgcctcattatgaggttaatccatctccgctttcaatcataccgcgctcgcatcgtacaaccgcacatggattcggccttaccacccgtgaaccagctgtatgacttcaatatgccaagacagaacagagagaagctctctgttctctgctatatggccagcgaaccgatggaggatactgaatggcctagactccgcaccgcaaccgcaatcagtagcccaaaggaggtaggtgaggaaagcacgaacacaacaggcaagcgctgcaaaccacctagtcaagtgcgaaagcgcaataacgcacctgaagaggccttgtcataggctaggccctagcgactatgctaaacctttgacggacaaactcaagatcgcgtcaaaatatataacgggcgcaggctatatccgactaggcatggggtagcattgatacagccgcctggtttttcgacaatggcctccatagtttgtcaatcgaccagtcgtgcagtaaaatcaccgcatcagccatcataagatcgaggcgtgggtcgtgattcatccggcgatcgccaagcccagcaagcgagaaacaaatatagaaacagctgccactacctccactgcgtactctgtacttgtatcatgtctgtagatccgtcctaccatcccagccctgattcgcttgcagggaacaacaatccacgcagctggagctgtcacacagcatttacaagcctcctgaaaatcagtccccacgctgcgttgcgtcattccatcaattccagggcttccgcgtgctggcctgacttctgaagactgagagctgggagttgaatcaagggataaatgtttgggaaacttaaagataacaacttccccctccctatcggaattgaatttgagcccagcctcgtctcaacctaattcaaacgtcccgtcttcacattacgctctccctcttccctcgtcccacaaggccacgatcaattaagtgatccagtcagaacgacaaaatgcaactcttcagtctcacccttcttactaccctccttgcctccgcaggaatcacaacagctatgccgtccgagttcaagacacagatttcgtgtattggtgtacgtcccttcgctcgtgttatttgtttatcatgccttgtcgaattcgttttgcttcaccccatggccaaaccctagttgaccggatgctaattgtttctctgatgaagctcaacaaccgcgcgtgcgataactcaactatcaaccttatgtgctgtccgccgttgacgtgcggcagtgacgcggtatatccctctccgtttttagtggtgtaattgtcatttaatgggtggaagctaatgcctttgctcgataatcagagatgccattagctggacccggttgagtcttccgaccggacaattgatgataccaacaagcgccgtggttggcttgcagtagggcaaggtacataatttgtgtaaagagggtggatcgaacggtatatgatggatatggaaggacagcatattgccggccatatatggcggataacaagtatatccgcggtattctactgatgactggtgtgaagttgtaattagatgtttgaagaaaaccatgagggcctaataaccagtttagcagtgcgtgaaaagtacgtgattgctgaactgaattgtactaccagatgaagaacatatgcatagcatgtaatcaatctctattaggagctggacagtgtgattgtgtttagcctggattaaccctggtttagaaaggtctgcgcttttgagagaagagatcattgataaccttagctatgatataaaaccacccatcgtgatactatactttcataggtatatacacagcacaatggggaaaacagttaaccgacaaattctcacctacttcccaccgatcccccccaacccccccaacacaggaacctcctccgccacatccacgtccacactcttctcgccgaccccagggccctcaaagaccctcagcccgccaagctccttctccctgcgcaattcctccttccgtgcttcactcacatccacaaagacatggccaagcggacccctctcgctactccaccccgaacactcaactcgatagccctcatccggctccagcacttcaaagtcattccagcgccgctcggcacggttatcccagtgtagttcgcatatcttcttgtcgccgtcaaacagatcaagccagccttcactgccgcggcgaccggtggcgcaaacctcgccgaggccttcggcgggaatggtcattttgtcaatagcggattctgtgagcggctctgcaggcttatccacttgagtgcaacatcatactatagtatgtctttagtcacgtaaatgagactacgatagcacgtacgtgggcccaatgtaccccgactgtgtgtgctctgagtcgcattccccatgccgcggcagctgacgtgggctctttcgttgattgagatcctagtattctatagtgtcacctaaatcgtatgtgtatatacata

SEQ ID NO: 1095 - DNA, 2613 bp, Emericella nidulans
ccacctcacgaccgctatggtatcagcgaccccactcacgtcccattatgcatcggacgaacgcttgtacttgagagcccccgagtggaaatcccagacggcgcagtgtgtgcgcccagcctactctgagtagcttctatgatgcgctgtaacagcactctgccttttaagaataagtgtcctgcattattctgcaacaatcctgcacatattcaagagctcgggaagataacggcagcaatgcgacggctgccgtcgcaaagaacgctaaaccttggttgatttgcggttattggtcgatcaggaacacctccggggtcttaactccagcttcatgttcggatgagcgtgctccgtcgacataaaagtctcagaagcatatcgcgcaagtggtggcgatcaaacgggatcatcgaggtatcgcgttggcccaagtccaattgagcgatcgtcttctccagtgggacttcggaagtaatactgtcaataaaaatctaaagacctgtctcccctgggcccgctgcccggatacttcgcgtacttgcctactcgttttagatgagaaaaacgtttacggaagaggtatccaacattgacagtatgagaattggtcgagcggggatctttgagcaaaaatctcaacacctacgcgttctgacctgcatgtaattccacccagactggcatcttagctacgctggctggtacaaacacctacgagtggcttagtaggctgtgagtagggttatatgcaggccagagctgactctgcgtatagtccgtgtctataggtatcgctacacgataccgaaaactggcatcttgcaggttggttatcttaatgcagtccatacttactacgttcaccgcggcattccattaccattaccagcgcccctgcttgcgatggccaatatgcaagaccccaaacctcaaggctcgggtaacccgtcaagcctatacatattggattgcgtccgcccctttcccagcactcagcattttcccctgccgcatatcctccaagcttattgtttgcggcgactatctcatctaaatattccgtctaattcatgaacggtctcagtctgctgcatcccctggatggctgtcgtccgcgccaaacatgctcacctgctccttcctcgactgaccttgagtattgtgcagcgcgttgcattccttttgcctctcaatatagggtatagacaccctgacggtcacaatggcggataatatgatcccttcgccgccagtagcataattcacaacgctgggcatttgttgtcagtgtctcgctgcgaggtgtgtcgctattctttgcccaacagtcgcccgcgcaaactcctgtttagcttgtgtgctcgtgccttgaggagttgcagtggcttggtggtgaagacaaggacggaactatataccagcaaatgaggcttttctccctgacttgtttcgagaggttcctgcattcctctggttatctgtgcagcaattcgtctgtccctgtaatgaccagtctctagatttgacggcgcttcgagagccatttgtgttcattagagatgttcgcgaatgagcagactatgcgcgctgcgtcacaccatacttgatgctttgctttcaagatataatggtatcatatccatgatcgctaaccccagatatgcaatgaaaaagttacaattgttgctgtcattgtccgccattagaagtactatcatcactaggagttcatcagtctctcttaggttctcagaagtattctatcggatcgttccgaacctttcgtgtccaccgtgatatgcagccccgcaatcgaacagtccacgtgtgctgctcagcttttctcaaccagatcttacaggacagactattttgacttacagaaatcaatgcggtatttgccaacaagtcaagttgataataacacacagactggctgaggataatactctatcgattttttccgccgccaggttacgaccatggccatgacggccgtcgacgtcactcccggcactaccacggtctggaagcaaagccagtttacgtgtcgcaacataagaaccgcgaccaggcgctgctatatccacaattgcttttcatcacaatgaacaagaacttgggttataagtactgcaacaacgggctacgaagcgccgaattaccacgactattcttacccctaccgcagcgaggctatactcaattagacccttcttgactttagaacccagttttggtacaggatgtaagcaaccggccgcgacgagaagtctacctccgggaaactttttcttaaaatctttgggttttcgaagtcattctacggtttttttccaattgtggatgggaatcccgaatgtgaaaggcgcaaattgaatcaactcccggaacacccttttaacagtcgcatataaaagatgtttatttaaaaactgctgaaatttttttaaaggttgaaagattggcggaggcaaggaaaaggcattattgcgggccccccttctagtgcgtcccgaggatttttcgtgatacgactctccaagaggttacagaaagaaacccttttaaaagatattattttggggggggagatcttttctccatacc

SEQ ID NO: 1096 - DNA, 3531 bp, Emericella nidulans
gccccggatgccatcgcaaagtcaaccaggtgctgcagaaacagaatcgtatcgcctctttcgtcctgccgacactggtcgagggcatcgatgataagcagtacccgttgattccttagtgattgaatgacagacagcagcagtcctttgaggtcccttatacaccagttcgaagtttcacggattcttacagcattaaatgcaatctcagaaaatcgatcttttgcgtctggcggaatcgctcttgagctgaagagctgatgcagtaaggatcgatacatctcaatagccgacctctccaaatcagcccctttgatggagaagaaaaacgacaagacgacacaatctgtcttcgtttcggttgcattttttagaaggtacttcattaatatggacttgccaatcccaggcttccctttaatccaaaaaaggcttcgctgaaaatctgaatttcttgcatcgacccacgctcgatattctggccgcttgaatatccacatacacgtctctttgtgggcttctggtacttcgttcagacggaaagtggttcggccaaagcccaacatacgaatgaagacctcctgggctttttcaatagaaaaaagaccctgtacgtggtcccgtgagatggaaccaagtgtcgattcctggtctatcgcaatgatgatagcacttagtaactgagaaaacatatgcagtcgtcaaatagccggtaaacatacctaattctaggcccgctgacgtactaacggatatcggcgcctcgtccagaagcgctcgcatgcaggctgctgcacttgccgctgcgaagtactgccagcgtttgctcttatggctatcagcatagtcactaacccctttgaccaggatacaaggatactggccccatacacctgccgcttccatttcaaaccctatgaccttttgtttttttgcgatatcgtcgcggaatttgtgagacatgataacactatcccctgagcccagcgttccgaaatgcagaaatggtactacatcgaagttgcgccggcgagcaaccaccgtctcgtcagcatccacacccagagagcactggcaattaacctctcgatgattgtacgtccgactgtagacaatgtcatactgagcgcctgggcactgtgctcgcacatgccgttgaatcatcgcaagataacggcattgccgatcgctcaaggtatcaacacgggtctttatcttcgacaaaaaagaatgtatctcttggttcggtcttcccaggttctcctccagtgcatctttgcgatatggaccaaggggtaggcggtcatactgaacgacccctgtaccgattatcacatcaccaagataaatgttggtattacctcgcgcggccagtgacttatcgatgaatgggacacccccacagattcctatcagaaaagcaatctgaattcgaggatagctcattttcatatgagccactacgctagaagcgactgctttccccgcactgggcatgtgtaccagagccacatcgtacgtcccgatccttccaagtgtgtatgagttcggatcaccacgtactttcaaaagcgtgggaaattcaacggcatggtatatccgactaaagagtggttttacgacttctgcttcgagggggaggggacagaggatcgcgattctgaaatccgtgcggcttgatggtggcgcggccattatgaaccggtgtacatggcttcactgttgtatagcccagcgagggaggctgtcccttataaggtagaggggtacagtcccttccaccattatccgtttctacgcgctcaacatgccgccgagaagagatcattggcctactcaaatccctaaaatagcaggcgcttcgagacgtaaaaaattctttcttgcgccacagtaacgcagcatgattgactagcaaaagggtctgcaaactagcgtagttgatttatgtatgtccctcaaatacgcgccctcccagttcttgtatccaaaattagattcgtccactattcacagctttacacgtctagaacaactgaaatctattgtacatccatcagctatacaaagcactgctatctagacgcggtgaagacctgcacggcggtgtcttcggaccttcttagcatccacagcagtggccttccccatcatctccaagctttccagatagtcactcgtcccatgctctggatcactgtcctctgctgttctctcacatgctgttccctcatctcctgcacctaatggccccttgatttggaaatattcccttttcgacggatcctgcagcatatactccgccgcctcgggcaaccatccattgatgaagtccccatgactgcagaacgagtttccgcaagcgagctcaagtggcggctcaccgtcccagccatccggcagaagctttctcaagtcgtaccggattgaaaacctcaagcgggggatcttgtacatcccgatggggcaccagttctcgccatagccctcaaaagccttggggttctttgagtacgcggtctcaaaagtgtctgggttagcgcaatccggaaaccaaagaagggtctggagatgcgtagagcatgtcctggttgggaaggctgcgagttcttttccttcttcggcttcatcgccttcacaggcccagctcacttggacgtcgggatcaaggccctctggccctgtggcggaagcgtttcctacgaccatctggaagttctctgggagggggatctcggcttcattcaggagttcgtagtaagcgctgaaacgcataggggtgatgggctggtgggtctgcccttcgggtgcgcttttgtcgaccaggtagagagtcgggatccctgactccgaagttagctggcgatcccatcagactaggaatggcaaaggtacgtacagtagacggagaaatcattaggatttctagcagtggagcagccctcccgcagctcagcagaggtcgacgtattggtgttgaccgcatcagagccaaagaagctgtgcatatggctgacatatagaccaggcgagacgataggatcgatattcttgaacataaattgatcgactgttgtgacggtgtaggcactggcaagcccagttgccaataacagggagaagagctgcattgcgctagagctcgagctggagtcgaagaccaaggaaccatacagactgatgactccaggaagaccctgcttcaccttttatagggttcggaaaagcccagtcggaacatcgccgtcctcccgaaccctagttgtttcagggtgctggtgggacggttgcggatagattaggcccgtctcttgatccggcgaccgcagcgcgaaaccccagacatcgatattaaggggtccaggggcgaatacaaccgttgcttgttggggaattgccagtagggctgttccctgttctgctttgacaggtaggttcatcgtattcatatagtatcactggtagcatgctcaactgaaagttggagggtataccttgggcgcaacaccgaaagaaaaccgggggataggc

SEQ ID NO: 1097 - DNA, 4863 bp, Emericella nidulans
gggtgagactagaatggtgcaagctttcgacttcaaccaatcaccagttgatgtttcgtttcgggttctctcaccaaaaatgagccaagcatccaagaagcggaaaagggacgacagcccgacttatgacggtaccctggcacctgatttgagcgataaaagctactcgtttgctcaaggcgaccaagacagcccgctggtggtaatctcgggtggcagtggtaccgacactctgtccatcttcaaccaaacatcgtacagctgggtgaatacgacccagttattctacggtgacaagtctgaacaagaaattcttggaacagcaacatcaacaccattatcacccacagctaccccaacagaatcacctaccgtagctgactcgacaagcgacgacgattcggaagcaaacattggcacgatccttggtgcagttctgggaagcctggcgggcgttgccatcatactggttctcatattgctctacattaaaagaaagaaggagaaggcgaggcaggcagatggtatgggcaaggatcggctgagcttccaagatcagggcgtagaacctctgactcgttcggcttatcctatggcagagagcccggcgccgaaagcagctgcctctgtggattctttggcaattttttcgggaaatatgggcgatgaaaagtctcccaggtctgctggctccttaccgcactacatgcaaaagactcaacccgcaaagccgagcccgctcaacaatatccagtccagtgacgatgccggttacggcccagatgataaagccattgaagctgggcaatcgccggtacgtcgcactacggatgaaggctggggtaaatacttccaggataacagcacacccacactggttggtgttcagtccccgtacgactcgacgcgtggttccaaagccaccatatggccggggaccaacaatgccctgccacctttgcagacaagtttcctacaggaaccgaccccgctaggacgagttaacagtggtagtcccacaacagaggttggccggcacatcgtgatcccagagagtcaatcagcgcgaatctctagcgccagttctgcaagtttcaactcagacgatggaggtcacgacgaagccgtgcgcgaacaaagctggctcggccgccctccaagcagtgcgtacagcaggagcttttacaatcctggcagcacgcgagacgccctatctacaatggcaccatctacagtcgcgccatctgttgattatagaaggcatgactcgcatcgcacaaacacacgaggatccagtgttctcattcctgacggtcaaccgctgccaaggaacaatgtcaactcggatatgagctggctaaacctcaatgctgaccgataaatacctcctaatcaaaagtcacttttacatctctacttgggatattgagctttggatggctgccaagcatcaatacccacgaaatgaaggcagcaacacgttcctttcctcgacttcctatcacctcgatccttaccgcgcccctttcaatgccctacaactgaaaaacgcaggcgttgacacgcattctcatcacctcgatatcattgcacccctatctcatcttatcagcgcgctgtgcttgatctgatttggttcgatttgtgcaattccgctctcagcgagttctcgttttttctatctttgctgtttctgtccctccttcgacttaatatagcctggcatgcttttcctgatatccacatgatgtgtttttgttggttttcctgccgtacattgcattgtatatagattacatcttatatgggttgtatctggtgtaatgttgggttttcgatctcttatggctgtttgtcggctgggctacggtttcgtacttgaatgcatggctgaaaggactcatttttcacttctatcaaccaagctagtaactacgagttaagggtgttaaggatctaattttactatgccgctgtaagggcatgggtaacactactaaatattgtgtagcactgacttgggccgccactcacctatgagtgcatcctaatccatctctctcctaccatgtaaggcaagtacacattgcatcgagactcagaccaaccagctgatattagactacttgacaatctcaatacgtctgtctaccggatgagcttctttctcgcaggctctctagagagtgaagttgcattgagcaaaagctagggtgaggtgtttcttgtgttccgctactggacaaccccaaaatcaaagaaccagcttcacagcatctagccggccccataactctttgttattgcctcgtctatattactggtggttggcgtttgtactagctggctatggtatttccttaagtggtaagttatggtagaaagccgttcatgtataaccactaacaaccatccatagcttgcagccatgtctggtaacatcagcaccaattccaatcctaatcctaatccgaagaaaggtacgcccattcagaccagaattatccagatcttcaagagcattaaactaaatcaagcccacttactccagtatggacaaccctaataacaaacagttcctacattcccggcctcctgaccctcgaatactctctccgccgatgcgagtcaaaataccctttcgtggtcctctatacagactccttcccaatttctggccacgcagccctcgatgcacgcgggattgcgaagaaacatgtgccctacctgctcccctcgatacccaaggactacacgaatgacgtacggataaacgactgctggagcaaactgacgccattctcgctgactgaatatgagcgggtcgtgcagctggatagctgatatgctgattctgaggaacatggacgagcttatggatctgcagctagatgggccggaaatgaagggggagggaagcagggtttttggtgcagcgcatgcttgcgtctgtaacccgttgaaaaagcctcattaccctcctaactggtacgtctcttcttttgtggcatgaaaaaatgaattgggaatgaattgcgtcgctacagggttccatccaattgcgtctatacggaccaacactcccatcctgaacttgcatcccacattgctcctccagcatcagcagccctcggcattcccaatggcggcctccaggttgtaaatccgtctctcgagatttacaacaaaataattgcccagcttgggtcagccgcaacgtcgtcctacgacttcgcggaccagtctttgcttggtgatctgttcgctgggaggtgggtggcgctgccgtatgtgtataatgcgcttaaaacgatgagatggagaggcgtgcatgatgttatctggaaagatgcggaggtgaagaatgtgcattacattctcagtccgaagccttgggaagaggatccggaaggtcgggatcaggaccaggaacaggacggggtggaaataagggtcggtaacagcgataccaaagatcctttacatgatttgtggtggaaggtgaatagagagaggttgagggaggagaagagaaggggaatcaatgatcggttctgatatggaaagcctagggctctaggatgagggcggtaatttggtcttacctaggttgatagatgatggtttgtctcgtctgtttatcggcagctatttcaagtcctaactaaatgaaccacgctgaagcacgcgctcttctaaccacaggtttattgctaaacatggctgcagcagcctacattgtccaaaaacattgaagaacaacgaaaggacgtcaatcgtagccacgtttggctcgatggtgttgaaaaaggaatgagatatgacgtatcaagtcttcgcccggagcagtcctcattatgatacaaatgacatcgccgagagcaccaggtcaattttgacgagacccagaactggcccaagtcccggtttgttaccatggctagcaatagacgccaccgtaccgtgtcagcagcccatttccacctcaagagtgcaggtgagaactacacttttcgcgccgctggaattcccgccaccttccctggtggctagagaccaatacctaattcctgagcactagcacagagatgaacgtcagcgagtgataaacaggattttaaaaccaggggattgtctaatcatctaactgctattaacctgatagcccggccttgctgtgctgcactgaggttcctcgaacgaggttgagtaaggtatcattcgcctcctagacttgcacggtgctatatacagacgaagctgcagttgatagtgagataatgcccctgaaccgtctgatctatgctttaacgtgagtctaagttctgcacaggttcttctggccaattgcacaatatatatttccatagatctcctacaaactaaccagggcgagcacgcgatattgtagcaagaaagagttttaacaagaacttgatttccactacgtacttatcactaacaaaccactaacatttataggtagtgaatcgcagtcatagtaaaatgaacttttgcaataggctcaacaactccagcggtatcatgccaaccaagaaaagacaaaaaaaaaaccactgccaatgagaaagtaagatataaacaagaaatccatcatacacttagttccccggggttaaaccataaaactgcctaaattgaggaattgaatggtaggcacttgcgaagggccggtgagaggaagtgatgatgggcgagaggcaattgtttctccttccttgtatgaagatgatatctggagtcgaaccgaggcaagtaagggctaatcgcattccttagccaaaggaagtagctaggagccgcattcttgcttcaagtcgaaccatgcttgtcggtgaagcc

SEQ ID NO: 1098 - DNA, 1567 bp, Emericella nidulans
tctgttggcctgacaacatgcccaggtgcagacaggccggactgcggcgtcccagcaggcaaactaaggatcatcacatgcgttataacggccccgctggtgcagcatccgacgtgtggaccgctcatgaagaccggcctaccccacgtttatggagggctaaaggtatagacctagccgtcttctatacggtaaccgcaatccacgttgcgataccaggagatctctgctggagatcactacgatcttatctcggctaatgaagacgtccttgaccgcaaaatcagtgcttttcaagtaggtcccactctacgcaccccccgaaggatctgaccatgcagctgacgttcatcaggagagcgacgagcataaagacttagcagacacgggaaggtccagggaagtcatccggtatcagagttcatacgagcaagaagatacacctcgaatcggaagacaaatatcagtcaagcggtaccgtgggacagtcgagatccagcagtttgccgagaacgagcatgatgaggatttttctgatatcctaggggtggatggagtcacgctagacaaggctgaaagcgacgacggctcaaataagagcacactgatgctaaatacaaaattatcaaacaattcttggctaggagatttggatgatgaagatgatcccttcgcactgcttgaggaagggctcgatgagactgacctcgaagctaatatcgctcgtgacaaacatgcacgactccgaagtcaagttgaagggcttgttggttctttgaagacgtcgcaagacgaagaagtacttggggacatatcggagcagctcttggccgtcttctgcgatttccctgagacgaagaacataataattagcgcccatggcatgttaccaatattggagattcttgacctatgccgccgccgcgacattactttgtgcctactgaaaattgtcaatgcaatcatctatgatgattacgaaatacaggaaaatctctgctttgtcggcggtattcccatcattaacgaattcgcggcgaaaaaatatccccgggaaatacggctcgaagcagcagcgtttgttcaacagatgtaccaaacatcaacccttacccttcaaatgtttgtcagcgcgggagggttaaatgttcttgttgagtttttggaggacgattacgaggatgaacgtgaccttgttctggtaggagtgaatggcatctggagtgtttttgagttacaggtgcgtagcagcatctctttctgttgcaacgggtaccgatattgacactacacagggctcgactcccaaaaacgacttttgcagaattttatcacgcagctccgttttggatcctttgtcccttgtgttgagccgagtgttggacgaagaaggcgagttggccgaggtcgtggaaggccgcattgcaaatatcttcttcatcttctcgcaagctgagaatcatgtcaaagaaatggtatcggagcgcacagtcttacatagtaagggctttgatgcatggatatgttttcaggtactgacgatggcttaggggtttaaaagaattga

SEQ ID NO: 1099 - DNA, 904 bp, Emericella nidulans
ggttgtcgcacttgggtggacgcgtggctgcagctagtcggagacgaaggcgttagcttatggtaggtcgtattggtctttcgacaagaaggctcccaactatgccggtcaggataatctcttctcggacttgggtgttccgcttttggataatgccttccaaggctacaacaactgtattttcgcgtacggtcagaccggttcgggaaagtcttactcgatgatgggatacggcaaggagtatggtgtgatcccgcggatttgtcaggatatgtttgagcgcatcaggaagatacaagaggataagaacctcacctgcacggtggaggtctcgtatctggaaatctataacgagcgggttcgtgacttgctcaacccgtcgaataaaggcaacctgaaagtccgtgaacacccgtctacaggtccctatgtcgaagaccttgccaaactcgccgttcgctcttttgaggaaatagagaacttaatggacgagggaaacaaagcgcgaactgttgctgccacgaacatgaacgaaacgtctagtcgatcacacgccgtgtttacgttgatgcttacacagaaacgacatgatgcagagacaagcatggatacggagaaggtgtcgagaatcagtctggtcgatcttgcgggttcagagcgagcgaactcgactggagccaccggtgctaggttgaaggaaggagctgaaatcaacagatcactttctacgcttggacgtgtcattgcagctctggcggatgcggcttctggaaagaaaaagggaaagcaggtgccgtaccgtgattcagtacttacgtggttgctaaaggactctcttggaggaaattctatgactgccatgatcgccgcgatatcacctgccgacattaacaatgacgagacc

SEQ ID NO: 1100 - DNA, 2744 bp, Emericella nidulans
cctcgaacttctggccacgaggggccctgaaatattgacatatttttttgccggtagagccgcagaggatgatagcaatgctacgaaatcacattgttccgaccaagcggaatgctgaagtggaaacgagaaggcaacgcggtgatacgatagcacatatgtgccatacgcagaagatgatgtcggcgggatgtattcaccaggatatgaaggaccaaagaggcggttgtagacgtgacgaaaacccggaccttgtggagaagctgaatgttcttgaggtttggccactcccttccacacttcctggtttttatatactaagggtgttttggagaaatccaagacttctataagacgcaatctttgatctggcccgtcaaatcggaatcgcagaccatttgacgggagctgaagagtgacgggttgccgtagaggatccgatgcggagtacgcgatatcgatcgcggggtaggtctgagggtgggctttgaggcggcttaggacgttatgaagagaagcaccaagtgctgctcgggattagtcgttgccagagatgtgtcaaagggggaacttacttatagagcccagccctttccccggatagatctgggcctgcgctggagctttcgaggcactcatgataagctgcagggcgcgaccatgccgtgaggggtaaagggagccaaagatgccagagggtttagtggttgggttgcgcttagaaatgggatctgggtacagtatagcaaaatcttcagttcggttttatgtgatgtaagttggtaataaaatagcgggctgtagagaatcaggctgcttgagcctagtcagatggcgaagatggaggacgggatcatgtgaacgaccccgaccgcgatgactgcgatgaccggcgatccagagtcacatgatggtccaagcgctggggtttgtttatgttttccttttctggccaacggaacaacagccgacaaccacgacattttgcgacaccgcccctcagcgagactcattgcttatttactgagtttggtcttatgtccaattattgtttctgtacctaattcctaccgtctattcacatcatggccggcccccagcgggctacttctggccttcccaccaggcgaacgacgacgcgacagccgacacgacgggcgggttctgcgataccagaacgccagacatccacagcatccccagctgtatcaacaaaaacggctgccattagtcggacgcgcacattaaaatccccgggcgaaccggcgagcgtgctccggaagcgaaaggagagggacattgagcgagaaatcaacgaagatacaagcatccatgtcgtcgtacgatgtcgaggccgtaacgagcgcgaagtcaaggagaacagcggggttgttttgcagacagagggcgtgaagggtaaaactgtggagttgtcaatgggtccaaatgcagtatcaaacaagacctacacgttcgataaagtcttctccgcggcggcagaccaaattacggtgtacgaggatgtagttctgccaattgtcactgaggtaaggctgaagcttcgattgagaaggctgtatgcgatgctaaatagtctgcagatgcttgctggatacaattgcaccatcttcgcatacggacaaaccggtaccggaaagacatacacgatgtctggagatatgacggatacattgggtatattatccgacaatgctggaattatcccccgcgttctatattctctattcgccaaattagctgatacagagagtacggtaaaatgctcctttatcgagctttacaacgaggaactccgagatttgctctccgcggaagagaacccgaagctaaagatttacgacaatgagcagaaaaaaggtcatatgagcacactcgtacaaggcatggaggagacatacatcgattccgcgactgcaggtatcaaacttctccagcaaggtagccataagcgtcaagttgctgcgaccaagtgcaacgacctgagttcacgaagtcataccgtgttcaccatcacggtgaatatcaagcggactacagagtctggggaggaatacgtgtgccctggcaagctaaacctggtcgatctggctggtagcgagaacattgggcggagcggtgcagaaaataagcgtgcaactgaggctggcttaattaacaagagtctgcttacccttggccgcgtgatcaatgccctcgtcgacaagagccaacacattccctataggtacattctttaccgtcgtttgaatacatgacgctaactagctactagagaatctaagctcacgcgcttacttcaagattccctcggcggacgaaccaagacatgcatcatagctacaatctcgcctgctagaagcaatctagaggagacaatttcaacgctggactatgctttcagagccaagaatatccgcaacaagccgcaaataaactctaccatgcctaaaatgacgcttctccgtgaattcactgccgaaattgagaaactaaaggcggagttgatcgcgaccagacatcgtaacggagtgtacatgtcagtggaatcttatgaggaaatgaagatggaaaacgagtcacgaaggattatcagtgaggagcaacgggccaaaatcgagtcgatggagtctagccttcgccataaggtccaaaagaaactcactttgacgagcaagttcagcgacctgaagaagggcaccgtcgtcacttgccacgatttatgc

SEQ ID NO: 1101 - DNA, 4321 bp, Emericella nidulans
ttcgactacgacttcctcatcatcttcgtcgccctctacctccttgccttcagctcgagctttagccttcttctgcttctttcgttcaacgttttccctttggagcttctttcgtgcctctttttccttgattttttgatcccaagttttatccaaagcatcgacctcctgctgggacttgtggatatagtcgtgccacataacccgcccttcacacagtccttcctcaactttgatcaatcggagcctcattcgtgggcccagttcgaccaatttgacagcccgtttctccacttcggcggtagttgtcttcttttcgactttctcccctgttttcatacgctgcatctcccgcttcgtcaataccttccttgtcgtcgttcccgcgacctcgacctcagcatccgtgtccagctccgtttcactggctgatgtatatcccgcagctgaaggatctagaaggtagtctgcggcatcctctagtttccctaggttgggaacagcagacttgtgcttttccctattccgcacctccttcgggtccaaacgtcggatccgcttggggatgcctgttttcctagtggtgatcgcgtagtgtcgcagattcagaatgtaagagccctctttatcagattcagaagcgggctctcggttcagaagcattacacggcggatagacttaaggggcgtggcctgggggttgatcggcgggaaaagtgattgaaaaacggtcgtttgttaggctctccaagcgctttggcactttggaattctcgtcggcattggggctgttgaagttgttcatcacgagcaacggcggtgttttatgatcctgacctccgcctcttggacgatacaaagactttctcgacatcacggcacagggagacgctttccaccttgaagttgagcgtaggaccgcgcggtgtaagtgccaagcgcatatttgtgtttccggtagatgacttggagaaaagaaggaaatgcgtgacacccagaggaccggccatgaccgcatagtcccgtagcctatttgatttgcgttcctgaacttgtcagtgtgcaagtccggtagtaaacaggaatggatacctccgagatcttaccttcaatcgcactgccgtgtctggttccatcatgagacgaacatccttaaccagctggctgacactgctgccaacccgggagcctccaatacggatgaccatggattttggagtcttgctcactgacgcggcactgcctttgcctttggcagcgccgcttggaggtttgggatgagcatggctcttcgtatgctttgccataattgaatatccgcttggaaaagcagagaattaccaaggtatctttcgatggtctagctgatcttttttctgggcggaaaaaaaagataaagcccgggctccgcaaagattgtccggatcaatatttctgcggtgtccccatataattttttgtctgcggagcatgagccgtcttcctcactgtatcataatctggtcatttattcacaatgtcagccttgaaaaagcgcaagatcacggagaagcagccagagactaatagcgattctgaagccgagtccgtcagctctcgcggatctgccaaggatgaaacgcaaacctccggcgaagagccagctccagcaaagtccttcaaagagttaggaatcattgaccaactatgcgaggcttgcgagaacatgggctacaaggcaccgactccgattcaatcacaggcgattccgcttgcccttgagggccgtgatgtgattggcctcgcggaaacaggaagtggaaagacagccgctttcgccctcccaatgcttcaaggtatgttcgttatgatccatacaatgactttggctgacaagttgtagctcttatggaggcgcctcaaacactctttggtctcgttctagcccccacccgagaactcgcataccagatatctcaagcttttgaaacgctcgggtcaacaatcggagttcgctgcgccgtcatcgtcggcggcatggacatggtagcgcaatccatcgcccttggcaaaaaacctcatattatagtcgcaaccccaggtcgattactagatcatctagagaacacaaagggcttctccctccgaaatctcaagtatctcgccatcgacgaagccgacagacttttggacatggactttggtgaatccctcgacaagatcattcgaatcctcccccgcacccgccacacctaccttttctccgcgacaatgagcaccaaagtcgaatccctccagcgtgcctctctttccaaccccgtccgcgtctctgtttccagcaaataccaaaccgtctcaacccttcaatcatcctatatctgtattccccacaagcacaagaatctctacctcgtctacctcctcaacgaatttgcgggtcagtccgcaatcatcttcacgacaactgttcacgaaactcagcgtgtcgcgtttatgctccgcgccttgggctttggcgccatccccctccacggccaattgtcccaatctgctcgtcttggtgccctaggcaagttccgctctcgcagtcgcgatattctcgttgccactgatgtcgctgctcgaggtcttgatatcccgtccgttgacgtcgtctttaactttgacctccccatggacagcaagacatatattcatcgtgttggacgtactgcacgtgcagggaagagtggagtagcaattagcttcgtcacacagtatgacgttgaagtttggcttcgtatcgagcatgcgctgtccaaaaaactgccggagtatcaggttgagaaggacgaggtcatggtcatgtcagagcgggttgcggaggcttcacggcaggctactattgagatgaagagctttgacgaaaagaagggggctagagggaagaagtttggcaaggggaagcgctcaagagatgatatggatcaggaagagggttaaatatgtctcgatcattaaaggctttatgttgcaaatgattggttggttatatacatagcgttgaataaatacccgaattctagatcgtctttacgtaccattataaacaatcaagagtggcatattcaaccgcgaatgccaaaacacttgatcgatgtggcgacgtctgatagacatgaaaactgtcattgattttatcataatgcctattagttgtagtataggatagtgtgtagtatcgtaaatcattggcatcggcaattttgttagacgtcattttcgcggtccactgagcccacttcctctccaagtggcttttgcgtagccaaatatgttctcgatctactgaacgacttccttagcaccagcatcgcggactgcatttgcaacacgcgtggcgaggtcatcagcctcagatcgactcgcggcctcggcatacacacgcacggcatcttccgtaccgcttgcgcgtgcaaagcttcggcctttgttgtagcgggattgcagggactcaatcttggcttggaggccagggggagactcaagcttacgctcggcatcgtaggctttgaaaattgagcggtcagcgacctccacccggacaagccttgaagggaggtctgtgtaggtggccagccactctgtgggagtccaacccttgtgtgcgagaatggcttcgacgaggagcaagtcgctgagagcatcgccaacagcttggttgatcaggtctgtgagggcgtctagacattcaagggcgcgtttttgggccggtgactggggctctgtagttttgatggttttcaaagcattctcggagaaagtaactgtaccgtgtccgttcgcctcgaaatagaccccgacatcaaatcgaagagcagcatggtgaaggtgcttcacaccagtgtttgtgcaaacagaggggagtttcaggactttttcaatatagtctgtgctagaaccattggcataggctgtctgaacaacaccaatcttgagcttgcttgcaattccagcgcttcgggcaaggtcgccaatgaaagaagctgcaagcgtagcgattcggtcaccatctagcatgcggaaaacattgccctcatccataaagtagtaaatgagtcgatcagcatctccgtccagagaggcacagcgatcgaggggagatgctttggatgatggaggagcccgctgttttgtttttacgtagtcggcaccacactatgcggaaaggttagtggtcgagctttgaggtgactggatcggggccatacgtcgagattcagactgtcggggttaataacatcgtcattcactattttgatgtcgatgccgccctcctcagggctatgaagatatttgatga

SEQ ID NO: 1102 - DNA, 1853 bp, Emericella nidulans
tcttttgcttcagaccgccttggtgacgtgtaaccctagcagggtccttgcttccattgcggataggttcggcgtcgtggattggatgccagggaattatactgcgcgtgctggatacgaagattcaaagatacttgacgtagtggaggagtttgttcttttgttgattgttctcttgactgatcgacactcgctcaccattgatggcgatggtgaccaggcaacgtaccagaatatgagtcgggaaatcgcacacgttctatgcttcaagcctctatcattttctgatctgtcaacccgcttgagcgatcaggtgcgggactctgatcatttccaagacgttctggaggaggttgcgagattccgaccacctgaagggctgaacgacagcggaacattcgaactcaagccagaatatatcagtctaatcgacccttatagcgctcattactcgaagaatcaacgagacgaggccgagagtgtctacagggaatggatggcgaaacaaacagggaagaaggcttctgatatcgtttttgagcctaagttacgacctttggagtctggtgccttcgccgacctggcacgcttcacgcgaactccgctatttgcccagattatgcaccagtgcctagattatgtgatgacttccaaggaccgtactcctgggataccacctactcgtgttgaaacgttcctccaggtcgttcttcatctaatcctttcagctacccttgaagaccacacggatgaagacaggaacgatgaccaatctgcggaatcttttgtgtcacacgcattaacgaaggtcagatcaacgcaaatgggcaacttgactattgttggtctcctggaaaagatctcctcaatgcctgagtattctgcgtgtgggccgagaatccgccacattctaaagcgtctctggcaaaagcggcctcgtacctacagttctgctacggcttccctgatgttcccatttgatcgtatcgatacaaactcacctgccattgacaccgagagtgaaaaggagttgaagaaaaaacaggccctcgaacggcaagccagggtaatggctcaattccagcaacaacaacagaatttcctcaacaatcaaggaggcttcgattggggcgatgaggattttagtgacatggagtctgagcccgaggtaacgccagagaccaaaatctggaaatatcctagcggcacttgcatcctctgccaggaagaaaccaatgactcgaggctttttggtacatttgccctggtccaggagagtagcattctaagacagactgatattcaggatgcggactttattcgagaggtactcaagacaccttcaagcctagacaagtccgctgaacatctccgcccatttggcgttgcgggtgaaaatcgtgccacagttcggcggctagactcatccggtggggaggttatcagcgagaaaattgggttgagcaaaggattcaacgctaagaatactgtgcgtggtccagttacaactggttgcgggcatatcatgcattattcgtgtttcgaggtatattactcggccacccaacggcgtcatgcgcagcagattgcccgtaatcacccggagcgtctaaagcataaggagtttgtctgccctctgtgtaaggctctgggtaacgccttcctccctatcacctggaagggcaaggaagagtcgtacccaggcccattgagcacaaaggtgtcgttcgaggagttcatggaccacgaggtcaaatctgttctctcccctaagcataaaattaattacgccctgctgtcagacaacagtgagctgcaattacaggcgtaccaagggttattccgggactatc

SEQ ID NO: 1103 - DNA, 1889 bp, Emericella nidulans
tgcactaccgcttgatggccattctcgacagcccaggacagaggggtttgacccttggaatcaggaatattaacatccgcaccggactccagcaaacgacggacaacacccgtatgccccttcttggcagctgagcaaagagcggttaacccatttttagaatcttgtgaattgagcccgacagagccattctccagcagaagctggaccacattctcatgcccctcatccgcagccaaggcgatgggcgttcgattgttctcgtccgtgcagttcaagttcactcccggcgtactcaataacaacttcacaattgtgtcgtaaccttgagtagcagctaagaaaagggctacctccagtttgctcggggtaggtggcgcgccttcggatgccattgttcgtcgtatgcgctcgtgacgggtgatggaaaattaagggtcgtctctaggagtgtttgactcgatatgcatacacgccgacattcgatatccagaacgggcagccaaagctaactagcccttcagtttgctagagataggctaggctagcgtgtctgcctcggaaactttgtttattcttcgttcaaaagctctattattcttctcgatttgatcccactctgacccgcgggatcagcagccgcgcccgtgacgaaactcgagatggcgacaaaagatcgtgagaggcccgcactagagctcgccacgtgtgtacccgtcactggcccttagcggttcttgacaggagagacaaatgtgctacttaaactcctaagagcagcacactggcggtgattgaaatttatgagcaatgtcgtcgatgagatcatactttgggacataagatctgccggcgtgggatggctccagctctaccaatttgggcatggttgtcactgcccgaaatcctttgtctgtgcctgaccgacaacgttaggttctaggatgattcgaaatgcttcttcgcgaaagcactggccgatcccactgaaacatacgctcccttgcttggtttctcacagtgttaagcgctggccaactataagaactggctgttaaggttctggtagtacagattacagcctgggatcaatctcgcgctatcacgcatatatcgtattttaaggatgtgcctgagcaccgtcgtcacatatgaacccatttacactattaacccatttatttattaagactgagtcgcgcattcagcatcaagtggaatcattggcataaccccgcatcagtctgggcaccgaagtttccccgcgctaatatgggtcgctatgagacaccaacaagtgcaatgagtcatgtatcaagtcacccataaatccagcgttcttctcctgttttgtctcgccatctctcagcaagtatgtcggcaacggtgaatttggagctggcttctctcgaagaacgacggaggttgtcaggagagcctgagcaagcatgcgcggccaacgcggatatccctgttgctcgagcgaagcaaaaatggaacgatccatctatcaacaagtggcgcatagcagcagcttttgccagcttcacagttgccggtgccagtgacggcgtgtatggtgtgagtaccgctcaccctgcggatgagtttgtttgacgtggcccactgacaacgctgtaggctttaattccctacgtactaatgcccagcccagattaatggtctattccaacgttgcgagcagctgtgctaacagctgctcctccagatacgcgaagattttgagttgtccaccacggtggtctctttgatttttatgactccatttgccggttatacaatggcgtccatcgcagtgaataagatccatatgacatttggacagcgagggattgcgactattgggccgctatgccatctgattcctt

SEQ ID NO: 1104 - DNA, 1676 bp, Emericella nidulans
ggtttttgcgaatctcatagagcatttgcgctttcttcttgagcgaggcggttcttccgttctcttcgtctttgaaaggtcggctatgcttcttccgcttgtgcttttgattctcgggttggtctttcgggagcgatttggcgatagttgcttctccagagttatttactgcctcgtcttcttttctattctcattttgttcaacagcagccgcttgcgactcggaggtgttcgacttcttcgttcggtgcaggcgagtttcgtccgcgagctgatcgcgcttccgtttcttgttctttttggagacattttccttgttatcacttggcctctctccagtctctggactcggctttttgttcgatttcagtggctttccttgttcgacgataggtgccgcgtcttcgtcaacgaagacggtgcgaacccgttcgggcatggcaagtccagcagaacagcgttgtatctgctatatctctaagatgagtctgtgagttattgctcgagcagttgtctccttgcctgttatctttttgactttgacgatttcggatcctgatccccagaaaaattctgggtggaaggttatcttatcataaactggtcttggcatcccgccccagcaccaaataataatgcctcttgagaacccttttcttaacttgcagtgactgttggcagccggatgatgttcttatatctaaggtttgttatcgaatttgttgctttattccctcaagtttgtttctatggatcgcagatctttaagttttctaagataccttccactgctggacatgatcgggtgtctatatatatatatcctttatatattctttctatatctaacacttcatatcttcatcgttaaaatataggcatcaatggttgactcaatgtcgtagcccgcttaatccataccccaacctctaacccgccggaagacaaatgcgcggtcatttttgagaccgaattcggcccagtcatcagtgagtttgtcgtagctccagtatcctttccaaaccaacttggtgtttctcgaggggtttgggtgaaagggactagcattcgtgggccgtgcagcagttgaccggagtgctaagtggaggacatatacatatttttctttcacgccttcggtttccaccacaagatcccgggggtctggcgtggtggataaatcatctttacttgggaagggatttgtggcctgctcaggaggatcggtcggggatgctggcttggaaaggcgccagcgaccccgttgagcacgcttcaatatgtccatggcaacagaagggactggttcctgagtcccacttcccacaccggcatttcgaggagtttgcttacgggatggtgcccgcgcaaccgccacattcgctttgttgatatagggagctagctcacgtggctccactgtcgtaagtatgtaaatgaccgtcccgtcgggatacaagcgaaggtaacggtaatatgttactatatggatcggactgttccaagcaatatttgaatatgctgacaccgcaccagcgcgtgtgtagtttcctgtgctgatatatactcccgtgaagcgaattcgcgcaaaagaatggaaaacctcccaccgcgacgatagcggacgcggtcaatgaaccggagcatgggcaagaaatggcgtatcccgtgcctga

SEQ ID NO: 1105 - DNA, 4455 bp, Emericella nidulans
gtatcgacattggagcattgttatctcgttactctgtgagagagctcatcattaggcgctgggtaccgaatcgtactcgtgattgattatggcaaattctggaaagacggaactctagtgtcttgaagttggtgtaactattcgtaacgattgaggcatatcaaggcttgatacctggaagtcaagttcattcgcaatccagtgcagattcacacaagaagtcgctattccatatactccacaatatcctctaaattctactcagcttctctaagatcaagaatgctaaatgtcggtatatgcttctaaccaaaagtggcaatattacagtagctaatcacgtggtcgacgcgttctcgcgtttggttccgaccacttcatttgaaatgaccacatctcggagcattctgcaagtcttcggcagctgtaaaaaaggcagagaaacaatgtccgaaccttcttctttgataaattgttaaactggtggaaatgatgatggaaacgcaggacgacagctggagcattgatatcgcaaagctgcaacgcgacgcgctgggtttagtgagttcttacaggttaaattctggccaacgatccctgcaactaaccaactccattcctttgcctaaggattctcagcaactcttcaagtatcctgacgcaattgggaactgtagttcaccagtttctcatgattcaataactgtgccgatcccgaacgatcacattgtgacttccgctcctccaaaagtgaccggcgagtcccccgtgcatggaggctccatagggctggatacaaaccataatgttacagagccgctagacacgaatcaaccgtctcctgaaagagcaacacagccctcttctacggggcaagctgctgcaaaaatgggttctgccgagaccataccttcagacacccaggtcatatcccagtcggtatacgacgaaatcatccggaagaacaaagaggctggaaacgaggaacctgacagcaatcttcttgaccgaaatacgctcatgactttgcaagaaggcggtagtggcaatttagacctgctttctggcttcgacgctgctcaattacaagcaccgaatactgacgagaatgacgatcaaaacagctccaagttaggagagtcctcgcctctctcatatgagcgcaataattttcccgagtctcaacggttccttgcgaagacccctttggcgacgaagcagggtcaacttgagactgattctacggcttctcctttagtctctcgaaacccattagcatctgacctcgagtcagcaagcggggtaatggcattgagtcaagtatttaaggccacgcaggcgccttcgtctccccttgtaaatggcttacaatcggatctcttgtctgatcggccgtcgcccaatatcccgatacaaaaccgcccgcttgcgccgtcattttcctccccattaaacaatatcgcggcaacgtttcctcgtgactcgtcggacacgcagctcaactatgtcacgctgagagaatcacagacaagtagaaatgacatggctaggggaagaatgacgcgttccgcagaccatatatattctgatggctgcagcgacggtggattcggcaaggagcctctttacactgagcgcaggaaacgtgaagggaggactgatgaggagaatgccgcacaattttcgatggtctcggcttctgcaaggcctcctagcgatatcgaagcacggaaaagaagacgagccacctcattatcgcggaaaacgaaacggtgcgatatggagggaaactctactgcggcagttcagctggagcaggaagggattagttatgacctacaggctgtagggacgagtgaagaagagacagaacaggaagaggagttaccaaggcctacgccgcaatctcaggttccccatccctcaacagaagaggacaaggaaaattgcgatgatccaccggctatcataccacacactgggagcgctcatgaccggctttctcaagctctttccttgcatgaaggtttgaccggcactcatagaatgcctgctcagacagtctcaggcggacacacacctgtacgaaacgatgacctgaatcccggtacagttgacgtggttagatcttcaccaatctccgtggtgaaagattcacagtggtctcctgagcgtgatgatgtaaaaccagccgaccggacaattgtgggaagccctagtgatcaaggccaaacccgctttcgcggccctcagtggcaaagcgtggcagcggcgggacacgggcgtggtatattatcacctgctgatcagccttttgcccaagaacttcagatctgtagtcagaatgccccttctgccattcttcgcccagaaatcgccgatatagcgaggatatcaaatccatctctggaggggtctgggggtgcaaatgcaaatatgcatcgcttgaggaaagcaacaaacgaacccgagaatgggaacatggcgctgattttcggcgcccgagaaaaatcttcttcaatgccgtcgtgtgtcgcggaaacccctgttcatcgccgacaaagagcatctaacgatctaccacattttgccactattccagagactagcccaacccgtttggataacggggcctggatgagtgatggggacaacgacgctgcaaatcaggaggatgatgatttgcctcttccatatccaaaggcaatggaagatgcccataagccacatcaatttatgtctcaaagctcatctccagttaaacgtttgctcaattcaaagatcctatcaagcccaagcggaaggcagcggagggctctgacggaaatagcggccgatgcttctcctcaagttggggctactattgatgtcaatatcgacatcatgtctgttgaagactatgaatttagggatgctattgcacagtctcccattcgtccacgaaagaagcggcgtagcaatgatggtcggaatatcccagcgtcggatccaatcattcctgttacgccccgcgcagaatctcacttcactcctccacgggaggatgatgagatggtattggctttgccctcgcaacccgcaaaccccacgaaccagcgtcaaagcacatccttacggcggccgaaaccttcaagaagggccgggtctatctgggacacggaagattctcctaaattccggttatcaagtaaagaaaggtctaaactgtttgcccgctcacaagctcgagagcgtcagcctccaccggcgccgaagccagagctacaagaggcacctcaacccacgcctgttccatctcgagcccatgtggaaattacctcgactccaattcatgaagcaccaagtagtaacctggctattgaggagagcacgggctatataggccagcgacctccccctgataattctatattggtaccaaaccaggttcttgcaccttggaggggccaaaagagggcctattatccagcagtttgcttaggaacgccttttgggacatcacaggatcagtacatggtcaagttcgaagacagtgccccagttgaagtgccaaaaggtgctgtcaagaggcttgagttgcgaatcggcgatgctgttaaagttgatatgccacatattcccaagattacgcacattatcagagggtttgcgcataagctcagcgcagaagatgccgttaacgcagtcacagacatatatgggcatgcgacgcttgttgtagggccaaaacaacgcatgagccttacgaacagtgggctagtaggccctgagaatgttattaatgttcctgtctcacgaatttacttggatactatactgtggaacaaaataagggatcggccttatacttacacttccggctctgaaggcttaatgagcagactacaaactcctccagacagacgcatcgcacaaacttcacctagcacaaggctatttcgcagcctccgtccctcagatggcctattttccggcatggtatttgccgtgtcctatggtgaatagagcgagggcaaaatcgggtttcaaagatgatccttgaaaatgatggcgggttttagatgatggcttcaacgaatattttgagtttcataatttgcccaattgacccccgccggggcaccatttcccgcaacaaactggttttaatctcgtttaacctgggttgaaatgtggtttggttttaatgaaacaaaccttcctttccaaaaatgaaggcggtttaaaatcctgtattaaacttgtatggttgctcttaagcctttaggtttggaatcccttcctttgggaaatccccaggggccgatatgatatctccttcgggttgggcaattagtttttttgccaatattaactctttttttttactcgagttgtgtgagaaaacctttcttatttggttgaaaacgtttttattcctcttttccatgttaatttttattttttttctacttt

SEQ ID NO: 1106 - DNA, 2470 bp, Emericella nidulans
acttatccggacgtgtcttcctgcagaattgcgttatttccccgtggtattctcaatctttgaaatcggaacggtccgcagcttgatggagtgctggtaaataaaagggtaagaggcagctggaattaagaggccaaggagaagactagggcgttcccagatgacaagtcggatctccgctgtaaaactaaatgcctcgcactcgaggtaaaagagtatatggtattcgaccgctcaataggccacgagaatgcgatcgatggtccgaggcgattattggcattgcgccgaaacgctaagtatggcttgtgagagagattcaagcgcgaataaaaaataaaataaaaaaatatattagcatccagcaaggaaacaaagaactgagtttccaactatgagcagtttgagatccagataacaacgacccatatctggagagcggcgccgaataatagacgagaagcgaagagccgacagcaagaactgcgttaggatagggcagtctgcacaatatcaatgcacatgccgcgcgctgagcaaaggaaagggctaaaatataccccaacctttttgtgtctcaggaactttcgatctgagtgtagagctagacgctggagagtttgatgtaaggagcaaattcgcatgcggctcattccccggaccattctggtttcttttgctataatcgacagtgagccaaattgatgttggcgacatatcattcgctatgttcacccaaacgtctgccacctttaaacgtcccaatgaaggagtgctcattctggatatgccacaaaaatgagaagatgctcccaagttcgtcggcagcagagcgagtcacggcaaaggagatcgcgttgaatgaggacgaccggggtttctgaaaggcaataacttgaacactcaccttccgagcgtcagctgcccttgttggaccgcttggaaatctcatagatgccagttttacagaccggacctcggttgctcaacatgagtagtgtcccctagttgttcttcgcgccgccgcttggcccggtaataaagttggcaggatacggtacagggcattgagcgcaatggatctgggtctctaggaattctgggcactaccaacacgaacatgagatgaagaagacggtaagaaggtccagagaggtcggaatcaaataaggagcaaccgggccgatgaggcgtggactggcactagttgccattagctgggtatatgctgacccttctccatctccagtttctgtttcgattgctggagggggcaccattcatattaatcaaggactgatcgaggttgatcgagattgattcgttccatggccaggccgacccagtgtttcgggtcaggcctggccagggcggacgatcaaaactgaggggtcgggatcaagggatagggtccgatccagtaatggtcccctcgtgagggtaatttgggcgatggagatggcgaatcagaaaaatggagttgtagccagcagctggcacgatctgagcgagcaatccccagactagacacgcgacagtcaaaccgctcgggctgccgacgacgaagcagtgaggtcgtatattagtgacaaacaggaaacggaaaggatcgcaatctccgtcctgatttaattgaggccaactctaactcattaattcattaccgactggactccttacagtctagtcagcccaaggtgaaggagctagtcccaataggtttcggaggaccggccgtgagagcaagaacggtgactcgtgggcgagcgaaacagctgcccaggcaagccaaagtctcgcttagactgctctagaccacctatcagttgctagtgattcagaccggccagcgggtggctgacttaaacagctgtcaacatggacatgccagtctcaccctcgtgctcaacatatgaccgccggatctcgagccgacattcctagcaccaacagacagctgaggcagccgatacagctcgaagcttgtgtttgaggagatcggctactagagtggctttcccgagggttcgttcgggtcagcagcaccaggtcctactgcactcggcttctggcgcgacttcgccatcaatcccttgcgttgagccaggcggtcctctgagtcgactgatcacgatatcgaagggccccgacttctactggcgggtattgtcgagttgggacgggcagctccgggctagggctgagagcaacctccacccaggagtgacaggaccatcgcgtgggagacccagagaccccgactccccgggcgagcctgatcgagccccagactcggcaagaaccgagcccactaaccccaaaggcaacgggctggggatagcgactaagcctaaaagaaaacgggctaggcgagcaggcgccccctggccaagatcaatacgcctgtaatggaacggaaaaaatccctccaaggacaatttcgccgccgccatttgctccgttaccttac

SEQ ID NO: 1107 - DNA, 5043 bp, Emericella nidulans
cgctgtgattccagctgcggcaggacttcttcatggctccaggtatccttagcgcatctttgcgactcgatccattcggtctcgtcaaaaccaaagcccttcgttgatttccgagatgcttctgctgagtcttttcgctcctcttctcctaagagcatcggcttcgtttcgatttgatcagcgtggtagaaatctttcttggatgagccccaagcggcaagagcctcttcctcctcctcggatcccaggctatccactccgtttcttcttggattttgatgagaattgctctaaatcatcgtcgtcataatcgacctcatcttcttcgtcctcatcctccagatcttcgtcctcgtcgacggactcgtagcccaggacctcctcgtctgataattggagcgcttcctctgaacagcagctgagttagtaacagcactcaacataggatgaagaatcgggcactaccgcataccatcctctgcgaccttgcgtcgtctctttgcttctggcgattcgtccagcaaaatctggtctcgaccagcctggaattcatcctcagaatcatcaaatctctcctcaatgtcgaatctatagggctcttctttgtcggtattttggaccgctggacgaccgccggcctttcttttcttacccatgactgatttgggaagttgtgataattctgttcgggcttcggcttcttcaatccaaaaaatcgataatctccgcgataaatttttgggtgagaccttcaccgccctcgaggctctagtctcgaagaggggagaagcacatgttttggtacaatacgttctgtaaccataaatacaagattcaagatcgtcgcactgcgatttggtaagtttgtcaaagtctccgcggagtgcgctccttcttcatcctctgcggaaagattaaagaacggaagctacgactgatacagcacgcaacagggccttcgtccttttatcatttccctttctcttcccttctttcttctcctccctccatgcatccatccttaccctctatcatttacgacgcttcccccacggccttggggatttcagctgtcttcggtgcactcttcttctatacactcgtcaaaatgttcggctttctagctcgtgagaaccagtttgttgtggagggtcgggtgagtctcattgtggcatctgtcgtctctgatttgggcattactaacaagttgggcttgcagaccgtggtgatcaccggtggctcggagggtatgggcaaggccgttgcctgccagctcgcccagaaaggagccaatattgtcattgtcgctcggacacttcagaagctcgaggaggccattgaagccatcaaagtacgctcaccttgaacatttctatgtgcatttgatcaatgtttctactagggttccgctgccaatgtcaacaagcagaggtttcactacatcagtgctgacctcacgaaacccgaagaatgcgaacgcattatgaccgaagtcaccgagtggaatgacggcatgccccctgacattgtttggtgctgcgctggatattgcactcctggatatttcgtcgagacatccgtccagacactcaaggaccaaatggataccgtttactggactgcggcaaacacagcacacgcaatcctgaggaagtggcttgttcccattaaccctagtcaccagcggccattgcctcgacgacacctcatctttacttgttctaccctcgccttcgtgcccattgctgggtatgctccatactcccctgctaaggctgccatgcgtgccctttcagatacgctgtgccaggagattgaagtatataacggctctcgcgcttccaaagaacgagcccgtgccactccagccgatgtcaagattcatacggtgttccccatgggtattctcagccctggattcgataacgagcaacaaattaagcctgcccttacaaagcagctcgagtcggccgacaagcctcaaacacccaaggaggttgctcggattgccatcgaagccattgaacgaggcgaatacctcatcactacaatgttcgtcggcgacgtgatgaagggtgctgcgcttggacctagccctcgaaattcttggttccgggatacgtgcactggttggttgagcaacttactattcctgggggttgttcccgatcttcggaagcaggcattcaactggggagcaaagaatggtgttccaaccatcgcgtcggcttaggcttagcttggctgaactgtcttcatgaaaagcgttttccattcattgtgtggtgtacggttagataccctcgagtgccttcaatgttcatccttattactcttgtacatccttacccctaatgccctagataagcggccacagcaattaagtgactacttcattggcctgctttttccatgatctatgccatgctcttcatgctcttacgacgtccataatcctaggggatgcgccgtagatcgctcttagatacactgtctaacataaagatggattcggcagaataagcttttgtcgttgccccaaacgcgcttattccctggtgttattgaggtcacagtgaaaaatcccagtttgcattgtttgtgacgccgttattttcttttggttgtgtataactcaatcttctggagctgtgatggagagtcctaaaaccggagttttcttcaggtcctctatcaattacaactgcgggtgtatataagcaccgaactattaccatcttttcattccccacccttgtctgactatagaataaaaaccaacgtgttttccttatacatgacatggaacactgtggtgtcgcatactagcccacgactctaactctagggctacattgcttaagcacctggtatattacttccttcctttggttgtcttcgtcattgacaccgctgcacttggcacaacggtctccttcaaagagcgaggcgaggctgatctgccaactggaaacaagcgcatcactcacagtgaaggaagccaagatcgcaaaataggtagtcaccactttgctctcagcttcaccatacagttgctgttgaatgaattctgcatagaatggccggactgagaccacagcgatctaattacactgagcctccccataccttgaagagccacaaccagcacctctggaatttcagcagagaagcaagggcgcacccatccatcaaattcgctccagtcagtgacttttaataaactccctttatagatctcatcttcatgccattcaccgcttcagtacgcacttgaaactccccgtcttcatctacttcgtcaaatgccacaagagctggtaccatgcctccgcacacccttccgctaacagcccactacaatcactctgccgcccatctgctctccacatttctccccatacctctccgctattcctccgcttccccgtgattatatcactcttctacaccgtaatatctcgctcgagacattcgttttttttttttcggattctacatcgtgccctaggtgttgctggttgctgctgcgcgccgtgcggacggacacctagccactatggcaggtagtttttagacgctggaatattattgatatccttgcggaaccaggcattaccgggacaatgcggccgcgcgtggaggcagcagtgcgaaaggtgaaagtgcggcgctcccagttgctctgatctggacattggtggataagctggatacgtgtaattgggacactcgcgttatggatatgcttttgtgtactttggactgctctttctgtgcactggtaagagcactggtgcaatgggcgtctatattatgcatagatggcgacctgggtcgcctctgtatagcgtcaggatatatagaatataatgaccatgttctgatatgtcgtgccgataaacaaacctatatttcgtataaatctagcgttgcgtagagtgtcggatttctatgtgcatagggcagtaagtcgatggttctgaggcaagaacacacaagggagagatcggtttccatctgaacctggaacttgacctggagattgagaaaagagtatcatactaaacatgtaataactcccagccatccttttttagagacacgtaacagctggaaaaggtgatcatgaatttttttcttttttctgctcacacggctcattggacatgagtgcaaaccagccacgctgggagaaacctgtccgcgaaaatatacacacaatcgactggaggtctttccgaaatggcagtgttccccaagcaatgacggatcctccaaatcgagatacaattttccgtcagccgtctccccgtgctgcgataattgcacttccccgtgcggagaagcgctgatttgcatttagccgcccctcacataattcctcctaccgaacccgcggccaccgcgtcgcacgtctaccacttcatctcgtggggcttgtcgccgattcggaggctgaaggtagcggcgaggtagctgccgaggaaagcttccttcttgatgctggccaagatggactggtccacggccttctggtcactggcgcgggcgctcgcgacaaccttcttctgtagatgacagcaaagttagttgattagttaactaaagagcggacattgatcacgcagagctcaattgtcgtctatccaaggcggattaggataacgtacctcaggcttttctccctgcttgaagaaagcctcctcggtcttcttctcgttcttcttctccttggtgaagtagccgggggcggaaaccttctcgatggtctggctgtcaacaccgctgatgtcgatgcgcgtgctggtagcgatgacgtagcgagcgttcacccgtcggagggggacaccgttgatcttgaagggaccggtaacgaggaggacaccctggtcaaggtgcttgaggaggacaacgcgcttgccacggaagcgaccggcgaggaggatgaggacggtaccgggctggaggctctccctgagcttggtgggacgaatagccttgcggacctgttcaacagagcgaaaaccatgtcagaatcct

SEQ ID NO: 1108 - DNA, 6284 bp, Emericella nidulans
tggaaaagggatccatcgacatacaggtccgggaagtcagaaaggttgataaagggaggaggaagatatctgcgcttctatcttttgtttctttctctaagcttgtgatactcgtttatacaggacagccagttgaaaataatactgcctacacccgttacactataagctctcttatctgtagagctactgagctgtgaatggctttatttgttgattagattgcatttcgcgtatccttctattcctgcaacatcatttgataatatcagtatatattttccaaggcctcatttactgatggaattgtcggtttggtcagtggcttaggccttgttttgttatcagcatcaggatcaaaatattcccatacttcttgcttgtttgcatggtctttaatgacttgaaaccatgcgcgccagtcatcccgcgagctcaggatggcttggaccttcatggcgctttctttatcatatgcgattgccatttttgtcgtcaagatattcccgatctcagcggaactcgttgtatattcgaaggagtaggctccgggttgccagtgtcctttgggtaatgttcaaccacctcctagcttgtctgtatagctcggtacggggctgcagatatcttcgatatgacaagaagaggtaataattctgtatcccagtccctagagcaatgccgggctcataactgtggattattggggtggttatgtaatcaatatctgtagtaaacgatttcattaaaggtcttgatctcctaactacgatctgtataggcaatttataccttttccaaggcttcaaaaaaaaaagaatgttctcgcttatgcaggagatatccctgccatacaaacggtgtaaagcatcaaacagacaggcaaacgaacgaggcgctgaacattgattagtaaggaggaacctcctccggttgacaggatgcatagcatcctcgtcgccattacctcttactttccatcaacactcggccaacaaactactggctgcgcggatcccagcagcctctgtccaattccccatcaacaaacagcaatggacaacccacggggcgtctcatgccacacaaaccctcctgaatcgataactgaccggacgaggttcggcatccggggatgcatcgtttacgggtacccgtctactggcggcgttctcatcaaggggcccattgaccttgtcgatattaccttcctctcgctcccacgtttccatgtagcgcagcgctccccaagtgccgaagaggaagacagattctgcaatctcctgcgacggcttggtgcgacatggtggccaagtaaagaggagtatatcatggtaaatatgggctccagggagaagacagaggaagaggaaaaggtcctggtatttgggtggccggcggacggcgtggggtctgggtgttaaggtttgcgagtgatatgcaggtgccaagggatattgggagaatgtattatgcagcaaatatggaggagaggatacagattatgaaagagtatggcgctgagtttgtggaagatgtctcgcaggtggaggagcttcgtgatacactttaagggatctcggcttttcagatgcttccttggggagaagatcttcaatatgctatatccacctattatctatgcccgatgcttatacaaaacacccccttaagtgtcctgtaatagataccttgtatacaatatatacaaggcaggtccaaggtagattaggtgcttttggaaagtatataaaactaactatctggacagattatgtaccagtaaataaacacttaaaacaacacaagtagaccatgacaaaacccgtgacaggtccaagatcaggacccgaacccgtgggtcgggtcgaaggtcaggacccgtacccaaaaccagtgaacccgcgcgggtttttgggtaacccgtggttaccgccaagaacccattttgcataaaatctccctattaggctatatcctctgtataaaactactgactaatctaaatatcaggtttatacagcatgtttgtctagtttgactacccacgggttacccaaaaactgtgggaacgaatgtctgattggttctaatgacggctcgacgtccgcctatctaatgtaaatcccgggtgatccgtagttcccgggtaatctgtgattttccctccaaaacctatgcttgctcaaatttgaggtactgtatattaaccaaaagtaattcaaattaaaataaactaaattctataataagtaggacggctggtcctcttatggccctgaatattatattctgaacatattagtagagtatatctaggtataccttaagtttgaggcgtacctctgccagcacccccctatcttgcctctatttagttattttttaataaaattaggtccctggcttcctgggatgaaagaccttctgtaggagttattattatgggtcctttgcctatacaaggaccttagaccttagtgactcggccaaggcctgcgctgtcctgaaggcggtgagccacctacaagacttcctcacaacaacaatccttctttctcatttcttctttagcagccactgccccgcgcgagccgacgagtccgtcctcacggccatcccagccatatcgcaaccgccacagccagatgtcaatatcagcaatgccggatggaaagtatcgccttgttctgttccgctacactgatgcaagaactccatgaggtttaggtgacgaattgccctctgttattgcttgcacataacatcaatcacgattgcgtccatcttcggctcatcaaccctctacatgatttgtctttactccagagcgtatactttctaacatacaatcagccaatatataaaccacttgtccagattagtggcagcccaggaatgcccgacgccttgtggttcactttgacaaatattctggctctgcaacaagcttatcaccttcttcattctctacatccttaccaaatgagtcagactcgttctctttgatgggagttttccagggattggagcttgggactatcagccggagctgaatggacgttcttattgcgcgggataaatactttcgctgagctgccgccccgctgactcacaataacacagggtctccgtagtctaatcaacatcgcagccattaggtcttcggtccctctgtcgcggcaacgatgagtgggagcagctctccggactacaaggcgctatttctcaaggctgaagacgaaaggaagcaggcagaagaacgccagaggcaggcagaagaacgccagaggcaggcagaagaacgccaaaggcaggcagaggaaagagagcggcaggagagggagcgcaaccgaccaacaacttttgaagagttcatcagacattgtcataatctcctttggcggccgctacaagctgaagcgccttctcgctccacaacgggcaagatcccccctcctaccggaaaatactgccctatacgactgcttccgtggaccgactgtgaggctagacaacaggaaatttacgaatctgtttgccgccaccttcaatcgacagaagaggacgcaaaacaattattcacgccgcttgttgcattagaagaccatggccgacgattcgcgcgtcgaccaattagcagcgaacaggatctcgagacttatgagcgactagccgttgaagaccatgtgcatgatatcatcgctgagttatgcaaaatacccaatgctcgagaggagttccagttaggcagcggagtatggttcgataatcacgctaatgctctggatgaagatgtcggaatagatgctagccaaacatcaaccgcaagaccctctagacatgaccaattttgtatccatcgagttgacagtaatacaagtaccttgctcactacagtggagtacaaaccaccacataagctctctgtggagagcctgcgtgagggactccgaccgatggatttctggcaagaagtcgtcgaacctgatactattcctacagaagagccgaagaaatcaatgtataacgtcgcgcggctggtcggatcagcaattgtccaagaatttcacgtgatgatacaagaaggtctcgagtattcatatttgacaaacggcctcatggacgtgcagctatgggtgccctacgacgacccatgcactctctattacgacctgggggaccccagtatgtacggaacaatgagtgtcggaagacttgggactcctaggactcggattgagaggactctatgcctgtgtttgatgagtttccgttcctcttgccgtaatcaagcctggcggaatgatgcgcggggtcagctgccaacctggcacactagttttgatagcgagcgctcccagatctcagcggcaggattgccacagtacccgagtgtggagcatactagctccgatcatactagtcctgagcagactacctctgagtacctaccttcatcgtctccagcaggatctcccgtcaccaaaggccgtcaagtgaccacacaagcggcctctcgctgcgcgtcatcttccgaccagcattacctagaggactcttcggattctgaggtagagcctgccgcatctgatggacggaagcggacatttagccaggttacatcgtcctctccaacccaacagtctaggccccggacagatcctcaagtgaaccaaagcgggcaatctcgtcaacatgttgctcaatattgcacgcaaaagtgccttctagggctactgcagggcagcacgcttgaccctgactgtccaaacatggagctgcacacactcggcagaagtgacaatcgtcacctgatcagcgcagaagacctagtagagaagcttaaggcgcagctagatcaagatctggatcataactgcactccaatagggccttgtgggtcttatggtgcaccattcaagattacttgtgccacatttggatatactattgtcgggaaagggacaacttcgagactctggaaggaggtgtcaagcgaggtagatgtttaccgtgtgctccagcctgcccaaggatcagcagttccagtctttcttggagctattgatttggcccaaatctacttccttcatggcgcgggagaaatctgtcatatgctccttatgggctggggtggcgagggcatgggcaatataaaacttgacaagaccatccagcgtgcaatttctcgctcggtaaaggaaatacgctctctaggtattttccaccaggaccttcgttcggaaaacatcttgtggaatgctgaactaaaacgagccttaatcattgactttcatcgatgcacattggaccctcagctgatgcacaagcggccaggctctctcaaacgaacacggcttggacatgaagaacgtgaatcgagaagattgcgtgtggtgtgagtagaggccactgtagacgggactggagatgcagaaagtcaacaggcgctaaggatggcctacgcaaggacgagcaaacgacagttgctgtgccgcagttgaaactgcaactcatgttatattattcataccggtatctcataacatgacgcatccattaactagcgagcctggacctccgctgttaggcctgcctagtgtgggggcaatgttcataaccactccccatgcatgggaatgtttccttgcttgcctattccgactttctgctcactaattgactgggagatgtctggatacttcctggtatggtgggagcatgtttgtgtggaagtctttgttgagaagaaatattcccgatcatattgccgcctgtgaatatcggctggatcattattacttctgctgggattcaggcagtgtattctcgtcgaccgctgccatagtcaagaatttagactctattcgagcaaccgtcatgttaaggttgtcgttttgacccactagggccttggtaaatgcgtgccgagacgataacaatgacggaatgcaataaaccccaggaatcaagatattccgagatcgggtcggccggcaccatcatgagggaatgaaacggagtaatggtattgtttcgcttgaagcttgaagcacaaatggacacaccgcagggttgaagattgccgccactgagatgctctgaaggtgctcgttcttttagggttggggcgagtgaggattacagagtcaatccctggcaaagtgccccccggatggcaacggaccggtgaaggcgatggcgcgatttttggacgactcacggccacgcgccatgcaacctgcagctgattgcaaaagcatcaggcctcctttttagct

SEQ ID NO: 1109 - DNA, 9805 bp, Emericella nidulans
actaggcatagtcatacacaacaaccacggttgtcaacgggctgtactagaccagagtatatggtcttaacactgccacgcacgtcaacagacaagggtatgggagtcatggtcacggctgacactgatgatgtgataataatgaaaactacatggggggcctgcttgtggcaacgcgctaaggaggagccagagagtcctgctgggcaccctcatcattattgaatggctagccgggagcttcaggtggggacgggggtcagcgggagcaggagatggatttaaagagtcagagaccgttgatcaaggccgatctttggctctggacgatcagatagcatattgactacgattaaggaggacctgtggcaaactgaaaaggcacccggtccctggatcttgacacggcctgtcggattcgacccggaaggaggaggagctcaagatccggtgtagatgaattttacgaaaagccaagagacaggtaagcgagcgatgggcatgaacatctgcaggttccaggtggaagctgcaaactcactgagattccgtcagtcacgttcgacggggccaacggcacacaggacgacgaataagcaatctcagttgaaatgcacgccgagctcttcaggagcctgcagaaacaatccaccggcgtcaatggatttgattggtcgatctatcggcggtttggctctgggttggcccttatgataatccttctgggggccaaaaatggcccttggcattcggccgcaattgacattaaacgtccttgcaacagagcggttgtcgggttctagattgagaagactaatgaatcttgctcataaaatcgaatcaccaacggcgcttctgcgtatgattggtgcggagtttatgaatgctcgtctatcttacacggccgtcacctgtcaagctccacacatgatgcggcggaggcttagtcgaagctatagagtatggatcggtgcagtcacattcatctaagcctccttgtcctcggccaccctttcgatggatcatatacagcggaatcataagagtttctccatggggccgaatttgctggtggagctctgtggttctcttggctggctggttcttggtgatcacacggccccagtgggacgaaggagtgtgacattcaagttaacattttccaaatcctgttcttgtctatctgactgcaacggcctccacggcttcagcgccgacttggctatagcttctatatcttcggagtcgggagttgctcgattctcgctgcgcaacgcttccggcggttaaagtagggtaaaggcgacgcgctatgcccaccattagagtggtggctcctctaaacgggctcctttgatgaggattatccatttctttggttttagagtcagacaagctatctacgaatcaagaacagcgggatatgttgggtcacgttcaaaacagctaggacacctttccctcgtccactaaaccccgtctcaccaggcaaacggagaacgggccattcgaatctggacacttattgtacttttgtcctcttctaaacagcagcacataggcagagcgtggataggtagtgatgggtcggttgattatggttggctgggtcagtataatttggatgggatatcttttgtaatgttgttcgacaatgccaaatgagcctgtagtatacagccaagaccacggtatccgcataatgactctcagacggcattgacagccctatcctacttttgccgtcgttcttgtagtcccaggaacaggagcaattgggttcggaaggaccccaaacgtatattcctgaagacactccaccaaaggattgaaaatggattgaatcattaatgctgatccttccaatatcacaaactatgtctacatccaataagtaacgaatctcgaaccggctacaaaggacgaaggaatttactcatgggtgaaagctctatggtgcctcccggtatgctctatagtgtccggcgaccgcgctaattcctcgtttgcggctaaccagccaaccaccaagatctctggcattatatctccagcggcctcaagacttctgtgtggtgtaaagccgacaacgtcgaatctcatgggggtctgtcgaatccagtaggcatgcctgaggagtacagactaaacaaaggtctgaaaatgcctgagggaccaagaccaagataacgatgcacataacttgaattatcaagcatgctctaattgttcgtatcgagttgactaccgtctagaaagccagcaggggcacctacaccaagtgccgtggcagccatcgacgcacacgtggagatgccttgagtccaagcccctcgataatattgggcatgttttacgatctccactcccgtttaatctagcctatccagtcctagcatactccttttaggctgtcatggcattttttagtagtgcgccattgcccggaacctggcgacaggcagccaagccaccatcttcagacagttggtagctgatggtcgatggatattcccaaggatggtacccggtgataccatcctaaaagccaacctgagctgttcaagccgtcggtattgaggacaattatttttacaatattcttttgttataacaaccgtcgcatgcttatcttttatagctcatggtagctgtatgtctcattcacgagctggggagccatcatgagctcttttttgaagcttgacaaccgtcaactcgactccaatccgcaacaaattgtcgacagaagtgccatagagtccagcagcacattgcgtcagcccaatttcttaatcagctgtccgctcagtcacgcgctagaatactccgttccctgtggcggtgactctagccgagtctcaagcaccacggacatctttggtatgtttgggacagccctaagtgtggccgcgagtgtgagtgcaagttgtaactgctcagatctatctggtggcgacgcgagcaagggacgcgaaatgaaggatgcaggcgcagagtgtcgggacacatggtcggccagatacacaggccaatggagcaggtgagattttgggcgctccgaagatgcgcaagtagttaatttggatatactagtgccacagatgttgtccatggcccgctattcagctcagtcatcagttggggttgggagtattaatacagagcgtgtccggctggcacttgtaaaaccccgcaacataccccaaaccgcgagacccctcggagccatctgcaatctgacagagcgcggaaaggatgggacgagaatgataatgttgtccggggcgagaaagatgacgatattaacgcacttcccctcactgccgctgaactgggcccaaaactaatgagtgaccagcagtcagtgctcgtacaggtccggacgaatagaggtagagatagtgcgaatgaactccagacaaacatggcgacgttaagatgtcattccgagtggaagatccgctggagaagagaatagacactatgtgctgctgcagaacagatataggtgatcgtataaagagaaactggacatagctgggtaggcctggtcttgataagctagcccatgagactgactctatagcaccattagctattcaatgcactacctaaggatgctgtccggcgcaatgataccccttgtactgctatttgtgacagtcttgccttgaaatctttattagctacgattcacctgcaacgctcatccccactgtcccccaaataccaaccttcgcaaataaagagaccgtcagcaagttaggcccgagcgcagattcgagctctgattagactgacttgcgctgcaacgattgcccagtcatcggcttgtagcggaattcggaagaactacctaagttgtgaagcatgaaggactgccattgaagtcagacaaagtattgctatcacaatgctatgacggcactactgtaacagtcacactgccctaatgagatcgacattgccaggcgattagacaaagacagcctcgattgttgggccgacggtcagggcaggtgcggagagacgatggctctaaaggaaaacgcccattattaaggcccctgggttgttctaatagaagaagcctatcactagacccagccggacaagcatttgggggaaaaagaggcctgaaatcccatcgcacaagtgccgtcccacacagaaaaaggtgacaaagtgccaacatgtcactttgagcgggatgttgctatttcctggggagattgctcacctctaggcattgctagcaggcgcaactgcgaggccgtggctcctcttggctggatgttcaaagctgtggagcagagcggttagacgggctgatcctggtgacaggctctaacgcacaggtcggttctccgtcttccttcggtaccacttcgataaaccagagaggtcatcatggaacaaccgtcccggaactgtcccagagggccggttacagcagtgatcaaatcgaggctgctccttttgttctcaacagacgggccgtaccgttcttctactatggaagaccacagaactccaaagccgcggttcttgagcgcattattcctagaagccatcttctctgtcttttctttacggctccaagataactatggccggacaaagtctctcgagtagtccaagcagggtatggcgccctcactaagcggatcctgtggtaggctatgaagccggtctgatccggggtcgcggcaggtaggagtcgtggagtttcagaaacaagaaatcaagattctagaggagtcctcgtcagagatctccgcgccttctttccatctagttagaccgatttggaagcaaaatcattccaggtccgtctacctctagaccaagatctgagtagaggagtgccgtttcaactcgccgatgccgtctggaaggtagggagcaggtcatacaaccgtcaggggagagctcaggcaggctagaagatcatccgaaaaacatactcctctcgttcacccgtagggggcgctgcccgaactgatgtcgtagagaaaccggggccaggttttccatttcatgttcggaagaatcactggcgggtttaaaggcaaaggtttccccggtcattttacccagtcgttcgatcagtcgtggatctcgaccaaaactgctatgtcggctcttgtatggcgcacccgtcatggcagtgcagtcgccgctagagacgttcgaaggagaccagatgtccacgttcaatgtcgccatcgataggcagccaccaacatgcccaaaatgctaaccggacagtctgtgctgcttcctggagtacgttgccatctcggcactgatcggcaagatgctaggtgaacaaaacattgcccatccgcccgtcctcattcgacaagcccttctggccaaccaaagcctcacaggcaatgtccttgcactgactaacaagctggaggaccgttaattaactagtcccaattgcatccctactctgagtagattcgcccggcttcagctacgtgcagacctcgtgattgggatttgagctgtacatcctcgactgggggctctgttaagccaccacttcggagcggtgaggtcgccgcatatcggtgtcatcgagggaagacaggtggtgcttcaatttactgaatgaggagtgtatgttatcgttagtgtcgagttgtccggacggacttacaaaagatcccttgcttcacgcggtttggcgtcgcgaggtagatttcagtgacaaaggaggcccttgggggaacggcttgaggcgcgctatctcgtaccgagcggtgaccagaacccatatatctgataccaagcattcaagctctcaaagtttgggatgctcctgtatgctagacaagccataccaggtcatcgaccatgaagggtataatgacccattggaagcgagcaattatggcacattcagtcttgccgcgacaaccattcatctgatgtctaggacatggctggagaccactgcttgcgagtataaggcgatatataccattcactttaaagaaaagggccacctcagtgctggagtgacttctgatgcatggtagtttaggccactcgggcatgagagcaagaggtcactttggctctgtagggcttcttgtcattacaatacacgataacagtcaggcagaaatacagctcctgatagcttaaccgatatgagggctcaaagtagggcatctccattcagcaaatgtaagagtaataccacatattctggtgagcgctacgtcttgtttataagacttttagtccctgaagggcatctccaccgtcagaccttctatttgtcaccgggttatatcatttacataatagtaacgtcgctaatgatagccgagtcttgaggtgcaaacggcactgttgcaaaccttgcaagctcgggtcgatctcgaaggcgatcacatgtttattcgcacagctcaaatgaaggatggttatggatgcagatcttccgcaggtattaccgactgcgtagctggttgactgactgggcagacaaaaagccgagtagcggtcacggcctcggtgtgttaaaccgccaggaggtctgctcaaagccgatccggctctgcattggcttggcagaaataattctaaagtaacaatatacaaatataatttcccaagatactggagttgatcagtggggccgggcacattccaagtgcaactttatgccggtacaataataccttatgccatatgtcgcttcattaccacctcatggataaactatccattggctgtgatgctcagctgcactccaatagcgtgggatcgatcgcccaatggctgcacacgttcaggagcaagtggactctcgttaaccacctctactggagagaaactggctttctcaactaacagagtcagccctcccccacttccctgggataatgagtcagtcataaaagaaagtactaagtactgtctgtgcgagcctggaagtggactaggcccgaggtctccgtgttgagcgaacccatgcatcccgagagtaagacggaattctgcagtctgcgcccacatggccacggccatccttgctgcagctctatccgtgttgcttgtactgttgagcttcttccatggagtccaccagtcatcatatagccgtgaagcaccgcagatcagtatcctaatgtgggttgtccatgcttgcgtttacgaccgtggtactagctagggcttgtttgattctgcccttctccgtacatatcattatagcagaattgctataatatgaggacgtcttttccttcttcctttatatctactttctttttttttcttattttctcccccctgcaaatctcgataaacaccatgcttttcgtttgcctattggggtatagaccaggcctgatcggcgagcttagaaggccggcaacatctccacacggttcatgcactccacttctaccggcaccgtagggactcatatctcttttgagtttgctggagttttcgatcgagtccgctagccatgttgcaaatgccggatgccgcgacatccggtgctcgccttcttgttcgggcctttagtgccccatccaatgtccattgtcaagtcactagtgattgcctcttttctagctgcggtgctcccctcggtagagtcagggcgttgaactgactctcagtataagagtcataggtgctccgtaaaccctcgaataatcgagttgctccgaaaccagttgactacgtcttgtctgtatattccttagtccctgcccaaaatgaggctcactcctgccgctgcagcagcatcgctgctcagtctctccgcacctgagttgactgtagccacggctgcggaatcatactctgcggatcaatgcgtacgtccagtgtaattttcttccaaggttccacgccagaaaggagccgctgactttcttcatctctacggatagtgcgccgcccttttcagcagcagtatcggtgacaaagtcgtcttccccggcaacgcggcctaccgcgactccgtgacctcgtactgggccgtcaatgtccaactggaaccgacctgcattgtgcagccgcagtctgccgacgatgtctcggtcgcggtgcagacactggctggtgccggcggcaactcgcgctgcaagttcgcagtacgcagtggaggacacatgacctgggctgggtcgaacaacatcgaaacgggcgttaccattgatctctcgctgatgaacagcacaatctatgacaaggaggccaaggttgcgactattctgccaggttcgcgctgggaggccgtttataagaccctggaggagtacaatgttgtcgttcccggtggtaggacaggcccggttggtgttggagggttcttgcttggaggtatctcgatttgaccttttcctgatctttcaaagcgaagaattgctaattatctggctgtctaggcggaaactccttccacgccgcgcgggtcggactcgcttgcgacaatgtcatcaactacgaggttgtccttgccagcggccgcattgttaacgccaacaacaacaccaacgttgagctcttcaaggccttgaaaggcggctcgaacaactttggcattgtgaccaaatacgaactcaaggcgatcgacaacgcgcacctctggggcggcatcaacgtcttcgacaactccaccacgaaccagcagattgacgccctggtcaagttcattgacaacatcgaaaacgacccatatgcctcctggatcggcctctggcagtacaactcgaccacgcggaaaaccctcatcagcagcccctgggactacacgaagcccgttgcgcaccctgctgccttcgacgacttctccaagatccctcgcatctcgtcctcgaaccgcttcgcgacattgtataatctcaccagtgagctgcagcaggccgctggatatcggtttgtaatcccctctcccccttccatctagcgaattaaccccaggtggacgcatcctgctaacgggaacagcgatatctttttgacaagcacctacttaaacagcgccgcggtcctccacaagacaatcgagatcctaaacaagaagatcgaagccgccgtccccgtcgcccagggcaaggattggtccatcatggtgattatccagccctggcccaagatctactggcagcggaaccagaacaacggggttggcaatgtccttgggctggaccggtttgatgagaacatgctgcgtatgattgccaaataacctgaacagattcgattgtctacatttgctaatatgtggatccagaggtgctgtacgattactcctgggacaacgcggccgatgacgagctcttccagcggctctgcagagaagccatggctgagctggatgaatacgccaagagcattggcaagtacaacgagtacatctacctgaactatgcagacgtctcgcagaacccgctcagagggtacggggatgagaatgttgagttcatccgccaggtggctgagcgatatgatccggatggagtcttccagtcgcaggtcccgggaggttcaaagtcagcgaggcgtaatttttcttttcttctccttccattgcctttgaagcgctgagaagatgtatgtactatcgatatcagtctagactatacagaatgtagacgagacaagcattgttaataatgatactcataagctacacaaaccatgaacccagtaaaattgcttcctcttcagcaggacgtatcgcaataacggctcccgtctggcactggggcataaacctcaccggtcaagtttgactgtgtatgtgagcgaacgt

SEQ ID NO: 1110 - DNA, 2621 bp, Emericella nidulans
tatatggcgaataaccctactaaagggatccggtctgaataaatggagatgaagatgaggatggccatggggctggaagttgaagcacaagcctgagctaaattggaaggggtccgtttgttatctctgtttgtactgagaggcaggcctgtggtagggcttcctgcacgatggtgagttagcacttacatgtgtgctttcgaccttgatgagttattttttttggacttctcatactggttccttattgtttagccctcagaggtcccatgccgtactcttctatataaacttctgcgagacttgagatatcagggagagcagcgatctcttagagttgatgcacactcccagtggacgcgaacctgtggataaaatatatttcctatattacacccacaggccactgctggacaggatttgactgttccaacctagatcaggcgaattttcgagctcgtataatatcccttacttacacaaggccccaggcttgctatcccaccatgagtggctcacaggaaggtcctatgagtgacaaatcccagtaattctagaaacggtgaaagtgcctagcatatagatgagagtggcctggtcccagttgtatatcaatccgcaccctgtagcagagagcaatgcgcggtgaaaatgacattgagagagccttatagctcaagatcgatccttggtaatcagttcgtgtttcgattaaactgggctctgtcattccactatacccgtgtttgggtgaaatcagctgaggtacttaggactactactgtgaaaggcgggtcttccgggtcagtgatagtagttggagaaatatctaggtctctattttaccttaggactgaaaaaagagattatctcagtaatgtaatattgaccataccgacgttgaacagagctcttttcgtcctatcagactcaacattgatgatcgtccttcagctcatgaggatccctagaactcactatgagtctccttcctcatcctggaatctgcgggatcatcctcatgtctacgaactggtcaaacactttaaagatcgattctgtactgtccacaaagccgaagaaccccagcttcttcgtttttgtagtactggttccgacagtcagtcaataccctaagcaatagaacgaaaccagacaaacaaccggatagaagtgcaacgtacgagaaatgaataggataagacgacgaaatcgccgcgtctgtgaacccaaaaacgcgatccgtatcccacaactcagcattgcgcaactgatgctcctttgcaatagccttccaggcatccttaacttcgggtcttcgcgcccactccacgagcgtgaacttgtatctcaatttcgccggaggtccgatcccgcgaggcggcagggttatacggcgtctcgacctcttgcaggccagctgggtcggtcgcaggacccagccatggaagactaaacctggcagctagtttaggccagaacttgctccaggtgaacgcacagtcatcggtagcgttgaaactctggttctgggcgtcgcgcgtcacacagcccattcggacagatagccgttcatctgggcgctcgaaatggtctgctgcgtttcccaggctacgatgtcagatgggtattcgagaggctttcccaggtgtttctggacgacggcgtagattgccagcgggagacagaggttcatggcagcatccgggacagcgccagggatccaggaagggcgggtcgtaatccagttaaagctgttacttttagcgaacgcaatgagagagtcttcttggttgtagtagaagttcggttcgaggagcacacgcgggtcggtttcttcctgggggacttgggccggacccaggtgcacgccgtagtattttgcgccgagttggaggaggaaagtcttcggaagagtgtttgaaatggccaaggctgagaggaagttgtgtagaagtttggctggacaatgtaagtaaattctgtgccgccgtgaacgcaaccggatgcgggactcgtactgttgaccctgaccaattcttcggcggcactccaaatgccgcctccgtcttttggagcaggttggatgtaggcataaaagaatacatagtcagctttcactctcctctcagttaactgagcagccaaggcatccggtggctgcaagaagtccatcgaaacatgctcgacatgcttcggccactcgccgtttggcggccgacgcgagagagcatatatcttcttccagcgcttaggagattcgcacagtacccgaagctacatcaagagctcacgttagtggtggatttggaagaagatagatcgcggagtagaaatagtcctaccatgtagtctccagagattccattcgcaccagtgacaattgcggtcagcccgttcagatcttctgggaaggttggcaggccatgatagatgtcttttgagacaattactcgctgagtctgggccatgatgcggtcttcgaactgttgctcgagtcggggttggtaactcaaggttgggggtttcatagatgcagcttcgggaacgaatattaagggccccaagctcccccgcttctcctcacctcggaaccccgggattaataatttaagcttttg

SEQ ID NO: 1111 - DNA, 6410 bp, Emericella nidulans
gccccagatggcccagttgccagggacagaggtggtcaactatatgcgctcggctgcttggatctactatcgcgtccctccgtcgaagcacctgggcagggagacagatgaggtcaatccagcctacgcggaggaggacaagaggaagtttcaagacccgcatgtgcatcgcgagtacaggaagggaatcatcaatcggacgaacaaggcctttaagctggtatgctcccctactccctccaagctcatgggtgaatgggaccagacgggacgaacgagctgacagaaagcagttcctcaagggagagaataatgaagaagcagtccgctttggcactgaacaaatggcctcgaagctcaactacgaccctgagttgtgccgcaaactgatccccaaatgggaggtcggttgtcgccgcgtcaccccgggtccaggatatctggagtcattctcgagacccaactgcagcctgagtgatagcccaatcaccaagatcacatccaacgcggtgcatactgcggacggcaaggttttcgagtgcgacgtggttgtttgcgcaacgggattcgatgtctcgcaccgtcccaggttcccgctcattggattgaacggggcaaatcttgctgaaaaatgggcagatgaaccagagtcgtatctatcggtggcgacggctggattccctaactacttcatcttcacgggtccaaactctctcggtgggcacgggagtctcgtcgaagccctgaactggacaggagattactttgtgaaatggatcaagaagatcgcgacggaggacatcaagtccgtggttcctaagaaatcagccgaggaggcattcgtgcggtatggagacgaggtgcacaagacgatcgtctggactggcggctgcaagtcctggtacaagcgcaacaagacgaacggccgggtgacggcactctttggcggctcggcgctgttgtttaatcggctcattagcgagttacgcccggaggattttgagattgagtaccggagtgtcaataggtttcggtttctggggaacggattcatggagtatgagactgacccggagagcgatctggcgtggtatgtcgaattgccggagcccttacgggcgtaagactgcataggcaagatagtataagctctttcggttatcccatttcttagctcggctacataaagtagatatataaaggcttggaccaaccacccgtggtccaggtttttcaagttttattgtgctctgactattcaccaatatactgctctgctactactattgctacaaaatgcccatcccatccactatgcgcgcctggaggaagcacaaaggcaatcctgccccggtataatactacagataattaaaactgggtaagatggagtttgctgactgcgtccaggtttgggaagaagtccccgtcccgtccgtttctccaactggactgctggtgaagctccttgcttcaggaggtaattcaaatcccacatttctacgcctccaggcctagttatcaaggcgcctgctaaaaaagaacggtagtttgccatagtgatcaggcgcttatagatgtcgaatacgatcgcactttaatgacgtctatacccttgtatgtcctgcccacttggctctgcaaacgatctctcacatggtacaatgcagggccacgaaggatgcggtgaaataatcaaaattggtgcataagttaccaatcaacaatttgcaattgtactcgaacctgccgtctcctcagtaaagcaggagtcagtagctaatgcagctatacttgccagggtatccgcgtcgccctcctcgccgttccaggctgtggtctcgcgacgtgctctgaatgcgcccgcaacctcccccagctctgtcctaatggagctcaccatgggatcgggcaagatgggttctttgccgagtttgtggctgtagatcagcgggcagccgtagctcttcctgacggtaggcaatcactccacattgcgcattctatcgacgagtcaaaaaccgacaagtcaaaagcgctatatcgcatgtatcctgagccaggtaggtaagaatactgactcgatgtaggcgtgcctccagaaatcggggcagtcgcaaccgacgctgtattaacagcataccatggcatcgtgcgccgcgctcaagttaagagtcacgagacggtctttctcttcggtctaggtggactagggttcaacgcgctccagatagttctgagccatataaaggctagggtgatcgtctcggacgtgcgccgtgaaaaactgctcgccgcgagagaactcggcgtcagagaatctgacatcgtccctgtcgacactccagtaactattcccgagttcatagcttcgcagggcataataatcgatacagttcttgagttcgttggaaaacgccagaccttctccgatgcgcagaagatcgtccggccaggtgggaagatattgtgtatcggcaccggtgaccgggtgaatgatctcgacatgaaaaacggtattcggaagcgattgagttttctgttcaactatggcggacagaagccggatctggaggagattctgacgttgatcaaggagggagtgttgagacccagggtgcagacggggtcgctgaaagactttcctacctatttgaggagactgtgtgcaggggagattgaggaccgagttgcccttttgcctaagtgatgtatatggactagtatattcgaatattagtggctatccatttacacttgccccctttggcatcccaatcccaacggaccgcgtcgtccctgcgtacacaggaagaatcgcaccggtaatccaccgcgcatgaggtccagcgaggaagaccaccgctgttgcgcaatcccatccattgccctctgttcctagcagactgcgtctccgacgggcttcacgtgcttcttcgctcatcccgttaccggacgcgtacatcatgggcgtgtaaagcatctatacccgattaaatcagccctaaccctatgtaaagcgcaagatgataacaggaagaggggacatactcccgggcaaacacaattaacccgtattccatcttctgcatgatgcgccgccatggcacgagtcatattcacaacggcgcccttactcgtcggatacaggagatggggtgtccctccttttagtccggcaacggaccccatgttcacaatactcccttttatttcgccgctgttcttttgcatggctgggatggcgtgtttcgccatcagcaccatcgagttgacattgacctcgaggcttttgctccatgattccatgtcaacagtgactgctgttcccggtgccccggcgataccgacgttgttgatcaatatatctacccgtttgaacgtcgatattgcttgggaaatgatggaggagcaatcggtctcgcaggtgacgtctgcttggaacgatactgcttggccatattgcgacgacgatcgagagtgctcttgaattatcgaaactgtcttctcagcccattctagattcttatcaacgcagagaacattgcatccatcactggctagaaaaatggcaattgcgcgcccgtttccaattccatcaccagcacagccggcgccggtgacgatggcacatttgccggcgagggagcgcgagggcggtgttgtcggaatggcgctcattctgttgacgttcgcacggtcgtcattctgtctgtccggtaatgggctctgctcgatatgaaaaaggagccggttcctcatcgttcacagcggacggttatcctcgttgggataaccggcggttagccggggaggggtaaggcacttcccccgcagttcagccggtttggagacgatgatttcattaggctacttaatatacctacagagtaaacaaagattgcatactggtagtgaaatacttgcttctatattactgtttactatttcgtggtgctaaaccgtcaatatgcctgccctccccccatacgcctacaccggccccgtcgactgcactatcgcgccaaaccccggccagctcaagggtaaaagcgtcattgtgaccggaggtatgtgcgccatactatgtactggccttggctgacggacaggggccaatggcatgggtgaaacgaccgtccgcaagttcgcggaggctgggtatgtctctcaccgaagtgatatattggtcccaagagattttagctaacaagggagattaaaagggcttttgtgacaattgcagatttgaacgttgagcgtggcgagcaagttgccaaagaactcgggccgtatgccagcaatcttcctagtatgattgctctatactaacccggccgccaggaacgcccagttcgtgcaatgtaacattgttaactgggacgaccaagtgcgtgtctttgaagctgcagtcgcaaattcaccaagcaagagctgcgatattgtcattgccaatgcggggatcagtcgggcgagtggtgacgacctgtggccgttggacggtgcctttccctgccgttccagctcaggtggtattgagattcgctaatgatggacagatatcaatgctgcacctgtaaaaccaaagctgagtatcgtcgacgtcaacctcaccggaacgctctacacatggaaactggccatccactacttccgcagacagcccgataccgaggaccgggataggtgctttatcatcaccgggagtatggtggcttggatcgattcgccggtatgtccagcttatatgacggtagcagcagaactaacgctgctgccggtaggccaactggcagtacacctgcacgaaatacgcccttcggggacttatgagagttgcgagacgaagttcgtgggagcaggggatcaggattaactatgtagcgccttggtacgtccatcccttccaatcgaggggtccatttgttcggggatgctgaccggctaatgcatgggggcagctacatcaaatccgccattcgttctccaacatacgaggccgagctcgttgccaagggcgttgaattcgcgccacaagaggcagtcgcacgttgtttcatgaggattgcaacggacaggactatcaacggtatgacttcgagacggattatcatgggttccatccagttcaatactgataatgattgcgattccaggacactcgttaatgatcactcctccctcagtagcaaaagagggcttcaaggacgtggatatggacgactatgacaataaagaagctgatgagtatgagtacttcaagcgtacacaggagatgcaattgagaatcattgaggatcggtgggttgaggggtggagtaaagcgcggacggccgaggggggtttgaagtagattaggcttaggggagtagagcgggttgtcgaatagaccggaacccggcatgtctggtatgtactgaggtatggtgatatgctgctggaccctcctgcctgacaggacctagacttcaggacatatatccagaggcatcccagataacacctttagattaagacgatatgtgactctaaccaaggacttagcccagtcgaaaagtagctttggatgatttagcgtacctcgagttgtgtctagcgatacccgacattaactggtcttctgtttgaagagttgatcaaacatgcaatgagcgatggatccaatatatgtctatctcgccgccgattgagtgaccgtttgtcgagctggagagttcagagacgacttgacaatcttctccatacgtactgtaggcaaagaagaaaaatgagaaactctcaggcagttcttggtcgagtctcgcgctgatggagctctcggaagaccagagttgtagttatagtgaggtgaagatgtatgttgttggtgaaggattacttacctcaaaactacgagtaattgcacttgcgaagtcatgagtttgtcagaagaccgtttgtacctcgcccaaatcaactttatatggctgctcatgttcattcttcagcctagcctattagtccctcgcgggtgagctgggaaagcaaagagtcaccaagatatattcaagtccgctacgaaagaagacatctgcaatctaccactatttcaaatatgctctgtagctgtggtcaatgtacagaatccggggtaatgtccggattggcgttactgagcaatatgcacgtttagtccgttgtaggggatcgaattcgctcagtaacccccggcagcggaccctccgctattctactttattgctttattgcttctagctattctcgtatctcggccgcatagtaattagcctatgccggtgacggcagtgtgagaacgtatttcccggggaagtctccggagcaaaacctaagcatgtcagagtagggcgtcatcggcaatttgcggcgaaagatcatctaacaaggatggc

SEQ ID NO: 1112 - DNA, 2009 bp, Emericella nidulans
acgtctacagaacagcgcaaccacaataccgatggtagagtaatgtctgagaagctaggtgtccactacgcgtggcgggcccactgcgggagttttccttccagcctactctataattcccgcctcgcctccgcactactccccatgaccttagagtaacgttgtaaacacaatacacatatctctacaacggtgatccgaccacttctcctccaactggacaacatgaatttcctcgcaaatgacctggaacacacacttgaagatgatgtacgtagcgtagcgcctgcataaacactacataagctgactcgattgttgtagtaccgcatggccctcacaaccgcgcatcttgagaaagaattttatcatgttcacgcgcacacagtacaagttcttgagaccgaacgtgcccgagtgcagcgcatggagcaattacttcttcgtattgagaacgaaaatttgcaattgcaattaaaccaggcaggtctggacctgaaccaggccaaagaggcagagtccggcatccgtcttgagctcgaccgcgccatcagggaacttgatcttctacaacatgtcgcccatgcgtcgtcccgcgagatagataacctccgtgtatgtgatgcatgcgccatgttttgcgacttgacctcctgacactttccatagcatgaacttgcctcgctgagcgcaattgcttctgatacccagaaactacaagcagaaaaagttcgcttaactaaagaagtatcgagcatacggtccgaagtcgacgaactcaggtctcaaaacacttcggccaacgcactccttgcagagaatcaagcaattacccggcagctaaacgcaaccaaaattcagctggagaatgagaaacgcgcgcatgaacgtacacttgccaaacaagctcaacaaaaagaggacgtcggagcactgaccacgaagctcgaagtagcacgtcaggaattggaactggcgcgtcgccacggcgcagcacaatacacggcagaaaaacagcaccccaccagtttccggcgaaaatagaggtgccgataagaacgcagtagtcttgaaagaccgtcatctagaagatacaccagtgcaacagcaagaagagtggggcactacaacaactatcaaggtccctactgagcgagccgctgaatcttacctcgaaattttcaactcgcttacaccctgagttgacgatgctacgcctggggctgtttgtgcgcaaactcagcaaaagccattttctacactccctgcgataattcatcattctcaataacccctttcttaaaccgcacaaccgaacttgatgattcgtcaatgagctcggatgatgaattaaacgaagctagtaatactgggaaagatggacacggcgctaatacgatcacgtctccaaagcagttgaagtcgcctatcccaaaacagcccagcaagctggcaaaacaggcgccggcaaaggctgccgtgaaagatgatacaaggaacgggcagaaacagatgattcctgatagtcctgatgtggaccgtagcaaccagtcttcattatctcggcccgtcggacagaaacaggcaccatctaaaaaacgcaagctaggattacagcgcgatagaaacttgtttgatgaggacgaggatgacaacacttcgcaggaaatcagaaagccgggacgaaagcttgtcggtacggggcagatgggcttagttgggaaacgcatatttactgggcccattgggttctcgcccttgaaacgagatagaagacgcttctgagtcgtataacaatagttgaccttgtagccttcaaccccgttaccgttcccgctcttgtagatgtccaatatctacttaaatgtaggtagaactgttcacctccgactgcctgtgaatatagcgcatagcccaaacttctggtagccctggtaaattgttcgattgcggaatggaaaatgccaagacttgatgtcaatcgtcgggaccggttgtctgtcttattt

SEQ ID NO: 1113 - DNA, 4695 bp, Emericella nidulans
gttgggcaccatataatccaaggcggttcgatagcgtaggcgacataccatgagcagatttttaagggaaggacaatagccttaggaggccgaaagtagaaaatgaatcctgatgcagaaaagattaagccgtgatagtacctaagattggctgtgtcgaaaaacccagctcaccgattaaggaaagatgtaccagctgaggcgcctaaaaagagcccaaagatagattcacagagtgacaccctatccagcgcctcgcaaggagagaatgaaatcttcaggctccgtcatgaagcagcgctcccctctgagaacccgagcattgaccaccgaggccgacgatcgcggagtaggaaagatgttgttccgacaaagaccacgtgactaaacaccccgcggacttctcaccgcctagaaattattccaaagcaacccagtgaccaaacaaactgcctgtccaggaataaggctattctggcacatcgcttcgttcttgcgaagaatctggccgctgatcctcttctaaagatataaatatttcgagtccggaccttgagcaagtccaaccgcacatcctgttcgcgtccttcttttagtctatcctgcattcatattattcccctccaatggcggatcttcagtctatcgcccagctcctcgcagcgagcagtgaccgcacgcaaacgaaacaaggtaagtgtctggcaaatctagactcaatatgagtgcttctcttataatttgctcttgttaagttcggtattaatgtttgctagccgaggccgctcttcgtcaacaagagagtaacccaaactttcccatatcgctccttcagatcaccgcctccgattcttatcctttagggactcgcctgtctagtgcgattctcttcaagaacgttattcgacggaactggaccgatgaggatggaaactataagctcccactcgaggtagtgggtacgctgaaacaagagctcatcaacctgatgatctctgtgccacaggtgctacaaacgcaattgggagaagctgttagtgtaattgcggatagtgatttctgggaacgatgggatacgcttgtcaatgtaagcttgactacctgattccaacaacgttcgcgagacttactccctaggaccttgtttccaaactccaacccgataacccttctgtcaacatcggcgtcctgcaggtcgcgcattcgattttcaagagatggaggcctctatttcggtcggatgacctttacatagagattaaccacgttctagagagattcggcactcctttcttgacgctcttccaggtatgtgctccacccgctgttatcccatattatacaccaatctctaacccttcgtatgcaggggctcgatacttatctcgaaacgaataagtcgaataaagatcaactcactcaggggtttacgcaactaaatttgatggttaagctggtttacgatctttcttgccatgatctcccgccgatgttcgaggaaaacatgagcggattagcgcaaatcctgctcaaatatctcacatatgacaatcaattgcttcatacagacgacgatgccgagtctggacaactagagtatgtccgagcggggatattcgaggtcctaacactttatgtgcaaaagtatggagatgagttccagccatacatacagcaatttgtggaaagctcttggaacttccttactacaatcggacaagaaacaaaatacgacattctcgttagccgggccctgaagttcttgacttcaatcgccggcatgcctcaacatgcacagattttccaagcagaaagcaccctcgctcaggttattgagaaggttgtcttgccgaacgtcagccttcgtgaatcagatgaggaacttttcgaggacgaaccgattgagtttatccggcgagatctcgagggttcagacagtgacacgaggcgacgagctgctacggatttcttgaagcaattgaatgcgaacttcgaggcatcggttacgaaggcagttttgcaatacattgaacactacctaaacgagtacgggaaatcaccacaattgaactggaaagccaaggataccgcaacttatctttttatcgcgattgcagcgaagggggttgcaactgccacacacggagtaacgaccactaacagccttatcagcattactgattttttccaaaagaacctcgctgctgacttggtttctggagatggtgtgcatccgattctcaaggttgatgctatcaagtatctttacctcttccgcagtcttatcaccaaggagcaatggcaggaagtgtttcccttattggtgaaccaccttggctcttctaactttgtcgtatacacctacgcagccattgcggttgaacgggtgctatatttcaccgacaaccaaggacagcccatcgtttccccggacacaatcagacctctagccaaggacctattggagcatattttctctttgatccagaagaaccctgctcctgagaaagtgcaggaaaatgagttcattatgaaatgtgctatgagggttctgattgtaatcaaggagggtgtagtccccattacagacaatgtgctggcacatttgatcaacattactcaaataataagcggcaatccaagcaacccgaggttctactactatcactttgagacattgggtgcctttattcggtaagtacagatactcttgagatgtttggccggccgttaattgaacaccgcaggttcgctgctccctcgaatcccgacaagcttgagcaggctctctaccctccattctctgccgttctccaggcggatatagcaggtatgtgtgacttatttcaccaaaggtgtgtgaactgacgtgatcatagaattcgttccctacatctttcagctttttgctgccctcttagaggctaatccctcaggtactttgccaacctattaccacgggctcattgctcccattctggcacctcaggtgtgggaatcaaagggcaatatccccgcgcttgtgcgactcctatcgtccatcattgctcggggctcgcagcatattctagagaacaatcaacttatcaacacgcttggtattttccaaaagttgctttcgtccaaaacgaacgaaggatacggattcgatcttctggaggctgtgattgagcactttccttcgtacgttgttattgcaagccacataatgcacgcaactgaccatgtctctagggcggcactggaaccgttcttcaaggatatcatgcaaatcatcctcactcgccttcagaatcacaagaccgagagtcttactctccgattcgtgcggttttaccacttcatgtgcgcgaatgacgccaagggatatagcgccgattttgttatccaagtcattgataaagtacaggaagggtaagctttggaatctttccttcgattggcctcaaactgaccgcaaatagtctatatgttcagctatacctgaacatcattctaccggaatcacaaaagctcgcgcgcccgatggaccgcaagaccgcagtgatatcatttaccaaaacactggcaaattccgaagcatttgcagtcaagtataagaagggatggggtttcacgtgcgaagctcttctcaagcttctggagcttccgcctttgccggctagcaaggacgacatcattgccgagcatgacgttgaagacatggcgttcggtgtcggattcacagctcttgtcacgatacggccccaggccagggatccttggcccgacaccggagccgacctaaagctctgggttggaaaatacctaaaggaggcggaccagagacatggggggaaaatctcaggatttgttcaagagcggttaggggagcaagccaaggcgatgctcagcagttatattgcgtgatattcttccgagacagaggattgcttcaaaatactagtacctctccctgattggaataaaagtcaatggcacgataattaaatatagatgtattattacggtccacaccttcgccacccgttcgtagtgagaatcggtgccccggagctctaccctggtcgttccgcagcattagtttctccctccacctccacgctctgggtatcactcgtctcttcggtgctcttcttctcttccaactcccgatacttcctccgactcttcttcaaccggctcgccttcttcttccgctcgcgctccgccttcagcgcaatacgactttgatccccttttagaaactgctcgaccttatcagccagaatctggcgtgcgtatttctcattctgagagcgcgaccgtgtcgcttgcgatttcacgacaataccggtgggtttgtggatcagttgtacggcggaattcgttttgttctgcgatcagagctgtcagcaggcgacggcgttcgcacaaacaaaacggaggcgtcgaagtaataggggtcgggggacagggagcacacaattttctgcccacccgggccagtgcccttaaggtaggcgattgttatgtcggcatcgtcaagctttatgcgtggtgggagggatttctctgcgagttgtgttgaagcggagatgggtcgttggagactctgactgagaaatgcggtgttacggaggggcgccaacgcgacgttcgaggttagcagttgtaggcgtcgtagcatgctcgttgcaaacatctacaatggtc

SEQ ID NO: 1114 - DNA, 1923 bp, Emericella nidulans
acctattgagtgtcggtctcccctgcgttgcccttggctccatcctctaagcttatctccgaatactgggccttgtccatcggggctttcatacagcttgcagttgctgtgtacgggacttggcatggtctttgaactgctgttgactattttatatttttttctgccatggcatttccctaagaaaggcttctatggactgtcgtcgtgtatatgtcatggcattcatctttaattagacttgattgcttcattactgcctaaaagtccgtatgcagtgcgtcgtagtttctggttgtaggttcttgtccattttcatactataacattgttaccgtttgagtccaaatgcgatattctggtaggtcatgtttattatcttttacttcgtttccagcttttcatcttgccaagttttgggcttaggtttaacattttaccctttaagagatcatggcatgaatatattccatttcaatatcgaagttctcctcagaatgcccctatgaataatcctgggagccctaagatagctatacataccttctcacctctaaagcgttcgcgacacctgttatataacctgttatatatccgggtcgttgtatgcagatcagaagcagtgtctctatttctcgtagatgggcgagttagctcactgccgaaagatccttgaagactcagaagtctgcacatgcctctgccactgatttcaacatgtttcgattcgatagtcaatcgctctgctgtggagtatttataatgtggaatgtcatttttaagcatagaatgatgccggcttcaaccatgaaccattattataattatagattattattatggccatacgtacctagctgtacaacatcgctacagtaatcgtacataggaaataaaccagcaactcacccatagtcgtatacgtacatcctccagccatatcaccagactagactgaaaccgattataaacaaatcccaactccagagccgaagaccttcaagcccagatcagagagaaagaagagacacaagcaagcctaaagccttactctcattcaatgcccatgcgcgcctccaacccaagaacggggtccatagccgaagcgaacgccggttcaaactccatacgccatgcctagaaaaaaagagacttaccattcggcactgctgaccccttgctttcttgatccagagcacttccaacggacgaacgagacaaaaacgcatagggtgggaaaagaatcgtgcccattcggcgctgtttcttcgtagtcgtcgttgctggactgtggacttgtgctctattctcagggacttcgtcaaggcatttctcatatgatttctctgttgatgatagctgtgaaggagaaacggatgcggaagtggaaccagttgccgaagacgcttgataggacaaggacaacgccgacatggactttggtcttttgtgctccaagttctcgcgttgggggttttctatgcctgcactgtccagcttttcagtctgacattgctgattgccactgccacagatcggcggcatgggaaaccggaagctcagattcgagaaggacaggctcaggcctggtcctgatgatgttgatgctgctccggatgaggaggatgtagacaaagacgtggacagattaaacagctcaatcattgacttgcgccgattagttgtgtctcgatgctgttttgcgtctccttcctgtcgctgctgcgcgagatacacctcttcctcttcctcaggaattgtctcctcgatgcatgcaagacgggttttggttttcacctcagaacttctccttgatgttgatggactctggcggtgcactggcacaggtggaagtggtcttgccggcagagagattttgtttgagtcggtgtttgtgtcttcaatgtcatcctcgcaattatg

SEQ ID NO: 1115 - DNA, 2489 bp, Emericella nidulans
ctttaatatagtgatgtcctggtacgacttcgccatataagagatttgagccgaaaagcgaagtttcttccttcgactgcgcctgatagtcccgcagatggctgtaaaaggcatgatggttgaagtatggcgttgtttttgacgacgggacatcttcatgaacaatgatgcgtttgacgattgactggtaatccacaattccttcactctcatgaagttccgatgaggcttccttggattcaggaagtgactctgtgagggcccccatattatacgtaccccacttctcgattctaaaggtgtcgtactcgtctttgaaaaggccctcgtcgccagctagttcttcaagcgattttagcactcgttctgcatcaccagatgacaaagacgagaaatgcagagacgatagagagggtacatgcgttgtttcctgcgccacctgcaaccctagcttggacagacaagccttcaggaagtcggtacgggccttgtcgtccgctgccaaagcctcgactacttcagcgtattcgggacctccagctttcggattgaggttaacggccgcaaatctgctacatcagctacactcgtctcgatatggtgacaaaaactcactcaggatgtggcccagtcaaaattgccgcgccatcgccaacaggacaatacaccactctcgcagcgccagaacccggattcacgttgagacgctccgcgtagctcgcaagaacctcaacgcctctatccgcatacaacggcgcatcgacaaacaccccaccaccattatagtatgaccgaaaactcgacgggattacaccagcgcttagtgcatccttcgaaaccgtcagctccgcagcccttgcgcccacctcgctatggtagacgaagcccttaaaagcccctccgcgacaaatgcctggatagaaagctagctcgcgctccccaataacctccattgttttatcgccgagctcgaactcgcagcgtttagtcccatagtatcccccggcacaaaaaccaaggtaagcgcctccgcggcgaacgaattgttcgatcctgcgattacctgcaccattgagcgcgcggcagtagcctaggtccgcgccaccgggaataacgagtaaggcacacgtaagtgtccatggctccttgatgagcatgtctgctgtaacagggattacagcataacgggaggctaggagacggcggagggtgtagaggcagtggcggacagattcgacggtggttccatctcctgagaactgtcaaataggtaattggtatatattaaaaaaagaaaacgcaccagagtagacgaggacattgaccctcttccccgtggtgctggggttcgccgtgctcgtcgccataactgttgcggggaagttgttcggatgcagaagatcggagttgactcaattctccctcatctccttcggttactatcggcctttcaacaccatgatatccaaacgagaagagaagcccaaagtggccacagaaggtgatgatgacgaaccggatgaatggtgagagttcaatttcttgtcttgtctgcctttactgtatcgtggaagctgactggcggtctcgcagggacaagcggatcttcagcaccggctgtgcaggtatacgcatcaaccattgttatctcattaaacagttctaaatctcatcacgtctagtggagcaagacaagctaaacgaatgctactgggctaagaaagactggagagcttgcaaggagcaggtcagccaccccgtaccaatcgaccctctgcagtcgaattcacatctttatccctaacaacgtctggtcaatatctggacgctaacagacaaattccaatagatggatttgttccgcgaatgctggaagcgccagggtaacgacattcgtacccagagcaaggacgcatgaactcccttcgcccaagcatgtagcgcctaacgagcgcataccctgtacaatagctagcgatacgtattcagtgtactagaggaacgttctgcaagacgcccctggttcaaattgaataaaacctcccctttgcctgaactgatacatctcaatatatcacgtgatcgtattatcagttcatctgcaacttgagacataaaccgccacagcttttacatcttcacgcacaaccccaatcccaccgccatggccttcctccgccccttccaggtcgcagaccccctccttcagcgcgcatcagcctaccggagcaccccacgcctcataacttgctccaacagttacagacacttcacccagcgctccttccaaccacaacaatcctcaacatcagcagctccaaagccaacctctcccacaccaactcttacaccagctgctgcccgcgccgccgagattgccatgcagaaaacgccaaccagcgcaacaactcccaacatctctaaaaccggcctctccgacaaaccgctcgagcttgacaacacgcccgctgagaagatcgactggacgc

SEQ ID NO: 1116 - DNA, 1958 bp, Emericella nidulans
ataattacaaagaaatgattaaagatgagaattgcaaagagataaagaagataaatcgcaaaaagaaaaaaacataagattcgaatgaaaatggaaaccatatatataaagaatataaatagaagtactttaattgaaacaagtgtgacaataaaatgtatgacatttagagaaaagagttttggaagaacatatttaagggatacaaaaccaaacctgtgggaaaaagatgcggcaacgcggttataatcatttagagaaatccggaatcaaagaaaagcaaagaatttattggccaactggcaaagaacaactctcaagcaaagaattgggcgggtagactcaagcacacggagtgttaagtccgaaacggcaccttacaactagactatttcgggtagacgcactttggtaaaagatcactgctcccactacgaacccggttcgcgtagaaaattcataaggtgaagagggtatgggtaaaaagggataggttgccgggtccttgggaagcccagacagccacgcgccgttcccgtattcggttttaatatcaaggtattaattccaagctccaagttggacgaatgcttcaccaagacgtcactgggcctctaagcctgattgggactagaggatagacgcctgctgctgagtggtttacttactttaggtgggtcgcccaagccgcccaattctggcgacgagctcaagagttcgctcctcctccccgttctctcttcttttcattgaacttgggctgtaccggcgcggtgacctggctgtacgtattcttttgcaaaaccacattgcctcgtgaactgatctctgctcatccagctccctccgactaccgtccgagttcgatctatacatacctcataccatacccgcttgacccactagcttgctttgatcttctttcacagaagacaagaagagctgcactggacaaaggctgcttcatggacaattgtgggacgctgaacggtctgctcacaccttgagagaccagtttgcgttccatagggttccccagcctgcttgccgagagtgaattgactcactttgaagatacaacgactaagcaaccaagaaacacatttatgcccccaatgggaagcctaccgggatgactgacaacaaacactcggaacatgcgccctttgtcccaccctcacaaccatcacctgcgataatgccgtcgggaaacagctggactatggatgaatctactcgcaacagactgctcaagaagtacaaaactcaggtggcctccggcacttccacggtctgcgctactttagctgtggtaagtccgcgcaaagacgagatactgggaatactgctaatactgctgacggcgtagactgctcttgaaaatgttaaaactcgcatgcaaacgtgcgttcctccggtctggtaacgaagcgccagtgacttgatcaggcacaacttgcaaaatgtcttccagtgtatacgatacctatggcggaccgaaagaccccgtggatttgctgctggtatgacgggctggctgctcttttccaggagaggctgacaaggtccaggtgctctaccacctcttgccagcgtcacggcggtccgggtagtgaattttaccacctacaattctgccaaacaccgaatatccgatttttttgagcgcatgacgggccagtcccctttagagctctataaccgaccgggcagcgttcccaccctctcgacgactttcacctttatcaccgcaggatgctttgccggagtagtaacctctcctcttgcctgtacgcatgtctcttggtctggcagttctaggctaatggtctaggtccgtttgaactggccaaaaatgtggtccagacctctgttctcgtatcgaaccgcgcccaagcatccccgaatgccgtgagagatccctcgttgcgccacaagccgcgtctcgggaccattga

SEQ ID NO: 1117 - DNA, 2601 bp, Emericella nidulans
gtaccgccccttgatggatggcattatctttgtcgaagagatcccacgtacggcaagcgggaagatccagcgcttcaagctcactcagatgaacacataccgggagattgttagttctctgcttgctcggtttcgcggcgcgagtctacagagcgtgggaattatgcatggagggcgtattgccgtatgatacgacgctggttttcgtcatttccagtatgaatttacgaccgccacgcactgatttgacaaaacttgttcaacttggagttcgcttcgtccgttccttaacaatctgcatggcgcatctagtttttcactactgccgggctttgacgtatgcttttgctgggccttttttgcttttttgcgcgctacgaccggcgtcttttggtgattgggagttggagattctatctgagattaattatttttgggattatgcctcattccttgataagatttgcgccttttgcgttattttctgcgactatgatagcgcttctttttgatttgctcccaattattcccctcgttctggcgcttgcatcacagtttcggattgatcgcttgaaaaaagctttcagtgtcattagttcacgctccctcgataccaactacaatacccattgttctaagtctgcatgcaccatgctgcttttggaaggcaggctctgtggatcacgccataaacatgaagattactacgccagtcttgcattttaccgctccagggccataaaacgaaccgaaaccgaccttgatctcggcatagtcgagtcatgcgccaaaactggtaggctcgactcatcgccccgtcctaactaagtcggttctttccaattcagtgtgttttaagtggctccacgtagtctcgtaaacctgatgcctgcatagcaagacagccaggcacttgggtccatgacctaagcttaccctaccccttaccatgggccggatagtatctgtactctgtacctagctggagcctaataaattgaagattacggcccatatgcacacgtacgcaatcactaataataggcttgcagtcgctgctggcgctgctggtgctattgttaggcttaccgcttgaagctcacttacgattacaaggctcctttccgcgcggggtgtaacagccgatatacctcacggccattaagtgcgtagtcagaaccagggggcttaaggggcccctaagctgatatgctatacttggcaaattcccagccaagcccggcctttgttttagtccgcacaggccggtgtactctatcgattccgcgaggtagtacataacatgtagtggtgatttgcggtacatgcagcttaccaagcataagcattctgtaagcccacagacggcacgcagtattagtggtatttctgaatatgctacggagcagatcttccgcgtctggtagcatctgggctctggacaaatgacaatagttgatttcgaaaaaggaataaatgatcagcactacgggcgaggatcgaaagtcaattccaagacctacaatcgtcgctgcaatgtattccgtggtccggctctcctatcaatcctgcggtctaccaggaaaaacacgctgtaaaacgagcttgacgcgcacgattcaatattatggtgtcttattgctgggagttggaacaggagacgggatatttacaatgggggcgtgctgggcccactccataaactagcagaaggtgcggtccgcgggaaggccctccgctctccgtactttggagtcacagccgtaatgacggcaatcagccgaaccgtccgaaaatgcagctttgtaggatagctgtaacctgtttgcggttcgagttatcaatcgtggtttcggggtttgacggagaagcagtggtgtcttgtcccgaggtgtggtccacatgcgtgattgggcccttctgacgcattgtattcgatagtcggattgggggccgagactcgctcgacaatccggcgcttgaagtcgaactgtcgagaacttacaacgtagccgaggtataatgttgatttggtgggaagcagtgttgtgcaatttgtcctgaagtgctcttgatgggagtagatctctacatagtgagggaaatgaagcatagtctaattctgatgcaggctgtcatcccgctggtaatcaggctcgggaggagaatcaggccggcgggtgaacagaggcatgggtcatggagaccccgatgtccagacgggatctcgctgcagttgcggggctcttgtctcctcaaccacgctgatcagcaaagtatacgatcggcgacggcaaaatcctatgtcactagtcgcatggcccaagcgtcgtagcaacctcgttgatcgtagactcaaagccgacaagggaaggttcaagaaaccatggccatcgcgagacaatggatgccgggtgggctgcaattcggtgtagatgaggatacgtcgtgtgacttgggcttcaagctagactccaagatcgacctggacaatccttcgtgttcctgttcgtacagtacagtcgatattggtaatagatcagcaaacctgggtttcctgggagggttctgggagtgaggtttgaggttttcttgtccagc

SEQ ID NO: 1118 - DNA, 4203 bp, Emericella nidulans
  unsure (1)..(4203): unsure at all n locations
ggagcggaaaaaatttttaaaaataaacaatggcagcaaaagggtaataatccaaagtatccaaggatgaaaaaaaagaaaacatacggagataaaaaagagatgtgatgaaaagaatgcgtgaaggatgcagaagtttactccatcaacaccactaaatcttgaagagactcttcaacgtcatttatgatgtctggaaaatcactaggtgattctgcgccgtggctcttgacccatgatgtgacgggctttccctttccgagcatctgacttacgacagttttgatgcgttcgtcgacgattttttcaattatacccctatccataaactgggctgttatcgctgagatttgttcgtctcggatcttgacaattgaaactggcatgcttgagtcttctaagaaacatgtcaagacttttgcaatatcacgggcaaaggcagccgcttctgtctctgagacagcatcagcccaatacctcagcagaataccctcgtatcctcttgcgctttcgacgtttaatgtcaggggatactaagatcttgttagtctgaaacctcccatagagggttttcaacctacctcgcaaggatcgtgtgccttctgaaactcatacgatatcccagcaatctcggtcttatcttccgaacggttctgtatggatatgcacgtgttgaataacggctctcccttcctaccaagggcatgctgaatttcggcaagtgaagaccgctggtacgcaaggctggcaatatgatcttcctgtacagacttgacagtacccttcaaagtctggttggtatcaaatctgaccctgcaacacaaagtattgatgaatattcccaccgcatcctgaatcccggggacaggcaagtcacggccagtagatggatagccgaagcagacgtcatcagactttgtgtggctccgaagaactatcgcccatactgcaaggatcaaattggcaaatgtgatcgaattagcctcgcagaagctttgaagtgcagcaaagcgattgaacgcaaccaagtgagttccaagttgacgagctccattttcactcgcattaattggcaggtgacatggaggcatatcagaaagacgccgcttccagtattcgagagcttcagccgttggctgttctctgaggtatttaatgtattcgctgaacagcggaccgggtccgggcggatgttggttgctgtaagctaacgccagttctctcagcagaatggaagtcgaacctccatcaataataacgtgattcatttcaagcttcatcaggacacgcccagtggatgttttgcagaggaccagctgatgataaagattcaaagacttgttgctccgaagactgactgcctcgagcttattcagagcatctaaatcatcgcactcaatcaagactgtcgcatcgctagcttccttgagcactacttggtcaaaagacccttcttcgcagcagctgtcaatgaaaactgttcttagaaccggatgacgaacgacaaccgtggaccatgctttcttgagtctcgcgagatcaaagctacccttattcccagattgacggagctcgaaaatagcattgaagatatactcgtgcggatctcgaagctgactgaaaagaatgccttcctggactggcgagcatggatatatatcttccacctggcgccaactttctaatccgaggcgcggaagcacactcgctgtcaactcctctaacccatggtacgttataggaagcagtgggtaatcactcagagtaggctgtggtgcaacgtttctgaacttgggtaattcgacctcgagcacgcgtttgcactcagccatccaagcttggattcgggcctggtggcgcatgttgcggttgtaagtgaaggaaatatgtagttgctctttgagtatcaacgcagtgatttcgaagagagagaatcttggagtctctgggcccatgtcgctcgctgagtccattgtttcagcactaaatacatctccgtagtgctggaaggttgacccgccccgctctagttgttggagttgaccgaggtagttgaataggatctcaagtggtatagagaacatatgagtcctgtctgtgctgtcagaatgcaggacgttgtgtgcgaagaaagcacgactgtgttcgctaattcggcgacgtgtgtccttgacttgcttcaaaagctcaagtagatctatacatattagcaatttggtgggataggacaatcgattatcttatcttacctgagcttgcttcaacatgcagtggatttaacgtcgtgaaccaaccgatcgtccctgaaggatcggagtaattccagggctcgcgcccgtgtccttcattatagatcgttggtgcatccctgtcagggaagacgcgattgaaggagtacataacagcagcaagcaaaacttccattgtttccgtcccaaggatctcatgaaagtgcccagagataaatgcagtagcttgcttgtctaatgcgaagctgtccattttaacatggccgtaattgttgggcgctcggctcatgccccagtagttgaggtctgcttgctgacaggggatttcgatacttttgttgagtctcttgctttcctcgaattgcacgttgcaccaggacttgaacgataatggtacgtcagaaggtattgagccggtgtcaacaaagtcctcaagttcctgaaggacaatgcgccaagaaaccacatccacgcatatatggctggctaccaggaacagaatctgctctccatttttgtcgaacaagtctgcggcaatcacaggccctctctgaatatcaagagagctttgagtatccgcaattatgctcaacatattgccagcattctttactggatgagtgcagaacttgtaagatgaatcaacctcctgcaatatgatcagcttcgtactataaggtaaaataaatggaaaagaaagatacgcacatctgtgattctctgccgccatgtcccgtctgaagatttactgaagcgtgctctaaacatggcgtgtttctgaacaacagccctaacagcatcctccaaaacattcggctccgtccttcttgcaagacgaacagtaatactctgattgaatcgccccaaagccttcggcaaaacagacgctgagcggaaaaataattcctgaattggggacagtgggaatagactgcctgactcctttacgttcttcgttggtaatggtttggtaccacaggacacagcgagctcttcaatcgacttagcctggaggatgcggttgagaggcaaattcagtccacgtttgcgagcttttgacacaaccgccattccggaaatactatctccgccaagatatatgaatgatcgacttggatcgactttgtttagcggtagattgaggacctgggcgaatatatcccgaatgatcgcaggagtcgcgtctccctcgcgctcacccttattttcttcttcaacgatgacctggtcgacattatcgtagtcctgcataattcgatcataggcagatttatcaatttgctcaagccaggtgcaaatccgtttcctgtccagcttcccagagacaagcatcgggatgcttttgaccactgcccaggcttgtgggaccatataaacgggcagctgctcttcgatactcttctggcttgtcctaatttgtcgatatccagtttctagcatgtccttttgactggcgagctcgcaagagcccgccatgatcgtgcttgactccaccgtaagcgatttcaaagacaaaacagcaaccaacttctgccgtagggggccttttgggggagtattacaacagcattccgaatattcttcgttgcaagcaagcgatgttcgatctcgccagctccatgcgctgccatgcagnttaactggggatcttggcccctaggaccttttgagcgcagggtataccaacaggacccatcttggtatcttttgggcaggaaggcctgaagccctagcccagcggtcgtacgaaaccccctgtctcaggggcctcatattccttcagactggcctccaaacccccagggtccacggaagctgcagcatggtgtgcaccgtaggggcgcctcaccagtggaaatggccaaaagtccccaaaaattttgtgcttctgaacctcgacttttccagtgtcttcatctctcatcctattactctttaaacacttcttcctctt

SEQ ID NO: 1119 - DNA, 1454 bp, Emericella nidulans
acacgagcgcgccattcctccttagttagacctcgttcacgcgagtgagctcatccgactggcggggaatcagtcatctcgtcccagtagcccagaaggttggtgtagtccactcgcatctgcacgggttcgctgtctcgcttgggcttgatcagatggaagttatagtcaatcttcacctcgtagaccgggttctcgatgcgctcgacagaccggtgctccaggtgatgatcaggcagctggaagtcttcgtctgccggtttcatgtatacaatgcgggcaaacgggccttctccgatatggtcagggagcgaaatgatcgtgtcttcggcgccgtcaataaagatacgcccacactcccgcgaccgggcagggtagttgcagtagacatggaaggtttcctccgagtggtcaaagaccgtgtcgagcgcggtctggttcgtggtcaggacggagcgcttcactctgggaacatcccgggaccgccgaactaccgtctgcgtcgttgcaaagtcgttgtcaatggacccctcgggcccgtcgagcatgacgaagccgtatgcgtcgctgccgtcttcttcgctggagtggtcagcgtcggcgtcgttgttttgatactcatcgctgtatttccagaccacgtccgatttcttggggtcgttgtagtacttttcccacagatacttgggatccacgggccagttcttgttgtatctggtcggcggatcacagcaatacgaccattctggatctgtacccggagggaccgtgaccccgtcacagttgatctcgctcttggacccggccccgggggccggtggtggatcgagggcgccggcaaccttgacctttccagcagaacaaggcctcggcttgcagacgagatcctggatgtggtctgcccagtcgcctcctgtcatgtcactctgttgcaggctgtttgtccacgcgcagttgctaaagctctggtccgtcggacagcagaggccgctcttgaaccggtcgtggagggggctgcccaccgcgccgtccacgggcgagacgtatgtatctgaacaccacggcgtgccgtcgggcttgtcccagcggaacgtttggtagtaatagtccgctgggcattcggcgggagtgtatggcatgagcgggccctggcatccggtccacatgcagtcggagaacatggcggcagaatcacagcagatgtagcgcgctccggtaaagcattgcccttcgcccatggcgtcgagcgccgtatcctgattcagcttgaactggttactgccgcattttccgtcgcacccaaattcgctgcgctctggagccccgttccacctgcagttcttgggcatggccgtcctttggacagcagatatggcggtaccaccctccgcgcaatctccattcaactctctgtttcctgctggagcggattgtgcgctgtgtaacagagaggt

SEQ ID NO: 1120 - DNA, 570 bp, Emericella nidulans
tgacgcacggcacgttgcatatgagttctcaccctataggttttatatacatactgtcacaggaaggggcccctgatctgtcaaaagtgaaaaaaatgaaaaattggcattgactgcttattcccggctcccacctctgtctgtttccagttagacaagcctgcttttctcattcgtcttcccaacgaagctagggcattaccggtttctccagctcgctcttgtagcgttttatggtattctaagtgcgttttatatggggtggcgcattgctttggtgtgttctggcgtaaaggtggatttctgtcatcttctaggtcttgtacatattatgcgttataatatcttttcccagtcttagttctgatattcatcaaatctggggtgaagagttagaatggtactaagggctttgaacactaatggttgcagtgcagcactttactgtaggtgtctctatgtcaacttgcaaatgtcaggatcatgtaatcaattcttgcctcaggccacatattccgggccagtgacgaacccggagtcagcttcatccgctaagctttgtcgtccagc

SEQ ID NO: 1121 - DNA, 2350 bp, Emericella nidulans
gttgatgtgatgacagtgcgctgggttatgatccgcggtgggagagttgcgcggtcaccgagtttgatttgagagaatatggttaggatcgcgaggacgccgaaggtgacgaagagccctattatgcgaccgttgctccacgcgtatttgtttccgccccattgcagtgcgagcagaaggcagatgatgcaggggatcagcaaggcagcgccgatgaagtcgatttgcttgatgcggtcgaggagtggagtggctttgctggataggttttgctcagggagctgcaggataaaggctactatagccatcgagacaccgccgatgggcaggctagtaaaggtcaagtgtcagtgaataatggttgaatgccgtggtcgagcgacatacttgatgtagaagcaccacctccaggagacagagtcagtgaaggcgccgcccaacagcggtccggcaatggatgcgatgccccaaaccatgccgaacataccgaagacgagcgggcgtttaggtaggggtactattcaggtcagaggattcagcagtaaacgggatggtctaaagcaacccaccacatagtgcaatgatgaccagcgcaccagagaaaatacccgcgacgcctataccagcaacggcccgtccgacgataaggacggtactcgatggtgcgacggcgcatatcaaggaccccagctcaaagagaaagacggcgcacagaaacgcccattttgcctatagctgtcagactaagcagcccatgtgcctctccaagggggtgaaagagggtgagggagaacaaacactgaatatcttatagagccggccatacgacggttgcagtgctgtggaagtgagaaaatatgcactgccataccacgcaatatcctcaatgctcttgaattggttcgtgatttcgggaatggctacccctatgatcgtttggtcgagggcgacgagaaagacagacaggtataacccaaggatgatcacggcaactttagcgaagccgggatactcgggctcatcggctgcagcatcggcggccttctcgtcggggtgcttttcaatatccattatacttgttgaagacttgttcaggggaattgggtgtggcagtctgggggatatcagattgggactcttccaggtgcctctttataaaacatcatcttcgtcagttgaattccccataggtagcctaattccaagcagcaaccggtgcacggagtttacagacccgatatttccctagacggagagtgactcaggtctcagcccgatttcgtggttcggggccatcattctcgccgaatacgaggaggatttgactctgcaggatccgagtggatttgcgctctgccgtatacagtctagcctccctcattaacgttagcaagctgagctgtctgacgtcttgtgaacgtactggatggcgccttccacgaatcaagagggcaggagatatgccacggagctgatggagtcatctcggagaatacagccttaaaacccttaaatccattactaatcagacagcagcctcatagacttttaattaataataggctatatattcattccataacgtcagacttggcctgatggggcagctagctgcgttatgtctagcgcagcaccgttagcttcagctggaccggaggcggagcgcgtgagcgcctctcgcaggaccgctgtcgaattggcgacctcattatgcgcgcctatctggcccatgattctagccatttccgccgctaaagagcctgcagttagattgggcttgcgttcgggtgaccggtcaggccgcgtcaggctcgacacgtaccggtttttgggtctgtacactcttgggtcttcgttgcgcgcgttgagtgctgtgtaatgcagcgtcaactctactcgtggacgtctagtgttctcgtatagcttcagtcgagaggggatgtcattcactgttgttcccatcggcaggaggaccgcaagggaaacggcgtcctcgattgccatcgcccctccttggcctagatctacagtatatagtcagcaaagtaacaggaatcgactgttaggcgatacacacagggctggaacggatgcgccgcgtccccaatcagcgcagcacgctccatcacatagcgcggcagagcctccatgtcatacagctgccagaccttgagatcatcgccagcgcgctcaacaagctcgcgcaccgcaggacaaaagtcttcaaatccgttgatcaagatgcccttgttgccggccgcctcgtagcctgcacgtatctgatgagcgtgtgcacacatcctaaacaaggggacaataccctctcccagtttccccactttagccgttg

SEQ ID NO: 1122 - DNA, 507 bp, Emericella nidulans
cccccagttgagcgaacagattgcaagtcgcctcagcgtacgattcgggaacactctgctcgtcttcgccgtacgaggtcgtaagaactgcgggcaattcctcgtctggaaggtcaagaagataatggagctgttcaagatacggctcattgatggatatatcctcgtctgtcccggtagccccaggcagaaacggtgcgcgacctgcagtagtataatatgtcgcaaatgtgttgtacgccagcgagattgcgtattggacgtccaaactagcctcggagctagggagcgatgagttctgcagattgaggcctccgttgatggagacaacagagaagttggcttctgtcctgtttggcgaaaactgatgcatgaactggtggaagtcactgtagcgtgcatactcctccaagtaaccggaaattccaaggcggttgcgaacatctggctttgcgttcgtgtcatagagccatacagctcccggagacagtcaggcgtgatggttgt

SEQ ID NO: 1123 - DNA, 739 bp, Emericella nidulans
agcaaagtgagcatctgcatctttacagtagtacgtttgcaaaaaataaacttccgatacagccgtgctccatattctcatagagagctaactttacgcgagacttcaccatcaatccagacctgagaacaatgtggaaacagagtgcgatggtctatgaaagtgatgatgaagccttttcatagcgtacagtataccctaggggaagctctgcctcccttcacaattcgctcacaaataggctgtcatccactttccactagctatccaactcaatcccgcagtccacctggcgatatgcggaagtgaggcgaaagaccaggtcagtgcactcagggacactgcaataccaacggcgactatggcgaacgaatatcccgcctggacctttcggatttcgaagtctgaccagcgagggaagatggtacgagcccagtacaagtacataggatctgggtagatgaacgtgttcttcttcgtgtgagggtccatccaccagctctggcagccactgttgaaaacaagcccctggagcttcctatggacccaagcaaggtcccgctcctgagccaacggtttcaccatgatagagtctgctgacccgcctaaaaccttgcgtaggagtctgcacgaatagttgatctgacattccgagtggaagatgacagaatgttgaccagtagctgcattcggaccgtagaggatgaaaaaattcggagatccggtgaccacagtgccc

SEQ ID NO: 1124 - DNA, 2447 bp, Emericella nidulans
ttcagttccctgaactgcagagaggagcaatatggtgcttaattatatagacagggatagccccaggagtaagactggttttaggggtcccataaaatgcccatactttcacccacttcccaattaggaataatccaagctcctcacgggtcgtatacaacgcggtaaacgccttgacttgacgttaaaactatacagcagggtttactagaaaacgatgggcatctaacttatggccggatatttgggtcagactttgtgagccatagtccgttgaatgtatatttactatgggtcatcagcagcatcctcatattctgtactgagaacgacttgctacaatcaaacgcgagatcgatcaaaagatacccaaatatctttcccttgaccaggtctggtcggctcagcgttagaagattacgttgcaaagttctgagcttcgaatagcttcgtactagctagattagaaaagcggaatttacttttacactagtgtgcattacggggtatcatatatcgccaaagcttctgacatgccgctgtataagagacgatgccaagaagacgtctgtcgctgaatgcagaaagtttgctttaagtcccgtttaggtcccactagttcggtgtatattcgttggcaagcagctaaggcctagtggctggaatgatacaccatgtttttatctcggccaatggtacctgagtgcattcatgattttattattgtgttccattccatatagatcgaaattagcttatagtaggtctattcaccgtcaatagggcagcagctcgcagccaacacatttatcatggacaactcgtgggaaagagccaggcacgaatgaccgacagtatgccgtatgagcatagtaaggatggcgaagtaggggtacgcctgcttcatattgcgtggtggctaataaaagccactcgttaccacacccatttattgcagaacagaccggcctgtacatgacgttgaaggaagcaccaatgaacaatgtccgtttggcggtgaccttgttggttctccctccagcgaaaaaaaaagcaattaacgtatatcgatctttgtatgtaagtagcgcaattgtacaagaagcgctgctccagctggcggtatcattacagtggctggacaatggcctacactcatgttttcacctgctaccagattaatcagggcagtcaaggtcctaacataacgcagctagtccaaaaacaattttctgaataaagcacgaccgggagaatctggaaacgcggctgagtaacaagaacgaaggtgtgaacgtgggatagacaacaacggggcagcgaacttcagtttgtcccaacaaaagcataccagagccattacaatcatgatattgtgatggaaagcctgatatccgttttcatacttcagaaagtgtaccaatcaattgtgcggcatggtgaggtgtgtcaagatatgtctataagcatgtcatgctctacatctagggcacatccctaccggagacgatagtggaatgatcctcccaatccacatcgttattgccgcgagacgaattattattctcagtggaactcaagctttgcaattattcatccgctcattttctggcgaccgttcccaatttacagcccctgaacatctctcagctctatttccatggggctatttgaaaggaaaccacgactcaatacttaaaacagatttagcgaggaaaatgtgtagcttggcaagtatacgcaataaccgtgccataagcagtggcaagcgaatcttctcatgttaaactatttagtacatgttagggcctataagcggttcaatatcttcggctatatctattattcagactaaaagcaccaacttgattttgatcgatggcaagaacaactctaacataaatctcactaggcgccacacttgttggctaaaagttcaatcgatccgtcttcattgatagcgacatagtctgctttgccatcgccgctgagatccgcaaaatagacattcttgccggagatcccactgacaccctctgctatgacgccccagtcgtcaaagttccgcgagttagggtcgtctgcgacgttgccggtgttgcgataggcgtggacggctcctccgtcgtaaaggacgaggtagtctgctaggccgtcacctgtgaacatacagtgttagaagcggttttgttgtgaatgtaataccttcttggttgaaaaggtatctgggtggcttcataccgtcaatatcagcaaggcggaccttgcttcctgggactccgttgactccggccgcaaaaggcccagatagcttctgccagcttctcttagaagagtcttgatttagaacgcctgtgttcaggtatccatcgatgccgccaccatcatacaacaccagcaaatctgctctgccgtctcctatatcgtgttgtcagctgagaatggca

SEQ ID NO: 1125 - DNA, 3421 bp, Emericella nidulans
aaactgttcgtctgcgccgttggtatcccacctaaatgggcagtcgatcgtctccacgagggcggcgtcctctacatgaacatgatcggacaccctaagcacgctctcaaagctgttgaagtcggagcggatcttatctgtgcccaagggggtgagggaggaggccacactggcgacatccctaccgttgtcctgatccccgccgtcgcagagcttctccgaggcaagatcagtcccttcacccgtagtcaggtcgcgctggttgcagcgggcgggatgtacaatggccaatcccttgcagcagcactcatgctcggcgctggtgcagtctgggttggaacacggttcattctatctgaggagtccggtgcatcgagagtccaccagaaggcgctgcaggaagctggtttcgacgatatcatccgcacaacgatcttcagtggccgtccgctcaatactcaggccacgccgtatatcaagcgctgggagaacgagcgcaagcaggagatgcaggacttgcagggcagaggtatcattccgttggcgcatgacatggataccaagaaggacgacgatgaggtcctggataatgcgcacccgatgctcatgggtaaggttgcgggactcgtacgcgagaggcttcctgctgcgaagattgttgagagtatggttgaagaggcagcggcattgctggagactggagggaggagtgtttccaagctgtgatgatgaccctagccaatgccctacagtgacctgttacactacctgtgtaatttctcttggaatccaatatactgagtctccacgcaatcgtcggttcctttaaactgaaatgtgttattcatgactctccaagatccttcaagcactggctatgtatgtcttttatgtaaaaaccgaactagtccaaatctggatgagatcagtatatcatcgccttagaagtcaggcaaaaaatgtcctttcatccaacttgatcactcacttctcgacacatcttcaattcttcctaccatccatctatacgtaccagaatggacgccctcacatttccctcttctgaaaccccttttttagagccttacctcccaaaaccaaaatcaaacaatgctgacctccctttcacaaccctcacattcgcaacctcactggactcttctctagcactctccccagggacccgcacaattctttcaggcccgcagtccaaagcaatgacgcactacctgcgccgccaccacgacgcaattctcgtgggcgtgggaacagcagtcgcagataatccaggcttgaattgtcggattcagggagttggaggatacggaggggaagggttacagggccagccgcggcccattgtgcttgatccgtctgctaggtgggagtttgatgagcaatcgaaaatccttcagcttgcccgggaaggccgtggacgagctccttggattattacgggctctggagtggcagttcaccaggacagaaagagtctgttggaaagccacggagggaagtttatctcccttgatgttactgaagggaaagggtttgactgggcttgtttgttgcggtgtcttaagagggaggggctcgagagccttatgattgaagggggagggtcggtcatcaattccctgcttgagccagagtttcagcacttgattgactctgttattgtcacgattgcccctacctggctaggccaggggggtgtggttgtctctccaaagcggcgatttgataaaaccggctcggcgatgacggcgtcgcgactgaaggatgtgaaatggcatccttttggagaggatgttgtcctctgcggaaggatcggacaataactagaattgtctatttgctgtgcaatttctatggtctatatgcatacgctatggccaattcggcagaaatcaatctcaaactggcacgcccaatccagcaaggaccctctttggcccgacctgtttccattgtcccaattcctcctcgctcgtcaaccacacggatcccagcatccctggagtattcgcagtgataccttcaaaggcagcattccgcctgggtataacgataatccactctctgaccaaggcgacattatgagggatataattttcattgtcctcgagatacccccggagagactgcttggcctcggcgagcaattccctgtatacctcaaaaagcttcttttgcccctctggacttccgagctcaacgtcacggagataacgaaggaaatatttgtacggcacagctttgttgtcattctcgtcatctgggaatagtctcggcggccgcggcaatacctgcagatgcttatgctgcctactagcaccacccgtcggcccacagttataaatgacaaattgcgacgatgtatcgaacaaggtcaagaccgtgcaagcagcactcagatcaactaggtccagtggctcccgttgtcgccggtacgagtcgcttgtcagtagcagtagttgcggccggaacatgcagaacttgttgactacgagcaaatgcgtcccgtgaatagttgctagaagagtggctgggtcatcgtttgctatatcgctccctggtccgaaacactctggtttctcagcgtcaggctcttcatggccactaatgggatctccgttctgtggcttcctggaaagcgaggagcttatgtggaactcgagctactctgtatcagtacagtgatgcgtttcccttgaaatgagctcaccgcaaacccgtcataatcgtactggacggttgtgcgcggcccataggatattttcttccttgcaacgaggtcatcgaaggtcgataatactgcattatagctgatgcctttcaccatgcttgattaagttgtttctctgcaccggtaacctctgatattcgagccagatgcaggattttccacattccaccattcagggtggtggctgcttgtggcggagttactcccccgcaacgtcatccatgatgttgctgcctatatgcctcaggccaataaatacttcaaaaaagcaagttatacatgctggtctttgtattaggtgtgcactgccaaagctgaatgtgggctgcctttacctataaagagccacgcttgagttgtctctatggaatattcagaacaccccagccaatgctctgagcacccttcaagaaagacaagctttcacgaaccatggcttgacgacgagtgcatattgaataaatcaagcccttcccggatccagagcatgacgaccgctggaaaacgacggaacacatccacgttaacactccaagtccgcaccttgaaccaagcctttgcctttgcatatgcgactgagctgggttagaaaccctatttgcgttagcgaccatagccgttggtacaccccagcaatgctccggcatacccgggcacctttgatgagaaatg

SEQ ID NO: 1126 - DNA, 1260 bp, Emericella nidulans
gactggttactccctggtgcttcaaacattcatctagtccgccttgaggaggatactcacttctcctgggcgaccaatccacgccaaatcgcccacgtttgttcaacaatcgagaaatttctcgccagatattagtaaagtgatgccaacaacgtatgcataatgaggtggatgtaatccagcaaggtcaggttcggggcaggattttgtgctgtaactcactttacgtggatatatatctttagagagacaataatcaatcatacttcaaataatgaaacgaacctgctcattgcaaaacatgcctaagagcacagcaacccagcagagggtaatcatgaagtaggtagctaaggatttctagttaggggacagcccggttctgtttattagttgttattagttttcattttaagagttatgcagtgagctgctacttatacgtttatacagggtggcaaggtactggcttatatataaacaacatgtcagcccttattattactcatgtcttacaagcctgctagggggaaataaagagtatcatggcaataaacagagtatattagtaaaatgatttaagctatgcctatcaagttgtggcagcaggcatagaaatcaatccccgggggccagatgtacccctgccatggaaattgaattgcaaatcattggtttccaccacttaaaatatagtacgtgcgccgctggggaccggaacatcttcattgcaaagattgccccatcgtcgacctacctacgcctgcgtcgacgtgctcggaacccccaccatcatttacaattgacggcgacaacaatccggaatcaatagactatacaggtgccagctagtttggtcagcatatttagagatatgcagaccctgcggtgttacagtacatatttgagaagagatttatcacgcctgatgaggcgagcgatagcttctgaagctagatagatcaccatcttgactatctgcatttaggactgactcttatgcaagatggtcgccgttaattagttacttgccagaagctggacatgggaattttctccaagagacaaccgcctgggagcctcgcagaatgctatgtcttgaataatgtagccaccagcaaaggtggctaacagtatctgatagtcagtttgattagcatatagtggtgtcaagctgcaaataaccgttttggtcacggcacaggggtgaaatcgtttaacatgagaacaaagatagccgatccctttagtagggttatt

SEQ ID NO: 1127 - DNA, 2124 bp, Emericella nidulans
catgaaaggcctcagtcaagtatttcagagctgaccgtgtggcaccgggtcattcatccaaagtcagtacgtggtttacgtagatctgcgtagcctcttttagccagtaaacggctattggcgcgtagaataccgcagagtaagtggtgctgcacctgaacatgagggtatcgcgcaaacactatccgaggtcagtgactagatgttgtgtggaaagggacggacaattgtcattattggatggccgacgtggccgcctatgaatatctagcttactaaatgatgaataagcgagctcgaccccttaggggcaggcgatgccataggacagtatgccccgacactcaacaagcgcctgttgaacaaagctataggatccacggtttgtggtttgcttccttgcattctctgatctggatttaatttgagctgggcttcattcttgttttatttataaccagtcgagcagagatgaagttgcctttgatccaagagcaggaacccgtaagctatgggtcatctctttgtcctgtgccggatagggtttgtatccttggtggctcttgattatccagccaaacaagggatatatgtagattttctcatccgatctttaccttcctattaacgactggtatttcaccacaggaaaagacaccgactgttttgacaggaaatggctctacggagaagtgaacgtctccgccagaagcttcagccaaatgcagaatccctgccgccaacaaagaaagagaaacaagcccatgaacatgtcaagatcctctcccgtctactatttatactgcccactgacattcatgtctagactgatcacaacgcgaacgagagtcacaaattatcagcacaagcagcagcactcgaaagcgagcagcagcctgtgatatccaagctccagaacctaaggtcctggtaactgaaagagactacacagtccagcactggcttgaccacagaagaatgcctggaatgccacaacttaaaggcagtatatagcaaatattagtaaataatactatcaagcaatcttgagcagataatacttatccccaagaataatataagaaatctcatcctcttattctttcccaccctagctgactatgagtagacttgttaaacccaacccacgaaacccgccccaacccgccccgacccgccaagaaatgggttgggttagaccttctaattatccatgggttttggatatttttggctgccccaaagcctggcggacaacccgctgggttgccaagatatctgaataggtatattattgtatttagattatattttcttacttagatggtttataatacagtatttaaatacagtattgtttagctatgcagatcactgcttattagagtaatgtatgcataactaggttattttgggttatttgggttgggttagaattatttgctaaacccatgggcggtttactgttcaggtaaccaccccaaaaaccgcgtgggcggatcagctaggcctgaaaacccgccccaacccgtggtttaacaagtctaatcgacccgtagggacaagcgataccagagggcagtgtgccccgacatcttgaatgcgaaatgtgaagactaaatccaataactagcctgatatagctagtctctaaactatggctgactaacatacagggagacaagtactcgaagaatggggagactgcgtacacttgcacatctgctatgttaacatagacctagacactctgcaaatgggcggaaaaggtccaagggagtcgattcagtattgaggtaagaactttccgcaagcctgcttatcagtactttcgcttactcgctcagattcgggaagatccctagataaataggctatatacgactgcttatcagttggagtacccagctacccaactataatagctatggaaactccccattgaactctctgagactcagtcaagtaccgacactgccgaaacttctgagacagcatccgctataatgtccactttagctcttccagcagacttcaggtacgattaggctgcggcataaccgcaaccgcggctatgagatcgataaccatcaccgcaattgcgtgtatggtcatgagatttga

SEQ ID NO: 1128 - DNA, 3025 bp, Emericella nidulans
ggagggcacaatcagatgcatgtactctttgccatcttagccgaatactaagaagctatggaaaatgctctcggaaggctggcggcgcggagtattatccttttccagtgtgtccagcattggaggaatgagatttgcaaggtacttcttaaattcaccctcaagggacttggctatcgcgtccacaagcgagagaatggtcgcttgaacctgatatgacgtgtcccagaattcccgaatgacctcaattatttcaggaagaaaggctctgatgtgctgccgcacaatattgacaaggattgccatttggttgaaataagattcgagccggcttgagggtgaacctcgaatgacagaaatgaaaccaggaatgatctggccaaggaaggggacacacttcaagccaagggtcttaaagatcgtaacaatcgcgtcgatgacagcagaatgatattgcgcaagggagttctcgcgaagtatgttctgcatgagagtatggataacaacagttgggtagtactcttcattggaaggggcaaggccttgcataataagactaacgtctgacaccacttgtacttcgttgatatggtggacgtctggtgcggtttcgcttatttgctggtatttataagggtccagtgcacctagaattcctagaacttttatcgtttccttgcgaagcgatcctgcctgctccgtcttgatgataccaataagcaccgccagcagatgagggtggtcggtgtacgggtcgataacgtagcctgagttgctggctatctggcccaatgttcgcaaagccgcttctctcttagcatgagatgaaaggtcctgcaaggcatccagaacgattggcatcagcttaggcaggtaggctttcatatcgctgcccccaacgcttgcaagttctccgacagctttcagtgttgtggaggcgacgccgtgattggcatcaactgctttcggtagcagagtcgtaaccatagggtcgacgtacgaccggataagtttcgtggcattcgaaacaaaaaggctaataagctgtgcactttcttccttctggcgagcagtgcttgcgaacccaagtccagtgagcaagttcaccagcaacttccttaggggagggaatacgtaggctgggttgacactggaaaggcggccaattatgcagatcgctgcctctctgacagcgaacacttcatcattcacggccaagaagaggcatcggatattttctggccgtgcaaggtgccggtcaaatttgcgatccaaggaccatagcacagtgcgtctaatctcaggatcagggtcgccgacaccaacggtcaatagcttgtcgatgacctcgctaacaacctgtattgagtggctgctggtctgattgataatggggtcatgcacaaatagctggcagcaggtaagagccgcagccttccgaatttcagggttgtcgttttcaacatagtgaatggcaacggcgcgcacaaattgcattcaaaatatgaccagaaaaatcgaagcttcccagggtgtggagagccagcgcaatttcagcgtcagaatgcagttcttgcagggtgaagtctttggcgaaagacggcagcggaggtagcctgctttccggacaacctagggggcgaaaaggcgtcccatcaagaatcaggctaagcatatccagcagctttacttgaatcgtgggcttgattggtggaatataatgagccatatcaacaagagcctgtgtcagggattcacttaagccacatgcaaagatgggatcgaggagcgattccatgtatttgctgagagcctgcccaacagccagcgagagcatactaatacactcaaacattggcgcttcattaatggcagctcgatttttgctgccaatcattagcgtcagattaaggctggggggatatataaaaataacaaaagggaaaagaaaggttgggagtttatacttacgctttcagggccagtccttcgcggatgtaaacaatgataccatcaaggtattgtgcaatagctacacccaccgcatttgcaatctttccgatagctatgaaagcagcattgcgctccttgtcctttttgagctgggcttgaagatacaccatgaatctatgcaggtatgtttcggtgaaatcaaccggagcgtaggaggcaagaatgggaattgtgagaacaacttgcgtccgaattttcgggtctcggtggtccttgagacgaagcacgatttcacacgcatttcgataatgttcattcatgaacatggctcctttgaggagaagttccttaagaaccaagagtgatccatggatccagtccacattattcgacttcaagccctggagcgcttcctcgtatattctcgcaaaccatagctgccgaacctgtatatctctcgcagcaatgatttcgaagcattcacttactgcttctgcagcagtctctcggataagtaccttggggtctctcagagcaacccagatgagttcgaagatctgaggaacgaacccgtaaagaagcgtgggcgaccctttagcgagctcccgaataaccagcaccgcagcaaaccgtcgaccttcttgtcgttcagactgaagccattccagtgccgactgtatttcactctcaaccaattctgcagtaagggcaccaccgggcttcgccaggcgaccaagtgcccgagcggcgtagacaagtacggcattatcgctgctgcgcagggcgctccgcaaatagctggcgaacctcgttgtcttctgcgcattgtccacgccatcgaaatctattagtcggtcaagagctaggagaccgccgatcctttcgtgtgcatcactgccggggacaacaagctgggcgatgcgttgactaacggcgttatagaattcaaagaactgctcgggaggcgcagctatgagaaagaaatccggtaatcagcactcaactttaatggtgaccagagaacctaggtaggcttgggattgcaagacctttttgtaaggttggagcagct

SEQ ID NO: 1129 - DNA, 3429 bp, Emericella nidulans
acgacacgagacggtcaatctatttcaagacacatgctgtttttgcaagactagagcattgtatcagacccctccgactctttgcccatgggtgccaggtggctgggaatatttgccgccctcaataatgtccggacgacctcctcactgccctgtatcttattgaacacaagcccccatagcaactccaacgtgcgaatgtatccagtcgggaggccgcgcttcttcggattggctctgtaggtacatggtcgcgaaagagaggcgcacgtcgagcatattggttgagctccgtcgcatttatccttcttcgatctgcagctatcgcaggctcgagagactcgttggcgttttggattagacgtaggatcttcggccgtggcggtcggtctgccatcctcgtcgaccgcatcggttaatcgccgtttcgacctggcgttaccaccggaggtttggcgggtatcgctactcatagtcgatacaatgatgcgcttaggtgctcggagcacatgctcatcttcgacacgggaagggagatgaattcttttccggcggctggtaactgcttccccggagtttgaatgtgcagggccccgccctagctggggatcgcggatatgtccgacgattaatcaacgggagcaaagcgattaaaatccttactcgtccaagtcagataccatgcatgaagtaattgaattagatcatatggataaaagcgatcatgttgtgggagatggaagagagcggagaagaggagttggggaattcggcggtatcgcttacccgctaccatgacaatgagaaacctttaggcgtccgctcgagcatgggttacttaccttgtgtcgtaaaaatcctaagtcaggctagccagagagctagaacgcttttgcccaccggcacccagctaaggtaacgtggacatggacggtagaactggacgctcagcaaatgttggccccgactgcaagccggagattccccgcgggggaagcatatcgatccaattgaattccgcataaaccgtcacttcaattgggaggttttttgcggtgctggttcgctggggtaagaagaggaggatggcctacggcagtggaaatcggcatttgggttgagtggttagccgagcgaggcatcaaggcaccgagcgtcataaactactttacggagcaccttgttgaacgatgtgcgcgcccatagattatgcttggaccaggtcatcacttcattctgctaagctgatgggaggtgcaggtgggtcgaaataaccagcactatgccgaagacggacacctcagccagggattaggctttgtttagacctggttgatattacttgaggtccttggtctgagagagttaaacagctactcttggtttcaaaaaagcgatacttattcatccgggtaactgcttggagtaggttgttccttaagactgctagtgatgcagacttcggccctggtaatgataaaacaagatattattgcacgctcagatcgtttcaaaataatagcaaaatagcaagaatggcatgttcagagtcaagtagatacctgaaaagcaatagcacagcagtaactgaagagacagactagtggcagatataggcagaagcaagcagtatccgttgtaagagcactttcctcgatgactgcgagtgcaggaatcagttgttattctggttattcaaaatccgtaggatggccaagaacagattgaggatatcaaggtagagcgaaatcgaagccgcaatctcctcctcaacatggtagtggcgcatgataagctgggtgtcaaccagaatgtagcctgagaaaatcagggccgccagactgccgtagataagttccatggtgctgccgtgaggaacaaaggcagccacaaatccaaagaggatgaggaaccacagtgcaccgaacaggtatggcatccagttggtgaagtcatactttgtctggcatgcaaagagtgtgagaccaacaaacaagcccaaagtcaagatcaaagcctgcaccacgatccgaggctggtaatatgatgtaaccacactgatggagtaggcctcaaggatggtgaacgcggagaggaacaggaggtttgcggggtagcttttgcgcttccagtatgttacgagtaggaatccgaaagcgccaaagacggataccatcatgagccagacgttgctacggatccattcgcagtaactggggctgaagaatgagatggagctcatgacggtggttaggagcagctggacggtgctgtttgaatgaggactgatcagcaagtggttctcgacgtaataagcagttatactcacaggatcgcatagaccttgcggatgaactgcatacggatgggcagagtgccctccgcgacggtgccaccaaactatagccattagatcctgacaagatatgttaagacacgcagcgcgatgaacgtactttaaagtcatcaggaacgttgtcgtcctcgctgcgaggcgtaggctcttgcgcagtagcctgataagaaggcggggcctgcgtgtagtgctggtcctcgaacgaatctcgctgaggagccggctcgtatctggcgttagtcgccatgaaggtgatgttttttgataaatgtatttgaatgaatatgtaactagacgcgatgagatagcttttagaatagaatcgaagctctaggatggggggaatggcacggctctatgacatccgcgacagctcaccgcccaagtgggtcctgtcatcgatttcgttctgacataatcagtccagcaaccactctcatacttgcttctctttggaattcatttgtgttttcatcaaaaatggcgagcgacttcagtttacgacggcagtgacatgcagcttactgagatccatctactgtagaaacaagttccgtcgcacttgaagggtgccccaaccaaatcccagcgcatggtttctgtagagtattcccaaccacatttagttcaaccaagaatgagactgtgccgtgttcaggttagtgaaaacaattgcaagtcttatggacccaaagagaggctgccaacagtatattggtcgtcatgcgtgattattgacaggtatggtgggatcttaggtaacgaataggtagttctgagcagtagaagccttaggcatcgactcatgcttccatagccctagccacttatttcgagatcagaccaccataaccccatatgtttatagacccccatataaaagtaggaagtctacagattcgatcttagattttaatagcatttctctctacataagtaaaggtttttgaaaagattaaaacttacctggtaatagcttatttacttcgaggaaagtatattttctgatcctaaatcaacagctaaccaaccaagtacatcgcagcagctccttaagaacagccttcgcccct

SEQ ID NO: 1130 - DNA, 3369 bp, Emericella nidulans
tcggactattgccacatcctaaatcgggaagaggttgccctgaaattgatgcaattgcgggattaaacctcctccctgccagccctgcccaaatagtctggcttctggccaatccccggccctggggctggacccaaaggaacgacctgcggtcttagtgggtaaacgggccacgttctgctgatcaaagtcaccatcatgccgtttccgtcgagctggagcagttgcgataagaacaattcccacaggccgatcgtcttttaaaccgccagtcccgtagttcgcaatctaagaggctcctctcctttcgcagctgtcaagccacacgccatgctttgctcgcgaagtacccagtccctacgcttgcaatcccactcgaccagcttgaccgagtcataatccctccctcccccattgcacgcttggtagttgttttctccgtgtcaacagcttgtctcggtcatgcacattgcctttctgagcaacccggcctcgggcgagctcaacgtccagctcaccacggcggagcagctcgtcgcccagggacacaccgtgacatttctctctgcagagtctggccgagtcaagattgaccggtttagagacgcgcggccgccttgcgcccaagcacggattcgcttcatcagtttgggtagcggtcacactgtgaacgatgtgtatgtttccgcatggcccaaccgttgaccagccggcggccaattaactgacctcgatcgatggcttagcacacctttcatccaagaacgcatgcatctcatgcggagagtccctggcgaccccgtcagtctgcagacatgcattgagtgcgcgctaggtccagcggaggagcacgcgtccaccgcaatcaaggtgcgcaagcacctggatgcgcttgagcctgatatgagtgagttggcgctacaaccctatgtgctggtaactcccggctgacttgccagtctgcgttgacgctctgtcgccgtcttgtataaccggcacccgtctgtcaagacgcaagttcatactcactatcccctgctcgcctgggctcagtgccctgccaggaccccttgatccgcatgtcgtcgcctggaatcgtcgaggatcctggggcacgttctttgagagtatgtcattatctctccagccgcgcaggccaagatgacgctaacagaagcagacctttacctctccctcagcgaatctatccacagccgcatccatcgagaccgacgcgacaagcacaaaatcatcaagcgtctagggctgaagtcgtacggtgctacccgcgactcagcgcacttcccgccacactgggaggacgacaaatgcgtagcgggtatccacttcaacactcccggcatgatcgactgccctaaacagtcgtccaaatttgttttcgtaggtgctggtgtatctaaagagccagagctactgacagcgacgttccctgaactggagtggatggacgacgctgccctccacggccacgacgttgtctacattaacatgggctccatgttcgtctgggagagcgacgaatttagggcatgtattaagggattcgaacgtgcgcaccgaaacatggggggccgagtacggttcctgatcaagatcaacgggtgtcctcgcagtcgccacactccccgccactccaccacaataaccacgggtttgagccccgatcaaaaagaggtcaagttggaagacgaattgccaccgtatatccgattgacctcatggattcagcaccaacagtctatctatacacaccgcgccctcaaggcctttgtccaccatggaggcggcaactcgttcaacgaagctgtgcatttcgccattccacagctggtactttcgcaatggctcgacacgcatgagtacggattatatgctgaaaaattcgggcttggcttgcgcagcaggaacccgccgcgcatcgaggccgatgatatccgcctcaagattgagacgttactcgggccaaagtgggatgaatataagagcaactgactgatcctagaggatcggagagaatctcagtatcaagggcgcttttaaaaagtgacacctcaagtgagtagtaatgggaagcgtgtgctccaaagtcctcggctttgttaagcggtacggtctggtattcgtcttcttcttgctcctccttggggggggtatagtccttagggaacgtcctgaacgcaccgatgtctacctttcccgcagagatcgtacgttcgggatcaatgacaacagcaacaaatggcccgctcatttgctgcatatcctgcgtagaaacgtcaatgcccgaaagccagcacccgtagccagggtgactgtggtaccaccccactgcgttttccatcctccctgcttcccgacacgactggagatatgagaccatatactcgtttgcttcgtcttgcgcgttaactcgagtctctgtgccctccacggggaggcggaaggcgtctgttacgacgaatgtgttggggaggatatagccttgcatcagacccatgacttcgagcgaaccgccggagcgggcgtgcatgaccattttcaggagagcgacggcggagatccgaactgatttaaaatagtgagggtctttggtccatggacgggtatcactaaggtatttgtgggtttcctcgtcgtatctgtagagggagtctcgttggggatcaatcagggtaacagcattctctagctctacgagacgtaagcatcagtggatcataaactgaaagacctcattactaaccccaggatagttgagcagcttgcatgatgattgtcaggtggggatatccccgatgacagcgaggatctgagcgcagtaaagctaattatcgatttggagaataagctcaaacaggcttgattatgcgataataaagctgatcaagcacgttctgaatcaaagtaatgaattgttcatcaatagtctaatccaactactatcgagaggtgctggagctgttgcggagaagcatcgaaggcggtggggtagagccggcagaagcgggcggggcaaagctgagtcagcggttgcctgagagattgcgatcagatcaacaaatccttggaagcggatctcagtgcggcgcaaaggccagcaacacctccaagaaacaataataataatcctgtatctgccccctctgtcccctcagctccctgcctccactccactcccttgccgtcacgttgctgggtgcatataagctgtgcgagtccctcatcccggaatctgtttttcattgttgatttgtggtttcgcgtggcattcaccttgttgctctcttcacaggcgcattgttgcgacgtccgtacatgactgactgtcagcgggtcacatctcggaga

SEQ ID NO: 1131 - DNA, 5009 bp, Emericella nidulans
accaagtagattggcgttggtgtaacttccagctatcgaggttgcacaataattacccgccccacacgttgcctgacagctcgccactgcagaccttactcgatggtagaggcactaaccttgccaatatgtatttcttactgctgaggaagtatgcagaggtgtatactcaaataagtcagaagtagacgatcagggaattgaaaaccaaatcgagtcgataattacatggagggcgccgtctcatgacagcgcatcgacacgcgcccgcccatgaagccccccccgtgataaacagggccggcaacggtgttcccgttaggccaccgatttggacggatggggatgagaacgtgcagataaagccggaagatccatggccgagaaaaatattacccaggactaagtgatcgccaatatttcgcaatcagataaatatactgcctggccctcgatcttactcttactctataagtactctcggtccctgacagtctttcactgatcttggacgttcggcttccgccttgtttctgctcgtcttggtctttctacagtctgtctacagtctgtctattagtctatctgttagtctgtcgttgtctatctattatctatctattgtctgtcgattgtctgtcgatttgtctgcttgccctgcttgaggcttccaacgggtgtgaatcagggttgtcaatcagccgctttctttcagcgccgcgctttgcgctctagcgcatgttcgtcgagatcggttatcgattccggtgcagaacaatacagaagtaaaatttaccagcttagtcaaacagcatcgcatcattcactccatacccgtcgccacagcccgtgccgataaaaagacccatcgctgagtgacggaaacggctgttttggaccctccccacttcaattcatatcctggtgggacccgaagatcggtgctcagtgccctatctgtgtcatacttttttttttcccttttttcgctttactccgccagccttggttcctatatttcagctggtccaccccccttgtgagtgcgatagcacctctccccttcgcaccgtttctgttggtgctcatactttcttgttgctgctctgagtcgccatggcgctcagcttcttcagcggaggcggcagtgcaagtcatgcaaagtactttgatatccggtgagtttctgccgtctcggaacttcggtccttggcccgaactctgctaatccgtccctccgctgtctagactcgacgaggactacattgtttttcgtggaggtgagcaagaagccgccagtgcccatctaagcggaaagctcgttctctgtgtgtcggagccgatatctatcaaacatattcggttgcatctcactggcatctcgcgcgtctggtaagtgcagcattcttggcggggttacttcggtgaatggtctgctgacaatggatttcactagttggcatctcccatcgagctctgccggcggcgggcgcaagaactggagggagcgcgtattctacgagaagacctggaaattcagagacgcgggcaagagtaagaccgagattcttccggcgggcaactatgaataccctttcgacgtcatactagaaggctccatgccagagagcgtcgaagggctctcggatacctacgtcacgtatcgtttcaaggccgaaataggccgcaagtatgcgaaggacatcgttgttcgacggccgctccgcatcatccgcaccctggagtctagcgccctggaactttcacacgctatggtttgtgattccatcctcggtatgacggtcacatgcgctgacaatcacagtctgtcgaaaatatctggccaaacaaaatcgagtattccatcagcacgcccaccaaggccgtgattttcggcacgagtatccgggtcgacttcaagctgatccctctccttaaaggacttggcattggtcagattatctcgcagctcatagagacgcacgacctcactctgaatccggaagatccagatgcgatccgcaacacttacaaaactacccgcaccataatcaacgatgaacataccatagacgaggaaaactccttagaaataatagacgaagctgcggaagggtttcagttctcgcgtacgctcgacctgcccaaaaccttgacgcgatgtctgcaggatacagacaccagggggatcaaagtgagacacaagttgaaattcagagtgcaactgctcaaccctgatgggcatatcagtgaggtacggaaaggatagcctcctgctgtatggatgcgctaaccacagtacagttacgggctactttaccggtctcgatattcatctccccgaacctcgcgattgatgacaacaacaaccttgtcgattcaagccctcagacgacccaaagagcgcttgatgatctcgctcagcaagcgcctcctttgtatggggaacaccagttcgatcagctgtacagcgaagttgatccttccggttaccgcacccctggtcctggaagtggtcctggtacaccttttggcacgcttagtcgcaacctatccgccgagaaccttgcatccatgaatgctatcacccacaccgacatctccgcttcagccttgcaccatcgcttggtaaaccttgatttgcgcggacatggtcgggtatcggcatcagaacatgatcatctcggtgttccttcagacaacgggcccccctcgggctctaacacacacggctccaacacccacgcacccggaagcccagaactttcgcgcagagcctcagacgaagatgtccacgacaacataccctcgggaatggcaacaccgttcatcccccactctgctgagttggagacgctcagtcgcgtgccaagctattccaccgctgtccgttcatctgttcgtccacatgacagcgatctgccagattatcaggccgttgttgctgaaactgtccatatgtcagccccccaatccccccagcaagcgcacatccgggggtctggtactggtcgcggatcggactcttattttagcgcacccatggatttctttcatcgacctgcttttctccattcccgaagtcatagtcattccgacgacgaacgcaggattcgtctaacgcaagcacggggcagggcttagactcttgctttctattcgacacttcatggtgacctactacggtctaacgataccacgtgctcctgaaacagatacccgccgccctattcaacggcccgttattgagcgattctaaccaccgctgttccattgaagccgggattccaccacatataatattccttcgaacgaccacgttaccagcgcgggacgctgatttgcatatatttatagaatctcctaatcttccactcaacaaagtacccagaggatctcgtttttgtatctatattccaacatgttcctctgtaaacgcgattgttttgagatcagggaaggtctactggcgttttaacatagacggactggagtggaaattatgccaataaaaagggatgatggaaatcaataatgactccttgctatgaattaagtatcatatatgaactatggatatgaagggataagctataagattgagactgctgcaaggtctcggcagtagacgatcccccttgttgacagagccatctagacattcttgcgtggttgtcgatcgacatattcagcggatctgaagatcttgccgcagaattccatttgcgatctggcaaagccacatctactggtgcccccctgattatcggggtgtaaaactagccaacctcgatctaagcctgtacctgaagatggttcccgcagaaagagcgtcgatccgacaacacagccacacctatggacccctaagatggcaatgggccaatgctgagctcccagctgtataggcacctaattcggcacttccatggcgatcatgtcgtcactagcccaaggcggtgaactgcccctcctgatcacaaactcgaccttgaccgtctgcatcattgggaattctttgggatgccctcgacgtggccccgatttgagctcttcattgttttggcggctgagtacttcgcttctctcctgatctcgacttcgttggtgcttcaccatctttatccttctccggttctccctttactttccgagttgggccccgacccacccgtccagtccacttggctgctatcataagaagccttgacccggccagacttcgaactgctgagcaacatcaattatcgtggctccggcgctgcccctttccacaggcaccactggttcctcagctatctcctgtggctaaataatccgccatcttgataccttaggcccaattaatatcgtccagacagctccgctacaacgatagtcgctcaatatgtcggctacgtctagtccggtggaggcgaggcttccgacccggtccaacaccttgcgtactgtgagtacgggcacggagcgcagggcgtctctaagcgacgacgaggcgatccctggaggtgatagcaatgaggtatggcgctactgaacttgtcaatcatagagtatgggtttggggaactaacgctgcgtctgggtagactacgaacctcctcgtggagcggcttcgtgcttggaagcatatgtgcgggtacctggaggattatgtctccgttactgccaaagtgcaaaaagggttgtcgaaggattacgagaaagtcttgaaggtctgctgatctattcgtgatttgtgatatatctttgtccttcattggatactgattaggaggaattgtagacggtcaacgagccgctgaaggagggtcaccatttctcgcagagtgcgggtggagttgcgtcttttttcgaaaacatccgtgccaacactcaggtatgatgtcgattgggatgtgaaagggtaggtgctaatatggagcctaggggatgattaacttgtatgccgacggagagaaaaaccttaggaactctgtgcttccgacattggagaaacttcacaagga

SEQ ID NO: 1132 - DNA, 1156 bp, Emericella nidulans
agaagctgacggatatttttggtgagaaatttgagttccttgcccacgatcctcaacggatcgactgatatcccaggaggcgctttgggtagacccttgaagagcgtttgggctgctgaaaccgccgcgccaaagggggaagcatcttttcgacgagaggggtgatatttgcggttttggaatttggattgacctagggagagatcattgcggaggcattgccagcatataggtgtctggggtgtgaccggtgatgcgagtaccagcttgccagctgggactgtgcgtgatttcatgctcaaaattagcagcccaggaaatgatagccagctatttaagcatacgcatgggtggaggcgcagttgttagtcaaacgagagagcaggcctcccaagtccggaggaaggaatagtaactgtggacgtggagttcgagtccgcaaagctgggaagtttttctccggcgaggtcggccgccaatcgggccggaacgggagcgtcacttatcaaccactccgattaaagccaagctactaaagtacggactacagcatactactacctgttatcggtaaaagaacaaagaaacattcctgtgattatggggtaaaatcgaatcctcttgtctttgctctcacgtagcatctaagcagtgggggaaattgcaatatgctccagcaacagctggaaagaaaccccgatcgcctcgagacaaagtaaacggaaattcgacaaagagcatgtgaggcagaagaattcgcatacgtgaatgatgcgcaggggtccaggccttagatggcatcgaagtccccaccagcatcttcatcatctatgtcgccttcttggatctccttggcgagttctctctcacgttctctcgcctcctgcgcgcttttcagctcgaggcgatgctggttcatcggaaatctcatcgcctgtatatcaaagaataagaagattagtcaattggatggaattgaaaatcattagtgagactttaccttaacgctctcgtcatgtaggcccaagcatgccctaatacgttcatggaaaacttcgccaggctccctggtagcgtatacatctccaacatccttgcacatcatgaatcctcgctcatggtccaagcttgcttcaatgacaccgtcgtggcttgc

SEQ ID NO: 1133 - DNA, 1850 bp, Emericella nidulans
cacaaatcatgacatagctatgttgatctgtgccttatataatggcttaagatttgcgagaagataatttccattaccacaacgagcatacgcactaggtactaattataagccaacgtgtcttcgcatgaactcgtacccgtccacgacagcgctggaacgcatgctgattgccaacaaaattggcctctaggtcaaaacaaatgtagcccatcacgcaccatacgcaagtcagagtccacgccacaagcctgcatcttatcatgtgtccgttgcgcctgttgtacgggaatcaaatcatccagagtaccatgaatcaagaaggtaggggctctgtacgaccccgcagagatctgggagaacgggcagactttctgaacctcgcttagaattggttcgggtaggacgacttcataatcctgcccagactcagcagctcgggccctgtagttgcacccgtagaacagtactggtaacgtttggccggtccagttcatgtaaagcgcgatcctgctacgtggatcacttggtgccatccaaccccccagagctcgcttgctgggtggagggttgtacccggaaataggcgcatcctgcagcgcatccaaaggattacctgtctggatgtcagatgtagagacgtcgactctatacgggaagttcggtttgctccagaacgggtcagtgtaatccgtagggctgtagaaggagagaattgcctcaggggccgaaacgccgcgcgcaggtgctgtccatgccagcgtcatagctaggtgaccaccagtcgaccagcctacggcaacgacattgtttccgtctggaagaatgtcacggcgctgaagctgtagttgaggtaatttgttccgcgcccaggccaaagcatcacaggcatcttgcatggggccgtctaggagtgatacctccgggcaaagtcggtaatcaatactgacgggcaagaaccccatgtcaaacagcattctgacttgttcatggtgtatttccttgcgcgagagcattatgtggccgccgccgtggatgagtagggctatgtgctcaagttagctcctgagtaccattgagccaattgcagttatataacctaccgattggtctttttgctccgctacgatccgtcttttccggatagtagatatccgcaaacaactccaatccgtcccttgagtcttagagaaccgtttgctcatgcacagtgttgcattcggcttctcattcatcgtcaccttgcagggcatagataggttgagtacacgacgctacgataagacgcagaatatccgactcggcagagtcgttgtctgtccaatctacccagttgaatccaagcttgccgtaggttgtggtcccagagacgctcgtgagccaaagcatgcgaacgaccatcgttaaacagccaccagccctcgagaagaccaaagacgaggtcaaaccagaacaaattcctcgtcaactcaatcaggcacaaaatgccttcggggcgtagcaacctccgaatgtttgtgcaggaagtgatcaaattccgggtggcgtggatacagtttgtggatattatgatatcgtactgtccctgtaactcaggtgaaggatcattctcaatatctagcgttgtatagcgcatgaaatcgtaagccttgtatcgcttgcgagccaaggtggccagggcataggagatatctgtgaatgtgtactggtataggagggcaggtagtgctgccagttcatcaagtaggtaattgctcgttcctcatgtgcaggcgccagtatcccatagtattatactagtgtcacctaaatcgtatgtgtatgatacataagtatatacataaggttta

SEQ ID NO: 1134 - DNA, 1803 bp, Emericella nidulans
gaagataataaataattgagatcatatgaggtgacatcacagagttaattcgttcccttaaatgcaggggcactgcaagcactaacactggctttggggccatctatcatcgatcacttaccacgcacaaggaccttccatccagacaagcaagcgctcgagcaagagacgaagttcgacgtcctactgcacgtagaatttaccatgctccactcgttctgttaccccgacaaaacgagctgggcatgtacatggacgaaaatagagattgttgtgagagacgggatatcaacaggaggtgagcgaggtatggagaggaaagaaagaagataagtgtagctaccaaatgtatattcgagaagtgaaattcatcaaagggtttccaacgcacgccatggctccgcataacaggcaggtaaacgagtgtcagggtccaaggctgggtcgaaggggtgaaaaagtaaatcaaaaagtgggtatttgggtgagtaagtaggtacaatcgcaagcgatgcgagttcccccagacgaagatactaggttttcatctcagagcacctagcctctcgcggatggagtcacaaccgtaccatatggaagctccatttagtgcgcgtggccgtgctggtgacgcttgtgagcggccaggtggtcgtggtgacgcttctcagcagccggtgcggtagggacctggacaacagatgaaacggtgcgggtgacggtgttatagtctgtcgagacaacgtccacgccgccgacctcggtcttcaggggaacgttgttttcatcgaccatgacgacaatctcctgctccacccagacagtctcttgcgtgacggtgctctcgatataagaagtggtgggcgtcggagtccatgtcgaggtcgaggtcgaggtggtagtgggagcctcggtagttttagcatcagcggcgaagatgttgccggcaagatcgctgagagcggaagagaggctgacgcccagacccgcgtcagaggtgctttggggagcggtggaggttgggacggcagtcgaggactcttcgccgacgtacttgatagggaaggcgtactcagggccccattcgacggcaatcttgttgggaagaccgcccttgacctttttaacgtcttcgctggacaggatgtcgggaatgtcaacgctgcacagcttttgcgcgagctcggactggagttcgaacacggggcagtcctcgacctcgccggaggggttggtgcaggtcttgacagcttcctcgagaacaccagactcccagccgtgcatgaaatcggcgtggtaaccgaatccagtagggtcgccggtggaaagggcaaagtatccgtcgcggtccttgaaggcgtaggtgttccagatggtctcgaagaagagcgaaacgatgcgggtctcaaagccctcggggcaagtgccgtccatgaccagcgaggggtaggcaacgtgggaggcatggtcgtcagagtcggtatccttgccattccagcatgaggggaacatgatttcgaaacggacaccgtcagtgcagtgctcgtcaagataagccttctccggcaagaagtgacgaccgagggccggctcggcggctttggcgtaattcaggcagttgaagccgatagccttctgtcgcagggccgcctggctagcctggtcgcctgtccattccgacttgggagggtcggggatcggccaggtgaagttgcgctggaacgggtcaccagcaaccatgcggaagtcctcggggaacgcctccacattgtctccgtagaggaggtagtacctgaccacccg

SEQ ID NO: 1135 - DNA, 6614 bp, Emericella nidulans
  unsure (1)..(6614): unsure at all n locations
cctaaccgccgactgggtgccaatggtgccgcggagatcaaatctcaccacttctttgccaacatcgattggcgtaagttgctccagaggaagtatgagccgagcttcaggcccaatgtggtatgtagcaattctgcgcccctagagataatcatcgttcagtactaacagctatataggctgatgcccgcgacactaaaaatttcgatgccgagtttacatccgaggctccaaaggattcatatgtggatgggcccatgttatcttcgactcaacaacagcaattcgaggggtggtcttacaaccgtcccgttgctggtctcggcgatgcaggcggcagtgtcaaggatccatcattcgccagtatccctgaggattctcgattctaaacatccgcgacggtctggctaagccaaccgcacacgacaggcttcgagatatagggacctttctgatctacccttgcatttccctgttgcctatgcatatcctgccacctttgtcgtcgttttattttccaagccccggtcttacttatttccggatacctgttctgattggattagtatgtggcagtgatttcagtttgagcgagttgtgtctttcatcaatttgtttatccttgcatcgaaatacatccaggcaggaccctacgcgttcatttctcgcatgtcttctgcacatctgtctaccttggggctttgcgcagtttccgggttcggtctgtaacttaaggcgcgtgtccgtttgcatgtctatgttcactgctcaaagacttgtcgcctcggctgccaaccgaacttcataaactttctttttcccccgatctgctggtctgatctattcaacctggcttcttaactgaaccacacattcgctttgagcaaacaattcattcgggctgtttctcaaacggagctgattcatcatcatcttcaaatagtcccatgtcgtctagagaatcacttcgatttcgctcctgttctatggttgccgtggttcttgttccttctttttcgttgttacgttatttcctttttcattcccccggtgggtttcttgcgcactaggagggcccaagcaagttacggatctgcggaagtatgggtgtttattgaaatggccggttcatagatcaacaacgaattgttcatattatcgtctaagattttccaactcgggtgtctcgcttaacgaagcgatgtgctcaaccatagcaaactgaatagatcgtattgaccagactcgtcacttgcgtggtcggatgtgatacaacatcactgagctatcactccacaaagaccatagtactggccgtgtcccgagtgttgagtgaatattccatagtcattagctgctaaacttgcctaagccataggccgagcgtcgatcaagatatatctattatgcgcctcacatttctgggcgtctcaacagcggagcttggaacgaccctgagaatgaaatgactagtatgtcgcattccgtttcagcggccaaacgtctaacagtctagcatctctgcaactttaaaaatactttgtccttgggccctaaatgatgcgctcgcattaagaactacgctggatatgcgcatttctgcgagagatgatagtcgcaattacaaggctgggccgatactcaagtgcaggctcattgggagagagaatgatgcgtatgcgctgggatcaattgcaagctctcacatcgtgattagttgccccaattttcaattacgggggacagtcttagtcggtgcagcagtttccaaaatggtctctacgatacacaaatcaagtttggcatgatgtatgggatcacgatggttactgagcgagagccgtaatatctgtttcagcattggggatgtagtagcaggccgatgaggttatacagtggtgttgtgcagtatgatcttggtaagatattgcaagtagaaaatggttcgagtcctcatattccttggacttttgcaacatatcaatagaaagagatatcttgcccagtagctgctgctgatctgttgactatattctgcggcacattatttcgtctatgctcaaccccgaaactcgtggtgagggaaagatgcatcaaaacacgactgtgccaaagcaagaatattttggagatcatatgcaatgagtcgtgagtattatagatgaaccgacacgttgcaagaagcatttcaaaaatctaattcgagacaaatataatatttggggaagggaagctaagacaaccagatatccgatacagaaaacaagcgctccccgaagcgagttttagctgagtattaacatttaaaatgccacattgtaaaaccctcctctccatgaagctcttcgcaagtccgcctaggcagcttcaaagcagtgtaaatagtcatgcccacattaaactctacccaggtaaagcattcatgcctccgtctccacctcctgcgtgccgttcgtctctggttcaggttcagcgtcctccccatcaacgtcgataagggagcccgatgatgctggctcagtaacaacgccttccttctctagtcgaagatactcttcccactcagggaacaagtcatcatccgccggcacgcctggtgcgccaggtgggacaccgatgagccgagagatcttggcctttccagattgttccaacgactccttccacctgaccacaagctccggggctcgggacggcttgtatgtctgggcgaagagaacagattcagctaaacggttggtttggacgaggaggtcgatacaaccatcgacatctccgagcgaccagagggtagagaacgcgacattgtgaaggccagcatcagaggcttgcgacgccagcgcttgtaggccttctctgttgccactagcagtatgcagtagcagaagagagccaacatctttggcggaaatgaaacattcctgtgccagggacaaattccaggctgacaaagcagcatcaccaacgaccttccacttgtgttccgcattagcagcacgagcgatttcaagggcaatgtcgaggttgttgagggcaagggcgagctcaaagcggtgctcttgatcggttgcaacctccagggctaattccttgtatccctgaccttcgaggaaccgtgccaccttgttcatctggtcctgtgggatgtcctggagcagctccgctgcgagttccatgtctccacggagcacgacagtctggtactcaaccatgctgagagacagagcaaacgagacggcattgacgtccttgtctgcaacgtaaactcggccatcacgaggtaggtatcccaaaacatacattggctgatcaaagtgtgagatcgtatacgtttgatcgccgacaaggtagtttaggcgatttgtagaattcgtgtagatgaagcagtctccaacccattgacctgtcctgacagattcattgacatcggtgacaacttcgaaggcagactcaacaccatcctcgtcagcctcacccgcattcaacccgttgatataattctctcgagaaaatcgcagaacatagaatgtgtcatcacaagcaagggttaccaattctccagactcagaccaatagacctaatgaaaatatcagcttgctgacgatagggtgagaatgtttcagggaacacgcttacgttccgcggctcaacctcaatacgtcgaactaggtttccagtctcccaatcgaacataccgatacccccctgtcctcgaacaccaagcagaacaccgcccgtaaggccttcggcctggaaacctacatcgaggccaccgctcacctccttgaagttcttgaagatcttgacactcgtagccgactcgcgaatagcatagtcgttgctgttatcttttgagccccaagcaaagtccaaagcttgcccaaaagccttgtttctccaagccagggcggtgtaaatgatatattcgccatccccacagacggaaacaaagcgcccattgggtgagtgtgacagtgtctgagggtacacttcacatgagcctaaatccttggtaggaagagaaatcggtgctccatccttgacgctagtatctccacccttgatgacggtggaaactacctcattgtgccgcgcccacacaatctttccggaaccatccatggaaacagctggttcttctctgcccatcttcactactactgcaccatcgtcaaagccaagtgcaacaccttgcttgccgcgttggtatgaaacacaccaagctctctctaagccgtaactcagagattgctccagtctataagtgttggcgtgccatatcttgatggttccatcttcagacccagagataatgacaggcaattcaggatgataacaagcgaaagagacattgctcgtgtgtccttccagagttgcaattagtgccttggtggtgtaatcccagacctttacagtcttatcatccgaagtagtgagaaggtatggcttatcggcctgcggatagtagtcaacatggttaacacctttcgtttcgtgggcctcgagcgtgaaattggcgtgtggtgaacccaggctccagattttaacagtccgatccagacacgcagacgcgaatgtgtttgtatccttggggttgattgctagccccatcacatagtggctgtggccctcgtacacctgcacacacttccatcccttctcccaatcccataacttaatcgtcatgtcatcggaagctgtaagcacgaatggctgtgtcggatgaactgcgatggaacgaatgtaatctggatgcgcctcgaatgaggcaatcttctcggaggtgttgtaattgtagatgcgaagctggaaatcgtctgaaccacagacgatccagttcttacgagcaataaatcgcccagctcggacagggacatcggtaagttcgaaggttttaatgatcgactagtaaaaggggcagtcagatatcgatcaatggtttcttttgagcgggatacctacctgagtctcataagaccatatgtatacatgacctacacatgttgatcagcatgaacaactaaacgcacatgctgaaattcagccacgaaccgctgtataatgttgtcaaaatctatggccgttagcataatgcagccccccagtgtacagataacttacccatggctctgtcgggtggaagtcaatgcccttcactcgctccgagcgagcgaagagttgtctctggattcaatgctcttgtcagcaggagctcccaatcgcagtgatatatgcagcagaaatgtcgccattgtcccagagtatgcaatcatgatgttcaagtcaaggccgtaccttgatatccaatctcatgttgtgatggggaaaggagtatcgcaactatgtgcggcgtcggaggtgatcgatcagggaggggagccaggccacgagccgttctaacagcccagcccggaattgcagaaaactttcggcaaaagtatagttcgacggcgaaatataagcacaagagagagcagccgaggggagaagccttgtagaacgtcgacgggactccagcgatgtgtccacaaggagacggcaataatcccgccaaatcgcccatccgcagtggacgacctagcgatgctcctctcaccgcctacgattctagtcatctttggctccagcttcaccactatcatatagcgagcaggtgcgataatcacatggagccggattcattctatttgtttgaccttgctggttgcggtaccgacttcataagtgcagtaatgagtcaattgcgaagcccgagctctcatgcgagtataaatttgcaatccagtggactgaaaaacagcgaacacaaactaaatttgaaacaatgagtgtatgtgactacaaaaagtataattgtcacatttgcgtccaacccaatggacaccgtcggctaataagtacaagtaatttgtggttctattgatcattcatggtagcaacaatcctttaatccgttttgcgttcaaagtaagtccactgaccaggtctaggcttctcttcaagctcctcccaactacaaaggcatcagttaggacaataacctgctatcagggatcgcgtatgaaaacttacgacttggacttgtacagctcgtccacaagcttcaattcaccctcggcgacttgaatgacttcttcaatgaggccagcaccaatcttcttctcaatttcggcgatcctgcgaagattttgtcagtctgtcgctctacgactcggaaagcgaatcaacttactggtcagcgtccagggccggttcattctcccacttcatctgcttagtgtggaagtccgatttggcgtccgcagcagaggaggtagcttcctcaatttccttctcccagcgcgcctgttgttccgccgtgcgagcagggccttccgtagttggttccaacttttctccatcccactcttctccacgggggttatcgctgttgtcgtcacgttgaattgcagcataggaaccgtctgccagacgtanggaagcaaatcgctcgggctcggcggcaacagcctttttcacgcgttccaaccaancttcgtatccggccgcttcgtcgctcgacgatctgcaagcgggaaccagtcatgcccttatggcctgccgtagcggaaga

SEQ ID NO: 1136 - DNA, 2007 bp, Emericella nidulans
gtgttgaaagctccccgtccaatagtagggaaaaaagatgaaaaaatagaaaagaactgtataaatccactcggcgggcacttaatcgtagctggaaaaagaagattacgctcatcttgacaactaacgcacgcaaaggaaataagccataatacgcccaaccctatgccacacccgttccaccaaccactacagtgatacccaacacgcctcatgactcgttatcatccccagattctggggaataagtcttattaacaaaatccatataagtaaccttctccctcgcatacccacaaagcccactccctctcattaacgcctccggaaacaacactctcggctcccctttatccatatcaagcctcagttcccccatatcattcactgtccaagtccgacaactaaatacatccctcgcgacaacacttggctggaatccattcatcatgcggatcgtgtaagccccgctattgctcccctgcgttgagagaaccatgataatctgcctgccctcacggcccttgcggaaggccatttcagaggatccgcggtagacagggtatgtgttgtaatttatgtagtagtcagggtcgatctggatggcgtgtttgcggattgtgttcagcgtgtgaatcgtgttgtaaagtggggaggaggtgtcgtacgcagagggccaaagggcttcgcgattgtgagggtctgttgagccggagaagtgctgctcttgcccttggtaaataatgggaaggccgtcgaagaggagggtgaatgttaggatatttttcgcgagctgaaattattgagtctaatgggcgacgcagaaggtttaaggcgacttacatttatgtcatccttcaagcttgcgaatcggggcagatcatggttttcagaaaaaatggttaaactcgtcacgctcgggcatttgctcttcatgctttcgacttgattgggaagggattctgtgtcgcctatggtgaaggcgtcgagaagagcgaagtagatcgggtagttagtgacgctgggcatgatattgctttgatacccgcagattatgtcgacagatcgctcatagacctctccgaacataaagacatcagctgccttttcaaatttcccaataaaatctggtgtgacatgctttgctgcatctatacggagcccatcgatggagtaggttgctatcatctcctgaatccacatctccagtatggtctggacccgttcgtcctccgtgtttagatccgggagcgcaacgatgttatcccctgtccagcagtactgcgattgcgggtagtcgttccagtcgtcgatcttgcagtaaggatggtagaagcttttctcattaaagggattaagagaagtgtagttaacgtctggtgctgggttgccgccgttcatggtataagccatgttatttatgacagtatccatcataatgaacattccactgttatgaagtgcttggctcaagtccagaagatcttcatgtgtgccaaaatgtgggttgagagagtacatgtcctgggcccagtagccgtggtatgcttccccatatttggctttcttttcaacgttcttgatgattggggagatcagaacagcatcgaagcccatgccttggatatagtcgaggtgatctatcgtccctctccatgttccaccacaataaagcccttctgtgagattgcaggaatgagtggttgatccatccgtgcgggcgaatctgtcagtcatggtttgatagacggatcttgtcttccaggcgtctgtacgtgctgcgagcactgatgtgggccctatcatcagtgaagtggcgtacagccattgcatcagttgcccggaaaatgccattccaatgctgtattatgaattgtattcttcagtgcccgatagtcacttagtgcgagctcgaacaaatgctaacagagaacagcgggtgatacggcgtaaaaagcgacctgacgattggatgagcaagactgagagcccaacgtgaaaatcaac

SEQ ID NO: 1137 - DNA, 1084 bp, Emericella nidulans
cgagcacgccgtcactcttcctgcccagaccactgtaaaagccgcgcttcgagccgtcgaagacccatcgcggacacagacgagcccatccttctaatgcatgggccttccaacacccatcatcagacagacgcgacatcggaagacccttttgtcctcccaatccgctcacgcactgacgacccatcccgcccggccattagcgagctgcgccgccagcgtctgcgcgagttggccaagaagatgactggcgcagagagtgagtggcgtgaagaatatgtgcctgatgcgggacgagatggcgccagttgacctgccggtcgaatagctgcgcaagtactagatagggtagaagtatatatcatataatatggtgcaatgaagcgtctagcaatccaccagtcaatcgcgatgaatactgagtattctgatgagtgattcgcaacttcagagccggcttggatgcaaaacgtttcacgggttagatatgcacagaggaacacagtaccgggttggggaaggcggcatcattcagcgagttaagatgctcaaagatgaaaaatctaataaaaaagagaaaaaagaaagaggaggtagagagcgagaaagaagaaaaagggggaaaacacgtaaaatgggtcaaacagtgtgtaataaatgtccaataagccaaaccttcgatacactacatagagtattttggttcatcccgcaacaacagaactgtaattactaattctatgtttacagtacatggatcctattacaattagtaccgcatagcacaaaacccctgatggtgtagttggtttatcacgtctgactgtaatggatctacattaaatcagaaggtcaccggctcgattccggttcgggggataagtgcgttctcttttttttttgggggggggggttaacattccatttttgccctggctaatcatgttttctggtagagtggaacttctgggcaactgttagcggcgaccgccgaatggaactgtcagggaacgtcccccgacgggaggtattccgaggcgaacctcgtgacagctagaatgtttatgcttggctgcccgttctt

SEQ ID NO: 1138 - DNA, 1689 bp, Emericella nidulans
cctcgcacctgtgtaggcgatatgggggtagttcgcgcaaggcggcctggatctcagtagatatgctggcttattactgtaccgagagcagagccggctttgaggaggacaatcatgatcagcttgacgccacaagttatgcgcaaaattgtgagcataccttagtcaaggacttgttacccagaccattctgagcgcccgcgaaatatccgagcgttcgcaggtcatcatgatgggtatgtatagtccccgaaccaagatggggtctctggcctaaatatgaagtaggcccttgaataatatcagtagtcctacacacccattagcgagcacatttgagagctcgatgatcatcaagttgcgaaccttgtattgctggactctgaattggctgcccttacggtcttcttatgggcgaatctgcacacatgggccatctttcttgcttgacaatgattgcaaggccattctcgactgcactggtttgtccgatgtcaggctagcccgccatagttcgaccgacttagttgataatgctcgcttgccttctgctttcgccgttgacactcggtacaagcagtagccgagcgaacaggagtctttctgacacctctcggagcagccatcgtttagcctactctcaaatcttccagataaatctttccaggtattgacaatgcttggggagaagttgaagatcgaccatagaagttgttctccaatgcgtccggggtccctgcgtcatagcgccttttcgttacctcgattacagcacgtgacaagcgcacaactcactgcggtcggtgcttcctccttctatcccgtatttgtggcagaaaagatctcgagccagtctcaggatttccttggggggcgatctctcactttataaacgagtcaggaggtgcaagtgtggctccaatgatctgtgcttagagtatcgataacatatagttctcgacgcttagacgtggaagaagagccagcggaaccataaaccctttatagtagtacattatcaacagccactcgtatgtttgccatactgtggctgccgtgcaagaaaagcagagtcgtgtgagaagaccaggaacaagcatagactggcggctaaagatgcctgatttagtgtatggtagctagcctcagctcagcgcgtaagcgctcaactgacctggtcattcttcacgacgcctgatcttctgtttgactcttcaacgaattccccgatctggggtcttacttattctgccattatcgaagttagtcaatgttagatgcttgcttcagccatcgattccaggattgaatcaacaagcaagtctggtcgactccacagccgcagaggcctcggcactttggaggcacaggcccccgatgcatcgcacatgtctgaagcatcgccagtacgcagtttgatgacagcgcagtaatattattccagcttttcacgtcacccaaggatcaagcagagatttcacgatatcgatgacccagctcattttcgagagcatttggcattgttacgcgatgttcagactcagatctttgtcctagacttcggcaatgagcatgcttggtgtcctgtgaacctggagcagcaggacgtcacagccctgcttacctaatatgtatgtggcccccaaaaaaaagcccagctcacacattgcccaggagctgtccatcata

SEQ ID NO: 1139 - DNA, 1898 bp, Emericella nidulans
tgcgcggagcccaagggtcgatggcagcggcgctgagagtaggaatggaggttgtcgtggttaatggctgaggcggtgctactggtttgggagctggctggctgaggttgaatgcagagcttatgtctggctggggtgctgccactggcggcggtgagcgcgcaggtggcgggatgggggctgcagagatcggaggggaggacagtccaaagaggtcgttggaaagcgatgccgatggagggttcgccttgggtggtggtggagactggaagctagagaacccgaagtcgttgctgttagatgatatcgatgtagtgcgcgattgaggcttcgcggagggagcagtaggagatgtgaggctatcaaacaaaccaccgcctgtgcttccaattgaggccgtaggcgatgtcaccttgggcgctgccggagctgacttggagttggcgaagctcgtcagacctgcaaagggagatggcttttctgcaggcctctgagccgggggggaggtggggaagctcagtccactaaaagcgtcggtcaatcctccaaggttagatgaagatgtcgattgtgggggaggggaagctagatcgccaaacgaagaggtgcgctcatgcgccgtaggctgcggcttggagtagagggaaagaatagactgcttcaggtcaggtctagacatcccgcccgccggcgttgacgcgacactagcggggcgactattcgctgccggctgtgcacttccaaagaaatcgagaccgagcaaggaatcgccgggccgtgtgggtttcggtgcagcctgcggctgcttggggggagctcgaattgagggctctgtggtgctgggacggaccggaggagcgacgccgtcatcgtcaaaaaggtcaatggacgcctgagggcgatgctgcactgctggctgcctggccggagcgaccctctgcgaagcggagcgttcgatcttcgctttttcttggacaactgctaggggctagaaatagttagctatagattgcgattgctgaaattacaggcgataactaacaacatcatcgtcgccggcatccaatgtcgaaggatcaggcatcgggccgtccatgacccagcgtttggattcatatttagtcctgataaagttctctatctttctgctcattgtcagttgcagctcatggatagctcatatgcatagactctactcacgcttctggcggaacatgcccgggggccaacttcgcctcccagtatctatcccagtatgttagtccaccagatatataaactcaatactgcgggagactaacttattcgctctggcatttccccaacgtactacactttggagttgttcgtcggtccacgcatcaaggtccacagatttcactcggctgatatgggtgcccatgcccctatgtatgcccgaacaacgaatacagataaatattcccaggttccaggaggcccatcgcggatctaagcagagtttcgttagaggacgtttagagacaacacgacgcgattgaagggatgacagtagacacaggggcacttacgtttgttgcgtttacaatcagcgcataccttgttgggctcgagtttcaagagagctttgatagtctgttgattttgggccgcctgggcgggatttggacgacgagacataaccggtcaatataccacaatctgctgtaatgactggagggaaattgggagggtgaagagaataggggaaggaagaagaaggatagggtctgacagcaagaagtggatggaggatggagcagcctggagattattcacaagtggcggttccggtgcggtgtcgggttcggggtcgtgcgcctgattcctgaggcaccaagacactaccccagtactaaatgatggcacgtgatatcttg

SEQ ID NO: 1140 - DNA, 2924 bp, Emericella nidulans
  unsure (1)..(2924): unsure at all n locations
cgcataagaaactccttgccgccgccgaactgctttatcttccaaacgatggcggacttttcaggcgcgtagtggactgtgccgatgtttgtgcggaacgacggggagtcagcatcgtccgggacggggacaaggatttcgacgttgttggccgtgctgcggcgtttgaattgggctttggcctgatgttatagattaggtatggactgaacagagggaaaggggtaaacgcaccttcaacatgtactcaattcgggaaccagagtgcgactctaccaaacattcaacccagataagtggcttaacttgtgtgttcagacggtagctcattagctcgaactctccatccggcgggatgaagctgattgtgcggtcattctcgaaccgagacagccggacacattgatgaaacttcacatcctccatctcgacggccttaccccgcgatgcccgaccggttgtctcgaacatgaccttgtcgttcaagccgagacggagctccggcattccgctcagataacacttcatcttgatagcgcccagaatctctgaccgtagcacgtttccagtcgcggatacgaggagattgagagattcaaccacatcgaggaaaacttcgttcttgcggtagcggatgccttcacttcgccaagagactgcatttgtgacggcgataggtggtcgggcctgaacttccagcttgtgtgattcttgtgtgatgtacctagcgattaacaattaacctaacgtgctccagtgttcaaaatagggtgaggcctactcttgtaggatcttgctctctgttgtttgagggtatccaaaatccatcatctcatcgagcaactcgtaaataatgacgaagttgtcccggatactctcctcctccagcaccttgaagtactccgtgaaaacctcgacgatcttgtggagaaagagcaggatttccgtcgcattggtgtttttcttggtcaaggcgaggatatagaggttactgtgacggatatagaggtactataacttggttagtacagacaaacataaaacatgagcacggcccagaggctcgtaatccagaatttatctaaactacctgcaatatgaggtagctaaaatgtgctggtacagcgcgcacagaaccaagtccaatgacaatgcgggttgcggggagagcagcggggagcgcgacacgtaagggaaaccgtcgccaggcgcaatcaccaaaccaaacgtacattaattccttcgtgcgagaagcacggaggtaccgcggagctttcttcttcggcgtcactgaggaggatggggaatttctcgacggcggacattggaatgtctccgcgatagtttcgggctagaagagtctacaaaaaagaggtcggtcagcacgaggtggcttagctgtatgcagtggacgaataattggggtgatggtgactgtctagcctgaattcacttgccttgcccttcagatctaggaagaaaaccgccgatgccatcgcggatgaccgagcaggagtggaaggagaggtgaagatggaggtcaggagctcttgggcggcttgaggccagcgaatccactagtcgactaggtagggaagataggatgcgctgaaccggggcggagccggttggggaggcagaaagtccgtttatagaaagattcgaggtgaagatcgaacccgtgatggcgtagggtacctagtcgtagaactaaatctagctcgagggtcctggtactggtagcccgtcttggggcatcgacggagtatacaccgtggaaagaccaagcacaggtagacaggcaacaatgtctacttaagcacttgccacaactccagtattcagataataatcaaagacatactatatatacactctaacagatcgacttatacagactactagatttcgtcaaatgttgtcggtgaacagtagaattatgatcacgtgactgctaaccaagcaaggtcgccaagatagactaactcaatgaagactagccgcataagatataatcgtcgattttttccgcgattttgattcttttttttcttttcttctttgtaccatacgctcccaatagacagttcaagctagcataaatccgtcttcgtgattcccgctaccaactctggcattctgttggattggtggcgggttgccgttgcttacttgcgatacagtggtgcgaagactatgcatcgtagtaacgagggttccataagagctggccgggtattttgcgctgttacccgggcggtgtcagaggaaccgtacatactttcataattcagatgcttatggtgttgattgagaggcagccgagttaggaatggtggtatttgccgtcatattaacacaagttcatagtaaaagtacaaataagatggtgatatatccccgtccagccaagacaacacgtacagagaaatatccaagcactgaaaataacgccatgaaaatgctcctgtggctattttcacacaatcccccgacttataccgtcacctggaaccccagaggtgctaatatccgctctcgtgcaaccttgttggcaactaggttgccttctccagagaaagagcgccaattagtgcgtaaagtgtgtgcgcaaggacgacttcgacgccagatgcttcgaggtttgtgggctgttggccggtattagcagagtgcacgagttggcgaaaaaaattggaggaagctcacctttcgagggcaccatctcaacactttttctaaatcatattgccgcgcacctcggcaagcttcgacttgtccgtaagaaatcgcttcgtgttgatagataggttttctaacccattaagtgctgggtgctcgaatggctatcggcataacggtcaggggcgggctgccataggagttcgaagcgctctcgatanagcaagagaagcctgcagctg

SEQ ID NO: 1141 - DNA, 1366 bp, Emericella nidulans
ctagaacacgtgagttggaatatgcacaaaccttgctcttcggccagtcgtcacaagctttgctacgacccttcttggccgaattcagaccatccgggctgccatcaccaactttcaacgtgaccccatgcggcgtggccgatatacttgttgcaaaattagccgaagcatccattcgatccatgcctttgatgctatgaagaccgttttggaacccagccccggaggcaatcgcggctagtgaattcagcgccgatgctgcatcctgcgcagtcggtgtgtgatgtcctaggctagaagtgctgactgtcatttgcgaacctgacgctccattattctcttctttgtgatggcatcgaattcttcgcttgcggcatgcgtcacaagctacacgtttcggaccaaggccagagcccctagaagcggttttgtgtttttgacttgtgtcttcgttcatgacaggtactggaatgccggaggtggctgctgggggagaattatttgctaagggcgcaacactctcatcgccgggagcagaatctttctgaatatcaacggctgggcgctccgacaaacgctgcactgcttgtctctctgcgtatgtccgttggttatcggcgttacgctctgaacggcgactgggccttccagcaggccttttctctgcaagactgagtttagcattgctttcaacaacaccagggcgggtccaatgtgccgccttttcgttgcctcgcttccacgcaatccacacaccgaatgtccggatcacgtcaatgggttctccaggcatcgcaggtatagatctcttgacagcatttctggtatcagcagtaacaccttccacaaggtaagagcctgcaatcaaggcagtcctgaggagatactttgcgagatccgggaggccctcgagctcagcctgtgaataaaagcgcgagttgtgatagggcgaccccttaggctcagtattggcccgctctccaaattcgtagtagataggatacttccggtggaagcgataattctcgtcttgcgaaaaagcagccagcacgctttgaggtactggatcttcctcgagatatttcagcacagcgtaccactgaatcttctgaaaaaaggggtatctgaatttcattgggactttggtctccttttcaattttcgcaatcttgatctgcattccgtaattgagcctggtcaaaaagttgcccccaatgacaagactgttctcaggggtccagacggcatggatccagccagacgggatgagcattgtatcaccttcggaaagatcaacgcggtagcattctttggtctgatctcccaggaaggtgtagtcttgagcaggcgagttgcaccactcctc

SEQ ID NO: 1142 - DNA, 1542 bp, Emericella nidulans
  unsure (1)..(1542): unsure at all n locations
catttaggtgacactatagaatactaggatcgaattgcagttaatgccacagctccagaagcaacggctgagatcaccgagaggcacgagagacaggaaagtcactacattgttcatccatgcacgactagctctatcttccaactgctcacgattgccaaggccaagggccggaattttgatcattcatttgtacccacatatatcgaagaggtctatgttacagcatcgactggttctattagtgcccagtccattatcacagccacccagaaccgaaccttctccggtgacgctgcaggattttgcggtggtagccttgtttttttcatgcgtaatatccgactcatgccaacggaaaatcgctatgaccgaggccttgatccccatgctggggcgcgactggtttggcagccagacattgacaaggcacacttggctcgtcttatacggccgcattgcgataagtcaatactggagaatctatttctggttgaggagcttgccttggcttgcatcattgaaagtgaacagcaaacgcgcagcagcaaagcgctagcgcattttgcaagatatagcgaatggctgagtctgcaacggcagcgtgccgaacaaggcaactatgaccatgtcaagtcatgccaggctatcgcatcaatgccctctaaagaccgggggaaccatattaaggagctttatcagaaagcgctcatgaccccggtgcaacatgtggccaccgccgttatgcgcatataccatgaaactaccaccctctttgccggtcaggttgatcccttgagtattttgatgaaagatgacttgctatcagcaatctatgggttcaacctctgcgactttgctgatttcttccgggtgatcgcgcacaaccgaccctgtatgcgggtattggagattggagcagggaccggtgggataactgctacgatcttgccagcgatgcatactcctcacggagaacgactctatcacagctatacatatactgatatctcatctggattcttcgagcgcgcccaagagcgcttccgtgcatacaaaggtgtcgactaccgggtactggacatctcagtcgacatagctgcgcaggggttcgatgcgccttatgatttgattatcgcgtctaatgtgcttcacgccactccaaaccttcagcaaacacttgctaatgtgaaagccttgctaaaacccggcgggaaactcttcctacaggaacttgcacccaccaccaaatgggtaaactatatcatgggcacgctccctggctggtggctcagcaatgatgaccgtccatgggaaccatacgtgtcgccgaaacgatgggatgcagagcttcgcgctgccgggctgtctggggccgataccgttgttcatgatggccatatgaatgctcatattgtttcatccttgccagaacttcggagtgagagggaccgacaagttactgtcctttgtaaacctggttctgagcacttgtactctgtcatcgnctacctncatactcgggatttcgaactgatacct

SEQ ID NO: 1143 - DNA, 1932 bp, Emericella nidulans
ggtcatgggtatgtcgcaacgtagccgttgaaggtcggctccatacagtcgaattgccattgaccatctggctggaatattgaatcctggggtcgaactcttattgtggctgacttttgctgcttgtaggttcgaacctagttgggaattgtggactgaggtaaatcgatttgagttgcaacccacgcaagatctatgatcagagttcagagtttgaagaccgcggcgatctctggcaggagaaaagagaaagagatagttcagaactggagacctggctggtagcagggaaagagcgaatgtggagaggctctccggcagctgggctggggggacgaccctaggagctcaaacagcttcccttcgggagagtgtgggggaggtaagatgtcgagagaacgagagagctagggacgcaagggaagttaggaacagagtaaatagaggaaagagttggcggggagggaggcaaaataataagctctctaggatgcgaagagggaggggggaggatgtgtggaggagaggatcaacctccaaaaagtgaagtagcgaaatgacaggtccaggaagctcgcaagtccagcaggcgtaccagaggacgaaaaccacccaagggaccaagggtggactggcccagcgtttaaagctcccccctcaaccacaagccacagttcagggtgtagccagagttggatcgacgcaagcacggacactggcaatgaatctggccccgatggcggatggagctctggctggctggttccacgggacctgatcgggatcgcagcagagacgagcaggttgaggccgcgggaattccctgctggctgtcaaggaagctaagttaattctctgcagaacttaatatgagataaggactggactggactggactggaagtgccgcgcaagagacgatgggcggtcgatgacgctgcccggttggcggccggcgggagagcgaggcgatacgagaggaagggaaaggaaaagaaaggaaagagcagagtcaacaagacatccagagtgcgagggcccggccacgcagacgatactgatgatctgagagctgggagtctcgagaggcgcgttattcctcctaccagaccaggtagacctacgtagtctagtcttataagatcggacgggccacctgcatgggccccagctaagtgaggaaataggaaacgcgctattcgtttatttttttcttctactgaaacgaataataataataataataatagtaataataataatactaatactaataatactagtaatgcaaaataaaaaatatttaaaatggttaaacgattaaaccgattaaaccgattaaaattcctcttgacgaccaccaccaccacatcaaaagggccagccgatgggcgagctagtgtacgagcctacgaccgagatagtgcgggtgagaggcagcgatgggcggcggggcgacccagagtcggtgaccaaccagactgactgcggcggcactagcgatcccaagaagcaggagcaccgactgcagtggagctgcaacaatttggttccagctatcatctggagatgcagatgatgatatgacagtcgggcaaccagccaattactaatatataatcatatatgacctactgcattacctactctatacggggtgcagtggtcagcggtcgttgggcaataatgatgatcaacgatgcgcgcgctgcagcgaaataagccgaaaaccgcccggctgggactcgtgagcggtggtgtcgaatggtatggacggtatggacggtaatgaggtattgaggtattgatggggttacgggcgccgggctgaataatacgtactacgtacggacgacaagggacaagcttgaccggggctcgacatggggaaacaggaagcaggtaccgacacctaatctcgtttaatagtagg

SEQ ID NO: 1144 - DNA, 3459 bp, Emericella nidulans
catcttcgattccatgtccgtatcacaagataactgttcgttcgcgttatatcgttatggtgttgattcggggtatcactttctcgcaacgccgcaatcagcttttctgcgactgattggcccctgcctggagtgtttccatgtagatgctgaccctccctcaaactagtctcaaacatagattgcctgttggagttattggaattctgaggcaaggaagatttgaataccccggtgcttatgtcctccgttttgcaagcttgcgacgagttattgctccagccagactctctgaagccaggctccttgagatcccattgcatatgtcatgcttgcctgctatggttctgatctagagagaagagatgagaggagttttgcgggggcaaagatggcattgtgcagcgggtagattatatatgcccttgtccttgtttgtgcttgagagttggttttgctggatagtggttgtgatatacggcgaagccaggtcgtgagtagacagcgagggagctgtatagagcgttagtgtatgactccctgtgatattggagggtggatgctgaagactaaagtatgagtgtgatgatacttacctctccaacaaactcgtcctcgttcccttccggtgatctgcctcgtagtcttgagaagccaattactgtcccggggcggaagatgtgatgttcacttgatgaggcagatgttggaaacagaccgttctcgatgtcgagccttagatcccattcgttagattgcttagaaactgcgtctggtctcgtctgatctgaggatgcgctaagctcattgcctagtaaagagctggccagaatggggctcgctggcgcgactttgtatgtggttgtgggcattgccggtgcgagccacacgcttgcttggggagtctgttgtgtatctacgttcctggttcgtcaattggttcaggggatggtcagtatcctagacttgatagaggcaggtgcataattgattgttcaccagtttaactcacatatcgatggcgagtgactgttggttgaacattgatgtcgcattaacgtttgcactgttggttggccctgagtttcggcctgattatccaggcaacaatgctaactatcaaaggagtctgggttattatattctatggagtacgaagaactcgcatggattgttgagacataaaaacagatgatattctctaggatttactcccgtatctattgaatacgttttaagccatgacgtcgaattcatttctcttggggcgccgagatatatattattaaaaggctgcggcgatgtatttatgtaatatcgtggttctatatacctttctaggctgatatttaagtaattgtacatcaataaccataatatagatcatttacaatggccgcacactattcatctcagtcactcttttcgtccaagtcccacgcccgtcatgcgtccacagcccatcactcaagatatctccaagaataacatcaatttcagcgcgaacagggtccatctcataatcacacgcagtaaagcttgtgagacagcctcttctccctagattcctgacgacatgcgcaattagtgagtaacccgtagcgagctccatccatggatcactcggatccatagaaccccgctgctcaagctcgtgacccgatcattctgagacggccctaattgaatttttaacatgtgtaaattgggcatgttttccacgacgtctaggaccagctggacatggttgtagaaagggaagactgcgatgtaggtgaacgcggttaggtttcgtagcggcgagggtggatgggaatatgaaggtgcttgctcagatggagcgttatttgaggcccatatactccagcggtggaagatagaggggacttggtagagaaagtactcgtagtggttgtatgcttttagcgaggatgattcgttgaatgtcattgatgtccaaggtggataatctagtatattaccttgttcgtctgcttgagagatggcgtcgtaactttgcgagccgcaactcagttgcacgacttggtgacgaatctcaaacgcccagctatgctcctgtggtatttccatcccgaacatctcccctatgaccgagggtggtgcaacgactgtcagacatcgcggcctcagagaggaaagaaggcgttgccaccatttgcagctcctaggttcatccggaccatcaatctctaccaccactgatgtgacgtagcggcccaagtctgattccgatacgaacgagaggtattcttccaagtccttcagtttaaagcaaccgtgtgagaaaagccgagggcggacgagcgtgcagaggcgggagcacgtaagggatagattcttcaatacacggttgcttaacttcgtgattcgagcgctaggaggctggtgtaatctcttcaaggaaggaggggaagcggagaggaagtagatgatttcgtcaagcagttcgttcggtagcgattccatcggagcggctgagcttcactgagcgtcaataccgaataaagctcgtggcatcgtgaaggactgcgtcggcctcaaacgatgcatttgaggcaataagcatgaacaacttctccgtaaatgcgcgatgggatggagaacccgcaatgctcactgctgaacagtggagatgagaagctgttgcccccactgacccacagctaagacttcatcaacccgttttggattgagaagagaaaaaaaactttgaccgacgcagggctcgaacctgcaatctcctgattcgtagtcagacgccttgccaattgggccagccggccttattgagaaacggagtcaaatactttacattatagaccttcaatgataatctgaccgcccacagaaccatcgagaaataaagcacgtgatccgttgcataactgtgcccaagaacaacgatgattcttccaacaatcaataggcacccgactctcgttccttgagctattgcttttcttgccatcatgggttttggtgttctgcctcatttgcgcactgcgtggcacgtggacaagctatctctcggaagaagacaggctatggtccgaatcttaacatattggggacatatccaacaccaccacttactgcctgtatcagggtattagattggcagggatcatgtggttactggaagctgctatttatcaaggtccccttttcaagaagagcctaccctcccaagcttgcccatgagaggtctttaaattccctccggaatgggagcccccctggctatattttgtatttgttaaagcctaccctgtatcttaattccttcggaaaatgtaccccacttggccttccttggattgcgggcttctacacctgcttttttctaccttatcttcacaacctcttgtgtgtccccaattttctctatcttctaactctttgttttgaatcattcctttgctgagtggttttctttct

SEQ ID NO: 1145 - DNA, 3115 bp, Emericella nidulans
atgtatacttcgtagttgagtatgcccgataaatcgagtgggtatattgtaaacaagcatcggtataaaaccaagggaaaatttaaaaggcaacgacttgtggatcgttatatgggcgtgctgtacatctcttgttcctttctctttccgcgtgattatatcaaattcacaagaggctactcgccccaggcaggtaggtagcacgctattgctctgactccatggtagtattatacctggtagtagtggaagggttggattctgggtcaagctgccctcgttccatagcgcttcgtctatcatccccaccccgactatttcccgtccccgtccccgtccccgtcaaacgggccaagtactggagacctgtcctccatgccccaagggcgttccttgagccggaaaggagacggcctgttgcccctactggccccgaactaggcgacgtcgattcccgacgggagtgaccgcttgatgcaggcgctgaagtgatagacgagattgtaccgtacctgtcgaatgtagtttgtgctcgttttgggagtaagaggcgttgctccggacctgaatccgagagagatgttcgtcgctgctgcgatctgttgccgtcttgctggaatcggcggggctgaaggcctagcccaatgctccaacttgggcctgatgaggtgcgaagaggagctccgcttctgctgcgcggacgagtccgaatggggttgactgagaagcgggtggagaaagagcgcgcgcctgttggaggggtctcagcgtcgatatcagagtcttctagttctgcccaaatggaagctgggtccatgttcgaagaggaggtacgtttgtgctttgatattgtcgcatagagcggaagactgggagctcgctggcgcgctgattcttggagtggatggttggccgggcgcgaacggagtaagggttctcgttcgccgacttgatcttcttggtcttctaattcgagcctaagctgagcctctacgttctcgtcgatggcggccattccgggtcctatggcagtttgggacgggccggcaactgtcatgggtgcgtggctgtcaatgtcctctaatcgccaggatagacagaggacacctcccaggaggacgattgtaccgagtgtgacaaggccggcatgtaggcttgagagtcgcgacatttggcggaagtatattaaaccgtccaagatagcgatgatgttgtatatgcagaagacaaatgggtagagaatgctagtgctgcaaagtttcaaaccccgatgcaggtaatacaattgcagcagagccaggccaaccattgatagtaggatagcccatgattgccatcgcttgaactgattatggcggtccacaattgtccggactagtagctccacggctgacttggctaggagaagtgaatgcgcggagaggatgccgcttatcatcccgtaacacagtccacgtataagtcggatacggttgtgcgtcaagtttagccgtgatgcgtatgtgcttcggagcggtatgtgttttgagcgagaagagacggcctttaggagcttcgatccggcgaagatcactagtgatagcacgaccgttccgacgacccagaggatgaaattccgaccgcgaagcagttcaaggagctggtcaagggtatgcgccggctctccgatagccccaaagacggctatgaggaccgcgccgccgcatactaagactgtaccaatgagagaatatcgagtgaaagattccccaagaatcagcgtagcgaagacggtattgaaaacgagtcccgactaaagaaagaattagtctcgacatagccggaggtgttggggtcactaactgcttgaagcgtcgagagcacaggtagaggaagcgtcgtgatctggattgtacttccaacaatatttgacacaacaaacatcagcattcccagctacggccatcagcgaggtgtaattgccataagatcgtgtccactagattacctgccatctgcgccgcttgtagggaggccttcgcagctcgtaggggtgcttctcatcttcaagaagatgcgacttgcgctggagggtcagtccgatcgcttgcaggctagttgagatcaacccaacaagaaccccgatctggcaatcaaattcgcgttagccgttgtaatgtatagggagtccgcattcgaaaggagggcctaccgcgacactcccctggggcgacaggtcaccaagattgcccattacggagcaacctcatgcatcggtggcagagtggggagattagtctcgggcaccgcaggacattagataggatgagagaaggaatatcgaaaataatattccatattcacggttatgtcgtagagtctcagcgtcgtaaagagaaaggaggaaatgtgtagagaagccaggggaggtgggacgcagtgatctcatggctgcgggaagcctggagttcaacccgccaagtcatccaaaccgactaagctatggcatccgcacccgactgcacgccgacctccctctccacatctggactcttttgactctcacaacctgtgagaatactgcgatagaactgactaggtgactactcctcatcaaaagcccttctgacctcaccacatgcttggtttacgcccgtgatgcagaatccagcgctaacctgtccaacctcactccagaccgagcttgacccgcgcacacgtcccctacgccatcctcttttaatagtcgccagctctagccgcggtctataacattaggcaagatgtcgcaaagccatgctctctccgacgaccaggtacgacgctgttccttgaataagacaaggtgtttttaatagaagctcaagctcacggactctcgatggctaggtggcgggcgagctccgcaagatgactgctttcatccggcaggaagctctcgagaaagctcgcgagattcaactgaaggccgatgaggagttcgccattgagaaatccaagctcgtccgacaggagactgctgcaattgacacccaatatgagaagaagttcaagcaggccgctatgtcccaacagattacgcgttctacccctggcaaccgcactcgtgttcgtgtcctttccggttggcaggagc

SEQ ID NO: 1146 - DNA, 3090 bp, Emericella nidulans
gccggtcagaaccttcgtaccgcacatagtacggttctcttttgtatggtcttgtatccagtcaatacgcggacgcattagaccacagccacctacactcctccagaatacagacgacggcactctttcatcgtacttttactcctacacacaatcaagcacatttaccatgacagactcgacagtctgcagtgacagcaccaattttgaatatggcattcaataaattatcatgtcagtattcgagattcgattatcatacatacaaatcgcacagagttggcttgcaccccaccaaccgggccgggaggatccccaagcagcaggcgatctggaatgagcacgttctttttttattttcttttctttttgccctttcggccctccgcccccccctctttcctcttatattattatttggtaattttttgtcttttttttggtcctttttttttttttttttttttcttttcttttttgccccccaatatcttcattcattccccacacaaagttctcactttatctttttcttttctccctccttgctccgattccgataaccctccccctctccgtaggctcaacctgtctttttgccaactcccctcccccgagttccgtttcattcttcttccccccatcctccattccggctctcattcttatatcctccttcccccagattgttctccagatttttttagtcttcctctctcctccatcggatcctttctgggaatccgcatcattcccttggcgtcatacatcccgacgccgccacataccaacacatcgtttcccaactaggaccacctacctatatcggcagctcttcagcgtggcgtcttacctcccttcgataaaggaaagtcgtcattttggtaatttcgccttctttttttacgactggctctcagtcaagcacacaaacaacaactgttctcattctgctgattctcgaaatcccatctcgtcctggaaaaccgacctagcacggcttagtgtggttggtgatcgtctcgcgccgagctaacccctggctgtgagaacatcctttttcctcggcttatcacaaccctttttagctccgtcccaccctggtctcctcggagctgcagaaggacgagcttcacatgccgcaaccaggatcgtcagtggatttctcaaatctgctgaaccctcaaaacaacacggccatccctgccgaagtctccaacgctacagctagtgctaccatggcttcaggagccagtctgttgccacctatggtgaagggcgctcgccggctgcagaggaagctcgtcaggaccttcctcgaccatacaagtgccccctgtgcgagcgcgccttccaccgcctagaacaccaaacaagacacattcgcactcacactggtgaaaagccccatgcctgccagttccccggctgctcgaagcgtttcagtcgctcagatgagcttacccggcactcgcgaatccataacaaccccaactcaagacgtggaaacaaggctcaacacctggcggcagccgccgcagctgcagctgcgaaccaagatggtagcgcgatggcgaacaacgctggatcaatgatgccccctcccagcaaacccatcactcgatctgctcctgtctctcaagtcgggtccccggacatttcgcccccgcactctttctccaactatgccaaccacatgcgctcgaatctgagcccctactctcgtaccagtgaacgggcgtcatcaggcatggatatcaaccttcttgctacggccgcgtctcaagtcgagcgtgatgaaagttttggattccgctctggtcaacgtagtcaccatatgtatggtccccgccatggcagcaggggacttccttctctttcagcctacgccatctcccacagcatgagccgttcccattcgcacgaggatgaggattcttatgcgtcacatcgcgtcaagcgttcaagacctaactcacccaactcgactgctccttcttcgcctaccttctcccacgactccttatctcccactcctgaccacacgccattggctacgcccgcccattcgccacgactgaagccattgtcgccgagtgagctacatctgccctcaatccgtcacctatcgcttcaccacactccggctctcgctccaatggagccccaggccgagggacccaattattataacccgaaccaacctcatgttggcccaagcataagcgatatcatgtctcgccctgagggtgcacagcgaaaacttccgatacctcaggtgcccaaagtggcggtccaggatatgttaaatcctagcgggtttacttcagtctcttcatcaaccgcaaattccgttgctggtggtgacttggctgagaggttctaatccggccaaaaaacttcgttttcttgttaggcgtacgaaagatatagacctttgcatttctggttgattcatgggcatcattggtgtcacggaattaggttgtttgacgattcttcacactgtttgagtacactattttgcgaggcgttgcccctatagcgaattatccccttgctttcacacacaagtcttgttttcattctattcacttctcttctttgacacctattacaccaacgttttatctctttcctttcgagatcctctcctatcggacaagctcctcagcagtttactattttcttgaggttacacttcataatcaaatacaaaagaacgagtttccttgaatcggaacactgtaccatttatctctttccgtattaaatgaatactcctcatgaggactacaactggactgcatttttctagcgactatggagtaccccgcatagtctccacagagcatcctccatatccatagcttatacagccactgccgtcagtaacttgttagtacatctatcttatatcttactgataagaaggcttagttaatctccatctggaggtgtagatactgtagtctatagacacttgctcaatatcttagttcgcaacctctcagtgaaattcctgcagaaatcccctacagggcctacatggatgatttactggcacgaaaggaaggcctatactggcac

SEQ ID NO: 1147 - DNA, 534 bp, Emericella nidulans
cgacggcattgtgatcagcgagattccgtcgaatgtcatcctgtttcgagttggaccacaaagatggctgtcggccgaactctttgcttggggccttgtagcaactttccaagccttcatcaagtcgtacccggcgtatctggtaacgagactgttgcttggcttgctggaaggcggtttcatccccggagcactctactacctttcgacatggtataaacgggaagagaccagtctccgggtgactctgttcttcttcgggcagatgttctcaggcgcaacttccagcctaatttctgccgggcttctgacgctgtctggtaaaccggggcttgctggatggcggtggattttcttggggtatgtggttgctaagcgcattttccgttgtgcctaactggcataagccgagggcccattgaccactttaatgggaatcctcttcgtcctccttgttcctcccagagccggagatggccgacccctacttagcttcttcaccggccgttggagctatctgacgcccccggaatc

SEQ ID NO: 1148 - DNA, 1151 bp, Emericella nidulans
ctttataaagagcgtcatgcggtcggtcaatatatgagccagttgtaaccggagcctgagagaactctcgtcttcttcagtaaaagcctggagtgtgcaccccgggcatcaaagtattccgtatcttcggggttttccaggttggggacgaattgagccttatcttctaagagggtatcccaatggatgtcagcaaaccaaggatgactccgaatttctgctccaccattgggatatttctcttccaggttcgcgcctatccgctcccgggggttaatagccatgagcttgttcatgaggtcaatggcttcaggtgatgccagttcctcaacttcgccgggccagttgattcttcgatgaagtatgttctcgaaaacttcgtccggggtggccgcattgaaaagaaggatagccgaaaagaaattcgaacatgatacaccccaaagaccaccaatcactcatttcgtcctgaccaacaccgttgattgtctctggtgccagataatccggtgtacccacgaagcgtctgttgtgatcctcggggtcaaacagtgccattaaaggcggcatcatggtttgccgtggagggatctctcggttctagcagaggctatgggaatgttttctatctcactccccaccttctcccttcttcctctgacccttgcactcttgttcgctacccccaattattctttatctttcttcttctccttttttgtttcttgccttttaattctttccctttcccccctctcttacccttctcttctttccctcctactctctttcttttcgtttttcctctccccttttcttttcttcttctcctactcttttttcttccttccttcctctctttttctccctctcctttcttccattcttctattttctcttcctcttttctcatctatccttctcttactttttttcttctctttcctttcttctcttttacttcttcctcttcttcttctccatctcctttcttctttcctcttattcttctctatttccttctttcctctttttttctcttcttctctttccctccttcctctttctcctctactcttctttctttttctcttctcctttttcctctcttttctttcttctcttctttctctctttttcttttcctcttt

SEQ ID NO: 1149 - DNA, 4885 bp, Emericella nidulans
attctggtttcaggaaatgtctgacttccttgaacgttacggtgaactccagtccgatggttcatattccttcagccacgtccggtccggtctgattgtcagtcttctgtctatcggaacgcttattggtgctctctgtggtgctcctctcgctgataagctgggccggaaatggtccatcactgtctggtgtattatcctcatggtcggaatcattgttcagatttccgccccttccggtaactgggtccaaatcgtcatgggccgctggaccactggtcttggtgtcggcggatgctcccctggttgttcccatgtaccaaggagagagtgcccccaagcacgtccgtggtgccatgatcagttcctaccagctgttcgtcacgcttggtatcttcctagcatactgtatcaaccttggaacggagagcttggatggtagtgcccaatggcgtatcactctaggtctgaccttcctgttcgcactcatccttggtctcggcatggccatgtttcctgaaagccctcgcttcaactaccgtcacggcaagattgacactgcccgtacgactatggcccgtctttatggtgtcccagagaaccacgtcgtcatcgtccgcgagctggctgaaatccaatcgcagctcgacgctgaaaaggagcagtcccagaaatggaacgaattcatcaccgccccacgcatgctgtaccgtattcttctgggtattgttctccaagctctgcagcagctcactggcgccaactacttcttctactatggtaccaccatcttccagggtgccggtatctccaactctttcatcactcaggtcattctcggagctatcaattttggaaccacctttggtggtctctacgttgttgagaactttggtcgccgcaagtccctcattgctggtgcttccttgatgttcatctgcttcatgatcttcgcctccatcggacactttatgctcgacgttgagcaccctgagaacacccccggacccggcaagggcatggttgtcgtcgcctctttcttcgttctcttctacgctacgacctggggtcccatcgtctggtccatcgttgctgagctcttcccctccaaataccgtgccaagggtatggctctcgccactgcttccaactggctttggaacttcctcattgggtatgtctataaatatcttcttatacgtaccgtactaacagttgccttagtttcttcactcccttcatcaccggagccatcgatttcgcgtacggctacgtcttcgcgggctgtctcctcgtcgctgtcttcgtggtctacttcttcgttattgagggtaaagaccgaactctcgaggagctcgactggatgtacgtcaaccacgtcaaaccctgggagagcagcaagtacgagatcccgcggatcacctaccacgatgacgctcgcggagccaggaaggagaatactgagcacgctgaagttgcttagttctcttgttccctcacaagagcattgcttatatgtgaccacgtcgtctcttgaataccttttatcttgtatatagaattcgtgcatgggttgagccttttgcattgcattggatatagacgaacattaccatacatacccatattatttcagttcagattttttcgtgtgaatgtccatatacaccgaacttgcgaactcttaatcttacgttatttgcttcgtgaaatcttttaccaaacatcgcggtcgcccaaccccgaaaatctcgaccccaacgagaaaaagggaattcagttcatgtttgctagtgattgactattgcctgtagttcactaatgggaagttcctctcaatccccgagttcctcaagagagtgaagccctgtattactcaccgcattaatgcatcttcgaaatattcgaatttaaccggcctcaccaccctgcatttacccgagaaacgtaacttgaggaaccaaaaggctctcacccgtaaaccgggtttgtcaaaatcgtgcgagacgcgcacagaaatgcttgccttctgtcctggtagacagaagtagagcctcgtttctcattcgaggttttgaaccgccacggaaagaaccaggccgatttcatcatctttaagacctcgggtatagtcaaagatgaaaagagcacagtgaatgtctcctatctccactggagatccagtacggagggcaaggctaacgtgcaatcattgcaaaataaattgaatctctcctcgttgtcaattgagattaaccctcatccccactattatactccgtatgctcctcgtcccatgctatttgactgttcccgcctgcgcggtgacgcggggacatggctgtaatcattatccaggagctcaggtctgccaatctgaagcccggcaagcttaataatggaaccttgaggatgacagcgttggggatgacagctgtgctcccacgcagaattagcgggggtttctcatgttagaacaatcctgaattgggagagcaccagtagataacggtgagaactcagaacagatacggtacggcgatccgcagatccccaagaacctcgtcatgcaagatcgacaggagaagtcccgtccgggccaatccaagcctttgcctgcggcagtgaatgtgccaagcagaagatcgcctgcccattcaatacttaagccgatgggatgtcgatagtcaacgcaattattgctgccagtcactactgttggctcttctcaaattcccttcacatctcgttttcgctacttcattcccgaatgggccctttgcctttggtccgacgcctataaactcaggtttgcccgtccaagcaagcaggtttgcttctgcagatattttcccggcttggctgccactctacatggtgactaggacgctgtcttctggctttattttggttcctcagacgataatgttatgctgtctttgccagtgcgcctcaaagggttggcttgtagatttcgcagtcgtagtcattgtagtacctgggtatcttatgcgacttccaccggcctaaaacgactgtttgagactggcgcaggtacttctagctctgtctctggtactcagttgctccgtgccgctgtcctttcaaaagtagctgccggtacgcaatagagaaagaaggggaaatcaaagcgtgaaagggaaggctcgtaggtaacaacaatccaagctagccctagcattagcggatcaatgtagggttgacacctagctatcctcgtagtttctttgagccctgggctttgacaccatagtccctgtggtaaagatccccctttgcactggtcgattgactgggtctcaggtaactaggctggctgcttttgtatttcgtttattcgtattgtgttgacacctcatattacgtatttcatcatatttgtcgagttggattagggcttttgtctttctattttcttagtgccatacttatgggatgtaccacgcacagattatcttctttttgctacacaaaaaaggtcaatggtctacagaattcgatatcgaggtcatgatggacattaccaaacaggcttggacaatgatatacgagagccgattcaacgacgaaagtagactgctggcggcagtcgcttaacaaaatggccgaattctaccttgagcgaagtacgagattgctgccttagtactagaaaccaacaaagatgatgaagcaggacagcctataaattaggtccaggttgcccccttcgatccaagacaatataagaactgttcatttcaatgttgtaaagggcttgtgttcgtgccatgactgcctcggtattcaaggccgacttgtttcgggcctctatggatggatttgaaccagtcttcaggactttaaacctgcggaaggggtccctttcaagttcgaatgtaaactcgatgctaggatattgatcatgttccgcctactgtctgcctggaatgcattatgcccgagtgtatgttccttgatttcgtttaggctttgctaaatggcccttcatcattgcacccatcgttcaacatgatgctagaggaattgatgccaatactggatgcagcgccgggtctggaactgcaaataagatgggctggactgccaaatcttccaattgtatctttgagacatgatctaaactgttagatgcctcacaggggcaatacgttggacacaatcgaatggatgaccacctatcaagaagaggcgactctttaaacccgcaggcagaggcttgggttcttccatagtaacagccctaactcgttgtagtaaattattgggaaaatatactgctaatccaagaaggcgtcatgactaccaaattatcttagacagtcatatctccaggtttatataaattatattgcctactaggcaccgacgttaaaaggcaaaagggaccatatctccttcccctctcaaccccacttcatcctttgagtctgactgttgctaaaattgcaggtaattttgctaacatcaagtgtgactaaagatgtgctgaaaatgagcttatctttcacgtcagatgtagtcatagttgacttttcaaaatagttgattgtttagttctcggtggctcaggaatacccgcccgcctaccctacgatcgtcttcaatcacatcagatacttggattgataaaatacttcatactctattccatgcaaccacaatgcaacctttgcttgcagctgttccagtctgtgccatggcatcttctatgtgagtcaccatttggcgaccaatctccttggcgtcattacgtgcccgagtatgaagcttaaaagtctttcgtccaagcacccctcaacactctattgagggacggcacgacaaagatagcatggatatgaatccaaactccattaatatc

SEQ ID NO: 1150 - DNA, 4572 bp, Emericella nidulans
agaagcgtctctccggagaaggagctgacgatgcacgttgagcactccgcgcacgggttgtctcctggagacgaagagttcctcgccaacttcccggacgaagagaagaaaagagtgttacggaaggtgtgtgttggcacaatgtctttatttgcttatatgatacaagtgaggctgacagtgattgtgcaggtagacgtatgagctcattttcgactagcgaggtgttcacaattaatagaggcatagtggcggcttctacctatgttggtagttttgtatctgttcgcgtacatcgacaagacaaacattggtgaggacaagcagactggttaacctatatggatctgatattttaggaaatgccaaaatcgaaggtctcctcccgagtttgggaatgagtggagggcaatacaacattgctttggctatatttttcgtgccctatgtcctcgcaggcacgtcttctgtcatatacatgcaaactccgctaatttagctgcagaggttcccagtaatatcatcttaaaccattgtaaaaggccgtcagtctacttgggcacgttgatattcgtctggggtgtgattatgctctgcacaggctttgtccaaagcttcgacagcttacttgcgattcggttcctgctaggcctattcgagtttgtcccctggcggtaaaggcatgtgaatactcttactaagtcttaccaggtccggctttctcccaggcgcagtcctcttaatttcgaaatggtacctccccggagaaacgcaaacgcgcatcgccatactctacacctccgctgcatccggaggcgccttctccggtcttcttgcgttcgctattgccaaaatgagcggtcttgctggctacgagggatggcgatgggtaggtgctctgctcccgtaggtagtctgtggactatagtaatccgagtgcagattttcataatagaaggtctagccaccattgttctcgcaattctgaccttcttcctcctccttgactccccctcgctgtcgtccagctggctcaccccctctgaaatacgcttcctcgaactccgccaactagccaacagcgtccaaagtccgcacaacagaaaaagcgttaactggtcagccatcaatagcgtcttaaccgattggaaaatctacctcctcatccttggaagctggtctaatgcggtccccaattacgcgatgaaattcaccatgccgcagattatcgccggcatggggttcacctcggccagggcccagctactcaccatcccgccttatgcactcggcgctttctcagcatttgtattctccatctttgcggacagatacacctggcggatgccgttcattgtcgtgcctcagctagcgcaagtcgttgcctttagcatactttacacacatgcggccaacatcgaagaaaacatagcgttgtgttatttcggcgtctgcttagcctgcttcgggtatcatccatccatcctattcttaagagctaatctgctaacatttccgactgacagcatgtaccctatcctccccggtgtcaacgcctggaacgtctccaacacaccgcaccttgccaaacgggccgtggctatcggatacctgatctgcatggggaatgtgggcggcctcatcggtagcttcatctacaagcaggacgaagctccacggtatgtgactgggtacggaaactcgttcgcctttgccgcggcgggaatcgttgcgtgtcttgttcttgagtttgccctctttaggttgaatcgaagcaaggagcggtttagtgaagatgaggttagagaacggtacactgatagtgagctggaggagatgggggatagaagtccactattcaggtatacgctgtaatgtaaattagaagggttagccgcatatgtccaatactgctcctgtgacctatcagagcaccaccagacgtaagaccaccaagaacaatacagtacatttctaaactgaaaggaagtaggtgacagtgtgtatatggcccagctcttaaggtccatccattggtcttgtagttcattccacacacgaacagcaggcgcggggcccataacttccattcctataccactgttaggcaattgtatttaaggtttacacttccggcttcagcgccgcacgtgtcgggcccacccggcatccggcgggtgtcacccgacaatagcttagacaacgaatccatgttgttggatatatcaatctgtatctccgtctaatgttctgcctcaaagttggtttccgcagcttccggctcgaccttgatgtggcccgtatatgtcctgggtgcactttctgcccgtgctcttccgaagacgattgatggctacaacgacggatggacatgctgaggtggtttcatctttgtcagtttcttggattatgcataggtttggatactgtatatggatgtatgtacctgtgtcgaataatggagagaagtaggctagggggtgtgaggaacggtatttgttttgctttgtggtgtagcaattcgatgcctggatgttcatagggacaggaagccagtctgagtgcttatgccacttaaggagtgcagagacatcgtaggtgagacagcttgttgtttgattcgacccgttcgatggctagcctatgcgttggttattgccctctggcatgggaggtaatttgggacaggtttgagtctcggaatagatctgacagctctggtccaccagcggtgctcggaagcttgtgtttgctatgctcagatgcaccacacatagttcgctgtgtaatagactcgctaaccttacccgcccagcctgccaaaacatgggttcttgcatggctatctgaattggtaacctatttgcttgacccttaggtggcttatcttaacaacctctcgccaaatcgcgcggcggattagctgcctagaagccatgtttgaaagcactcagagtagctatactctagataatctaataattataggcaggatcactgttgctaacctgctctgagtcctggctgacagagcagggttgacagaaacaaaactaacccgcaagagcacgtggccgggcgggcatactcccaactgggccaaaaaggtcactataatcagactattgtctgttttaccatatgacacctagttggagtatatagttggctcgtccgtgatatagctgtggtttaacaagtcaagctatgctagttgtacattcacgaaagtgcggctacctaaattcctaagggctcctaaacaagccgaacttgtaacgggctggatacctatgcgctggtataggccaaactacttgactaaagaggtacaagacaactgatcattctgataagttgctctagcgccctatatagcagcgaaggccatgcctgagcccttaccctgggtttatcccgtaacagaacttattgggcaaatataaagtctcggaaattatggaatctgcgaaataaaaaacttgggaaaatataagatcctttccgatttaataagatggtttctagttacagataataattggctgttgagggagaaacggtcttgcccagctccaagacagatttaccccacctagcctcatggacctctgcgagttatgttctacgaaacagattgtttgcagctaggtacatgcattttctaaacagcttacacccaaagattcctcgattgagaccatttgtcaagtctggggccaatggctcccttcaaacacaccgactatacaatagcctggatatgtgccttgcttgtagaggcagcagcggctagggtcatactggataaaatccacaatgccctgccccagccctcaactgacccgaatgcctatatccttggtgaactcaatggtcatttcattgtcattgcctgcctaccgattggggtctatagaacagtatctgctgccactgccgtgtcccacatgcaccttcattgcacagacaataaaaactccggctgttttaaaggccatttagatgtgttcacagcaagatgagaacatgaattggtctagggagagatccaatctattagcagaagaccttgagggtcccatatcagcaagcgtaacggacattttttgctctccgccaccaaccgtgacatagccgccatcgcccaggtttggcccaagttcgtcagcaacacataagcctcaccgtgctcactcgggccagtaatacacgcctgcaactgcacggcctggttgctgcccgtcccaggatttcgcggctgcatcgggtacatggcgcagaagtctgcagcagcaatagacgagggggacgtgatgagccatctgcctagatcatcaagaattcgtcatatcagagccgagaaacagatttgaagaggctccaatccagattctcatcagcgtattccgctgcttgtctgtgactccttaactttggcaggattgccgacaaacaggttgtccaggttgccccgcaatgtaacaggtttatcgtattgagcgtcgacaacttgcaagttaacaaattgccgatagtcctcgaccgtacatgctgcatataaaaaaaaaa

SEQ ID NO: 1151 - DNA, 107 bp, Emericella nidulans
aacaaagagaacaaggcctggagatgacaatgagaccaatattccccggataaggattattaccctgcaggctatgtccgcttcctatatccgcataatggggccca

SEQ ID NO: 1152 - DNA, 1740 bp, Emericella nidulans
gtttatactatgtacggaattcagaactttcgcgacgtccacgctccggcggacgaggaaagggaaaccatacacattgcctttcacgtaagggctactcaagtcaattgccgctctcttgtctgatactcacgcttcttaccaggatttccatcactactcctctgtacgccattgcgaaggccctcatacgggcttgccgcgtatccctaaagcagaacaatcagcacaaaccagcaccgcacctccagacgaaggcgtggtcaatgtagcttccccgtggaaaatatcagctatccaggcaggtctcggcgataagtatgaccgtgaaactattgttgaggtactcgagcagtgccgaggcaacatagacaatgcatttctgaacctgcttggtgacgatgtaaacacgcaacaacccgaagccaccgcttcccgagcaatcatgaagtcgcggtttcaaccctcttcgcgctcctcatctccctttagcactgggagcaaacgctcagctgatgataccgacgaagaagaaaacccgcggccggcttcacggcgctcccgagttcgcgagcaaaagcgtcggatcctcccagatgttacagttgggattgcattccgagatgatcaaaatgaccttgtctccttgcgtcttcgtgtgagccccgataaggctgtttctaagtcaccagccgaaactgctagagagcttacagaagccagctccaccgaatcatttgaagaaagctcagcactcgcgaaacagggtaggagattgaagtccaggaacaaacagaccgcagatatcagtgaaacctcaagccaacagagtgaaccgaacaccaacgagcaaaaactacgccgaagtaagcgcatctctcggagccgaaatacataagcacttttcgtctctctccgaagttttctcttggtccgtcttttctcttacgcaaccgtctcgttatcctctccctatcacatcaatccacgattgcattcaagcgcattgggcggccccgtctctcatggtttcttttccagagtatattgtgtcagcgacttaggcggttgttttgaatttctccggtatcaaacagcatttttagccttttgcgtgccaccgtcgacgacgaaccagttcttgctttctatcctacatgcgagcacaggtacacattataccatcatggggcgttgatcggttcggcggaatcactttcctggcatagtacacggttcaaggcttgcatctgggcctttctcttcctgcgtgggtagagattgttgcatttagcgcgtcacacttattatctggcgtctctcttatgatggcgcaaatgggcgtggtgtttttgttcttcatgcttcaggagttactttggcgtttgggtcgggaaaaaaaacatatcattgatgccatgcttgccttgggaatttttggcgggctgttttattctagaatctagagcgtgtttctcccttctgttctggctcatatacgtgaaatctggctggactgtttcactatagctagaaaatatgaattactatctcagagagaactgactagatgtattgattcttcgtagttatattgcttttcagacctttgtttaggcctggctcagacagacacaactcatccaatagtgacgccatgattgcaaataattggcgtccctgctcattattgtccaattctatcctatatatatacatgataaagcattacaccctgta

SEQ ID NO: 1153 - DNA, 512 bp, Emericella nidulans
ttccaatacttgtcccggccaaatctactgtgtcttcgtaaggacagccacctttgttaaaccatggtcatccgtaacaacaagaccctggggacctaaagagccacttgacacgtatgaaggattctgcgctgtcaggttcattaccacgggcgaactgactgactagtatatactatccatacatttgaattgttgaccagctgatcaaatgtacccgattagcaaccttggattgatgagatatataaatcatgccctcaagcccaagtcgttcggcgcagagtcggaacaattctaggcagttcagagagtgatatacagcttcaataagaaaacatctgatactgacattatcaatgacttgatcgcccaagttagatatctgtgtactacataccgggaaagcgacttttggatataggatacctatctttctagctccaacgcctcactaaccattcccactctcatccactccagcaccccatgcagtccaaacagattcaaga

SEQ ID NO: 1154 - DNA, 474 bp, Emericella nidulans
ctaccgcagcgattaacgactggaacaagcgaatccaggaaggtcgtgcaggcccaaagtccgtaaagggcttgattgccgtggctttcgaccagagaaatcatggcacgagattagtcgatcctctctgcaatgagtcttggaagaaggggaatccacgtcatgctcaggatatgttttctgtcttccgtgagttacccgcaccgatcagaccaacgactacataaaaccgagcaatttgactaacaaggtcaacttgaacttgggttagagggcaccgcacgagacacctctctcctgattgactatttgcccgccttcgttttccctaagacagatcgccgaatcactgagaatcttgttctcggggtatcactcggtggtcatgcagcctggagctgcattttgcacgaacctcgcatctccgctggcgtcgaaataatgggtgcccgactacgcgaacttgatggcaga

SEQ ID NO: 1155 - DNA, 1320 bp, Emericella nidulans
tcaaccctagacaagctagaggagatatatcggacaggggactttgagtgcacggtaaaccaatgcaagttcttcgcgctgtttgcgttcggtgaggcatattcgatgcgtagtgaaccagcctcgggaagcagggttccggggacgtcttattttgcgagaagtttgagtctcgttcaagtgttgcccgagaggacgagtatcacacacctggagacattgttgctcttggtacgtatcatacctagccagcatcaactcgaaacgctgcttacaaggtagtccctattctcctattacctgaatcgtcgccactcagcatatgttttgatcggcagtgccatgcgcctaggcttatgcattggcttgaaccacaacattcccgagtcccagcttatagaccctgtcgaacggcaacaccgcgtgcgcatctggtggacaatttatatttttgaccgaatgtgggcgtcgaagatgggcttaccgtcacagattctagacgatgacatccacctcgacatgccatcaagcacattgccgaagcagatttacgaagagcaattcactgatgcagagtatatcaaggcaaatataaacctagcgcggattgtgggcgagacgacggcgaaagtctatagtcggcgtaagtacaatgagacattcctgcagagggtgcagaagctgctcaaggcgctgaaaaactgggttgatacgcttcctgagcatttacggctgaatgttgaggatcccgagatgaatacgaagcaggttacctctatacaccttgcttttaaccaggtattcctccctggacttagaccttaccccaccaaatcaactaatgccgacatacagtgtgtcatcttaacaactcgtccaaccctcctccacctcctcagactcacagaaaccggaaatacaacgacgtcgtctaccacgaccaccaaggaaaccatatctcagcctcttcaaacgcttggcgaagcttgcatccacgccgcacgacactctcactccctaatactcacgaaatggatcaacggctcccttcccgtcttcggatattttcatgcacactacctcttttcatcttccctcgttttggcgatgtctgccttcgtgccgttgcctcttggttcccctgcagatctaaatgcctttgagaccggtcttgaagtgttggcgagtatgagtgagaacggaaacctcgcagcgagcgagttctatcataaccttgtgcgagtcaaggagtgtcttgattcttggagggcaaagaaggggcttgccaatgggagtggaagcgcaagcacaatcgtggga

SEQ ID NO: 1156 - DNA, 1574 bp, Emericella nidulans
acagtcctacttcttcaaaagcgacgagctacctctacgtctggcaattttctggatggcaaaccgcctcacggacgtcgtttccccgctcatagcatacggtgtactccatatgcgcgggactcaagggcaggagggatggaggtggctgtacgtccggatccaagcccccgtcctgcattagggcctcttgagttagggctaaatctgaccttcaatagcttcttgatagaaggacttcttacccttttgataggcatctggtcaatcttccagatggctccctcgcccacacaaacaaaagccctctggagacctaacgggtggttcagcgagcacgaagagaagatcatggttaatcggatcctccgcgacgatccctccaaaggagacatgcataatcgagaagcgatcaccccgaaattgctctggcggagtctatgcgactatgacctctggcctatctatgccatcgggctgacgttcggtatacctcctgccccaagtgatcagtacttgacactcactctgagggggctgggctttgacacattcgagagtaatctgctcagtatcccggcgcagattttcacgactatcaatgtattcctctcttcctttaaaccaaagttcaaacggcaagactaatgagagcattagatgctgatattaacttatattagcgttaaatggaatcagcgcgcgttcctcggcctcttcacgcagatctggttcctcccttgtctgattgccctggcggttctgccagaggggacgccttgatgggggagttatgcgcttgtcacagtgattttgtcgtacccgacgcgtatgtttttacttccacctcttaaccaaatatataccggttaatacatgggtcctgactgattatcaatacagcgcacccaatgcaagttggttggtgcagttcaaactcgaatacggtgcggacgaggaccgtctcggctgctttgtacaagtgtgttccttctcgtaaaatttgacatagagcaggcactgacgaaagcagtatgatggtccagatccagtcaatcatatcgtcgaatatctaccgtgaggacgacaaacctctgtgtaagtctcactttccagcctgctgatagtgcgaagggtactgatttgagtgtatgtagatcgccgcggaaaccgcgtcctgatcgcgatcaactgtctgaatttcgtgctgtatctgtttgccaagtggtactaccagcagaggaataagaagagggatgctgtttggaataggatgagttctgaggtaggtctcttaactaggcttcttatccaaagaagggatatggtgctaatatatagtactgcaggagaaagaagagtatctcaacattacaacagatcaggggaataagaggttagatttcagatttgcaagctagaggctcgggtttgcgagtcctgatgaggtgtgataaattgggggtcctggagtatagttatggagataagatggatgagatgtgtcaatggtatgatttgccgtgcaactaccatcgtaataacacacatagttgaagcctggaaagactttt

SEQ ID NO: 1157 - DNA, 3315 bp, Emericella nidulans
cttcgctttccttgcaacgttgtcgctcttgaattgttgccacacattgctggtttggtttgacgtttgcttgttacaacggcctccctgatttgctttacttaaccatattgactgttttgttctccagggggtttgttcaggaaatactttgcttgtctgcaaatgtatctagtacatgctaacataatagtaatgttagacctaatttcagccctctgtagagttcctctgctaccatatcgaatcccaccagaacgcctgggtaaagtcatatcccaatctctatggctgtttccggcgaaccctgcacgcaagctcagatagagctgctcgtaatatggcactatatttttgctgggttatgacactccatctccaatcagtcaagtacatatgataaggaatcatgcaatcaaaggtacctatatctatgggtctagagcacataagtcatcgccctgaatagctaagactatgactgactgtaatacgcagtatatctcggagctgaaacccaaacaatcaatcgcaaatcgtaacctgtcctttaatacccgtaagaagcactaacgattgcataaataacaccatacattataacctaatcaaaaccccagaaaaaagagaaatcaaaacaataacaactcaataccgacttgtctttaggtctatcaaaacccgaatgcagactaatgaacaccaccacacccgcactcatcagcgtcaccgctgaatccgcgcttccgcttaaagtccccatgatacgtatcgagtccgtcggtgcggacgtcgtcgccgagcgggttgcccagccagttgaagctctcgcttacgcttatgctttcagcggcggtccagaactcagagttctggaggcgttttgtgacggcgctaacgtcgaggtcgaggtagtcggctaggaaggcgccgatttcggtattttcgtggttaccttgtagcggccaggcgtctcttgacgaggaagcgtagatatttacgtcgacaccttttggagggattagttgctagttccgatgatatgagaggtttaggtaaggaagggcgatagtataccagaatgaccgtgtgtggaccagccgatttgggctcggcgactaaccatgtcggcgaagacatagctagggatgattgggttgttgggatcaagtagggcgtctatttcttgctgtgaggcgtcttcgatgcctaaagatttcttgaggaggtcccgcgtgtaggcctcctgagagggcttgtcggtcttctggcggcggtagtcttgaagcttttgagcggcatattccgaggagtgactgacgttggccagaacgccagggagccataggtattcggggtaagtgtcatgtagttgtcgagctcaggcgagtcctccagtttcgtggtcggatgttgcacccaggacccctggggtggaatcgtcgttgaggaactcgaggaccgcagcaaaggccttatcgtaggcgagcacttcgttgacttgcgcggctgggtcgttaccatggcctgcgtggtcgatgcgggacccctcaatcatgaggaaaaatccttgatcgctgtcctctgtagcatggctaaggatcttcaacgcggtccgagccatctcctccaaagagggatacacatcattctgagtgcggcgatcgagttcgtaagggatgtccttctcagcaaagagtcccagcagcggtagctttgcttccgtcccaccattgaggctgtcaaaacctttccggtcgtcaatgtaagagaaccccttctccttggcgactgccaccagatcacgatcatctccgcggcagctaccgtccgttgtattgggcagaaaatggcaccgtccaccacccattatgaggtctaccacacggcccagtgggtgttcaccaatttcttgctctgctatctggtcttcatactgtcgaaggtttgcgtgcgacgcgaagcaagctgcgtgtagcgtcggtgatgcgggtagtcaccaccaacccagtcttgtaaccagccaaagatgcggcctcaagtactgttccacaaggtgagtggtcgggaagcacagagatggcgccgttgtaacttttgaacccgcacgagaatgccgtcgctccggctgctgagtcggtgaccagactcgagctggaccttgtccgtgaagtaccaagaatgtgcctgtccaacacgaggacctcgtcagctggaagcccttgcgtaagctgtttgaagcttcgagtcatggtaagactagttgggcccatcccgtccgagaccatgaagataaggttgcgtttgccggttggttttcctcctggaccccatgtttctttcttgtgactctgtatccagcttgactctcgctgatagacgattgcaaggataataacagcaacggtggctattagagcccaggaaaagaggccgacctctctccagaagccccatccacgacgacttccaccgcggtgagtccgctcgccagtcaacaaggcgtcttcctcctcagcatttcgaatggatgactgttctgatgattggcgtggagccagaagaggctcttctcgcggcattatgggaacgtagcgaatagaggaaatggtggggtcgatgtcgccgcgagtcggagttggagttggggaacttcaagggatctggccaaagctgtcagcgtggactgcttggcgcgaggttacgtcagatctgctcagccctgtataaggagagatcaagtagattgctatacaagtacaaatataatactttcaataacacatttaacataagctttacctccccttccatccgatcggtatcatcgcagccgcaatttcagaaactcccctctcggtcgcgagcaggttgaactgcgcagcagcgtttcttgtatctagcacctcaacccggatccctagcgagttaatatgcttcctagtttccggcgacaaaggaaagattgaggctcccatcccaagaattaacaggtctgtcaccgtggcacagtcagtgaaccaactaaagaagacaacggtaaaaaaaaaaaaagacatacccggacgaggccataccaagtccaatataccccaaacctgctcatccacttcaaattgtccctttgcattgatcatgttgttcttggtcccatccttcttactcatccaaggcctccatgtaaacgcttctccaccgacaagcataactccgtcaccacctgtaatcttgacgccattgtccagatggaagcccgtatctagacaggcgtcaacagcagtcgtcggggtcggaatgtttccgagtacgttcagt

SEQ ID NO: 1158 - DNA, 3700 bp, Emericella nidulans
tgcctagtacttcgcaggaagttagacgccttgtgggccccccggattatcggcatcacctgtcgggtggcggccgcctgaccgccttaaggacgactctttacatggcgcgccgcataggcattccccctactcagaagcttcatcctctagtttcgcctcttcctgtcctccccccttttcatcgctcgttttcccctcgataagtgacagccatcgtccagaacctacagctttagagccaggttgcgcttctcccccagcttttgtttctccaccttccgccggaggtctattagaacccgagccgtcctcggcggtagtcgcggaaaacaagtctcctttagttcgagatccgaaaggagagcagagctccgaagaaggggaacctcctcctccatatactgaaggagacagccctatcgactcgttcacatacgttatggcggcagctgaaggcgcgtcgagtattattactcaagtgcaacaaacaggaggaccccccatcaacacccttggtggtacgcgcattcagagtttacgtctgataatatcgaatttatctaatattgctaatggctacttgtttagatgtcgacggcgatgagcatattacccttgatcttcggtaaggacatgtttccagttgcgcaaattgaatacagtcctctaacgacttctcagtggtactcgctttacgctctcccgtgatgaactattaaccctaccggaatttgtccttctgtcgctcttcccaaatggtttacttccggatgggcatatgaacggttttcatgaaagcgatgtatatcctgttgatgtaagcggacgattttccactgaatctcttcagcagagcaacactgatatacagctcagtacgatccagcttccctccaatacatgctagatttcttccgttctgtcgcccagtctatcccatcttcggcatctgcttctccagacctcgaggtggcccccgattctatgcaaggctctacgagagacatgctccaagatcgagctggcataattgttttacgtgaagatctggacttttacgtcattcctcctcgatcagacattgaccatggagaaatgatggaggtcaagcgaagcgctgcgaaggctcttctacggcaagatgggatattttcagggctgaggaaaagcgatgagccgggatctacagagcagcatctcatcgagatgctcaccgccgggtaaggtctcttgatatctcgatgaggcaaggactaatctgtcggtaggggatttgaccgtgatgatcattggggacaccgagccccagagcctaacaaagcagtaatttgcagccttgcattggcaaaacttcgaactgatatcaggggtgacctagccagtaacaatgttggaatggctcagaagcttcttctgttctggcggaactgcacgaagatgttggtgggagggcgtcgagttggacaatgttgagggtgttgaaggcaagatcaaaatatggattcgcagggtctggaccctagaaatggtgagttttgtggtttctcaacttggcccacgtctactaacaaccccctagagcgtgattgggctccgatagtattaacaacccgcccttaaaaattggtttccatctttttgtcccgtcatatcaatcaccgccgcgtaccttatccattcgcgttccaatgcacgccagagatacaatgtcatgctcaacactttggaccctgttacttgaagccgcatattgcggagtttacgatatcccctagttttcgagtctacgtttgccgatcagaaaattatcgtcgcgataattttctgcttgtcttttggtgcttatgcaattttgtctatagtgcttacttgaaggccggcctccatgcatgatttgtcccgcctcgctttctgctctccccgtctactcgttttgttgcctcttagtttgccctttacggatacttagcaaaatgccggatgctccacagtcccgctgaataatatttccagtacacggagaatgatcccctacacactagtacaaacgtcaagaagaaaatctatggttggctgtaggatgattgtgtcacgtgatatggatctggaatgggactagcgcagttatgggcaaaacgcggagcttgagcgcgatccccatcttcaagtctcgttggaattgttcttggcccaaacaggctgcggaagcgacttaatccttggaagatacctgattgaggcaaccgattgttggacgcaactaatccgtacacaatcccaagtgaagccttttgcagatattcccatccactccctttcccagtcattgagcgatcaaattcgcaggcgctattatcgtatcgcagatcgcggctcaaaacgtccccaaaatcccaaactttgaaccatagggatatgttcatgacaacctagatggccaatatgtccccttccagaggttatatcacgacctacccgccacgagtgcgtcaatatgcaaacgcactcttcacacccgtcattcctcagactcaggtcggtccgacgccacgaaccacgaaacgagggactgcagccatcaactacgcggaagatggcttcgacgatgacgactttgatgatagtgaaggtccccgacgacctacaggtctcagaacgttcggcgagaggaatcttcgttcgacaaagcggcgttggccgaaaagctgggaaaggaggcacacgcgccagtagaggttcaagggatatttcgggattggatgattaagaagatgatacgacccgcgtatgtgttttctaattgaagtcgactttctcggtcgttgctgatttgcgccgtccttggaataggtgtgccgatcaattgcagatacaagcgcaactccctttgacacttataccgattcgaatcgacctcgaagttccggcgcatcagcctctcgaacctttccaggtaccccggcatgttgttgacccagcgattaacacgacgctgcctgcgtacaggcgacctgatcccttacctgcgtttcggatcaaggacacgtttatgtggaatcttcatgaagcgttttctacccctgaagagtttgctactggatttgtccatgacttggaccttcccaaccagcatgcaatgaccctggcgatcgctacccagatccgccagcaattagaggaatatgcgggcgtcgcgctacatccgttgtttcaaagtacacaaccaaaatcagccgctccacaagcaggtttatcgcgagacgcatccaatactcccgcgcctccccatactgcgacaccggacagccgaggcacactggtgacagcgacgaaagagccccttgtaaacgacagtatcttaaatccagacgatgcatatagatgcatgatcaatctgaatatcaacctacagaacaagctatatacggacaagttcgagtggtccctcttacatcctcctgggatggccgaggaattcgcaaaggttacgtgcgcagaccttggtctaggtggagaatgggttggggccattgcgcatgggatttatgaagcagttttgaagctcaaaaaggaggtctgtgagagtggcggtctaattagcggtctaggcagctacgggaccgaaattgataatcaagcggccaacgcggctgaggcaggttggcgatatgacccgaagtctcggcgatgagtggga

SEQ ID NO: 1159 - DNA, 4681 bp, Emericella nidulans
catttttaaaaacaagtaagatagaaacccgcatgacggaatcaacagtataaacagataatcggttatgatggttagagtcaaaaggaacaatattgaacaacttatgatcctctaagataccatattggcagcgctggggtataaaaatattaatgagaggtaccaagaattatacccgaaagaaatttcccctaggctgaaacaaaaagtaaaacaattctttacacacattcgggggtaaaggaaactttcatcaaaactctaatacattgcagaggccaaaaaggcccaacctggggttatatacggggaggtgaaattaatgccaactacaggcctaacgaggccatgtttattcgatggttaccgccgcataaaattgcaggtcaaccagagtcagtatacaggcgcaatattcagtatgtgctaggcgtacagtcatattgtctcattcccacctgtctataggcatgctagccttttgcaggaactgggtctagtgcagttggcatgcttgctgccgccaagcacagagcaagcactcctggttcttacgctgagactgtcaacaaccttcgcatcaatgccgataccaaggttcttttccagggcttcactggaaaacaaggaacgtacgtagctcctccccggactcttgattgataaatggatctgatgctgatatgcgccaatagttttcacgctgagcaggcgatcgcctacggtacatattgccatttcccttgcagctgtttcgcgcactgcgtcgttttggatcggacactcacgcattctaggtactaaggttgttggcggtaccaaccccaagaaggccggctctacacatctagacctcccagttttcgccaatgtcagcgaggctgtcaaggagactggtgccactgcttcggccatttttgtcccgtatgctatgataagctccaaacttctgccagaaagtcggcgctgatgcttggaatttagtcctcctctcgctgctaagggtattgaggaggccattgaggctgaggtgcctttggttgtctggtaagcttcgcctgacttgagaaactaatttacatgttactgaatgttccggtatcttacagtatcactgagggtattccccagcacggtatgagagagcaaccacgattcgcacgtattgctcacatttatactaactgagccagacatggtccgtatcaccgatatcctgaaaacccagaacaagactcgtcttgttgggcctaactgtcctggtatcattgctcccgtaagtatctcttagtgctcgtccagtgctgacggcagcttctaacgtggcattaacatatagggtcaatgcaaaattggtatcatgcctggtttcattcacaagcggggccgtgttggtattgtttctcgttccggtactctcacatacgaggccgtgaaccagaccactcaggctggactcggtcagtccctcgttgtcggtattggtggtgaccccttctctggcaccaacttcatcgattgcctgcgtatcttcctcgaggatgaggagactgatggtatcatcatgatcggtgaaatcggtggtagtgccgaagaggatgctgccgagttcttcaaggccaacaacaagcacaacaagcctgctgttggtttcattgctggtatcagtgctccaccgggccgccgtatgggccacgccggtgccatcgtcagcggcggcaagggaggtgctgactctaagatctctgctctggagagcgctggtgttgttgttgagcgcagcccggcttcccttggcaagtctctgcttgccgaattcgtgaagagagaccttgtctaattctgatcgcaaacaccttcatttatattcagcacgaggctgtgtgggtcgccgtcctgacgctcggtcgacagttcaagacgccactgaaaagcatcgaggcgatgattgttaatctcctgctctctgctagattcccgtacttcatctgaagttctttttggagctcttctgtactttttctgtcattgtcatttcaagttttagaggcggtaggaggtaattagtttcctgtaaatcttgaataatctatctgttgcagaaatggcatctaataccaaacacggtcgctatcaacaaacatgtttgctttgctttcgaggcatatgcgtatgacaggcacctgaaaagacaagtattttatactagctctgaggctcaataacgagtattagaatttatattttttatttaaaaatacctcacgagagaagtataattccctaggttaatccctccaggagacttaagtcgcctcggaagcaacagtgatgatgcctaaatagcaatgacgttgggcctgaggaatgaggcatgttactgttatatcacgtgagtgggaggttgttttcgttgcttgaggaacgggcgattctctgtttattcccgcttgccctcgaaacctcaccaaaccagccccaaacgccatgagcctgacgccctgacagagtaagttgatgattagcatagctcggactgctctgtatttgtgtttttttattttgtctgagattatctcctcgcggtggcaccgaagtcggctctgaaggaaagatcaaaacagacgggcactattgaacctattattatcaacgcccgtggttacccactgtttcgcacctagcaacgagagaaccccaagcaacagcactattcaaggtcctttgtgcgaatagctcctgtaaaaggaagatgcctcctgagcttggtaaggcgctgcatttccctgcaggatacctcttccgttccccttcatctgatgcttaacggactggaagtggtttttacttaccgcatcgctgacccgtggtgacaccagctcgcgcagcctccctgtcctccagtgcagcctctcaatcaacccaagtcgtcgctcctcagagtcgtcctggcacggcagatctcatgagatcgcgctcagaaacagtaatatctaggaatagccgtcgcccgcggtcgagaggctcaactgctagtattcattcgaccacaactcagcagacccaagatcagcaactcaccgatggcttcccccagtttctgccggcccaaacatctgccggatccaatgttttcggcaacaacccggaggatattattatgcgatttggccagcaattgtcgcaccaagtgaacggcaccgccttggattctttacaagacgcccaccactctgcaatttcgagggctgacgagttccccaatcatgctgttcatggtcatcatctttcccaccactcattaccctcaggagtctcacacgggatgccaggcgtgccaatacctcagtatcaaaacatatacgacagtggaattgagaaccacatacaggagcacgttctggatgaacatgatgcttcggaagccggcctcaagaaaaaaaagggatcaagctcctccctagccaacgataatgagttgcgaaaactcttgcggcagtatgagggttatacactgaagcaaatggcggcagaagtactcaagcatgagggagctggcggaaaggcagaaaaggtcaaacaagtcttcgcaatgatctggtaagtaccaataacataatcatgctcccatttgctgaatcttatacgccataggttgaaggagaactgcagaaaaagcacaggctctgtccgcagagatcgtgtttactgctgttatgccgaaaagtgtggaaccgaacgtgtctccgtgctgaatcctgcgtctttcgggaaactagttcgaatcatatttccaaatgtacagacgcgcagattaggcgttaggggggagtcaaagtatcactacgttgatttaacggtaatcgaggaaaagcaacagaagccatccacatcgaccacccagaacccttcccgcgactccacggcagtaggtggtgtggatgctatgaatggcaatgacatgcaaagagcgtgagtgaatgttttaattcgcaagaaaaccacagactgacatcccccatagtgcgagcaccatacagcagcctacagcagatacagcactatttccatctcctactacttcattcgctcccagggccttcatcgacagggcaatttcaggctgcgggtgccaggccttttcacaggccgaagtggtaaccctcgagaatgttggcagtcattcaggaaagttaatttaccagattgtacaacttcctacgacggatagctccttgggtgatacagactctttgaactcccggtttcaaatattactctcccgaaacactgactttaaggtgtggcggtatcttgtgtatttattgttaaactggttttaattattcgagggtttcgtattgcaagaacgcaacctgtatattttttctggttccaggacttaaccgtccggtcagagctgttgccttctatttccacttgaataagaggcatgggtttaaccatataattttgttggcctttataccatgtgtcatattgctgtacttttttaatttacctttaaatttgtcatatttagcaccttttttctgtagtgtgagtatgcggatatcatctatttattttcattatattatgtattatcactctttttaggttattttctgttttttattatcttatattatattttatgtttttattttataatttt

SEQ ID NO: 1160 - DNA, 1238 bp, Emericella nidulans
aatgcggacaaccttcaactccctacaaagatcgacgcgtctgcccgtaaggatgggctctctgattttcttcggatataaaactgacacattcttcatacagtgactgaggtaaaaccccgcatcgacgcagttatctttgaagttgatgcatttgagacgcttcgggtcgaaccagtgcaagaaggggtctgcgtcgacgacgacccccgtgaggatcaatgtccggatagacagacggtttcgggtacttccagatgccatcgcgcggatcttggctttctcaatacacatcttatcgaggtactcggcgactccaacagtgcggaggagggtgccgtagcgtgttccgctggatgtttagattctaatgttagctctaccctctccttcctaaggacaacgtttgtgtgctgtgcttctcccttctgttcttggattgggaccaagatgttctaagatgttttagggctgggcttggttgagaatgtgcttactggttaacaggttcagggtaggtagttttattcagacgccaaccttccttgatgtaaggccatttgtagccgcggcggagacctggctgtagagccatgccgatttcaagctccttgagatcggtgttgagccatgctgcttggaagatgtacatttgataagactggatcatacccgtgatttttaggatccgcaagttacagaatgtgcagaggggggccatttcgtctatggggagaacggagggttcttcgtgatcgcctttgctttcaccttctgtgggagggcccgtcttatgatattcctacaacacgtttggttccccatggatgcgttgactcgattggactgaccaaaagacgctcaggcccaggggacggcgggtcttaaggagagcaccccaaaggcttcctcacgaacttcatgtcggattaggggagagcttgatcggaggtaaatctgaataaccttttggttcttcggaaaaggaaaattctttactgggttcatccaaaaaggactcatttttcgactttggtacccttgcattatctgttagggagatggaaaggaatttaacagtaactaaacggatttgataactgacgaatttgacggaatcttcatgggttttatcctttttaaaacaaacggttacgtgtaccctttaacgttttgtctattcttagggtttaaataaattgctttttgggggctatgctttgttaataggaaaaagg

SEQ ID NO: 1161 - DNA, 394 bp, Emericella nidulans
gactcacaatcgaatagcagcactttggcgtcccacccttggaacatgtcttcacgaagtctttatcactcgagacatcaaatcctacccgccagcaacattagcgctcgcccttatacagttccaacttcgtgtataagcaaaacaagacaattcgcatataatacgagagcggatgatacgcacaattgactccctcaaacgagaccttggagtcccgcgccggaacaaatccctcacagcagtatggcacttggagcaatttggcgtccagagctatagggcataagtacggtcgtccggccattgttggcccggctaggcacagcgcgaggatggcagcagcggaaataaaaagatgcatagttgctgttttctttcacttcgttccgtg

SEQ ID NO: 1162 - DNA, 4742 bp, Emericella nidulans
gtcgaccaaaccccaacgactccaaaggtagcggatcagatgcctgagaagatggagacggacgaggacaagggcgacgaagagctgaaggaaggggacaaggaggcagtcgagggacaaaagaagaaggctgagcgtgaaaaggttggatacgagcttgagaacatgtctagagtgctgcctgcgcaactaaagtatctcacattccccgatccgcggtatgagcctgtgaagagggtatgtttccacgccccagtctatggtgaagaatgattgaataactaacgtatattatagcctaccggtggtgttgtcgttgtcctggacaagacacctgaggaacctcgcgacgtcattgagctaaaggctagtaaggaaaccaagcaacctgcacttgcaacggaatctgccgttccagcggacctacaagcccgcctggcagaatttacggaccctagcagactcttggcaactccgcgtcgtccggaaaaccccctcagcgggtcaggggctgctgctgctgctggggtattgaccgctgtcgatgaagatgaagatggagaggaagcgcctgttcccgaagagttcggctacacgagcgagggcgaggcagaagagtagatatgtgcaatatcggcgcaagttgtattactagattaatataaatctatgtctccggtaaaggctgctagagctgcataccgtcttggaatgttcattgcatttaattcacagacctccttacttcgcatagccaatagagtatgaaccgcaagtctcacatggtcactctagccaatcggccagttcccgaatcgggagtctgttcacttttcattgtctctcaatcggccgattgccgtacatgctcgtccccgggcccatagatgtcatgcctcgatcggcaggtgatgcgatatgaggtgaggaaccaataccatagcattaatattcacatgtcagaagacccgcgagctgcggccgagtcgactcttgagaccatggtcacgtgcgagtaataagcctcggtattttcccaaaatgtgcagcaacgatgaattagcgatgacgcatgagaatcgcatatgacccaatcagaaacagggcattgctctgcaatcagctggccgaggcgaacagctgatcgcaaagtgcccgacattgcttaggtctcgggggtaaagctgcgatattattgcatgggaatttatgtaaatgtgataggaaggactcagcggctcacacctcttttttttgtgtcttactcagcctggcggacatgtgaagaggcgtatctttacccagcgcatatcataggtaaatcaccgagggataatctggaagttctcgtagcaaaggtcactcccaccagttgccattcaccgacgcattcttcttttggtctcttgtccgagcccgttatccaccttagtcctaacgtcccaagatcaataggcctaggaccctggttctgtcctcatccttataacgaagccttcagccatccccgtctccgatttttcttttaccccaggtttactcttccccataccgtgcctagtcgtcaatacaagggcctcccaatcagatagcctcgaccggaatttatattcgttctcttcgtgacctgagaccattctcgctgtcatcatggccaaaacatttagtaaggaggacgtggctaaaaacaacaagcctgatagcctttggattatcgttgacgaagacgtatacgacctgaccaaattccaggacgaacatccaggtgcgttccctaatgcgcgacattttggtcgcattctttggtcttgcatgtgatactgactttagctccgcgaataggtggaaagaagagtacgttccgagtttgaaccccaaacagcgctcgcttggcccgcagcctttgagtactgactgctgctaccaatatagttctcacaagagtggctggtaaagacgcctcgaaacagttctggaaataccacaatgaggggatcctgaaaaagtacaagtcgcaattgcagattgggtcattagactctaagaaagcccctgaagccccggctgcggctgcgacggaagcacccaaaaagccccaggccgcacagcctgttgatgtctcctctgcgcagtcggcaggtcctcaggatccttatggtgatttgattccatttgccgatccctcatggtaccaaggagtgagtttattctgtccgtatgtaaagcagggttgaatttgttcgctaatcgtttgcttagtaccactctccttacttcaaccagacccatgccgcgctccgtgcggaggtgcgggaatgggttgagaaggagatcgaaccatatgtgacggagtgggatgaggccaaggaggttcctgccaagatctacaagcaaatgggcgagcgcgggtatctcgcaggtctactcggtgtcaagtaccccacgcaatacaccccgcaccgggtgcagtcggttgcgcctgagaactgggatctcttccacgagatgcttctaacagatgagctttcccgtgctggcagtggtggtctggtttggaacctgatcggcggctatggcattggatgtcccccgctggtgaagtatggtaagaaggcacttgtggaccgcatcctgcctggtattctcgcaggtgacaagcgcatctgtcttgctattactgagcccgatgctggtagcgatgttgccaaccttacctgcgaacggaacgtctctgaagatggcaagcattatatcgtcaatggcgagaagaagtggattacgaacggtgtctggtctgattacttcacgactgcggttcgtactggcggccctggaatgaacggaatttcagtacttttgattgagagagaagctggtggtgtcagcactcggcgcatggactgccagggtgtctggagcagcggtaccacgtacgtcacgttcgaggacgttaaggttcccgtggagaacctcattggcaaggagaaccagggatttaagggtaagtcaagtcagccctatttcgtcgtcgcatcagtattgacggaatatctagttatcatgaccaacttcaaccacgagcgaattggtatcattatccagtgtctccgcttctcccgcgtctgctacgaggaatccatgaaatacgcccacaagcgcaggacattcggccagaagctcgtcaaccaccctgtcatccgtatgaagctggcccacatggcccgccagattgaagccagctacaactggctcgagaacatcatattccagtgccagtcgatggaagagaccgaggcgatgctcaagcttggcggtgccattgccggtctcaaggcccagtcgacgacgactttcgagtactgcgcgcgcgaagccagtcagatctttggaggcttgagttatagccgtggtggacaaggtggtaagatcgagagattgtaccgtgatgtgcgtgcgtatgctatccctggtggaagtgaggaaatcatgttggatctgagcatgcggcagagtctacgtgtgcatcagatgtttggtatgaaactgtagggttggaaactatcttgtaccttgggaccttggttatttatccctttttttttgctagataggtagagacctttggaattcgattgtacaatattatgagttttatcattttattctccaaaaacataaatcaacagttctagttcgtaaacctcaatgggcgttgcttcttaaacctgttgtgccaagagattgagtttggcggtatgttcgcgctggaaaactagtccggcgagtcacaaagaccaagcgcgcagtttccttctcaatgaaactcgccttcaattctgtaaagctccccaactctcaatcgtcacacatctcctcaatctcagccgccatttggagaagaatagctattaatccggtgttgggtgctccttaaaacccgctctcgctccccttgacgcgactcgcttccataccccgacttgccgtcgcggagtttcgcagcaacaccgaacaggaatcatcgatctgcttgaagaactacggttgctggaacactataatttggcgccacttgctcttgctttgccctgttatttatcgctagagtccagtctacaggagctacttgcggtcgacacttgtctcgcctatccagcgagtacttcgtggtcaattacggagtttgtctaatcgcaatcactcaacgtcagcccgcttggataatcgacgcgaaaatgtctcggaatttgatggaccaggacttcgggtccgaggaggaagatgatgacttcaaccccgcacccgctgaagagtcggataatgaggaggctcatcatgacaaggtttgtgtgcagttggctgctgttcgatgatgtttaagctgatgggcaggactttagaccagaaaaccagaccgtgattctgatgcgcgaaatggaagcgatgatgaaggcgctgatgaggctggcgaggaagacgaggaggaaaacgaggaaggcggagaaggagaaggggatgaagaggaagatgaggaggaagatgaagacgacgacgatgtttcggtgagcaactccagattatgtcggaagcttaccaacgatcactaataatgggtcttgcctgtttcctagaaaccacgaaagcgaagaaagggacatggggggcttagtgccttcattgattatgaagctggtgttgatgaggaggaggatgaggttgagacgaagaggaagagagggtta

SEQ ID NO: 1163 - DNA, 6838 bp, Emericella nidulans
atcaaccaaaccatgctcgttgtaacaacagtgatgagctagcttacggtcaacgaatcgagatgtggtatgtgattgccacaagggcaccaaatgcaaaacaagagtgccaacccgcttctcctgagaagaattcagagacaacatggatttgaggtagctgagaggtttcttgcatgacttgtagcatcaggtttggggtggcttgcttaagagttatgttagccacctacctttcttatggagtaataatagaatctacttgcacgaaagcaattccaagaaatatgaacctaacactgagtctaaatggagctgcgcctagcattagtaactagcccatggctagcgcttgacttgctatcaagtagggactgagcagaagcagtgaaccgtcgcttgagcttcttcctcgcggacatctcaaccttcatacctagctcctcgatatcatttatgtactgttgtgcctgttcttccatttcaagcgtgtatttttgcgcttgttccataatttcatttatacattcggcggccgtcatgcgtacctcggagttaccatcgtcaacctgttcacgaaattcggcttcgtttattgtgtatacgccgtagatctgatcacgacattcactcatggccctatcgacgttttgttcgagccgatgctcaatcgtcttatcgacgtattgttcaagtcggcgttcaaccacctcatcaacatatcgttgaagccggcgctcaagcaccttgtccttgggaaagctagctttctcataatcgtattgaggatcatggtctacacctttgggtatggctagcagatgttggtgtcctgatcgaaataaaagttcgcgaatttggtcatcggaaagaccacgcagctcatcttcaagaaactttagtttcttagattctgtgggggcaggagaaacacgcgtaaagtgggttgggcgaatcgagggtggtgacggggagagagtacttggcgtattcacttcggtcggagatcctatcggttgaggagatggaacgagcactttttttcgtccttcaccgttgggtgacattgaccgcggatctagatactaggattgagctactgaaagataggagaacatgaaactgtaagatgaggagatacctctgcgccgttttccaaccgcctgctcgcaatatagaggtggatccgcctgctcggacacgggctcctgacaatacgggggtggatcgggcggcagactgaagacacgccaatccctttcgaccacgccatggcgagcatggttaaaagacaccgtctgaagactccttcgttgcaaggcatgggagaaggtttgcagcttatcaagttcgttattcacaaactgtcgcccggaaaagtgtatacggagagatctggatcgacagatcttcgcaaatgagtgaatcttctcgtctcctggcgtcgctgggcttaaagactccaacccagatggacaaagaacaatgccggttgtaccgaggctcagactcagtgttgatacggccgaaacattattgacgggtgccgggagcatagaaaataaaccagctggaaaaaggttgtctctgcttttccgaactaaagtacattcttccactctttctgggggaatattcaaggtcagcgcctgtgatctgctgctcaggttagtgagatctgcccgaattgaaagggagatagatccttggttggcagcttgatcatggacaatactaaggtcagcacgacagaacgtctcgaaatcggatgcataaacaagaactgctttcttgagaacccagcgcggggtttgcgacgtggcggtcatgatgtcgcaacattcgctttctaaaggggatccctcgaagaatcgagtagccctccctcccgggcttttgagaagcgttgagcagccctgactcgcgttatatgtgactgaataatgatattaagacgaaagtaaagtggtaagagctcttgcggcccggtcgcgagcacgtgcccaatctgaagtcaacaagtgagatcggagagtcctatgaaatcacaggaatggcagggctggcggcggggacggcaaaaagcatatactttctttaccgatgatgatggtggacggaggatgaagaaggaatgataccaagaatgggaaaaggggaggcgggatctcgacgaagttgggagttcgaccacgtgatctaccaaccggccggaatttctcgaattccgacctcgatccaatttccgaactccgagctacatctttgtctcatttatgcaattgtttaagagtctggtccgtagcctgccgttttctacctaccttcatactttgtcatgaataaacccctgagcctgaaccactaacaccacctgcacctcaagtatgacgcgtcggatcccagccatggcgctgaatcgtctaatacactacgcttaacatgaccatcgacatgtactacccgcatccgtctccccgcaatccgatcatggacgcttacctactgttgtggctacgtatgtacgctcgaaagggaaatggcggaaggaacctatatcgactacatgaacgtagcctactaaggatcggacgccatatgacgattaattatctatctcattgacgatagatatctttttgcgtgtctgtcaattgatgttaaaggtcagggttggagatcccagctaagccacgatatcacatggcgtaagctagccagaggtctcattctgtactccaggtatatatgagcatcacatgacatttccatatcacctacaaaatatggttcactggcgtgttaggctaggattcatagagctaacactacgtagatcaacattcagttaaggcaaatgaaatactgtccttcccagataaataatgtctctcaatctcagtcactcgactcttggaacagaatactgggctatgccctacccaagcgactttggtcgaacgatcatgcatattgcccttcctgagaatccgtaccgacgaaacattgttctaccttctagcctcacagataatcgatagttttcctccatttaccgactgagggggtgagcaaatccacaatgagcaacaaccttacgcttgaagctggttttagattcgctatcatattcactgaacggggatcgtcaacggctagattgtacatggcaagtcaggctggataacacgtttatcgcggtctctgtaagggtttgatctcagcaggagctctacatccatttggaagtactgttatcagatggacgcttatgagaaacactcctgatgcgaagatattgccgtcgcatccgaaccaaacctcagatctctatcaacccctagagacgacagcagtacaacaatatctatgaatggagaaaacgggcctctacattagcgaccaaataaatgctcgctgaccaggaattacagattgatgacatttcagatcaagcttcggcttggcggaatgtatacacattgccctgggccgccatgtcatgatataaacgggcactgttggcagaaacctatgggaaaatatacaaatggctgatataatgtgcacgctctattcgtctagtatctttctactccagcgggtgggcgcagtggtgccatccaggggtcagtaatattcttctcaagacttgcagtcttcataaacattgcacaggtgctcctgttcttaaatgtgacctaaataataagacttctgagacagcattgggggaggactgcaataaatttgataaacaatgagaagtagtcttgaaagcatttgacttactcttagatacagctgctggcgccaaaaatttcagcgttaagaatctacttcggtaggtcaatcagcctgtcaacaaggcaaggaaacttacatcacgtacagctaacgctaggacgactaatgctgaaccttgaggatctttcactctggaggatttcccatggtcctacatacacctgtggggatatatgattgcaacccaacagcagagtcatgacataacctacatgaaatcggcagctaagcagagtaattgcgttgatatagtatctcctggggaagtgttccaggtctcgatcgcccctctaggtctccatgatcgtttgccttgaggtttctgacttccaatgctaagggctaatgttatgtgtttacgaactactttcatctatcctaagcacaccgatccatctagaactctcgtaaatgattgataattgaagactgattaaatttgacctatataaaggcctgggctgccgaaaggatcttgtgccgtgagtttcgacagagctcgccccacatgaggtcaaggactacgatgtaagatattatcctgctacgcactttatctcttaaccaccagcgtcatgcttacttcaaatataaccctcataggggctagctcaggcaatgggagatttgtgattactttggtaaggtgatacgttcacttccggatctcagcggatcgctctatccgagagacccagaagtttacgctacgaaaactcgccgcaggcactaaccaagcaagaaaaagttacttcggccgctgtacaaagtgttttgcgtgtacattagctaagagcccgaggcactgtcaatagtgagcttagccactggtcaaattccgatcgaccctccagcgtccgcaaatcataaatcatacagaccctgaatagtacttgcctagctacttctatctccgttgcctgttttacccagaactcaccaagcttccaaagtatgcaccggatgctttttgtgtgcgggttgttcctgctgtctgtccaggggctcctcattaggcatgatggctcttttcaaccggatcacatactgcgagtaaactccaagaactatatgcaagcatgctcacccaggtattcagtcctggtgaacgggtctttccctggtccagaaatacgtgttcaggaagggcagacaagttggatcagagtttacaacgacatggagaatctgaatgttactatggtatttatataagtttctcgttatatcaaactaactagactaatatatttctagcactggcatggtctgaccgcaattactgcacctttttccgatggtacccccatggctagccaatggcctatcccacctggtcactttttcgactatgaggtgaaagtcgagcccggttatgctgggacctatttctaccattcccacgttgggtttcaggctgttaccgctgccggtccgcttattgtcgagtcaactaaaccgccaccgtatttctatgacgaagaacgcataatcgccttatccgatttcttctcaaacaattgatcaacctaccaagtagctaaacatcctctatctttcttttcttcttggacgattacttgtggaggaggttgttggtattgcatcttgtagacccatgtcagtataatacccaaccaacaaagagagtcgactaacaggtggtccctgaggagggtagccactggaacagtattagctaagagtcagacagagaattgcttctcgtaagagcagacgtactattgttgctggtcgtacggaggttgttggtaagacatggtagtggcctgaacgttcgagttggatatagcaaatcgagatagataatatccacttgcggacgagtcggaaaagaaccaaatttaaaactaataaatgaacccttagccctagcttttgcaggcagcagcattaacatgggcgcttgcccagcctgccatgcacctaagcgccgcctcatgcgttgcccagggcgataggaccaatacaaagacgggaaggagatctctaaagcacagaaacgaactaagtggtatgaatgatttgcagtgcacatttgtagtcgttaaggctgagctagacgcatacgtacatgcatttctatatcctatcctgtcctctcctatcctatccaagtctatccgtcctatccagggacactacaacaactgctacctaggactttccactatttcatcgtttacaaggctagtcatcgtacacttcctcatagatctcctcgtactcctccctggcctcttccagcgcctcctcctcactgctcgatgcatcggagtcttgtgccgccagctgcgcccgctcatattcctgtcgagcctccagaacctcctcacggtcgctggaggaaacggagtcaccgtccgccgtctcatctggggggagaccaacaggtggaggagcagtggcctctggcggcgccgatgctgctgctgccgccgcgcgggtttcatcgtccgagtcgtctgggcctgttagccattcaagcccctataaccagggcatagggataagatagtttggattctttgagcataccgagtgcattcgcaatcagcgcacctccgacagcgcccacagcaagaccgccagcacctgcaaggagcatagctttcttatcatccttgctcttatccttatccttgcccgacttctctccactatagtgttctcctccctgcgagtaaccatacccaggggcgtaccctccctgtggtccgtaccccgggtgataccctcgatcctgcccgggccctcctccatagtatgggtccggaccctgctgtccttggggataaacaggcgcccccgcatactgcggaacctggggctggccgtactgcccgtatggcgccgggtacgcaggcggctcccagcgggaaatgcctgtgcgctgctcgatgtagtaccatcgttggctggcgtggtcgaactgggccacccacccagggggcaggggcggtccgctggggggtggactgcttagtggctgttggtgctggggagggta

SEQ ID NO: 1164 - DNA, 570 bp, Emericella nidulans
  unsure (1)..(570): unsure at all n locations
ttttctttttttttttttatttcttttctttcgcttttcgtcatttttgggttttgctttttccttttttttttccctattctgattatctgtttatgtgctagcccgcttccccaaattgtgaaggaatgcctatcagcacacccaccaatagtgagtggaattcctggttcctgtgctctggtacctcgaccatgacagatggcgccaagcaaggaatgaagttataatttagttattattcagttataatttatgtacggttcataaaccgtccccatactttaactttacgcctactattagtgactgcgggatccaagtctatggtctgatctatctgggaagacccttgtcatcagtctatctggctgtctgtatgacctggcctagatgaccgatctccaaatcgccctgcaatgcanagcaaggtggccggtggtggccggtggtggctggaagaagcgtcatggttcaataaaccccaccctgggtgggccccgtgccccggaaacaaaggctgttccccggagcttttcagtctggattccactcccccgctgtttcccc

SEQ ID NO: 1165 - DNA, 2845 bp, Emericella nidulans
agctcaaactgctatcactgtctgatgaatcaccaacagccgcactcgcagctgtcccatccacctggctggtcttagatccagcagggctttgtgcctgctcccgcgcttttgtagcggcctcgggatcctgactcgcccactctaggaacttggctgcatctgtgcaaatgcttttcggagttcccttctcgaccatccaccgcgggatcgtacccccggggttacttctcgtcaccatggtccactcgacagggttagtctcagattcagcatctgtctcagaaccatccttgtccatcaaaatctctctgatcatctcaaccgactcatactgtccacgaatatattcgtctccctcgggtgcatccggatgctcgacaggcttcgaaaccatcatccaactgcggccttctctctcctccttttgtatcacatccccatcgtccctcttatactccacaaaccccttatcccacgtaacgatcataaccacgaaatctcggcttgtcgtcggtttcggaaacgacgcacttacatggtaaacattcacctttccacatatcgcctccccatgctaatactgacctcaatcgttcacaacccccgctgctcaccaattccccgaaccgccatgtcaggtgcctgccccttctggacacgttcctggttcgttctcaatgtctctgccatctcgctcgacagtttcttctcccacacactgtatggtagacccttgtgtacgctgcgccgaccaaaccagtgcccttggccgtctgtgccggatagcttataaaccggtatcccgagaggattgtctttgttgggcgttggtttgacgatcggtttgctccattgcttttggttggcgagggtggactcattctttgtgccaaggcgtgcaggtgagggctttaatttaatgtcgttgagggtgcttattgtgtcagagggcgggggctcagggacggagtcagtgatcagacgggctttggctcgaaggtcaatgatgtattctcggagcgaagattggtcgctagggatagcatcccaggttgttgcgtttagggataggagtgagtcttggagggatgccatcgcagcatgtggaggtgcaggtcagaggaggtcgtcgtgttaaagttgtaggtgaagggtagatggcggttatttttttgtcaactattcggctgctgatgctagatgaatgagatagaaaatagaaagcccattgataaagctgatctcaatgctgagcgagctatcgctgtagcctagggaactgacgtcatttggtctggccctgtttccgttgttctaatctatccgcagaaagacatacagactacacagtatctgtttaggtgacaatttgctttatgtatcttgaattagactccaaactaaatacaagctgaagctgcataaaaatcgatgagaaaagaatgtatcgtgggcacagccctccagcatctgattcccgtcacctataccctcacccggagggataaatggcgagcatccaggtaatcacccagcctggacagtaggagatgaccctactaggcagctgacagttgatgggcacacagtaagaggtatattgatcaataggaaaccgattgagtcacagactcgaagtcttagccctgctcgtggtctgccacaggcagatctgagactaatgacttaaatacctcttacctgaccaagccaacctgtcagttgcaaatctgcatccatacccatacccgatgggatgtatcgcagcaccacgttgcatctgctccaacccgcattcggattccagtctcatacctgtaccagaagaagcagacgttcagcagtaagacaacagttggctctcagaaccagtgctgtcaagcccgctgataatggacgaaatgaaaccaacgagtgtgataaacgtttctcatccaagtcatatccctagccgcgaggctcaccagtcttcatgacatatatgtgggatgggaaaatacaaaaaaagacacagatagccgacccgccgctgctgctcgatgcaaagagatggggggaaaaaaagaagaaaaagaaaaacgctcaggcttgctggaatcaaaacaaaagcaaatgacagaaaaattatgttctgggttcagaatgcaaagcgaagtggagtatcatcgggttgaaatcaaatcatggaaaacgccgcactgatgccgattattctgtggtctggtttcgtggggaccatgtccctgttgttctcgtgttatgatctcggattcgggtggtgctgaaggtatgctaatgaccagtcgtggctttgtcgataagaaccctggaatctaatccagagacacgcgaggtcagggagacgtcaacatcaagtgtctaggacttgaatccatttacattgtcgtgccgtacggcaacgcaagatcctgatagcggtcgccccacccaaagcccgtcatgttcgccgctgtgctgcagggctgaacgagcatactcggcagtgggagcgctgccagcgcggccgatgtggctgcggcgctgtagtactgcagggtattgtaaggcgatgtggtataggcttgactataggccgatgtcgtaggagccgtggagaccatctgcatgtcagacataccattcagcccagtccacatactcgagtttgcatcagcagttgtaacaggtgctgggctggatggcagtactttccatgagtccattgataccggctgttgcatcgagtcatgcccccaggtctcgagacctgtccagctgggaagcaacggtgtagaacgaaggacatcaactacgcgagtaggcggcgagagcgagggggatg

SEQ ID NO: 1166 - DNA, 666 bp, Emericella nidulans
aggaccgctactggaaatctctggttggcaggatgctgactgaggcggactcaaggaacggcttgtatcccagcggctatgtagccgttctccagagggcgatagggatcgggacaagtttggacaatgctgcgacagattccggatgctcagacaggagcggctcttcgatgaataagggctcgtgcggtgcaagcttgtatgcgagctgttgcgccattgccttgtggactctgccatggaagtcaacaccggggcgcaatcccccaaggacttgaacggtcttcaatcgctcaaccgaaaggtccaaagcatggggtgagtcaagccacgacaagatcttcggggcgttcatcttcacagctttaaagccctgtgatattcttgcccggctgtaaggtgttagaacatcataatccgtacatcaaatggcaacagtgcctcatacgcttgtgcctcaacatcccctggacggtcaccaccaatccaagcgtacactttgagcttatccctcactttgccgccgagaagctgatatattgggagaccgagtcgtcttgctattgatagtcagaccgaccatggctcaaataaaattcgtctcaaacactctcacctttaagatcccagagcgggagatccacgccagaaaaagcgctgagatcc

SEQ ID NO: 1167 - DNA, 1130 bp, Emericella nidulans
  unsure (1)..(1130): unsure at all n locations
ggcgattcagcggggtcacccattgcaggatcaaaacacttcaggaaagaatctgaagggttttttggatgtcggtgatggccaatggcgtcggccacattttccgcggagcgatgcaccatcctcaaagccgcctaggccgcagggtgacaatagcccgactacttctccggcgaacaatggtctagccaacttcccattgatgaacccgttcgccgtgtttgacggattccctccgccagcgaattcctcaacatttcagctaccagctttcccgcccaacctgtcagaacaatcgcgaccacagtttcctccaccaattgatccttccttaccgaaccctccattttttccgttgctcggtagtgggaatgcattcatgactatgccgccgattttaccacctcttatgaattttgacatgttgaatcaagcaatgatgaaccctatgttaaacactcctgaagcgatgaagatgactacttcagctggcttcacagcttccggcgctactcggaccaatcagaaaagacaaaagggggccaggtcgacgacactcagcgtcgggcttccaaatctcctctacctccttcagcaacgaagaagtaccgggaccgagcatctttaccacccagggaatcatcatccccacaacctttgctcgtaatccttgacctcaacggtactctgatttatcgaaagacaaggaaattcccgccatcattctctagaagagtcggtctggacgacttcttgaaagtactcgtggagaagtacaaggtcatgatttggtctagctcacagccaccaacagtagccgcagtctgcgaacagctgttctcagaatcccacaggaagaagctcgtcgcggaatggggtcgtgataaactaggcctttcaaagtcggaatataacactaaagttcaagtctacaagactctagaaaccgtttggtccagcatacagattcaagcatcacatccgggccgagtcaataagggcaagaagaaaggtcctcgttgggaccagagcaacaccgtcctcattgacgacagcagactcaaagctgtcagcgaaccctacatcccatcgagatcccagaattaccaaacaccncatgtggatgagtc

SEQ ID NO: 1168 - DNA, 1563 bp, Emericella nidulans
gttaatgctgattgttggatatatagaatactgcaaaatggagtatttgcgctactgtattattaaacaaccagaggcatctattccaatacggctgaagctcgtgggcataagtagctcagcagtcgcaagccagaggtacagcacgcagcgttgctgtaagcgctcacagacatgtgatagtggtagtgagatgaagctttcaagcaatcattcaaattgggggagaagctcccatttggcccgttaataagttaccattaattacagatgctcagaaagcaagttaaataacggtttggtgagtccagactcccaggttagttgggtgtgaaatatatcattgtcggcaacttgcggactttgatgatttgcccatcttacagcagaaataagtatatggtacgattactgacggagatacctgctctgcccactacacgccattcatctagacttgtcattattcatgcaatcgtcgcggggaaattgaatgcggggtgtgcctggtatggcttgacgccatccctaaatgagcacgggacagtaccttagcgaggtaataccactatattcggactcggtattatcctccgcaatatatctttcttgtttagcgattgctatcacaagggctagtgacctggcagctacgtagggtatgccggagcgctgcaaaagagcgggctgcacacgctatgttattcgggcactcatccctagcgacagatttgggctgcggaatggagattatctgtccgacggacattatgcttgcatgatcagaagacactgaagaacagccttgctggagtggcaaggccaatctgtcgcggaggtccgagatggaaacggaagcattcacatataaatactgtgtcggctactctgttatattcatcataatggacagactcctcactgctgtaagacatcatgaagagacaagctcttactctgattcctctgctcggtgctgctgccgcgcagagtggcccgtacggccaatgcggagggaatgactggtctggagccaccacatgtgtgtcggcgtacgtttgcgtgtatcaaaatgagtggtatagccagtgtgtgccaggtatggaacaggattttcagacgtgatagatgcatacttatctggactacaggcacagcgacccgatcgtccacgacgcttaccacaaccaccaggggttcaaccaggacaacgacaccgcgaccagtccaaccttggaccggcgtggcgaacttccatgggcagggggtgacttcccattgagggggactgctacctgtgggtcaacccaccggttagcggtacaaagaagcgacgggtttgtctgacatttcctaaagggtaaatccggcttggggctaagaggaactagcacttggcagtggctaaacacagggttctccaaccggaacggtgcactggcactttcctttcagacactccactctcatcaatcacctcacgtacgatgtctacctctagatatacttatcatcaacttcctctattcttacttatacaccttttattctcctttcttatgc

SEQ ID NO: 1169 - DNA, 527 bp, Emericella nidulans
agagcgcgcaaggatatctagatgcctgcagctggcctgatcttaggtgtgcacgcatggctagatgcccgacctgataccgggataggtgcactgcagcgttgcttgaagtcaatgctttgcttgcacgacatgatagatgcacaactgtgtgagctgaatcgcgagacaggggcctggacacggtatatgctccttgggactgctaccgtcctgctagaccctcgcgatccgggcgagggtcacggggtccctatgcacacatcatggacgctgtacgggagatattgtcgggacgaggaccacacgatctttagtgcatcctgaatgggcggcgatctacgcaggattacacatggtattgctgctgggtaacttactcgaagtgccaacggaagactaggatgcctgactgtgcattatacgctgctagagctgcttccatgtgctggggactgagaaccacctcatagctgctagtgtatattcgggacatactttggagttctatcctataactaccgaaa

SEQ ID NO: 1170 - DNA, 1080 bp, Emericella nidulans
ctaaactgaccgcagaacgcaggtatcaagggtgtcaaggagaactcttgcttcctgaaggaggttggcgatgccagaggatccgcaagcgcatcatggactgtgttgagactgccatgttcaaggatcagtctgaggaagagatcaggcgtcttctgcacatggttgtcgttggtggcggcccgaccggtgttgaattcgctggtgagctgcaagacttcttcgagcacgatctgaggaagtgggttcctgagatccaggagaacttccgcgtcacccttgttgaagctctgcccaacgtgcttcctatgttctccaaacagctgattgactacacggaatcgacgttcaaggaggaatccatcacgatccgcaccaagacgatggtcaagaacgtcacagacaagtatatcgaagccgaggtcaccaagcccgacgggaccaaggagctcgagaccattccatacggtctgcttgtttgggctaccggtaacgctatccgtcccatcgttcgcgatcttatgagccagctccccgcccagaagaactcgcgtcgtggtcttgctgtcaacgaataccttgttgtgaacggtactgagaatgtctgggctgtcggagactgtgccatcaccaactacgcccctaccgcccaggttgccagtcaggagggcgctttcctcgcccgccttttcaacaccatggccaagaccgaggccatcgagaaagagttacagagactatctgaagctcaatcagccgccaagagcgaagaagagcgcaacaagatcttcgacgaaatccgtgatcaccagcgccaactgcggcgaaccaagcaaatcggcccgttccaatactcccaccagggaagcctggcctacattggaaaggagcgtgcggttgcagatatcagctggctgagcggcaacatcgcaagtggtggaactatgacctatctcttctggcgtagtgcttatcttagcatgtgcttcagcagtaagtatccagtttgcttcagttggtctcgatcccattaatttcaaaactaccggcatttcatttagccgcaatcgtgtctagttg

SEQ ID NO: 1171 - DNA, 404 bp, Emericella nidulans
cgatcccgggcaaactgggcgaccttgcccacagtgtctacccggagggtagctgtgggcacaccatctggtatctcatgctgatgcagtccccaactttgtgtcagctgtatggacaaggccctaatcatgtgatcggacgatgactctcagtgccgacccttgactgcaccctgggttacaaagcccccagacgcatacagacatcggcggctcggtcggaagtgcctgagagcgcaccagctcgtgagatggctctcagattgctctgccgaccacagatcactggtcattgttaccgtagcctgtggcagcttatcgtgggtgacagcgtgcacaacacgatactgatgttggcattaatgatgacgacccattgtgcgcaagtgggtgtgccgttagtt

SEQ ID NO: 1172 - DNA, 550 bp, Emericella nidulans
cccgcaagctcgacattcttgcccacagtgtctatccggagggccgcagtaggcgcaccatgtagcgtctcatgctcatgcagcccccaccttatgtcctctggatgctcaagggccctatcctctctacggtgtgaaattctactgtccaaacccgtccaggcatgctctgatgctgagccaccacactgtgccagacatcgggggctctgatcgaggtacctgaaggcgcaaggttcgctcacatgtctctctgctgctaggtggatcacaagccactgaccttgtaaccgagcctcgaccccctctaagtgggggtcggcgtatacgggcacgatgcggtacttcccattgacgatgactccccatacattgaaagcttggtgtgccgatagatccgtgatcgaaggatcatcgtcatgccggcgagttttgcaatccctgcgtgggtcaaccactacacggatgtcgtgtacctggcggctaccctgggttccttccatcatgtgccgcttagcgctcctcaccgagcaagaggctacctgccggc

SEQ ID NO: 1173 - DNA, 2176 bp, Emericella nidulans
agagagagaaggagagaagaaagagatgagagataatgtgattgtatggaaatgcgaatactatgagaaatagattaaagttaaatagagtgatatagaatagtgaagagatattcagagagataaagtagatgagatgaataaaaatgaaagtgaagaagaaagaaatatagagaaagattaaataagaggaaagaagtatggaaaaagagaagagagagaatgagagcgaagatagaagggagagagcgcagaatcgtgactaagcgataaagagcgagaaacagagtactaagtatagaacatgtataagagtagaaaagttataggtggatcactttatgacagggtgagttaataaaatataaccgagaggtaagctccgacctgactccaagggtataacaagaagcctgtaagggaaggatgccaatatcaaagggtgggacatcttatctacagcatacgggaaaaccggtacaaaccggcagggacgccccacactcataccaaaaattggttcttacatgaattcccgctgacggcgcgtttggtgactacttacgaaaacccagtgatcttgacgtcggcgttcctgaacacaaaactgtaggtaacaaggaaaccgctgttcttgcggcagtcgctgcagtagcagaggccctatgcaatcgagtctccgtcaggttccggctattaggggtgaaagggggggttacgtagggggaatcctgaccgatgtaattggcgagttggtgaactcgagctggattttcccgcaaaagcagcttccgacgggcatggtggctgttgttgtcattgagttttattgaaattgtaagagaagagtagctctgggtggcatgggatctatataagacggctgagaggagagtgctcagctcggagtttatgtactccggcctcaagctgatgagaatctaagtcgatactactctatacggccacagttcggttgaggctggaacatgagtcattgtctgcaaagctagatctagatgttgagtatattaagaaggatctactgttagcttggcggtgcaagccttctgcggggcagttcctagcttgtgaatgctgacaagcttctggtttctgatttataacagcttactcagactatactctaagttagttacatgcgtgttcttagtcacgagcctcggccgggagagattatctttaaacgataatatactactgtaaggacagagaggtagcaaggctcacttaatgctggcctggctcgtgctcgtaaaactgaaccttcgaatctgaaatctcttcttatcgaccgtaggcagtactaggaattgccagtgaggaggaaaacagactggtataagctaacctttccttgttgccttgtgcgccctcatactcttagcctcaaatgctagtcaatcctaagtccttcacgaaactttctgcgtggttactcgcacatcgcttgcgcacgggttcgggctggtggtaggcaccatgtcagacttagagaaggactgttgctactgtcgctgtcactccaccggagccattgagacaatgttgtgagacgatttgctattcccatcaacattctgtattccactcaagtctcgggagactaaactagaagcagcatgagccttctaaaggaagaccttgacgacgtcaagtaatgacctgatctgctgggcgcatttcggtctctcaggggtgtcatatgctaaagccctactgcccggaaagacctgttttacggcccattaaccaacatacagtggtgattgctccactatacaaccgatatggtatctgttagtatgaaactgcaattgcttgaacatatttatatggttttagtcttatgcgcttactgagatcagaagctagaagtagctaactgtggatcattctgtggctatgtctgcacagacctctgaagactcaaaaaaggcattatattcccggtaccgagagaatatcatctaatatgttgttatggtgattccttccgttaatcagtgtctgatctcgtataatacctggttcgcagctgttgttactccgggacttccatcagccgatgaccacccgctctaaaatatgtagtaaacccacttcaaatccagtcggcataaccaatggccagctgttactggaaaacactccg

SEQ ID NO: 1174 - DNA, 621 bp, Emericella nidulans
tatatctttatcatcataattaacttatattttatcctttatgtactagcatttctagttcatctggaagagtgattttatttttataattagctatatagatgtgacgggcacggaggatggaggatcaattaggtacagtagggaatcaccaggggatcaaaggctattaacagtctgaagctatctgtcttatattaactagactaattcttaaccatcctcttataaggttggctagtatattatatatataatatcaggagtcatgacattattctcttctgacagattaataatatggtcagtaactatctagttccgggtttaatcctgcactcggaccgaactatataacaattactattatatctttaatttatttttatactagttatttctatttaattttaatatatatactatattattccctggtaattaaacaattattttagacttatttataaaaagtaatgtatctactaaaaatattaactaacctatagaggctatcaataaaaattaaatataattatttaaataatctataaaactagttattggatcaaatattaactaatctatctagtaagcagtttaaattatatttactaacat

SEQ ID NO: 1175 - DNA, 1109 bp, Emericella nidulans
cccaatgcctgttgccttatccgccgatccgtgctctatcactaacctgtaaaatggccaggctcgaaaactcattattaaatggctctggttgcttagttctttcgaaaaccactgagcacaactgtgagtgttggcgatggtagatggatggattccgtttcccagcacattgtatgcgggtcaatgcatatacaatatacttccgttaaccaaggcatagcttagcaagtatgttgctctctggtgtcaacatgcatttgctaaatagcagaaactaactggaaatattccgacttatattcgacaaaatcctgacatgctgtaggccggtatctaaagaaaaccagactcttttcagccctcttctctccactatcaatctcgtacgcatcgagattttggcaatgattcaatgcaaggagttgcagacattgtcaccagctacccaatggtccatttcctgaggtccagttgagcaacttcatccccattctcctttaatgccccataggtcacttccagtatcttcaaagacgccaggcattcgaactgatataccttctcgcccctggcaagatcctcatctttcggaccagaaatcactgcggcaggcatcggcgtcatagtaggcatcttttttgtcatgtcccaatacagaacgtataattggcgtcgatcttcttcccaggagtcagtcctgtcttcgccgcgacccaagccttcatcatgccgcataatttgaaactttcccactgatccattgcccatgtcaacactcagaaccagtctctgcagatctctcaatgtacaagttactggcagaaccagccccgggtactcaacctcaaatccagcctctgtaacaagtcccatagtcatatcatcagacttaaccttcagtctctttgcaccgcagtttccaaatcgattaattgcccattgccacccatgctgccgcattctaggcccagcaagaaacaacaattcctgtgggagatacttttttggtgacagtaaggcatgcatgtggtcttttaaccggaagcccttgagcaaggatgtgttccattccatcaaacttccaaggacaacatttgttccttttc

SEQ ID NO: 1176 - DNA, 634 bp, Emericella nidulans
cccgcacgctctgctaccagccctccccatgacttattaaagagcatatatcctaggatggccactttgacgccggaggaggaattgaaacatgccatgcaaccccacaaaggccggctctctatcagcgtgcctggctttggcaagaagagcgaccggccccactaccgctccctgagcggatccaacattgctggacgacttgagcgcgaacactttcaccacgaggtgggtttatcaacagacacgggctcaaaggactcggtaaaggaaaatgacacattcggatcgactgacacagacttcctgagtccaccgccccctactgcaagaccagcgtgggtcagcagtgagcgcgagctgcgcttgaaattaccccgtctacaaacacaagaagggcgatcaccaggcttgcgacagaagccatcatcagtgaaagtgccaactacaatggaagctacccacagaactggaaaggcgtcgcccaaaccccggaaaacactttcgttcaacctcgggggcacgatgtcgaagaacgctcgacgggcgaaagctatctggcccatgtgcgagatggatgttgactcggagcctataggcgaataccagctcgacacctgtctgcccgagcagc

SEQ ID NO: 1177 - DNA, 2077 bp, Emericella nidulans
  unsure (1)..(2077): unsure at all n locations
gagaacaaacaattagagagtttctagaaataatgatcaaatcctaccacgtctacttaatctccttccgcacggggttctttaatagctggcggggccagatcaccaccccttgggaaggcaagggtaaacaggcctcaacaacccaattgcagtcgcatataactgcctcgtcataaacgtgctcttcgccccatacccgtcccgaatgtgctctggaagcatctcgattgtaatagccctcagcacaggctttgtaagccctactcctcgcggtagatcccgcttctgcagctcggacgcgacatcatgtgccgccgcagagactacgagcttcgagagctcggcgtcccagtacttccagaactcggcgcgcgttgacggccaggatacttgcgacaggctctggtcgccggcagaggcggatggaagcacggtaggcgatagatagcgcaggacgagggcgaattcgtcatacgccgcctcggcagtgcggtagtcgaaggccccgtagatgcgctggtagaagtctgccgctgttgcgtagatggtcgcgacgagccagagttgtgatgtgggcgatgtgaccttcaagctcgactgcagaggaggttgtccgagccctaagcgagccagaagtgcttgtttttcgtccttgctgccgaggacgaggcaggcgatgtagcttagggctgcatggaggtacgatgtgaggtcgtcagtcagattggagcttgcactgctggcggtgttgaggccgggatgcgccgcttgcaggaggacagctgggccgcaggcaacgaagatgaccccttcttgtaggattttagggagcacttggaggttatcgaggccagagaggctgttgttggagttgtatgtggcggtttgtggtttcgttgagcttgcactcgagggaaccggcgtgattctgtcgatgtcgcgtttctcctcgagggacattttgcccgttgtagatgtgacaaggaggtaggactcgtgaataatagtattcaaggtgggtgaacggttggtgtagccaagtgtagtctacaaaatactttagacactgggaattgttagcgaattcagctagcttcagtccatactcaacgaacgccactgacagagccgaactatttcaaaccaccaacgcacgaccttcagatcaacggatccagtaccccgaagcggtatgctgcccgagttcaacaagcggatcaaatggacttaatgggaggacgagagatcgtgaatggcgaaatctggggattgtcttgactatcgcctatcccccgcagtccttcctaacaaggcggcaaaaccggggtgataatcgtggtatgatgccatgctttctttcaagcatttcgatagccgaggagaaaaggggctcaccaacggtcctactagcagtttagaagagctggcactccgcatgtgaaccgaccatggctggctaccgagagcgcccattgcgatcgtcccgtcgatctctgaatagcgccattttcggctccaaagggggtccatcgggctccatcacaccccccgaggttttctgcctcgctggagttgccgcccactcgtttcgcgggcaaatcaattgggaagttcttaggtcgacgtcgtctccccgcatccgcgatcgtcggggcacgactcacgaggaggacgacgaggaaggaattctggggtttatcttccttccaggttcttcaacctggggccacgagtcaagcaagcagataatctcgtcatgtcgtccgtcagctctccagaaaagcctgcgaaggtagcccctaagaatacactgggctcctttaggggtcctcttgctggcagcgatgtggatatcgagtgcatcgagaagatcccaggcgaggtctcgctcgttgagcccaaggtgaagcagaagagggcgcagcgagtgaagcggcattttgcgcggttcttttgctgctacatcttctggagcgtcattttcctggcgattttcttgcccatattgtacggccagacacgctctttgcagaatgccctactgactttcagagtttcctccnaatcattcctc

SEQ ID NO: 1178 - DNA, 732 bp, Emericella nidulans
  unsure (1)..(732): unsure at all n locations
ggagaattatagtgggtgactgctcaagcagaactattggacgatcatttagctctttcacatagcttgtcttggctcaatggagaatctactcattctagcctgaaaggataggcatttgcgagcctctgttgagaatgactaatgttttctgcatcgtaaccacgatgagacctagccgatctcaccaaaatacgttggatttctcggccagtgtgctgcgccttactcctttttgcttttgatctctttttaagaagctcaatactcaccagattcgatataccaagcagcgccctgggggcggccctacgtactctactccgtactacgcactactgtcgatggcggctgtcggtccttggcttgcagagacatgcacttttcttgccgcccatactgcgtaaccggccagctaccatgcattctgggcccggcgcctgctatacctgtggcggtcgggggacctctgtaccctgaggtgtttgacagccactggcgtctcacctagaggctacttgagaccggcgcggcattggcgttctgggatgcttgtgtgaacccctgcgtatgaccgccttgcaacgaggctcaagctaagggttcggctgcgaagcgtcagttccaacttcaagcggagctcactgcgaaccacagtgcgcgagatgtcaagctcactctcagtgccatgcagacgcccttctgaacgngtcttaagccagagagcgctct

SEQ ID NO: 1179 - DNA, 792 bp, Emericella nidulans
aacaaaggacgcaacacatatattgcaaacatccatatcattaccatattcatgtgctcttctaagcccaggtggagtgcatatactagtatacaacgtccacgcgtcaagccacatcaggaatctgacgccttaaaggactctggatctgaagaatgtgaagaaatgaacacagtgcgctttaaaagaagatcgtcataatgcaattaatgaattcttcacacggagtaggtttgttctttgtagagacaatgggggactgcgtgaatctcgtgggatccgatgcctatgagaatggagttctatctttctacagggaggatgctctgagcctgttgaatgcccctcgagacaaattcatcgtttgtcatatagcttatgtgccatcctccaaattttggcttgggccttgatagcttgaacttttccttggtgggctggatgataccctcaaccgtaaaggtttacacctttctaaattttaaactccctttaaagtaggtgttcaagggttaaaatttcttttagcataacagggccccccataaaaagtcattgtgtttatctgtaccatttatctacttttccaaactacatgggcgactctccaggggttgctattttttggaaaaaaaacaggaacccataataacagctagtatttatttctatacaccttatttgtttcacaaaaaatattcaaatatgatctaaattaatttcttctttattctttaatttttcttgaagtgtataaaactccatcatatttatttacttaaaaaaaaaaaa

SEQ ID NO: 1180 - DNA, 1437 bp, Emericella nidulans
atatttgtttactgacacatccactctgaactgaggcctgtctgtaggcatcttccatatcagttgctggataacttgctggcaggcaattatcaggtaataatggtctgcaatgcatgaatattactggcgaatgtatgtattggctgggatctacaatatccccactttggtgcgctcccagcgcctatctcgcctggcaactacatcgcaccgctcgtcagtgagtttacaggaccaatgagattcaacgcttcattcccgagaagataggtatgcttctgacgcatctgcgcaggatgagatttacagtacgggatttacagatcacatctgccactgttaaaagtacatccgtcgccaatacagcggcagaaaccagagacccagaccgcgtttctttttcgtctctcaagaaggaactgagccttctctcattgccacaccgattgttcgtcgactagcccctcagtagttccagacgattattgcgggtcgagaagagtcaagacttacgacttccttactcgtacagcagatgctagcttattcacaggcagaatgatgcagccaacatgcatgaactgtcctgatccacataccctaccatgcatcacaattatggttatctcgatcccaatgagaggacacagcggccacccttgctgcccataattccatgctgccacttttaacaacctattacactacttactctttattctattcctcactctattccctaactcacctatctcttcttactaccttcattacctactccattcatcttcctcctcttttacccatactcactcttctctccactcccctatccaatctcttatacgtcctctcctctcactcttccactcacactctcacctttccctcttaattccattctcactccatctctatacatctcatctatctataatactttatcttctttccccccaccatccattcactactactattaactcatccatcactttcaactctctctcattttctttctttcctatcctctatcaccttatttcctctatctactttatcccttaaactctcctttcttcccattccccctaatcattacctctcttcctcttcaccttcaaatacacccattccatctacattactcttatctcccttattacttccatacaatcatctctacctaataatcttctactctacttacaatttcttatttcttctttaacacttctcctaaatcctatcaaatacctctctactcatcacttaattatatcctcccctaccttctcactccctcaccttctctacccaatatcttatcactctctcctattcccactctcatacctcttattataccccatactataatctctctctctttaaatccctaatccctactcttcaatctcatcttactcatct

SEQ ID NO: 1181 - DNA, 548 bp, Emericella nidulans
tctaaggaacggacctgctcctgctgtggtccggacgtttggcggaggccaggaacaccgacgttgtgcttccgtttctgtttatgcttgaggccatacttcactaatgcctggcaactgtttggagccaaaacggagagtgactatgccatagccttgatgtatctgactgccacttgatgtgtgagctcatgtcagcccatggaacagactgaataggacctggagtccggtcagctgcagcctagccggccttggtcagtaccctattgcatcccgaaactaccactgcgaggactgtcatgaatgctgggtatccccacgcagctatatcacccagctaaagcgcctagcacgttgttagcaagcaacagtccgaaacatactccttctgggtcacggactgaggaaacgcgtctattggtgaactttacgacctgtcgctgaagctacactataccctggctctcagaagacccgactatcgcatggagcaggcctaacgctgagatcagacactagaggcgcaggtactccctgagaagaag

SEQ ID NO: 1182 - DNA, 430 bp, Emericella nidulans
gcagacaaggatggaaaaggccttggaattcaacgacattgcatcggttgcggggctccacaactatccatcttcgccatccaaactaccgtcgacgccgcattggccgcgagaaagagcaaaaccaagggcgacgcgacctcgataacctgcctcaaatgcaaacccacacggcgactgccactcaagcttccatgcgctatatgccacgaagtagtcgaagggatgctcacaccgtgtctcggctgcggccacgtctgttgcttcagctgctaccgcgactggctctccgtggcctccacagatccaacccaacagcacagcgatgacagcgaccaagagccgaattcacaattctgcccttcaggctgcggctgtaaatgcgcagatcacggcatgactgatatagtggctcttcacattggcttgg

SEQ ID NO: 1183 - DNA, 3436 bp, Emericella nidulans
gaacaatgcagaaatgtttaataataagaaagtaaactaccaaatattaataattaattaagaagggcaaaataacacaagaccgcaagggtatagaaaagtataaataattatagttacccagcggaaagacttggaaaaacacaaaataaggagtcattcactacataaatattcaaccataacaccacggaaggaataattagtccacaggttattatcccaaaccctaagttagcagttctacccaacaggataagatggggaaagatcctgtatatgtagagcatcaggtcaacagaaagagtgattttaccctttgatgaccctattatttttcattacaatatacaagggtagaacatagcgaccttaagtcccaccaaaagagacctaagaaggggttatgccacatcaggaaaagggaaatggcgaagcctatgcttgatggcattccccacccctattttatgggaatccaaccctttgtggctccccctctaccagttaatggacagtacaaccaatctacccctttcgcggccaatgcctattacgggaatgggaattaccgccttgtggagagccaacctaagcctgtagggtcccgcagacatgcagacggagattcggctcagctttctcgctttaataaccaccccatcgagtattaccgtaatgagatctatggcctttgcaaggatcaacacggctgtaggtatctgcagaggaagttggaggagcgcaacgatgatcagcttcaaatgatcttcgcggagacacattcacatgtgattgagcttatgaccggtttgtctttcccacacctgcgcgcgtgggtcattgtgacgagatacaggttaactaatcgctcgccaatttctagatccatttggtaattatctgtgccagaagctactcgagtattcgaacgacgaacaacgcactgtcctggtcaataaagctgcccctcagcttgtcaagattgcgcttaatcagcacggtacccgggctttacagaagatgatcgagtttatctccaccgaagagcagacacagacggtcatcgacgcattgaaagatcatgtggtagagttggttcaggacttgaatggcaatcatgtcatccaaaagtgcctgaatcgccttactgcagaaaagtctcaattcatctacgacgccgttggggctcaatgtgtgactgttggcacccatcgacatggctgttgtgtcctacagcgctgcatcgaccacgcgtcaggagctcaaagagcccggttgattgagcagattactgaaaatgcatttgctcttgtgcaagatccattcggcaactacgttgtgcagtatatcctggacctagctgaagctcgcttcacagaacccctttgccgagagttcctctctcgtattccaaaactttccaagcacaaattcagttcgaatgtgattgagaaatgccttcgcacagctgatgaggagatgcgccgtcagatgatcgaagaaatgctcgctggcgatgagctggagaagatgctacgagactcttatgccaattacgttgtgcagaccgctatggactatgctgatcctgcgactcgcgctcgtattgtcaaatacattgagcccattttgccctctcttcgtgggaccccgcacggacgccgcatcggcagtaagatagcgccagagaactcgggaagaagtagcgccgcagccagtggtcaagttacaccaaatgagatgaactccgcgcagcttccacaaggatctcttcaaactcctcagaagccacttatgtatcaccacaattcctattctgtttctggcactccattcaacaaccagagttttatccctgtagctgggacaggttcgaacacgccatctggtgctagtgagaattcctctggtgcttatagcgccgctttaaagcagtcgaacaacaatcttggcgctcagccgcagttgtacgctccctactaccactgaccgagcgtcccggtgtcgacgattgattagttcactgcctgttgaactgtactcatacgatcatgatgctacgatctttgacgacttaacggctaccctcttgacatgctgtcaatgcattggggaatgataccataccaagtcctttgtcttttatgcaatgacgttgcatttcctggtccatttcttgacggatactacgcctattctgtcttgtatttcatcgaacatttgaatgctttcctttgcgtcttatgacgcttgggatgctatgtacgcttttttgctggtcctgtcttcctccttgttaacagttcgttcgcctgtggggggaacgaggactttccttgtgatctatcgcagccgtccagaggaccattctctgcgtcgtcttttcaccacttcttctatgctttggggacgaattacctatcgtttcccatgtcattgttccccttttgacacgccagaacatgcggtagaatagatgtatccatatcgacaggcagccaagatatccgtttcgcgattccatttgtcttgtattttctttcgttctccatctatgtaccatctagccatagcggtagaattgatttattgaatcatcaactttttttttgcaatctaaaaaacctgatagtaataacaaaattcaatgacctcccaaccgactgtctttcatgtagtggtcattatcaacacgtgactcgacggtaagtttgttggttccacgcgtatctctgcttaaactcctcttatgatatattggaacagcttcggtttctcgaccgcatgcattaaggagatttcgatgctcataagaatctattcctatgctgccgatcgaggtgtccaaatctctgagcccgcaatggccctgtcgggaagttcaatcgcggcagtcgccagtctacttgcagtacggaccccaatggctttaagatatacagattcttaagactcacaataatctgatcgcttagcccggactgtctagcccatccactgttgtcattcacgggatatccgccacctgcaagtcaaccatcgtaacgaacgtccttgcactactcgaagtaccgcatgctattgtccggagtccggaatgtattacaggtcggcatttgttgacgaagatattatgggctgtgttgaacgcagtggaccgcaaggatgaatgggagcggtttggaaaggggcgatgcgaacatgtcagctctctagcagttttgttgggcgaatgctagcctcgcaccctggaggagcacttgagaagttcgttttggtcctagatggaattgataaacaaagagaggcgccgcatacacttttatctgcgctggcaaggctaggagaagtggtatgtcaggggttggtggactgtcaaagaaaagtactaactatccatctctttgcagattcatcactaaccgtcattttg

SEQ ID NO: 1184 - DNA, 481 bp, Emericella nidulans
gtgacgaacaggagaaaccgcatggttctcgccggtgtctgatccagggaggaaaagtaatcccctcgcgcgccagcatggccaggatcaatcgaacactgatactgcgcggatacagcggagggactggagctagtcagcatggctgagtcgcacattgctattgggcttgtagcaactgagacatagcaatattcgatggtacaggcagaggacaacttgttgccttgtgaggtatgctagggctgtggtgagcgatacaatcgcatccacagaccgagcacctggaacgagcattcactggatacattcatgcctgatgagaaaactcttcgatcgctactgactaaaatatgaggtgttgatacagctggtctgccatgagacttcaatggttcactcatgacgtgaggctctctagtcttgactcacctgctgtcccagggctacaggcagctatatgttagagactttacgtaca

SEQ ID NO: 1185 - DNA, 1170 bp, Emericella nidulans
ctcgactagtactaggggagaaagcaggaaagccttagtgtgagatattggttccttctcaaaagctatacagtgctcacaaatccactcagcttcatttactctgcctttctcgttttcgttcatatttttgttccctaagtcttccgcaatacataagagcattcatcccatcagtccatccatccgcaaccgagagactattatccccactgtattgaaaatcgattacctctccagtggctcgagagacacgcaaggcaggaaagtcgtaaaaggtatgactcaatagtacagggatatctcttgaatagatatcgtgcttaaccgacgggtttaagtcatttcggaaccaggttcgtaaggccaaggtttatgacctggccgggggggctgagcaaataaagcaaatcgtcatgaagaggacggttggatgagtatccccgtacactggttcactgcacaatttgaggcgtgacgaataatgatgagttatccatttatcaattagttgttagggcacgcgctttgaatgtggcccggctgcttgcactggtagcaaacccgctcacccttggcctctgtgggacaatcgcgcgaaacgtgacctgtctcgccacctgtaataacaatgtcagaatccgaagcatggaaacgaaaggacaaaaagcaagaagttggcagagcagcttacagttgtagcacttctggccttgagtacagtcacgggccatgtggcgaaaccaccgcaggagtagcaggtctgctgacgaccaccgtagccgcctccaaagccaccaccgtaactgccaccctgagagcagttcctggcaatgtggccgacgcgtccacacttatagcattcctggccgccagcggggcgcctcgttctcgccggcttgggggcattcgcgagagatgtgaccgacagcaccgcaacgatagcaggacttctccttgggagctacagtgcattcacggcctagattgagcaaataattaacctctgtcagacacaaatggaagggttgtacccggtacacttactgacatgtccttgtcctaagcgatcgagaactaggttaggaaaagacttggtatagaaatgggaaacagatgtgtcataccaccgcagttgtagctaaaaacaggatattagcaagtgggcgc

SEQ ID NO: 1186 - DNA, 726 bp, Emericella nidulans
tttcacatccactttcacatccacatccccttccgcttagttgcctgtacttctttcctccactcgcgccaccagcgtcttctccgatagaactttgcctcaggagctttccctcccggcgtcttctgcagtcctaagcatactctgaagatctctgcttaacttcatatcgcgtcttttgctcgccccctgccccaacaacacaaatcttcccgttgctgcgtgccgctttttgctcccttttttcaacaccgaccgcggcctcttgttgaatccctcttcaccctccggtcgcttttcccggagccgcatctcttgtcgctatttacgcgctttatcatcaccttcggtatttgcgtcttctaagtcatcttatctcgcgcggccttcgacctcttcgtcccccctccctcgctcaccagggccatccggcctgtcccgcctctcgacctcgacttcaccagatcctgtttggtaagcaaattccacgcccctctctcctatcgctatctcccctcaaaccacgatgaatttttctttcgcgcattgagcacgcgcctacagaatctatttaccaaatttcattctctttttactgtgttcgtttggccaaaggtctttctaacacttttgcttcctctgacagtccgtaggcgccgcgtcatctatcgtacactgaaccgaccgctccgttagctatcctctcgccttcttttctcgtcgccg

SEQ ID NO: 1187 - DNA, 1158 bp, Emericella nidulans
ttgcaccttcctccctccgccttgactcgttttcattcgttgtgccctcacttccttcagaaaaggtaccacgtcatcatacagtttatacccccttgcactcgcaaagcgctcgagaaggtcctggatcaacccatcaggaactctattccctcttgctgaatttgcagtcgggttcgccgcaagcgcccgctcaaaacatccgcgtatcacatcttcccaccactgtcgcggcccagcatagtccccgcgcagggcgagctcacgcccgtagtttggatgcgaggcagaaagggctttataggaggcgccgaacgcgggttgtagtgcagagggggatatgcggatgttgaatgctgaggcggagtgggcgtattgcgttgggattgggaggcgagggtggaagagggtattgaatgcgtcaagggttaggagcaggtggcgcattctgggcagtcggattggcgtagaagtggtactctgagctggaacgaatatgaggtggtgaggaggtcggttaggtcatgtcagggtgcgtgcggatagtgaggggaatatggtgtggggtttctaagctcctcacactataaaataaacaatggagacctcttgcagtgcatcagaattatgcattcagaattgttcattctgtttagattctacttagattcttcttccaaacgacatactaattctagagaggatatataagccagactataaaaaatagtatagttgttccatccattcttacatttaattggcgacttgggcctgttcctgcgctgagccatcaacaagtaacgtctctattcgcgtattaagtggtagttacttggtcataagcagtcagtaggtataccgaccgtaatcactatcgactttccaattttaccttatgacactattttgaaacacagtcacctattcaatgcagttagcctaggcacctgtccatgccgttctcctcaatgatcacaagggaccaacgctgtcgcactgtattacaacttgttcaacgtggttgcggcattcgtgggcgcacaattggagaaagatacaagacaggttagaattaacggggcttgagaggatcaaatgcccgtgctggttatagagtcgttgactatgatctatggtataaataggacgagcatg

SEQ ID NO: 1188 - DNA, 2519 bp, Emericella nidulans
gggaaagagataagcacaaaaattaaatagtataacaaaacgactcagatagggaatgttaataaaaatgagataggatatatcccatagtgtcatgaaaccaaatccgttttaagcaacacaccgtaaaaaatgacaaaaaataccagatgggggggacacaaaccccgccctggtgggggatacccaatataagagacaagaggacagcacaaaacaaaataataaattgggttgaacgacacggccactggcccctggtatggaatgattaaaaaacgctacaccaattaccctggaatggttaagacaaagagaaataggttaaggccccatgcaccaatgagagagtcaagtcagactttgcttgaatgacatgcggcagatccccaagcaccggtgcggtgtagtctgtcccttacacccggaatgcctggcaccccgccgctggtgtgatcagaatcatcattgttcggcacagcgtctgaatgaggctgatctagcttcaggcgcgtaggaggcacgtcatcctgagcgctcgaacgtgagagtgctcgcttatgtccgtggaagtatcgtggatagcgcggggcccaagttcccatttccagctcgaaggtcaaccgaagacgatcgcggcgacagctgagagaattctgcagtagtcgaggacaaatgttcagttatcggactgagtggacgcggagccgacgtcagaaagtctccgttgaggacagtgcttgtttcttctgggactttgaaaccaggttttgcatcttccgcaatcgagatgatggcataaaccgcgtcgcgcggctccgacgtattgaacatgtgcaagctgcacagtaactcctccagaggaagtgatctgcccaggataacaccattatcttccttgctgaagatatggccggcgagatcaacgagtcgcgcagctgcggactcgcccaagtcgccaaagtggtgttcatcatagttgaataccggcgaggtgcggcacatgtgacgaagtcgtgtcggtgcgctaacaaagaacgaagtcgcattggcaaagacgtcccaggagattgactcgccaccgcagtagacgatggcagttttggcaagcgcaatctcctggataatccagcgtcgactaaaccagggcctcgtgataattttataaagagcggcccagtccttcgccaggttcgcatcagtcatcaagctatcggtgtcatcgtcctggagacgattttgtatgaaatgaatggccctggagctctcgtccttttcaggcccgagccatacacagaccctttgcgcctgactatagatgcgccacatttctttgacctggccacccttttcctctttatccttttgatttatgcaaagcgcgtcgacccagaggtaacgaggggagcgaggctggcgaagctggagcagggcggctttgaggctggggtaaaccttgacggtatgaaaatcgtcgcattggattatgttgagggattgttggggctcacgagactcccacgcatatgacaaagcctcgtatggctcaggatcgggtgctcgatcaccagggggccgttcgctttgcatgcgaggcgtatacaatgtgcggacttcaagattgcagtgcagctcattgccggcttcaccagcatgaaccttcaggaggcgaaactcaccccgtttcaactccgaatagagcatgtcaagcagcacgctccgtctaagaaagcaactttcgactgattctagcaacgaatagttgggcaggtatactcagcgttaatcagtgatgtattggttaactggcgaccagtttgtccctatatgatgtcggagagatgagattccagagcttgttagtggagggaaataaaggaaaaaccagaacatcgcgggcgagcaatggcatcgagcctcatcttacgcactgcctcgcgagcatcgcgtcgccgcaaattgcgcaaggctcaaacgcaggaccagggagaaaatgataagggcaaagtgtcagcacacaatcttctcagatgatcagcgtgtcgagggctgaaaggattagtcctacatcttattgggcctcctcaccctatagagttcggcaaactcaaccccataagggatcgaccatgttcttagcctaatgaataataggactgccgccgaaatcaagccttcaggattcactgatcgcatcctggcttagttggaaggctgtgcagcggttcttatgatggctcaaccagcctgcaccgcccctctacaaaactatgaaatgccaacaaagcgcttaagcagtgactattgctagtagacatctgtttttgctcaccacagcgagtgctatcttcgactggaccgcacgtacacgaatattacgcatcctggagaggaatgtatattcccgcacggtgagcatcccacaacccaccaaaagcctcgtcttatctagaacctctgcaggcggaatcaggtgcttccgcgataatatcagacgacagcaaacatccatggctgac

SEQ ID NO: 1189 - DNA, 1993 bp, Emericella nidulans
tgtaagctcccacggccttcaaggcgggaaaatggcacagcacacagcagagagtggttaatcaaaccatctagacaagaattggcacgaatgattacccatcttcgcctgctgacatgatatggcggcctcggacgcgagtgcatgcctgctcttcttcgactggaccattgagccgggtaagataattaaacaccactcaagttcttgaatattctcacgatgacatccacctttatccgccgaagccactgaacccccttgaaatcccacctcacagggtctcgcatgcaatcaccaagcgttatcaacgcccaacatctggttgctgcgtcgcgccgtcatggctgtcgcctttaccccgttggtcagccctcgtttctctttcggagggcgcctgagctctaccaaatagagaagctgcacagattgaccccaataggatgacgccgtcttccctctcacaccagcccaacggaaaagcgggtggcacagaagtccaacaatgcgaaacgcaagaaccagagcttggtagggaattttcagcttgttgatacagattctcaactcatgatctcgagcgcctccaatttttgcgataccaggtctgcttcatgctctttttttttcgcagttatcggacgcacgctcttccaacagctttggccctgaaggcgagagccgcctcttagtttgtttgcttttttatattttttgtgaatctcgaggaacaacctagcgggtcacggaacttcctgcttgttttgctcgggtagtcttatgcaccattctgctcgacatttcgctcatgttgcatcggctcgacaacatcgctcgcccgcccacctggtacattttgcttcactttacttttgctcgtcaattaagtttggccttgagcattcgcggacaggaagcagatttgacgatggctgatcgacagtgtagtggtcgcgcttccaactctttgtcttaaagaactttggtttgtggtgcgcagaattcgcccaggatcatcagaaccatcaacccttcacgagagacgatcagtttgacgcctgaaggtgccccgaattgcaatggtggatgcaaggattgtggggttacgtggaggtttgcctatcgttggtttgttcttgcgcagttcttcaccgccacatgcaacttggacagttagatacatgcctcgtctgtccaaaacaaccagccgtcgtgttgaaagtgaactagctcgcagcttctgaaccctatcccgtttgatcatggaatgactttttagtcccttgaaggccggagaaccgcacgaatgtgacggtaatctgataacggatgggctgactgatgaagttggagagcatgcagcgctttccccttccggccaagatgattccgaatctagtctaggctaacgtcgaaccattaacgttcaagaacaacagcatacctggaccctgccggaatcaggattcaacacgcccttttattgtgcaacacctccaacaacaacaacaacatcaggggcctatgaattgcccctaattgatggacaatgaactccaaacggctctgattgctattctgtatccaaatctaaacagggatcaagtagctgctatcaccaaactccatgacttcaaaacaccttccaagctaagtcgcgatcatgccttcgtgaatgtctatatctatctatacgtatcatatctaggtattaagtaaaaccacaccacgtgtcgccctggggctttaagagctgaaggaagttctgcgcaagcttgttgaggcccgtcgatgcttgcaacgttgttaagatgctgggcataagcttgatataggcatcgttaagctcggggtgggattgtgagaatcgggcgcccagaaggagcaggatgggggtcaaaggatgcatctgctagtcttagcaatcagcttacacttttatcacacttgattggcgcaccttgaagtgtggccaagtcggccccagcaaaga

SEQ ID NO: 1190 - DNA, 2893 bp, Emericella nidulans
  unsure (1)..(2893): unsure at all n locations
aaaaaaatgaagaggaaaaagtagaaagaggactaagaaaaaaattttttcaagggattaaaagacaaccataataaaccccattataactttcggaaaaattggcggattacatctttatcctggacataatgggcctccccggaattgtcaattccagcaaatttgaagacttgtgccacggaaccgcggccattcaatagcgcgcgtaccgcgtgtgcgtataggtagccactaggcgcctatcttgtccttatgagttatcaaattggggtgtatcaggaggaactcgagcacaaatggcgacgcccccgaaatggacgtgaaagagccggtggtgcttgcggtccgctttggcctggcagcaccccgagggaaattgggaagctgatgagtgattggccgatggttgcgggttactgtaaagagctgatatcgcggttggaggatctaaatggtgaagggaagggacttgttgagctagatgagggcgggatctttattgacggagtcggaaaggccggctttgatatcacggcaaagagtgagccgtggagacgggggtactttcaggctcttttgggggctgcaaaagcagcagagaaccttgagggttggctgactgatcggaaacaacgcgtttcagcatcggcagagtattttgttggcccatcgaatccccgtccgaagcctgtaccccttggtcagaccccaccgcgtgaggaggactctgagccggcatctcctagtcctgaggttttctacatgaagatcctgacgacccgcggctttaacacaggccagaaaattgatgccgcactcgcatacgccgactggctggactacaagggtttgcaaagcactgcggcggatatgtacaaatgggcaatagatatcgccgcgtcaggggcttccatggatgccacgaaggtggtagatctgaagacaggcgtcatcaatagcgacagccaaactctgccgtctgaaaacatcctccgggtctcaaccgctctcggagtccaccacgcccgacacggaaacctcccaatggccctctcaattttcacctctgtcctcaaagcccgccgtgccatctctccacctcctcccggcaccatcgttcctatatcttcttccatccctaagccaacgaatgacatcttcgtttccttcttcaacaccctgaaaaccgtctttattcccgtccagtaccccccaccgccccccaccggaaacgacacccctttccgcacaccatcttctccctgcgacgaagcaggcctgatgacctatatcggcgaaatcctctacgcaactcactccaaagaaactggcctggcctggacgcgcgacgcagtcgaccttgctgaatcgacgcttccggaaacagacccatcctcgcggaacaaccgctgcatcgactgtctccgcgtcagcctcgagaactggaagacaatggtgtcgcagttcctcgagaatgctcaaaaggacgaagaagagacgatcaccaaggcgaagaacggatcttcctggttcggcccctcgaagagacagatcgaagcaaagacgctggtgaggaagaggtgggaggctgagcagtttattctgcaggcacgcattaagaaactcctaccggttatcgaggacgactctgcgattcagggtgtagtgcctggtgtggggttgtcccagtacttccttctcctatctctttttctattttgatttctctctctgtctttttgcttaccctcctcattttccttcgcttttctttctcctctcccccctttccatcgctcttccctctcccccttcaccattccctattctcctcgccctctctctcccttctcctatcatatcatctccctccctattttctcgctcaggtcttcctcttatcgtttcaatcctcctctctctatcttaccttccttccgtccctcccctgtggctccttctcttcttctcttcatatttcgcaacttccccttgcacaaatggcncacaaatccttgttttcctctaacccaattaacccttttctctatcttgcctctctcagctctctcttcttctcttaccaaaacttcgtccttcctccacctcttacccacgcgctttttgcttctcctctgcctcctctttttcactcctcctttctcattttaccatccggctccccttaatcatatttctactttttctacactctaacaccacctctcttcccttcctcttcacccttcttcactccgcctttctcttttttaaccctaacccctcgctctctccgtaaacctttttcttctttttccttctctgtttacactctacttctttctatcccagctctcctaccctctcctctactctctttccctcactttccttcctcctcctctatgttcttctatgtgtcctctctgataacttctaccatcacactccctcttatactccttcctttctcctctcgcttgtctctctctcactcaccttgctcacctccttctctctatcgttcctctatctctgtctctatcctctctccacactctcctactctctgtagcactcctatctcttcttctatctcttgtatcgctcaatccttatcatatctcctcatactctctgcgtatctattattgcgcctatctttttctcacttctcttctactctgccttcctttctcttctgttcctatctatctgcttactcattcctatcctctatcatgtatctcctcttgcctcttatttctttcacctccctcatattgttcacaccttctctcacctcttatctcctcttcctctctactcctttctttactctcgtctccttcattctcccacttctctccttcctttcctcatcctcctc

SEQ ID NO: 1191 - DNA, 5287 bp, Emericella nidulans
ggcgaataaccctactaaagggatctgggttctagaggaaattcaggaagatgtcgcttacattgactgcgacgagtcttggaatattaccgccatccgtggggctgctggtagaatttggggccatgggatgaccgagattggtcaacatctctcgaaacttcttcctcaactgcctccaagcagcttgaaggcgccggcggagaaaggccttagcgaggttgccgatattaagtacttcgcagcgtctacttctgggccaatctgcacaccggtcacggtttctaaagacgagcgctctcgctctttgcgagtatctagctaccctcacgtcgccggcatcatggtcttgtcgtcctcgagcctaaagatcgttagctcaaactcggtcttctcctcagtattatttggctatgagcggccggagggacttgacataacggacctcatacccgggtttgacgactttctatacgtgatctcggaggaagagaatgtgcctctagtagacggcgtcgttattccggagctcagtttccgaagagcacggaccctttccatgttacgggacggcaaagcgaatgtcgcgtcggtcttcctggaacctgctggtattacggccaaacatcgcgacggatcaacaattgctgtggatgttcagttacgcgtcgtgaagagcgggtcaatattcccaaagcaacgcgagaagaaaggcgatattgaggaggaggctgacgataggcccgaaggtgccgtcacagtaacggagcttgtgtacgctctatggatcacctattcaagaaatatccactctcatggttcgccggtgcggcctcctacaccgcacgaagtatcttcatcggcaacaagcacgcctgaaaccccaacttctaagccgtctccagggacgcccactggtcctcgaattaccgtaccggagggcatgaaatcgaggataccaacgtcaactttgagccagcagcttagcgaggcagcgtcggagccgctcaccgacaaacctgtccagctggtgccggaggtgaagccagctaataacaaggaggctccaaagaagcgttccatttcggattatgttattcttgaggaaatgggtcaaggggcgtatggtgaagtcaaacttgctcgcctcaaaaaggtgccctccaagaaagtcgtgctcaaatacgtgactaagaagaggattctggttgacacatggacccgtgaccgtcgcctcgggaccgttccattggagattcatgtcctagattatctacggcgagatggcttgaaacatccgaacattgtggaaatggaagtattcttcgaagacgacatcaactactacattgaaatgttaccgcacgggcttccgggaatggacctctttgattatatcgaactgaagaccaacatggatgaacaggagtgccgaaatattttcgagcaggtcgtcagcgccatccatcacctgcacacgaaagctttggttgtccaccgtgacatcaaggatgagaacgtgatcttggacggtgaggggaggattaagctaattgatttcggtagcgcggcctatatcaagaacgggccgttcgatgtctttgtaggaacgattggtaaggtatctgccgcaatctttcttggccaaaagctcactatccttctagattatgccgcacctgaagtcctgcaagggaagtcataccgaggcaaagagcaagatatatgggcgcttggtatcctgctgtatacgattgtctacaaagagaacccattttacaacatcgatgagatcctggaccatcctcttcgagtccctttcataccattctcggaggattgtatcgacctgatcaggaggatgcttgaccgagatgtggacaaccgcttgacgatcggcgaagttatggagcacccatggatggttgacggctgaaccgaccacggtcttcgctactcattttggataagccaaactgccacacaaaaacagcttatataccgacattacatacatgacatgacatggatcttgaagtcaacaacgaaattctttacctctcataccgacatatctcacgcataacaacaattcaacaataatgccctctttacgcataacgaccagaaccgacccgaaaggaatatagttatagttacgacggatggaagtctggatgggctctttgatgcagcaaattgggttcgacctagtacatagcgcgctgtctttttatctttactctctttatcacaaaggactagtattaagtgatatagatgtgaggagatagccagataccccgtgatataggattctttagttacagactcatctgcaagaattggattgacatgccaagccacgaactttggaccttggtgccgcaacaatagagtgtggactatcgactgttcagaggcactagtactacggaacgtagaccactgagtgcggggtgaagaggggagccacgtctcggccggactgtccatggaaggcaaatcatcggacaaactccatcgcggtgttctccgtattagtgtcgctccacttctctgttggcgagagatggaatatgggcacgccaggcccaagtccaatggtcggcctgggcctgactagccaagtctccccttcatttgactcgtctagactcccaagctgctgggccactgcggtggcaaagtattagattgtccggccgacgcggaccgtgggctggtctgactggttggggatatctaggaacggggaaatggactgttgaacgggaattgatagacgagatggacaggagaagtcgaatttgtggagtcgatgcgagcctggctcgctgggtctcacgtgatgcgcggtttctgtgatctctagctcgccgggcggctctcactctgaaccgtaggggagagaaatacagtactggtaggaaatgatactagtagtactagtaggacatgaatctcgtatttaatttcctatgctgtggtaggtggaagatccaagtgctgtatctttggcaactgtcaagtggggggccacccgtagtgttagagtgctatcgataaagccaatgtgggggaatcaactgttagtctaacggtgtgttcttggtcagtgataggagtgcttcatatggacatacggagtagttctgatggtagcattccggtctcctcgctgcaacattccaacaatcagttagagatggtttggactgatctgacacctctgttccacatcgcctgaccgagtgggctcagactgtcttgctttgaggccttcccctccacttacagtaacccacctgccttacacatccacgtctcccgatcccgggcccaaccgctttcctctacactcttcttggttattctctactgttgcctgctattctttttttgtgagcgccgtcctcattgacctcaatatctagctttcgctcttgccgagtattccttgcgttggccttgctggccgactgtcagctcttatctactcctggttacgcggcaagtcccatggttcaagtgcgaacaccacctcttgcctgtcctccaaccgttgaccgtctcgaccctgtcgcttgaccggaattttgctcctcctgaccccaaacctcacgccattttcgctcttgtcttcttgtctgtgctctcgtctttgtcgacattcctgctcatccatacatccactcattttcttatctccccttctgtttcaatcaatgttggtggccggggtttggcgccatatcagctgctgattgcggatatcgaggatgaccactttctgaagactgtgtgcttgcgggttcccgcggtatcactgactgcgttctcgaaatcttttgtttgtgtctgggtttgggggctataaactactcgttcatttaccgcgtcttgctctttatcctacttgtctaccccgccaacaatggcgacagtagaccctgagatcgtgcctttccctgaggctcccacttcagcgagcccaagctcatcggcagaccaaatcccactccagcaggcccagaaagtgaaagggcgacataggctcctgcagggtctccagcgcttttcctccagtccgtcgttgacccggcgcaatcgatctcgatcggcgtccaccacctaccgtcagaatggggcttcgttgtcctgtgtctcgctctctcagtcagcgtatgctccctgctcgagcaatggaagcgcaacacagctctacggtggtttgaacatccgtcctacaaccccggggcccactggatcgcatgcggcagatgatcaggaaggcaatgcgcgtattcggtttgtcgcggacaccatcaacgggccgcagcctaaaaaaattgcgctgcccactgaaatgaggcctggatctcggggtgctgtgcttgaagacactgctctcattgcaaagccaaagcagttcgatttctggggcaagatgcctaatgagctcgggatgctgatattcagctatctcactccaaaagagattattcgctgctcgacggtttgcaaatggtggcacagaatgtgctatgatgggcagctgtggactgtaattgacaccacggactactacagcgacatatcatgcgacgcgctcatgaagctcattatgtctggtggtcctttcataaaagatttgaaccttcggggatgtgtccagttgcgagagaggtgggagaacgaaatcgatgagatcacggccgtgtgtcggaatgtcgtgaatttctctttggaaggaagccgtatggacaaatatcctgtccactcttttattgggcggaaccagcgactgcagtacgtcaacctggcgggcctagacagtgtgacgaatgcaacgatgaaaatcatagcgaagtcatgtcaccagctacggactctaaatgtctcgtggtgcacgaacgttactgccacaggcctaaaacgagttgtaaaggcttgccctatattggcagatcttctggccagcgaaatccttgggttcgacgaagtggaactttcctcggagctattcaagcggaatacactggagcgtctggacattagccggacggatatcaccgatgagagtttgaaagtacttatgcacggcatcgacccggaaatagacatactggaagagcgcgctatcgttccgcctcgacggcttaagcacttagatctccaccagtgttctgagctcccggacgacggtgtgaagactcttgcgcataacattccccaacttgtagggctccagctctcgggttgccctgagctgccgtatcgttcc

SEQ ID NO: 1192 - DNA, 6100 bp, Emericella nidulans
ccatacaacatcatgcaggtccaagtattgtgagaagccaacgccggttaatgtcctgcaaccattaatatgagaatctataaaacggactggtacagtacagtctgcgcaaacttttaaaatctctgttcactgagtttttgaccgtgttaattatggccatagtagcttactgtaatatttgtattgtaatccgaagacccctcgcggctgtatatatttaagagacggcaaggctgaagactagagacacttatacagatcagaaatcaagctctgctgaatatggcgttccaatctactgagcccattgggccgtcatatcttgtaagccagcctttggggctccgctctctgacctcaactgactgtctagactgtcaccaataagatctttaaggaactcgtcaacagtgatcatgctgcccaggagtatcgcacccatatagagtcccggttaagggaggaacgtgccaatctggagcaggaacgccagtgctctgcagagcttgagtcgaggatagctagtttacagtggtcccgaagccagttagaagcaactgtccagcatgctgcagaagcggttggagggcttcagaaggagcttgaggacctgcgaaagaaatctggaagttcagaatgtcgggtggttgcgctgtcctctctgagcgacactttgctgaagatattatccaatatctctgctttacaaagtgctcctcagggggaagttgacattgtgcagatgtctacagagcttcaccgacaacaaaacattatacgtggactagagcagtctaatcaacgccttgcagattctcttcagggtttgaagactgccttagaggttactttgattggggagtcatactgggcatcagagagtgataatgaaagcgtcaccatggtcggaacgaccagtgagagtgcaccacttccgggcccagaggtgaatgctgatgacgaggccattgggtgcgagcagacctatcctactcaacgctgacgacggccactactgtatcaggtcctatcgacagctgtccagtagctttgaatattgttatcttctgcgcttgcctctcagaccgtgtccgtaaactcgaagcctctggcacgaattgctttattgaagaggcttggggaaatatactgctaagccaaaatgtcgttataagtaccagatttggtttttaaagtcatatttccagttaacaaatagtgattcgctgtccagtgactcaggagtaaaatactaggaggtatttgccagaaatgaaaatgacactactgtatacgtgaatctgctctggacagtcgtaatggggaacgagtttgagtctgacacctagtgcccagtgtccccacccagctaaagtcctgaaccgtcagcgggctgattgttaagttaggggattgcgtaactgccttgattcaaatgtattttacaagagggcgataaataccctagccctgcgcttgacgagtgggtctggatgtcttagactctagcacggctccgcattcacagacgaaaatgacgaggccaacaacaataccttcacgagattcttgtctacagatactgcgaacaaccacatcagagctgccctaactagcacagaacctaccagagatgttcaagtggcagtggtcggcactccgaaaaccggttaagtggtccgattcagaaatgcccagtcagctgagacagcccggaacaacacagcatgactggagaaactgggaatgagaccaagctagtgaaaccataattcggtgttgtggtccaccgagttccaaatcagacatcctgctacagggaagtgcaaaagcagcagcttcaccatttcacactctcttctggattctcggcccacccccaagacgctagtctgagaaatgggtacgcgtaccagacgctattaggttgggccacagaagaaccggcggctgctgagctgaccaggctaagtcaaagtatggagtgcgcattttttgagcaccctgttgaacaaatttccccgtacaattcctgtggatataactagattcatggaagctataatgaaggaaaaagacaggcagtgaacgaggtattgataaatcttctcacatttaaggcctttgcgtagaataaaatgaagggcgctgggtttgagccccctggacagaagaagttgggacgattcagacagtcgtgcccagagagagggaaggtacagtatgaagacagcactacagtcgttctcgaaatcgccttcaccaacaaacatatgacagttgttgttctgccccactaacaagacattagcgcgagcagtgtattgagccatcagcacttaaaatgagggcgatagacggtcctgtacatttccttccatacgaaacattaagaatacatttcattccgtacgaaacgttgagaatacaatgtatgtttgtaccggatatcgtatacctcaaccctataatgtatccacgacccagcatacacgcaacatccactttttacccacctaaaagatatttattgcaaagagatttaatatactaatttataaactacgtactgtcaaagttttgttacctggggctcaaatcattgcggaattttttttacaagtctaaggtttgtaggcctgatcaagagaaaatacaaaagctactattttgcgcagaatgctatacaggatatcttttacgtgagcgttctttaagcagcccctgagggtgttcagccccaatacatgtgctactgcgggtgggggtcgggggaaacatggatgtggcgagggctgtcttgctcagcgtgaaggctagcaagagacactagattgtttgcgactacacaagtttttgaatgattgggacccagtgccttcccatagcctgccagtgctcgctgaaacatctcctctgcctctttcagcttgccctgatcagagtagagaatccaagattgttgactgtcataagggtggacgtgtggtcaggacccagtgctttctccttgtctgccagtgcttgctgatacatctcctctgcctctttcggcttgccctgattcttgtagagactccccaagattgttgactgtcataagggtggacgtgtggtcaggactcagtgctttctcatagcctgccagtgcttgctgatacatcttctctgcctctttcagcttgccctgatcagagtagagaatcccaagattgttgactgtatcaagggtggatgtgtggtcaggacccactgctttctcatagcctgccagtgcttgctgatacatcttctctgcctctttcagcttgccctgatcagagtagagattcccaagattgttgactgtcacaagggtggacgtgtggtcaggacccagtgctttctcatagcctgccagtgcttgctgatacatcttctctgcctctttcagcttgccctgatcagagtagagattcccaagattgttgactgttataagggtggacgtgtggtcaggacccagtgctttctcatagcctgccagtgcttgctgatacatcttctctgcctctttcagcttgccctgatcagagtagagactcccaagattgttgactgtcataagggtggacgtgtggtcaggacccagtgccttctccttgcctgccagtgctcgctgatacatttcctctgcctctttcagcttgccctggttcttgtatagaatcccaagattgttgactgtatcaaggtggatgttgtggttcaggacccagtgccttctccttgcctgccagtgcttgctgatacaattaccttgcctctttcagctttccctgattcttgtagagactcccaagattgttgactgtatcaagggtggatgtgtggtcaggacccagtgctttctcatagccttttagtgcttgctgatacatcttctctgcctctttcagcttgccctgatcagagtagagattcccaagattgttgactgtcacaagggtggacgtgtggtcaggacccagtgccttctcatagcctgccagtgctcgctgatacatttcctctgcctctttcagcttgccctgatcagagtagagaatcccaagattgttgactgtatcaagggtggatgtgtggtcaggacccagtgccttctccttgcctgccaatgctcgctgatacatcttctctgcctctttcagcttgccctgatcagagtagagattcccaagattgttgactgtatcaagggtggacgtgtggtcaggacccagtgctttctccttgcctgccagtgcttgctgatacatttcctctgcctctttcagcttgcgctgatcagagtagagattacctaagccatgaaaggcgccaaaaatgttgattctgtcttcaggctgtatatcaagccaatggcctatattcctttgaattagattatttgcgtgaggaagtaatcgctgctcaagccttgcataatctctggtgtcataactggggaccatatttcctaccgagatgaacgccagctcctgtagttgatttgtgagtccatccaaggcagcaatatgataacaccagtcctgtaccacgggatgcagagtatagcttccctcctgctgctttatttcaacaagcgagaacttaactagtgcttttagctttgctttaaagaccagcttgcttgacactgctgtctcaaaccattgtggcgggtttgagtagtccaaaccgtttcgaattagttcataccagatatcctggttatcaaaaaatgcaagtaggagcaagagtttcgcggcagtggaatcatgtttctggatctctttataggtgatattccatgtttgtacaatgttgccttgctggtattggcgtttgggtgccgactgagactgcaagtcaaaccaggaagtccggtagagctccagatactctttaaaagttgttcctgtttgacacatgaaagccccagctatgacaattgccagcgagagcccatccagcaggctggcaagattcataaggtctgttgacgttagtcatgttcttcaagtctagttaatagtacagtaccttgttcagctcccatctgtgtaatgtctttagctgaaaagccgctgctttgcaacaatagctgcgtagcatctttgtatataagtttctgaactggaaatgacttcccaagttcagtgagcccttggagccgggaagtgatcatgatagatccatgatcagcctttggaaagaattcgtagacatcaaatccacagtgaccatggccttggattggagaatactggtcgacgttgtcaaagataatgagccatctagtgttgcctggccttgccagccactgtagtacttggtttgccctttgtactgcttcctctttgttgactgcctgatcctctataggcggtccttgtatctgagagaggcaagaactcaaagatgaaaccaaggcagattgatccttgctgttcagccagaatatggctgtaaattcattcttgtgttttcgtgcaaagtgaattgctagttgtgttttgccaatcccacccagaccatggaggacagccacccttcgtgtctgtgaacttgctggttgtagataatcccatagacagtttagttcttcttctcgtccaatgaactcctcaatcacaggaaccgctgaaagatctaacgggatgtgaaatttattggcgtctaaaaaaacatgaaaatttagcatacaggtatactgatctgggtttatatgctaaccttctcgagcagtgggctcccagtactccaagaaagatttggcggccgcagctccagtcgccgctgcatatgcttgccatgctttattcttgtggctatctgcatagtcacacaccccttttataataatgcatgatatgttgtcccacacccctgcaccctccatctcgaaaccaacaacaccttctgactggaccaaacaattacggtgctcgcctgatttcatcacggtatcagcagatgcgaccgtcccaatatggactcttgggctgttgtgttctgtgctagggcgacgtcgacatacccggtccatatcacagcctagagaagtacaaggtga

SEQ ID NO: 1193 - DNA, 10055 bp, Emericella nidulans
cctggtgacctgctggtaactcttagcgagtgccgtgagaatatcgaggtctttctcgacaagctgcaggagatgttccaaaacacgcagaacaacagttgcgcgatggggtcagccctccgtgctgggtacaaacttatttcgcccgttggaggcaagatgaccgttctcacctcgtctttgcctaatgttggccatggcgctttgactatgcgggaagataagaaagttctgggaacaagcaaggagagcagcctacttcaaaccgcgaacagcttctataagagtttcgcagtcgagtgctccaaggcacaagtgtctgtggatatgttcctgttctcatctcagtaccaagacgttgcgtcacttagcaaccttcccaggtacacaggtggtcagacatacttctaccctggatggaatgccgcccgcagtgaagacgcaatcaagtttgcgcgcgaattctctgactacttatcctccgaaattggcctcgaggctgtgctccgagtccgtgctaccactggtctccgaatgagcaccttctacggtaacttcttcaaccgtagctctgatctttgtgctttcccagcctttccccgtgaccaggcgtacgttgttgaagttgcaatcgatgagactgtcacaaagcctgttgtctgccttcagacggcggtgctccacacgacctgcaacggcgagcgtaggatccgagtcttgactctggcgctgccaaccacacaaaacctagcggacgtgtatgcgtcggcagatcagcaagccattgctaccttcttcagccacaaagccgttgaacggacactcggaagcgggctggagcaagctcgagaagccctgcaggcgaaggctgtggaactgctctcaacctatcgaaaggaacttgcaggtggaagcgtcggtggcggcggtcttcagtttcctgctaaccttagaggcctccctgttcttttcctcgcattgatcaagaatgtgagttcaaataactttctgaaaccataccgttttgactgacattgaatgtacagctcggccttcgcaagtcggtgcaaataccgacggatatgagatccgcagctctctgcttactatcaactcttcccctccctcttctcatccaatacatttatccgaagatgtactctcttcatgacatgcccgataacgccggtttgcctgatgaacagactggcgaaatcgtcctaccgccccccatcaacctgtcatctgagcggatagtcccttacggcctttatctcatcgatgacggtcagactcagttcctgtgggttggtcgcgacgctgtgccacagcttctactcgacgtctttggcctaccagataggtcgcaactccgggttggcaagcagaatctccctgagctggacaatgacttcaatggacgggtccgagccgtggtggagaagagccgggatcatcgatcaaagggggttggcagcattgtggtgccacacttgtatgtggtcaaggaggatggagagcctggtcttcgtttgtgggcgcagacgatgctggtggaggacagagctgaccagggtgtcagcctggtgcaatggatgggctcactgcgggagaaggtttgagaccctttttgttagtcgtttgtctatatttttcttcttgattgtgtcgttgccgaaaccagcaaagtcatacttgatagactagactgacgcgctcgtaccgcaacaggttgtccagtaatgaatagtttctacgatttttgggccgatttatgagttatacagcaataaatccgaggttgcagacttcattcgtctttccgctccggaatctcgcctgtccttgtatcatcatccaatgcagttctctggagtttaggggtcgtaaggtgtagaggggcattttgctttttcgttgggagtttccgcccggcggccacagagccacagacagtcggaagcagaatgaatggcaatcaagagtttctgaaataagctgtgcaatggcctcgcctgtgttgatcatgcactgtaaactttcgatcccgtcttagcccaccaaggaaggctctcgtgctcagaatagatagacaaatcaacggctgaagaaggccagaggattgagaggctgggatagaggacgacgtgatttgacagggattggtgatatgtgatggactagacgctgtgatcaattgaagcggcagcagtagcgccagttcgagcactgccactctcgggctcttgcacagtgtcagttgccctccaaagaatccagcttgtcgcagacgagaccaaagtgagaaaagtgagagcgttggaacttgtcggattaattgtggatgcttatgaaacactggtcgagacacgctgagaggttcctgacccagaagtcccaggccagttctgcccctccatcctggccttaaccaaggttctgtcgcatctcgaggtcgactccatcttcaataaacgactattctattatttcaagagatcattcttgaggcaaaagcttaatcttctctcaaatcctatactcccactctcgctactctcattacactgtcaatagccagtactagtagcttcccctcgtttcagctcaccccactttggccgatctacgcctggtttattaacctctcctcctctagtccagtcctcgactgggtcctcaactccccaagcctactgctgctgctttttctggttctcttcctccgcatttgacttggacgctcaaatctccaaactgtcaacttttccagctctgacctttgttgtcctaaagctgtctttctacgccacgccgagccaacacagacaaaagcacggtaaaaatagatcggagctgtggaacatcgacctatccggcaagagacatctgcctggtgagctcctcttttccttgttctatttactgtcacgttgtcttcattcgacgtcgcattccttgacctcatcttcttttacgagcttggttgttgacacaatcggccaccgaatagaacgcttgatctgcccgaggccccggaacctgatttcctaaaggcatctgactttgactcgctggatcatacgtcaatcgcttcgccagtccaacttctactgcatcgttgaacctccttcacctccccgattctcgtcgaccctgggcgctgcagtccaagtgacaacagccgacacgggccataccccgcattctattcttgtttggaccacctcgtgattaagagcgcaagttgacaccgaattgttggtggctcctcttatactttgagatcgccctcagagcaagcaattgtaagcgtcgtccatggcctttttgttcaagtattatgcgagacgtacgcgcggcctgcagtgtgtacctgcatgaaacacactaagactgctgcttgggtgccatatctctgcacatatcttattgcccctgttaagctgattagcattcattacttgttaatctcacattttacctcgcataagtgctgacacctttcagtttggaaccagtcaacatggtgcagcagatgccgcctcagggaggctcaaggaagatttcctttaacgtctcagatcaatatgagattcaagacgtcattggtgaaggcgcctatggtgttgtttggtgagaataacggtgtaaaccatgccggttatttactgatttttcccagctctgctatccacaagccctctggccagaaggtagccatcaagaagatcaccccctttgaccattcgatgttttgcctgcgaaccctacgagagatgaagctgctccgctacttcaaccatgagaatatcatctccattttggacatccagaggccgcgaaactatgagagtttcaacgaagtctacctcattcaggtaaattgcactagtgcggcgcacatctgagagccggctgattgattggtactgaaggaattgatggaaacagatatgcaccgggttatccgcacgcaagacctgtcagatgaccactgccagtactttatttaccaaactttgcgtgcgctgaaggccatgcactccgctaacgtcctccaccgtgatctcaaaccatcgaaccttctcctcaatgcaaattgtgacctgaaggtctgcgactttggtctagctcgatctgcggcttcgactgacgataattctggtttcatgacggaatacgtggcgacgcgctggtaccgtgcacctgaaatcatgttgacgttcaaggaatacacaaaggcaattgatgtgtggagtgtgggctgcattcttgcagagatgctgagcgggaagcccttgttccctggaaaggactgtaggtactctattggtggttggtggagaaatgcgggctaacgcatggcagatcaccatcaattgactctaattctggatgttcttggaacacctaccatggaagactactacggaatcaagtcccgacgggctcgggagtacatccgttctctcaaaatcaagaagaagattccgttcaaggcactgttccctaagagcaacgacctagctctggatctgctagagaagcttttggccttcaacccgacgaagcgaatcaccgtggaggaggctctgcgtcacccgtacctggaaccatatcatgatccagatgacgagccaacagcgcccccaatcccggaaggcttctttgacttcgacaagaataaggatgctctcagcaaagagcagttgaaaagtaagtatctggcgccaatcgactccataagttatgcgacaatcaactaatgtcatcacagttctgatttacgaggagatcatgcggtagagaatcaagtgtcgaatcttggagttgagaaggcagcacctagtaagcagcatacgcttgcacgcaccatatttgcatagagattttcaggtagtctatttactttgcggcttaatgtactgcatttttgtctacatttcgtttgggaaagtggaacaaacatggatctatcaatcttcattctatgcgcaggaaaacgtgggtatgtagtaaaaaccataaaatagcaacttatctcaattccaagctcctcataaactcttctatccctgcccccaccccttcaggcgaaggcttcgccgcacacacatccggctcaaacccatattctttcaccaaatggtctctcgtcgttggcccgattgtcgccacgaacaatttccgggctcctttcccattctctcctgcaatcctcgcctctttctgtctcaaaaccctgaccatagcgtcacaccctgtaggggaaaaaacaacaacccatatcatcccatcctcaatatcattataacaatcctgcaatacccgttcgaaatccccctcaaatccctccactacgcccgtctcatacacaacaacctcctcaacaccaatcctcctctctggattcacactagcacccattagcgtttttggaatgatatcgcgtcttgtctcgccaacgaggaagagtaacggcttcttctgtgcttgctgcccctcttgttggaagaacaaagcgttatagtgctcgagcatgaactgcgcaagattctccccatttcccgtctccgcgccgtgaatcgttgcgtgcgggagatatctgtctctcaatgtcgttaaggagcgtgccgttgcggggccgacggtgtagagggggaggtttcgcgaagatgaaatcaagtatgattctatattgccgtcagctctacaccaagtattcaagtgagcggtagtgtgctgtaggaaacataccctcaacaccactcagcgtctccccaaacgcctcgaccgcgcgctgagaggtgaatatcaacccgccatattgtcggtctcggcctggtgcgagactaccgttctcgaataagtgctttatgctggagaggttctgagtgtggaaattatggctcaggactgggatgaaggttggtttggtgtgagcagcggagaagaattcgtcgtagccgtcatgcggggtggatttggtttttaacaagagaatgtggcggggatgggttgcgaggggagtcattagggctgtcttaagcaatccaagccgtagggcataaactttttgtccgaaaaggtatattcgttctgagatttaggtttgtaaaatgaatatgtgtatgtcgacgttgtttgtggtggatttgacttccgcggagtggagcgggaaagaccggatgtcctacagtctttgatgtattcgatagtgacctcatggactgaaacaatgatatttcctacaggtacattttgaacaaacggaatcaatgtgtctagtattgttatgtacactaagaaaacagcactactggtcgtcgagaacgtgcacgtacttcttctcctctgcccgctcccgctctgtagccggaggcaggtcgtagtacgaggagcttcggtagcctttctaaaccaaagttagcacaatttatttgaacaacaaagatataagacttaccaagtagtggaaggtgagttcagacagttcagcaggctcgattccgagatccttgaacgtcttcgctgtcgggtcgatctcttgatcaataaattcccgctcaacctcatcggcactgatggtgggccaccacaggtacttgttgaggagataggccgcaggcttcaggatacgcttggggacgttgatgtggcggcggcgcttgacgatttcgcggtcaacaagaggagcaatttcggcaagcgagtagttggtcgggccgtacagctcgaaggtctggccagcggtggtgtcgtcgtgaagcatgcgctcaagagcggtaccgacatcaatggcctgcaagaatcagcccctgcttgtgtagactgcaacagttcaactcacgtgtacaggccaggagcgttgctggaggtggttggctgtgaacaggttggtcgcgctcgcgagcttgtggagaagacgatcctcgaatccgaacaacggagctggtcggacaatggtggtctctgggaagatcgagcgcgcgacttcctcaccccatccctggaacaatcagtttcggttcgaggtatgtccaacacaaacataccttggtggagaaaaattcggagggagagtttttgttggcattgtaggaggaaacgtggatgaagcggtcaacgtcgtacttagccactgcctccgcgatgcgctctgtgccgtcgacatgcacgtcggtgtatgagaagttccttaatgatatcagtataataccatatcagaaattatccgcaacgaacttggtagggtaatcgcgcccgacaagattgtagacgacgtcggagtgacgaacactctcctcgatcgactgagtgttgcgcagatcgtattcctaacatccacgtcagtttgtgcctcgccgtcccgcaacgctggtatcgtacaataaaaacgactcgtccaagatcaccggtaaccttgaggtgacgcttggccatctcctcacggtaggggacgaccacagtgcatccctgcgtagctaagaatacgtcaatttacatgccctcttcacgccgacggccggacataccaagcttgttgacaatgtaacgacccaggaagccggtagcaccgaaaacggtcgcagtgtgtcctaatgacgattcgtgtcaaccctgaataatcgtgcgagctgtttgtaaagcggcaatggcttgcgaagtacctccgagagagtgtctattaagaaatttgtcagcgccgcgggcgtaccgggaaataaattgagcatttaccgtccaccctggatcttcaagagcggctttccagttcgagtgattgtgatatcttggaggaatcggcgttgagcctgaaactggatacgggggttggggacgaacgccctagaccccagcacgggattgatggctctggacttctgcatggtctatatatcactcgtcaggtaagtcggaacatcgaattgaaaatatgcggtacacatacgacagcgggtaagagctgggtgaagaagggcgcgaggctcggcaagaggtcctttgatgaggtcgaagtcgttctccgaagcaatctgtcggcacgggaccacgacgctagtcccgattcggtcagtacgaccacgacctgaggaatgcgacgtcagaacaactgaccttctactcctgattcatggctgaaaagaccacagagaagggctgtgtaatgattacggcgtttttgtttcaatgcagcttgcgaccccatgtatttttggtggtgtatgactattcatgctatctcattggtcaatcattattgatgcctaaggctatatttttatacttcatcgtcacaatgcaacccagcagctccttagtagctagcaaacagcttatgcgctgatactagaacgatttcaatcagaagggttgtgccatcttagggattgctgcacttattgtcaagaaacctgcgagccataacttagtggctggagttgggtgcttctcaatcaatagacgctttagtatgctatatattgtggttttctaacgaagctctcggtggtattcgcggcgcactactgattctaagttgtacgccattataaatgcggtcgctctttgtaactttggcttctaggtagggctgttcagggctgtttgtcaaatcacgtgatgattcattgaaaacaaggcataacatagaacagtcccgcagcaacatatcaacggttctaaccgaatgcgcacttggaagcgagttttgagtcaccggagtatcaggtgatatgttgtctcagaccaatcgacgccatcaagaggcgctataattggaagtctccggaaactctccggataaggaggagggtgagcacgttcgatataccctggaaatctgaaaaagacatgcacacagtgtgaaaagtggaatctgatacgtggagcggtttgattcagtctctcggcgccaggaggctgtggtggtctgttcagagaagtctccgagtatctctccggccagaggcttcaacagcttaaatacccagtgctcgttcacctactttcatacttcactgcacacctttttgactcacttgaagcgtaccaaagccatcaatccaaaccacgatttctagtgtcttaccggcgaaatgatgactgacttcgcagagaaaaaccgccaggtgttcaagtaagtttccacaggcctagttcatctgagacagaagactcaaagaatatagcaatcaacccgctgcctacaagtctgacttcgaaggagcggtggaagcgttggtcagcgtcgtccacgaccaacgcacctgggttagcgatacttgggtggacaccgaggcaggaaaaggcaaagaaatcagggcactggagtatgcttgcggccccggccatatatctttggtaaaattgcacgaaatcccaggcgtcacgatcaaagctaacctatctcaggcattagcgccgtttgtcagtagcgttgtcggcatggatatctcagagaacatgcttgaagagttcaagaagcatgtccacgaagcaggccgctccgacactatggtcgcagtcaaggccgaccttgtttcagagtcctcgccgactgaaatttcgggccccgagtactttgatttcgacttggtggttgtcagtatggcgctccatcacttcgaaaacccggagaaagccatgaatcgtctctctgaaaggctaaagaaaggcggagtgatgatgatcatagatttgattcctaatgaccaccatgatcatgagcatgatcacgccttacaacaaatgggcgaggttgtcgagacgatatctaagcatggtttcagcctggacgagatgcggaccatgtacgaaaatgccggggtatgcaaaggattcaagtatcaagttcttgagaagcgcttgccgttcactaaaaacggcaaatcctttgagaagacgattttcattgctcgagggcagaagtgaggttctcggagggaaaagctgttttgttgctttgttacgactcaaccaagtgcagtggtagtatcgctttcagaatgacttatatagttttaaggtctgagttcttgaggagtttcatg

SEQ ID NO: 1194 - DNA, 2668 bp, Emericella nidulans
ctttttggcgagaaccccgcgaggcctgatgtggatgagccggatgtggcgcagcagctcggttttacggccaaaatcccttgtatatttgcatccttcccatctgcattgcaaagtgctcgatggcgtactttccctggcgagtgggaggtcagacatcacagtcgatggggcgtgggcgttcatcggataatggtagtccgcctgtgccacgctgggctgcatgaacgatgacgtcgaggcaggaaacccaagattctgggattggctgtttggaatgtgaaattggccgtctgattggaccggatatggcgaggctgtatgcggagggtgccatgattggtaaatggtagcgccggtggcctcgagatagcgctgaaatccgtcattcctgtcaggtttccgctccaactgggaaacgttgtgatccatggacgagttgcaaggaccgatggagtatgagacctcaataggtaaattgcgtctggttggcgcggtatgtaacgggtcgtggtgggccatggtggtggtctatgacagatgctagggtttgggacggtaaggttgaacgagcctcgaggctagagaacgcatggtaagggccgagtgcaggctgatatagactgaagtgccttgtcaactgtcgagtgctcttgttgctcagagtcctcttgcttgccttctgtcaaaactcttgccagccttggcagttgccaaatgcagtaagcagctgccaagtctcgcttgcagaatcttgtcaagcgtcaagagacaagagagtaagcaaggcaaaagcggttattgcctaagaaaagggaccaaaaaggagggcacttctcaaacgcctccgacctttctcctaaaccaccacgacgtgccacgacgtgcccactttttctccctctgggctccttgccacagccatgagcaccaccagcaccccaagacatcgaccgatatcgtttgtggggaagtggctggatacgatagaagaaagaccggcaccacagtccactagctacccccgccgcagccctataccgtcggccagttccaacctcaccgggtccacactcgtttggccacgcgcgcggcaagataccggcatcactcaagacactcgtgtggtcgtcgtcaagtcgccgcgccctaaaaagagcaaaaaagacgccttctgcgccatcttccgcagctggaaagccacccttaccacgcggacgacgagccatgaaaccttcccagcgaccgttcgcgaaaaccccgagctcgccattgcagagctcagctcgcatctgtctgccaactttgcagtcttaatcgagacggctctgcggaacagcccgtcgaaagcgctgtccgctcgccgcatatgcaaggagatcatgcgagcggataattggtaccgagcccacgagaatctcggctggcaggagagtgtcgcacgcgaactctccttgagcccttcgttccagccggtgatcgaatgccgtgagggtagggttaggaacaagggggtgaagtggcaactcaccgcggtcgatgtttctcttgcacctgcgactgctccctggcggccaccgcaggattcggttccctatccactggagctgtcgactgaagttgaagctaccgagaggcagacggagccatctcgcgctgaaaacagtgacacgccgcaacctcgtcgtccgtctgccggactgcctgccctagcggcacttgcctctgcgtctctactatcatcggcactgccccttcatcctgaggaagatacaatcccgaaggatgaggctctggtatctgggttttccaagcggttgttctttacggcacctggtccttctcgtagtcccgcgaacatatcattcaacgatgcgcctccgccttcgcaccagtctggtgagaattgattcaggcctgacaagggcgacagtaccggaaaagggccggagctgcctcgtggtcgcggatcggatgatgagcaaaagcaccctggacgcagcgacggcaatgaaggcaatgaaggcaggaagcgacagcgattatcctcgcctgagcggacaacgaccaaacgcagatttgcatgcgtctatcacaaatatgaccctatcacctacagcagcgtacacactgttagataccggacctgcatgggtccgggcttcaaatatgtgtctgagctcaggcaggtatctgccacccttcagtctttcacattgtcactgaccatttagccgccacctagagcgtaccaccaagaatatgtctgcgcgaagtgcctgcgccactatgacaatgtctctgtttacaacatccacgcagagcattgtatcgtgaggccgagttatagtcaagaacaagggtgggaaatgctgtggagattcagattcccgcatgaccctgttccagatgacatctgtattggacctgcctgcccgttgttgattcctgactgattttgagatagatatttcaccggtgccgccgcctctacggcctcaactacctcgcctaaacatccccgagtctctgcccgtccaagtggacaatagcgcacgcccaagtccagcttcctcaactgcggccacggcagacctgacccctgccgacaccagctcgacccaggcccccacacccagcaacagcagcgaccagcagtcgtctaatt

SEQ ID NO: 1195 - DNA, 5790 bp, Emericella nidulans
aagcgcattgaaaatatatttcagattagaggttccgcgagacatttcggcaacctttagaagataaagcgtaaattgcagtagtatctcatcaatcaagcattcttacagcgatctgagcttccatgtgactgaatataaaatggagtttgctgtaaatgttgaacctgcctcatgagctacgaaagcaagggtcttggccattactaagcaatattaaaggtcacctgagaacagtcgacgtcacttaacgacatcaataacagctggctagtaggcgaatgctgttcgagcagcatactggaatgcagagctgtaaaccacggtaaagcgatgggatttatgtggctgtcaataatcaccaggtctatattatctaggatgacttattggcagtatgatggaacgtcttcaatcgcggcttgcaaattgaaaaatatgccactggacgagcacctagcagttatggatattatctctccgcatggaccgactatagtctgatatattcgccttgtgagggctccccaggatcataaaactagaagtatcttctattcaaaccttcagtgtctcgctgtatcagcgcctttatttacgattaagataagctccttgtccgtgggcagttcatgcggggtgtcgttcatagggcaagggtacgtataacttaccaagggtagatcatgccggtaatcgaaatagggcttgtccgttcgtctcttcggacaggtacatctgggattttcaataaacggcgaggaaaagcattgagccatcaacgctgccatgtcattcaactttaccaaatccctttccgaccttgtagctcctagtcaaaacagtctttaaacgtctccagctctaggctcaactaccagttaagcggctggacagccaaagctctagccttcgtaaaagaggtcggtgtgatttggaactgtcggtatacatgacccaatcgggaacctggacttctggggatatacccacgggtaccgtgaggagctccgctataaattaagatttctgccgggaggccaactaagcaaggtttcttccccgttttcagtcgcctcatacctcgtggttgtcatctggcgggattgccggatgacgctgctatgcacggtctctgtagaatgggactcatcgaaggtagctagcattaatttcaacgagagttctggccggccagcttcaggtactttcgttgtattttcacagaccaagacttctcccagaaggagccacctcctaaactcatgggctttagagtccaattcattgccgccttgcggtgcagagcatctattatgacctccacattctgcttggtgagcgaccaagatttatgcgcacaaactagtgccgacatcgagtattcatcgcgaactcagtgaaactgtctctcggtgggctctgtcttcacatggattgatatttgtccaaggatttgggaagaacgcgacggtcgcgaggagattgcgaaccatacttgatataacaacgcgttctcacactcttgctgcaatccaggtcggttgagtcaccagagggactgagtatgcaagcgggcgttgacttactacgtcaaattccatggatgtggacttggacatttaagccaaacatacagcagcagatcagtgtctacggggctaactcggtcattcgatgatatctaaatactccctagataccccaggtagatgctaaatgacatacccagccagccatgtagtactggctgtatgatgtaagaatttctctagagccatatgacttcgtggtatattataggttggtacgtcgttttctcactcgaagctggattaccctgatagttccaatgagctaaagaaatcatgatggatacaaatggctgatgaatggtattccaagtacgggaggttcttcgtagtaccaaagagaagacagccctaaacgggcggaattcgcaagctcagcttaagattaagaccgtttcatgtataattcacgcttcggcgaggtctggactcgaaacagctgtggcaatattcactcgagatgagactaaatgcttctccttttatcatcaaccccaatcaaagttagtgtctgagcttctgtttagcgtgttgccccagcattcggtggagcaagtcgagcaacgagattcgttcagccaccgcattttcataaggtataccaacctccgtgatattctaccatctgaatcttgaaaattgcctggaatctatcgactaacctatgactgtcacctttgtcaaacaccagatcgttagctgagactagaatagggagtatcctcgaggtcaacaaggctgtggactccctgacagcacgtgcggatcacccaccttcgttagtttatcgcttggcgccgtttcattgacctcgaccacgactcctctcccccttgacgcctgtcttgataggggacaattaactgaaacttccctttgcccctcagtagtgtctcaacccgtactgtcatttcaacacgacctctattcatcaccccgcagcgttgcaagacaagcccatctctagataggggacacttgaattgacgttcttcgggctacctcaggcaggcttcaagtgcgtgactgcatcggatttgacttcccatcgacgtggcattccagttctcgtccggctggccggactttacagcattccgtttccattccaggcgaagctgccttttctgctgaccagtcaaggtccagcttgacaatgctcgctgaaccacaacgcccttcagcggctgccacgccaacaatccccagctcgataccaccatcgacccgaccggtctctccttccacggaagaagacaatcatcaaccatacattgatcaacgtttttcgtacatagagacccctaccgctgcgctaaccccgagctcacaaaccttgctcccacgcccggaaaacaaacatatcccgtacatgtcttcccaccgtcgggcaaacacagaaattatccaaccgcgcaatcctcggcagacatctgggcagttgttcggtgaccagtcccacagtttcgaagacctcgactacactcgaacgcgtccggctccctcgaacgaaaatctcgccaggaagaggctggaggtcggcgcgagatttttgacgggtttgtttcaagggaagtccgaacaggtcaacgtgggactcctgcaccgacaagaggaccgaaaatctattgaaacggagtcaacgagcatggacgactctagcaccggagaacagtatatcctctcatataccacgccgaccttcacgagccgatcacaaaaacgcatgacggcgccgtcccctttgaaacaagtaacgtcgacaaatcccctctcgtttttcggccggatgcgtccaggcgaaagtaggctggatcttcccgaacctgcagacgatgagttcttgaacctcgatataggcgcggcgctgttccctcccagctcgaacaatctgagtgaccaggaagcttttagtgcattgcgagacaatgcagaaaatattattaaacggttgcaggcagcctacaaacagcggacttttgccctacatgaggcgctcagcgtaaagaccgaaaaacaggaggagctcgaggaaacaaaaacgcgcatcgggcacctgaaaattcagctggatggaatggcggagaaggtcctccgtcaggaaaaggctatgaaggccatggcggaagagcttgaacaggagaggcagttgcgccgtaaagaagaagaggcccgaagaagtgttatgctagtcaaatcgagcgctgacgtcgagagcgcctcggacattgctgttgaactccacgcccctaagtggaacttgaaacgccagagcaacagcaccatccccagtgattcgggcttcgaatcgggcgatgagagccaagcggaaagtgtgttctcccgccgggaaggtctcgaatcgcccccttcaacaatcacagggtctccaaacgtctctcaaaccacccttcccgccccgccatctgccaccgtacaagccagccagagagagtctaaacctttacctgcgccgccagttcgcgaatctgcctataatagagtcataaaaggactcgcatccagtggtatttctagcgcgtggacaggcaattcttccaagtgcaggatatgctatggtgtgccttcatctgaagcctggagcgtcatgggcgtcctgaaagaggaaaacaaaggccttaagacacgactaggcgagctggaaatggtcatagatgactgcctaagcctggttgggccctgacagggaacaaaacagaacatagcaaattggcgcttccactttagtatgatagtttacgtttcgaccctgatggttactgtacaaataccttgtgctctgttttccagacactgagccggacattgtacgataggaatactgtacttagatgaacataacgagcgatatacttatgatagaatcagtctatgctacgcctgtccaaactatcatactaattctccatagaacgcgcgatctcagggtcaagctccgttcgggggaagcgaccaagtggcctcaagcggtttagcgtggctggggcagcgaaactcgaaagtggccagcgaggcgactacaactccaactcctccctcaccccttcccttccacgtcgctactttcttcattcagtttctcctccctcttcacttcttcccttcactccttcagctggcaacataccagctactttttccccttttactttgatacccatttcttgacccagctgggaggtgaccacaatgagcggacgtaagttcacactcgatcgcaaaagcaattctgcggcgctgttctccgaattgcctcaatctaaaaagcagtactgacgttcatggatagtccgttttcttgatttgatcaagcctttcacgcccctccttccggaggtggcagctcccgagaccaaggtgcccttcaaccagaagttgatgtggactggggtaagttctctggtggccgccgtgcgagattcagccagctcatcgatacttcagttgactcttttgatcttcttggtcatgagccaaatgcctttgtatggtattgtgtcctctgacacatcggatcccctctactggcttcgtatgatgctggccagtaaccggggaaccttgatggaattgggtatcacccctatcatctcctccggcatggttttccaggtaagtcttgcaggccgtacaatcgatttccaaagaattgtgatttactgactcaattgcgcctgaatagctccttgctggtacccacctcattgacgtcaaccttgaccttaagaccgaccgtgagctttaccagaccgctcagaagctcttcgctatcattctctcgttcggccaggcttgtgtctacgttttaactggtctctacggccagcccagcgacctaggtgctggtatctgtgttctgttgatcgttcaattggttgttgctggtctcgtcgtcattttgctcgacgagctgctccagaagggttacggccttggtagcggtatctctcttttcattgcgactaacatttgcgagtccattgtgtggaaagctttcttcccaaccaccatcaacactggtcggggccctgaattcgaaggtgccatcatcgccctcttacaccttctttttacctggtccgacaagcaatgtgctttgcgcgaggcctcttaccgcagaacctcccaatgtcatgaacctgctgctaccctcggcgtcttcgccgccgttttctat

SEQ ID NO: 1196 - DNA, 1444 bp, Emericella nidulans
atccgacacgcacaacacaaagcccaatcttttagatggtgatatcctcatccatgctggcgaggttacaggggcagggactaaagaagagctcgagaagcagatttactggcttgactcacaaccgcaccgattcaagatcgtgatcgcaggcaaccacgaaaccttccttgaccgtaattaccatagccatcatgggaatgaaagagttaccatggattggaaatcgctcatctatctcgaaaatacatcagctatcctggatctcggtgctgggcaccaactgaaagttttcggatcaccgtatactcccaaacacggcaacggggcttttcagtaccctcgaacagatactacaacatgggaagagatacctaaggataccgatctcctggtgacgcatggtccgccaaaggcgcatcttgaccttgggcatcttggctgccgggtacttcgccaggcgctgtgggagatggagtcacgacctctgcttcatgtttttgggcatattcacgggggctacgggaaggaggtggtatgctgggacctgtgtcagcgggcatatgaggccatcatggatggggagtcgagatggtggaacctttgcgtgctcttctactgttggatactgaggctttttttcgattggactgcagatggccgagcaacagtcttggtcaacgcggcaaccgtcggaggagtgcgggatttgaagaggcgcgaagctatttgcgtggatattcaggctggtagcaaacgctttctatcgggatgtacttgaacgctgcaacgatacggcgatcttcatccaaagccaagccgcattggtcaatcggcttcgcttgagatctgatagcatgacagcaggcgatccaatgaaacatgtgggctgcgacacctgctatgtaataaggagctactggatagagatccagtcacatgggattcgacgcccttcagcatttcctcacagtagaacgccacccctgcagcgagctacttcaatctatattacctgcatgcgctagagatagatgacgcctgactgaagcccaattgaaagacaagccttgagcacgagatgctgccgaaccgaagccatttcttggctatcttggctgcaacatgacttcttggcatgaatacccatataaaattgtcgagcaaaagtcgtttggaatttggatcagtggtttgagttctttctgacaaaatgcatttaccctatgcccttggagtcctgctcgtctccgctgcgggtagcattgcctcccctttaacaggaaaccttgcggtctcctcgttgagtaccgaagtagaatctgaccaaactgccttctactacgggaccgccagaagcaggtccttcttgattggcaatgatggaagtgcagcaacgggcgggatccgagcttcacctgcaaaacttgaacgagacggccga

SEQ ID NO: 1197 - DNA, 2832 bp, Emericella nidulans
  unsure (1)..(2832): unsure at all n locations
atccccgcctgtttggctacatggttctcgccgaaacttcggtgggcggttgtcaagaattttcgagctggccacgcccggtggaccagaagagtgaggcatcagatcactgttgctggatttctgatggagttggtgtgcgccacgttagtagcgccgatttcaggcacagaatcatatctccaagcgccaattagaggctatcctttgtggagtagaaactttggtacctggataacccagccaatcatagaacaattggcctcagcgactggatccacgttgtttgaacctgaaaaccgttggctgacactttcttgagctgacgctaaaagaaatctcgcaaagccgcgaatccaccctcgtcgatgaccggtctagattgctaggcagcctgggctgagcaaaagatgtgtcattgtgaggtccccgatgcatgcactgttgaaagagatatctcgcgactgctgtgttcaaggttggattatccagacaactgggaaccgaagactagagcaaaaatcccaaaagggtaaatgttcaggcagcttgggccatgttggtagagtactcgaggatagaacaatggtacagtgtcgcagtgcgctcagaagtttgcggtggatccagtaacgggcgaggccgagtcagcgttcgtggccaccctcccgaaggaccggttcgaacaatcatacccgacgtgttcctggggatcctgacagcactcatgcaaaagccgtggataattttctttggaccgattggtcattggcataccaggattccaagcaagttgtagaaaattagtccgaacaaaatccgccttggtatatagctgccctgccgtggttacatcctttttcgaccatggtgaaggcgccgccactctatttcaagtaaacaactccacggaagccatggaagttcggcagttggaggggttcgtcatgccgttcaacctggtggaacaaaataggaatttccgcaagatgagtcgggttcaccgttcgtcgggctgcttagtagagctcgctctggaccctgatggatgcgatgtggattactttcagtcgcggccgcctcgttaagctgaaaagtttgcatcatcctggacggtgctcggacttattcggttaagtaactcgtacctgacgtgtacctaagtgcgtttacaggtacctgcaggaagcacaacatgactgttctttggatatgaagtcaatattgggactggggggtgttggcgagaggaacgatgtcacacgctgccgacacggcgttgctgagttggctttgatgcctgattcctcaggcgtaaacattgaacaccaataaaccgtgaattcggatgaattcggataacccggatcaatcactactggaggatatccaaactgttctcaaaggtcggtgtgcatagtctcacagattcgtcgaaacgatataggtcgtggttgttctcctgcgctgacggtcaggttgcccctcgctggaggcaacccttgcactagagtagataccgtccactctactaaggctgcaagacgtactcattatgggaagctcgaaaaccgaacaccattaacgaaaggtatcctccctctggcatgcagttttacagcccgacgacgttatccggtaggccttaagctccaggtacagagcaccactgcccctcactcccgcatttagaggattgaggtgcgtagcagtgtaatcagcattatgtgagtcacaagcaaccccctcatcccacttggccccgcatacaggcataattcctgttactacctagttggagaaccgtatgctcctcattaagcgctggagcgaaccgtttggagcatcatccatgttccttggaggtgtatggtagagtctatgagtgtagagtatgtctactcgaactcatctacaagtgatctgatcggcgtctttggatggcctttgtaggcagctttagcgattggccagctaatccgctcatagacactcaacagccgccgtactagttgttaaaaaagcgctcttcaaggctgctgccagcgtgcgggtagaactgcgacctctgccgcattgagtattgactttcttcaagatagatgtagatgaacgccaattatttgagatggttaccagagaagaagtaaagcctggcgcggagaagtaatatgggcatctgctctgcaataatacaggatacatcggtaagcacggcgcagagaggtctctaatgcggaaggtagaggtgtaagagtgtaagcgccaaaaatgagcgccgaaatgagtatgattaatcttaagagcggactttttgagcgtgtttaaggggagcaactaagattcctatatagctgtgatcggtcgatgtgacacaaatcagaagtcggcttgtggtgaggagctccagacatctccagattagtgcctgaagattaaggaatgaatgaagacatacaaaccgcgcaaacagatgcaaatatgcaagacatgggaagcatgcaaagtacacaaattatgcaaacatgagctgatgcgcgtccgacgtcaccacccacagctncgcaaggcccgcgggcagcggctcagtcaggccatctaagaagcagctgaaccaatagaaagaacagctcgaggtcagcagagatccattttgcagccagggcaagctctggactggagtaatcccctcacgatgcctcatctggccaggcccgtgcgggggctcggctgcctattcactgacatgcatttcgatagacaattcgatttgatacaaccaggagtctccatgtatcctgatgtcactcatctacatctctgtcgtgtaga

SEQ ID NO: 1198 - DNA, 2279 bp, Emericella nidulans
gaccgcgcccgattgccgaccacgatgtcctggcgggtctttttaaggacttcacgaacatgctcatccagtttttttgttcgaaacagagaccaacggtgaggggctcgactgaaacgacatgaagcgatcgatcgacagctttgaggacgaatgcaggatctcggctgaaatggttcgctgattagcatcttcggctgtgacgtatagagttttggcatgctcgatagtcttcaggacctggctgtctgaggctaggcgcaatagatagccaatcgacgagcagtaagatgcgctgactgtgtcgttcctgtccaagacgcatttaccaagcagttggatgaatcgatcggcatagggctggaaaagaactgtccgcatgcttagcaggactagcacacggctgcacccgaccttagaaggaaggccgacggccgagcgaagtacaccttcgagcttggctgcgaattccttcatgctgtcatcgtctagcatatcgatcaagtatcgctcaatcacttccatcattggggacgtacggatgcttgacagcctcattttgtctatttcttgccctgtcaacccgtacttgtcggcgttgagatggacgtaattgaccgcttgcggctccagcgagctgaggcaattcagaaactgctccatgatgctggggacaaacggcctcagcgcgttaccaggtcctttcttgatcatctgtatgagagctccaagagcaaacccctggacttcctggacgctggattccatgcctttatcactcagtagaaaagggatagtgttctcgagcatcgttttgattcgtttcgtgtcagggtcactagcctctaaagtgcggataacagatccagtaatcgtctggcaaagctttagagcggcaattcggacactttccttgatatcatcaaccagcttgaatgctttcgtaaatatctcatccacgtgtttgacatatacatcaggctgccgaccctggattaaatccgagattgcagcacagcttgcctgcctcattcgccattcccgcccagctaacatgctcttcagaagatcagtaatgatttcatcaaaatgggcactgataaccgcatttggatccttgaccagcgaaagccagatcgagttcatagagcgctgcacatttgggtttggatcaaaccggtatcggaagagtttgggatagattttcgtgttcttcgcgagatatccattgatgctggagtcggagaaaatactgctgataccgagcttgctgaatgccgcacggcttgtccagagcgcgttgttggaagctagcgacataaatcgatatacgagggttggatcgccagcctcagaagcaaggttcattatgtctttgtatgtgttgacggatgagcctcccccggtaggtagggctcctggctcgaagagctctgtatcctcattgatcttgccaccaccaaggttcgcgctacttgccgtgaatgaatccacaagatcacgaactagatcatccttaagagcttggtcgcccatctcatacaccaagcttagcccttgggctcctgtctcttgaaccatctcgtctcggtcactcaacaagcttgcgaatgtaatctggcatttgcgtagacgggtttgtacctcttctatgtaaccgcagtttttaaccaggcatagtagccaaatcgcagacgcctttctaagcgatggttttgaagctcgacaatctttagcaagtttgtcacatgcgtctgcaaggacagaggttggaatactcttgtcaggaagctgctcgtcgacgtcaaattggtgcaccagtgatttgtagttccagccggcgaccgcaatggtcagtgcctcgccgacagtagaatgaacgtgtggacttcgaatttcatgcaagtcatagatagacatcaagcagctgccgagagtgcggggcatcactggggaaagtaggtataagctaaccaatggctgatatagcaatattacattcagcctctgcatttttcgcgagcttatcctttagcgtgtcccactcaacgttggtgaaggaagtcggagacaggaggccatagagagtgagatgcccaatggctgtctgagcagttagccggaggagagagtcgcactaaatatcaatgatagtaaagacacccttgatatattagtttccccggggctgggatattttctcttttgcaaaacggaaaagcaatctgctggagataaagggcagtgcaaggcccgggcctccagcctaaaaagcgctc

SEQ ID NO: 1199 - DNA, 3265 bp, Emericella nidulans
tctgtcgaagtcaagaagctccgagtcaatgatcgagacgcgaatacgaccattatccacacttgagtatacctgtagtcagcgacccactgccacggaagcaggtaatgcggcaaaggccagaggcactgagtccagcaccgttgagcctgtgtgcgccgagatggagcaattcgcaatgttggcaaatatgtaaatcccaacgcctagtataccgctcagaaccgtgaactcgaagccgtttctgataactttgacgggaaaaaatagctcaaatgctgtcaagccaggcgcatagtctgatgagaaaggctggggagtctggctctccaccagggcaccttcttcggtgatcatccaaaagtctggcaatgagcccgcggagaattcggttaactgcatggttcgcgcaccgacttcacaaatccgtgtgagcacaggatcagagcaacggaatactccgagggagctttgaaatgggggtatcatcgactgctgggaggaagcccacctttgacagcgtcagggtcccaacagtaaagagattgagcttctgataacgaagaccgccttgaatcaagcggttagtgtacacagagaaattattgttgaggtcgtatcgattgatccgataattgtccatcgcggcgctcaatgtattgggtccgtcagattaatgagatgaatttggtaagcgctagcagaaatgacttcaatcggcgcttctcaccatgtacaagttcagagctatcggcataggacatctcaaaccctgatgtgtctccagtgcgactgacaacctcaaaggttggaagcccctccacatttctgccataatcaagggtcacgacgcctggagacttgccgtcggatgatcagacaaaatcatcagaaccaattgccgtaaaatggttgccatcagacaaataggccactagctgcgttagggcgaagcaacgtgccaagctagagcatatcgtcagcttgcggagcatagagtataagtttatatgcatggcagcacctaagggaaagtatctaaaattcagagaccctatcttttgccagcaacgtgggaacgcattacttatagttctaattttcgcagcccccttgtcccagagtcgtggcaagtattgctttgatttcaagacgtggaacccagggtcagttactgtaccctcaacataagaaaaggcccgcatatttttgcttcatttcgccaattggctctgtgtaatatcgttatttcagttttcagctgagagcacggtttctgtgagaacttctggagtatggacccctgaagatatacgaacgtactagtatacgattacgtaacctgtcagcagtgaagcctaataaaccgctagcaggttacaggtcaagtgattcatcgaaaaactcggacgatggccccaccaaatcttggcaattcgactagtcaactgagcctttaaatacagtagttaattaccgaatttcattttcaattcgtctcctttattatttcttcgtactcccaacgtacaaaccactttcaaagtacttcccaatcagttatagagtgatttataatggatgacaacatagatccagttaactgggaagaagatattaatgatattctatcagatacgtttgaagaggaggcaagagaggatgtaatggaggtaaaatataactgtataactcttaagtactgcttaactaaatatatatcttaggaccaaccaacaaccttgacagaccttaccgatgcaaagttacaccctttacagacgctctatattgaatatatagatgaccttcctgagtatccaaaaactcatatcaatggtcatacgtatatcattgcagcagataaaatgtcacaatcggaggcggagcaacgagttcaagatgtaagtacttcggaactgttccgtaaccgcttaagaactgtttgttaattgcttgaagattcagtattctcgttcaagcctccatgggctaagacatatcaattcccgtttcttgaactgtaaggttaagaaatggagttggaaatgctcgggagcttttgtctgtgaatatatcaagccaagtcttcgacttcttcatcatacataccttgatgaaaaagcatggcaagaaatacaaacaattcggaaagatattgaccttgttgaaaatgatattcggaagaggaatgcattcaggtaagtactttggaactacctggaaactaaatgccaattacttacaaggaattgcttctattcagtctttatcgctcgaagaagagattcttcaacagtggcaaagcttgtatcgaaaacctttcaagctgtgcgcctgtatttcgaaaatctttctacccggtaagtccttggaaactgcttattaactacctactaacttgctaaaaggacatcaataatgagcaccatccatatattagctgcataaatagcacaccaggtcctctacagaaacattatcacagctctctgaaaggccatacatcaattgatcttgaattcttagagcagttatttaatgagtccattctcccgtcgcaggaggagtgtgctgttattgaaccactaacaacacggcgcaaattctgtggtaagtggttcccaactacttttaaactgcttggcaacattcggcaaaccaattctaaactacttctagactttgaccatgttcaaggccccggcaagctggaacatataaaatgcagtgtaatctttactgcattggtaccagttaatattcaggaaactccctatatcctctttacttcacatggaattcatcaacatcctccaccactaccacacaagccaccggagcagattttgaaagggattgaatcgaggattagaaatatgcggaatccaagcctaacccttggtaagtggtctaatactatttgattaccgtttaataactagttactaactacttaatagcaaaattcctacgaagtcctgagttagaggctttttgtcaacagtataatgcttctacaccagctgaaatacacgcctccctttccaatattgacagaatatctgccattatacagaagcaacgtttacttacatatcccgaaggccaggattttaatggtgtggtatacatatctaatataaaccctaccttgaaggtaagattataagtattttgtaactggttgggagctgcttttatagccatatctagcaatatgtccagcagaaataccgtgatcctgatggtatcatgatattat

SEQ ID NO: 1200 - DNA, 2404 bp, Emericella nidulans
ggctcttcttctttttcctcttgtttttcttctgcatctggattttgatcttgaccttgagtttgagcttcaaaatttaaggagtttgacgaagtaagcaatgcagccctgaagacattcaggagtaactgctgcagcgctatggggattgtgtcagacacatcaatctggtttcggtcctcgaccagttggtgtccctgctggtcctggactttgcggcgaggatgagatgccgcagaattcttcctgtctggctgcttcccctcacggccctgagagcctttagactgtttgcaaaagctgctagatctaggaggactcattttcatatatagcaagagtttttggccgtaaactttggttgcggaggacttaaggtactgcgattctcggcgtcgcaaaatggtggatttttgcctgaaagcccgtacttggaacaagtggagagattccagaatgccaaagcaactttgcctgtgagagcccggaagtattgggctgatcaggtatcgtaaaatgtgagggatatgcacaagaccattgactgctaattcttatgatagtggacgttcacacaagtgccatgactggggatcgaactctgaactgtttagtagtatatcagtcactagtcagcctaaccaagctgacgggtgtgagggcctagctgagactccattgattgccttttaccagagatggccgagggccacgcaaaataccctactacctaatctttggaatcatctatcgacatagtcgtcgattgtttttttgaaattttaactttaacttctaaagtactaggctatgtagttcagcagtttatttttttccctaacatctacgtgaactcggacccgcaggatgagaaacgagggcgtgtgattaccgcttgagtgtgtgtgaataccagctcccctgcagacctccagtgagaaacagggccacatcagtctactgagcttggtgactcgaaagatactgattgttgaggcacgggatgtggattcaattgaataaccgctcacgggtcctatttacttcacagctaactaacaacttccaagcggttctaggaaggaacaacccggaatccgatacagtcgcgttaatcggcagaaatgttgcaaatgagaataacggagatgattaaacaaaggactgtagggagagaaatcggcttaaaacgacagctcaacacgataatagataaaatgtgcaaccggccataacgagagacagtaaagaagtatcatacccttacgcttgaaacaacatgccaagaaaaagagattcgtcaggtatcccaacaatcgaaggtagaccggttgaaagaagataaaaagggtagggaagaaacagcaagatatagcaaagttcgagatctggtaccatcaagaccatgtcgaacaaatcataatggggatactatgtacaattgtcgatttttttctgcaaacagcatttcgctatgaacgcagctaatcctggtcagccagttcatccaacttctctttgtcctttatccgccagaaatgcatcaatcgactaattcggcgacccttcttcttagccttctcccgttcatcgcccggtggcttctcctcatgactcaacttgcttctttcggcgtgcggccctacaacaagtttagagagacttgcaaggctcgaccgtttggaggtaggttggctagatcgacgataaacagcagcagaaaacgatgcagaacgatccgtcgatagacgaggtcgtgtgaagaaagttgcagaaacacgatttagggtattcgtcattgtggaggcgctactagtcagtgaaggcacgtcctcaatagatgcatgaggaaacggatcggtagtcgatgacgtagttattgaacgaggagcttccggggaaggggtgaattcggaagatgggaacgaagaattagggtgggaggcgccaccttgaagagaaaacggggggatcgcgcatagttcagtgggagacgtcacaggccgactatcagcaggtaagaaacgcggggaaacctctgggctaggagggactggcgctctcctttgccactcgtcatatttggcgggttccaggcctgttttaagctggcttagggaacgacgttgtcaaatttccaggctgattggagtagaaccgttgatccgatttgaagaggccttggaatggggttgcgacagtagctgatgttgcatcgcctgcatcgggattctggatcccaagtcctgtattctctccgctggcggattcattctgtagctttttccagtcagaagtgttcaagagcttcttctgcactttcttctgacttatcgtccttggattccgtgagagtagcttgatccctttagtgagggttaattgcggccgcgaatcttgaaga

SEQ ID NO: 1201 - DNA, 2228 bp, Emericella nidulans
gcggttattcacccacggttcctggttacccctgtatgggtatctacgtcttgaaggtcatggcctgtgttcaatgccgccgagttctggggctcaatggatcatgatttggacatgtttccacggctctaatggggttgaagggctctttgcggattttcactgactacagatgacatcaaacacaacaaatagctctcgaaagcttgatactatcaaacgcatacacgcagcacctgcgtcgcgtcgcttgatgcgatacgtctgaattcgtccgaagtcgcaaaaccattccattggctcgatttcctttactatcaccagtaagaacgaaacatcatcgactcaaggcgcatgactcctttgcggttgtcaatcgagctcaggttcttgcagaaaggaaagaagtgccggatggcttcacctgacagagcagtagccaatcctgactctattcagtctacagatatttatagccacagtattatgccggaaatagaccactcgagcagtattacacggcatatgtctccaggcggttgcgaaggcatgtttgagatccatacaaacaactgggccaacaaagtatgccaacaccccacagagcatcaaccaacgccacttgagcgtcagtccaagaaacatccccaatcactccaatgtagtgagacatgcctgttgatgatcactttcgccgccactcttcgattggggttcaactcgtattgggtaaaacatgcttcgggggctgtgatcatcccggaccaaccacatttcctccggcacaagtctacatcaacatctgtttgttcaccgctgacactggtacttcgtccccatggcgccatttaaatacgggaagcatgaatacgaggaatcgacctggttccacaactccccaactagaatataaatacatcgtcaacgtcgacagagtgtataccaccaaagctcaatgtctagtccttatctcacctaggccaatttcatactctgcaacagcaagtcttcaacatgtttggtttcaagctcttcctagcccttgcggtcctcgcaactacctcccaaacagcacagataaacaggccatccgtcagagactccactatcctacgatcaacagtcagctgccccgactgccctgaaagtaactgctacaagtgccgttatggctccgaaaagactctacgcgcaaataccggcggtctcgcctggatccagagcctcgttgggttccggctcgacctccctgacgacatataccccgacgatatcaccaaatgcaccgtccaatttccggcatttacgacgcttccaaattccgcattcaacatgaccgtcactcctgccgtgtcgtccgactgggacgaggtgaccgtgaacggggagaatgcgcctgcctcgacggacaatatcgctctttaccatgtgcccgcgctgacgaacccgcctcttctggacgttacagaggcttgctggctggctgacgatgatgggcagttctcaatctatcttggggcggagttcggttcgtatgagatttggtcgaaggattcggggaatccagctgttctgcatgtctattatgatgactagggctaaattattgtttgcgtctgttgtatcactgaatctaaggttgatgtcttggacaaggacggggtctagaatgatgtataaatagaattgttgattgacatatgtacttactacactttcttgaccagccaatatcactacctagcgacttgtccccgttcttcgtgctctaaatacctagaagttcccggcttgatcctggcttgatcctggcttgatcccagcgtgatcccagcttatgccaacatgctttatacctccttaccttccaatggcgcggtgtctcaactcagaacattttgtgcgacggatacccaggctcacccttcgtcgtacacgagcaactggccaccccggccgtataatgacataaatactgctgctgtccgtgagccagcagggctcctttttttatcctcgctaaacttgaccggagtcagtttctcagtaactttcttttggactagaaaagacgctgctagctagctggaactacttcctggaattttcagctcggcgatatcaaggaaatcaagtagaagctgcgggatattaaactcagtatagttagtattacatactcagggtcagtctaccgtagagtacggggtatagctgggtgacttatt

SEQ ID NO: 1202 - DNA, 1194 bp, Emericella nidulans
cggcttccgcttcagaaataaaactcagcgtcgtccgcccgcttttcttggctttcaatattccggccctcttcgcagcatcttgcatactctgccttgcgtacgctttccaaattgccggaacagttatcacaacatgaaatcggagtccatccataacagaatcccccagggccttgttgatggtatccatagtatgttgccaaagtgcgcgaagataatctgcaatcaaaccaacgggtgtctttccggtatctctcagcatcttcttcgctcgcaggaagaattctgaggtcttgacatcatcggtaaggtcttcgtcgtgaagcaaaagtagcttgaatccacgaacggtatcggcgccacctgggatattgtatccccacattatcttttcatcgtcatagagaagttctgtcggtgctttcccttcttctcgaccggtgccgggccatgcattaatcagattaatttggtcagcttcaaagtgctcgggtgtggcccaggcgacacctgaaaaactaaagagaacctgtcagtcggtgttccctgaccaatacgatctcttctcacgaaacgtacgttgtgccaaagtcgattccaatcaccagctggtcatcgtcctcgtttatcctcaatccctgcagtggccatgtgatatcaccgtcggcagcattgatggcgttgagagtgttgagcgcgctctcactcagagaagtgactcgtgaagcaagcattctcatctagtgcgggaagcactttctgctggacaaggaaatgtgtgtctctaagtacgagtagttggtgtcgcctgttgaggagctggctttaagtaccgtcttcgcttccttcccatcctgaacgatggcaaggctgcttttcgaggctcagcagcaaccgcagggatgaatgtcgagcctatcacgagttgacaccacgcctagacagtcgctcaacgagaataaccgtttctcagcctgatggtggcagagactgttagccaatgggccggtgtagtgctgaggctaaaactgcccgaaaggctgggatggcttggcgtggtgttgcacacgaggctgccccttcaactcgcacggcgaaaccccgctctggacttgcacagagtcatcatataacttgcacgatttctctactgtctgtcgcttgatccctatagtgagtcgtattatcgcc

SEQ ID NO: 1203 - DNA, 2639 bp, Emericella nidulans
aggggactcatacctctttgtactacaataggacccagccaaatcccgtagatcactgggagatgatagggcaatctcagaacctgcttgcaaccatcggcaatgggcctttgaagcaacccccggctattgtccgcaccgcggtatccgtatccgaagtatacttataaccctaactatagactatagcaatcccagactccatcgactggctaatgattctctgaaaaacaacaatcaatccaaaatgtcgaagccagtaatcctacaccttggcgaccccataaaatataacccagccctatactccaccttcagctcccacttcaccatcgttcgcccatcactctctgaactacgccgtgatgaattcaagacggcgctacgcgagaaccgcttcggctcattccacgccctctttcgccctttctggaacacgggtggcgaaatgggccgctgggacaaagagctcatcgacctgctcccgaaatcagtgaagattttcgcctctgccggggccgggttcgactgggttgatacacagtatttggctgaaaagggtacgtccccagttccctaccctgtactttgctcgttcgtgagacggagaggagatgtgttagagtatctgatattgacgaagataggtatcctgtattgcaacggcgccgcgcgtcctccgagtccgtagccgatatggccctcttccttattctggcctcgtttcgaaaccttgcttggagtcatagtgcagcagtatcgcaaaatccgcgggcgttcttggacgcacatcagaattctccactgacagcgcggaaccctagaggccacagtttaggtatcattgggatgggtcagatcgggttcatgattgcgaagaaggtgtacgcggcatttgggatgcagatcctctatcacgatattgtgcgcaagtcccaggacatagagaggagcgtgaatgcgacgttcttcgagagtctggatgatatgctggctgagtcagactgtgttattgttgcgacgccgtttgccgggaagacgctgctgacggctgaactgttcgacaagttcaagcggggttcgcggtttgtgaatattgcgcggggctctctagttgatgagggggccctggtaggggcgttggagagtggcattctgatgggcgtaggtatggatgtgcatgcggacgagccgaatgtgcatccaaggcttgcgagccatccgaaagtcatgatgatgagccataatgctggtggtacagtggacacgcacattgggtttgaaaggctggcgatggagaatatactggctttttttaaggaagggagggctatgacgccggtgaatgcgcatctaatcaagccgaagagtgtgctgtagagcagcattgaaaaatgaatatatattgcacggctatggacatttacaaacagagagacattctaatgacacagcaaggtatatagcaacaaatcaccaacagaacgcctcgtcgtgtagacttatcgtcttggcccctttctgcgcctcccgtacagcctgccgcacatcgtctgttacacatccattcccgcacacgctcacggccatggcgcctacctgcgtctccatctcacgctctatgacaaccgcaaagcctgggcgtccaaagccaacgcttacagaaacgccagacggggcgctgaacgcccagaggttctcgctgtcaccgacgctggcctcgctagcctctttgcgggtgacatagacctggactgaaactgcaagccggttgttttggaaggattctttagtggcgatagccgggtgcgtgaagacggatttcatccaggggtcgatccagtggaggtcctctgtgcacagttagtcgcgctttccattcggtgggttggcacttaccaacactgcgtgtaacccagacgaggttgacccgtcggacagcggttttccgtgctgaaaatccttccaaaaactggtacaaataggacattgtgttggttatcccaacaccgctggctattagtaataccgttccgtagctgttgagatcttcgagtccgcctattctcgttaggtacagttaagttgacacagcagacattgacataccatacggcccctcggcaaacacagtggttgtaaattgacatgtgtcggaattggccgctttgcgctgtagttctcgcgtaaacccatcttctcttttaatcagaaacgaaatcgtagtctgcggcttcctatccagtagcatcttgaacgattcattcgagtcgctgtcgacactgacctcctcggtggaggtccaagcgacggaaaacggatgagaagtccataaccctacagaggggacatataggtacatgtgctgtccagctctgaactctcccgttcgcgcaagggtcactgtggcccgaatgacgttccctggtaagagctcaaagtcggcgaccgtgcgttgcttgccaacgttgcgccacacgaggcttgcgacacgtgtgactcgctaacgaattagccctatcttaatcaagtacacgaagctctcaccttcaatccccacagaataatcgttccgagaacgacgttttgctgctcgagaccgcgaagattgtaccagagtccgacaaatgacattaccg

SEQ ID NO: 1204 - DNA, 1102 bp, Emericella nidulans
gtagggcgccctggggtcctgagattggaaaggggttccgtcaggggtggattttgccagctacagcgaaggccaatttggcctgactcgataacagtgactttaagggtctgacactggaccaggtactgtgcccgcagtataggtccgatccgcctgtcgagcatctccgatgatcaaacttgtgtttccattcccctttgactttaaccaaatcagctggtcagtattgtcaatccattgcggagagctggcgccaggatcatttgtgataagcgcagatcgaccggtcttaaggtccaacacacgaatctcattcgtcttggaatgggattcgaacgaatatgttgtctgggtataaacggcgagcgttccagtcgaattaggcacggccccggaccgtcgaggtgctccgagaagtaccctaataatcagcaaacgaaagacggatggaagggctctagttggacccgaaaaaaggccttactctggcgtaaatttcatggatcggatggtcatgtcactccgcaggaacgataacagacgataagttaataaacccaggatcaggcaattcaaagagggagaaaataatcgtaggaataataatagctgcaagtttgcactccgcgatagaagggaggatactgaaaaagagggagatggatgagatggcgatggcgaatttaaagatgaataccttgctggtgactcggtgaggggaagaggtggaggctggggcctaggacgggaagatctccaaagtcatcaacagcattccacgacagataacacaaggccatgtttgtcctgtatatcgcaggtctagtcatccgtataattacaataatctgatgcagtaaatccccaaacaaaaaaaagcttgatcctcatcactcctcttcctcactctcatcctactccataccttcagcagccctgaccgtaaatgtgggagcctggtccacgccaacatagctgtcacacattaagtatagcgtcagctcatgttcaccaggcgtaggcacggtgtagtccaggcgcagctccagtttgcgaccgatagtgacacgcttaatcgcagtagaatctcgactctcga

SEQ ID NO: 1205 - DNA, 3527 bp, Emericella nidulans
cattcgtcatgaacaattgaatcaattgatccgtcatacgtaataacggccgaatgttctcgcctacgaataaacgaacttacgaacgcgatgaccaaccaaaaagaagattaaaacccgcctttcaacatcactacggaatcgtctcatttcctttcgaaacttctctcaagtcgtctttcaatgatcctctgatacctgcctagaacaacaaaagttttgcctttttcttctcaagttgaccctttggcgttccaaggttatctcttacatctgcattgggtggataaatcagttgcgcatgatacccatcatactgtatctgacatgccttactctctttgtttctcttctctctgttcacttgctttgctgcaggtgttgatcacgaattacgatataacttgctgtattgctctctaataataataataatatcataccatctttacaaacaattcctatgttcttgttcttcaaaacctaagaacactaactgcgcggtacccattattccccgcttcattagcaaggtatgcttggtcactggcggggagtccgagcacaatcaacctgcagctgcctactacttggagcgcaaatacgagaactcttgtctatcactaagctggtgtgggggtctacgttatcctaattctgacgtctcccactggtatgttataacgcacattggcccctcactgagtctcacatctctgcaactgatcactcaaacctcaagcaaacatttatcattatattgattagcacgcagatagcagaattcaactatatatctctaaataatcgttccatcgaatcattacagcgtaagtgatgcatcggaaatcatgaatcaaatattggcccatacgcggggattcccatcgactcgagttcgtacacaacttttttcgtgacaaatggattactgataacacatatcgcctcggcatcgtgttctcgtgcaatctgccgaatgacgggcaccatgtcgagacggccggatgaattcgtgtcgatgatgacgggattcggatccatgcgtccgacaagattgaggacctctttgccgtacgttcgcttgggggctcgcgtttgccagatcactcgtagcgaggggcggttctcgtctccaaggaatgagagacagggcccgatgccggagcctgttgtgaccacgacgacacgcttgtatacccgcattgcgtatgcgaagccatagatcagcacgccgcgtttccagaggtgtgttggttgatctttgattgtggcggcggtccagtcgccggctttggagacaaggctagagaagctcttgccgtctctatcgacgtccgggaaggtggcgaagccgtgccaatcttgcaaaggatgcttggagagctggatgcccttgccgaaggtggtggttgtgtgagagaagtggagccgcacggcgtgcggggagaggtattctggggtgactttgactttgcgaaggaggagccatgggtgtatgatggctaatacaacaagcatgaggaaccagaaagctggcagctcgattaggaagcggcccattggtttgccttcggccgcggaagcttcgtcgacgaagaccatgaggagaatgacaaagagggccacgatgagccagcccgagaagcggtgcgtgagctcgaaatagtcgtgccgcttgaatcgaaaagttgggtaggcgacgatgatgatcgcaagcagcagcactaggatgatgtatgccaggactatcggcgctgctgagaaaggagatgagcttcccgaccagtactgtcgggagaattctccgatgaaacccagataccagattagagaggcaactccacatccgctatgaacacccccataatggtacacctttgatgcaattcggcggagccatagcggtgcggatctcggtatcgagcataccgtgaagaaaatggtgttgacaaccaaaggttgtcttgccagaccacatgcaagcaagtttgctgctgctgcattgacgagagccagcagttttcggtctgcaaccatgacatagacgaagactccgatgttggcgagaaacacaagcgtgaagagtcgccggtaaatgttgaggaatgtataccggattggagaaatcaatcttcttgccgtgctttgagcctcaagatcaaaagaaggctcatcgggtaacatcagctcggaaacatctttgatgatgcatttctcaatgttcacgaagctggtttcgcttgggctctctgggacgcacactgccgttggcggcctggtgacgataacctcttcgggctgagacatggctcttgaatgtttcgagagctacacctcgagtcaacagaggatatatgggtcgtatggtgtagcagtgaaatgggtgaggtaagtggtgaagagcagcgatgtgtggcttgcactcatacactagaatacaggaccaagccaaccattgggatgtctggcgttccatgcaggatgcatgagtcttttgaatgcatagcgccatctggtttagctaacgagacatttcccagagggttggcctgcatcgggctttccagccgtgccctaggcccatcgttcctctttgcaacctggggtccacattagacggtccactatgacaccgtccttatctctcaaggtttttttttttcccccgcgcaacgagacaggaaaaaggaaactattgttcttggatccgaggtcagacagccaaagtggtcgtagatcccaagcgttcgaatttcatgtgcatccgcgtggcacctcaacggaaccttacccgccaagtaaggcactatatggttaccaataacgtgcaacacacaagataccctactgtacttgtctcgatccttctttctccagatacggaataccgtaggaccaattggcaacaaagaaggaagtgtcgccgacccgcttggttgtctggtgtcgtcctgcgcaaatgccggccaagttgagcggacgagatggcctttcaaccggttggtgcggcaggcagcccagctcaacgggagagatcgacgtcgatagaatctacaccacgagaaaccaaggcgttcgccacaagtccatggcgttcgtccgtcctgccccacaaaagacaccgtcgaaggcagaaagtcgatcggatactccgaactccagctagcagcgcaaaatcatgcagacgaggacagtcaagaaccgaggagcgcgaagagccgtggagttgagttacatttccctggattctggactctgaagcatggcttacggagtaaacaacaaatgcagtgttacgctacggactcgcggagcccacacacccgactttttggccttaacagaggctgttattggcaggattcgggcgagacagactgtctggacttggtaccctgatggtcttggttagtgaagcggatgccggccagatatggatagcgtcgaaatgctttgatcaaccgcagatcaatgcaattgtcacctgctgggccgcttatccatgttaattttgcgtacggggc

SEQ ID NO: 1206 - DNA, 2607 bp, Emericella nidulans
agaagacggggctcccgaaggggtgagttcctttgggaagtggcagagaactgcaaggcctcccagtttcgtatcctgtccatactcctgccgatcaatgtagcgccgtgctgtgtacagagtcaggctactctcgataagagtaatgtgggcacatctgtcaccgcgtgccttgccttttcccctgcagtaagtgagggatagaatgcacaggaaatcatgctgtgcaccgtgcatcagtataatgacgacgcaaggcgcaacgtgcagtttgctctctaatgatgattgatgatcagccgagaagaggccccgttgttggaaacaatcattatgttggacaataattggttctagcctcttcaggcaaataaaaaaacggtcattttcttgcgagtatagcagaactcgtcactgcgattctgtcagccacgatattctagaggaaggaagggaagaggctgaggcgacgatcgcgctgcctagtagagaaccgtgctaggaaccgtgctaggttacataaatgcggctgacaagaaagatctgtatgttacttctttggtcttaggtcatcttgaggcagcggtgtaaccttaacgtcacgtatatccgattccgagcggttgattctttccctttgctaagatcgcggtttctcaaccgaagatgattgattactaagcatattatctttttttatgtcgatgggatgcagttagcgcgctaatatcgaatgcccgccattcgtgcggcgtaccttttaggcacctatattcacgggtcgggttcgggagtcccaagaatcggtacgcagacgcactcgatttcttacaacacaatccttagggcaagtcgacccgtttcccggttccgaacgccgattatcagaatgtttcggaatgttccagcgttcagctggaaaagttgagcagtggctgaagatcgacagacgtttagtaccatcgctttgctcttcccgtcatgctccgttgcctgcagagaaaagctggtggcggtgcgctggattttcgatatgtaattggctccggccgaggatttaccgacctcggctgttttaccttgacgggcaacactttagtacggcggggagcgggcacccaatatagactcatgggagtacacgagaggtactagtgacagcaatgcacccgaatcctgaaaagttcttcctcaaagattcgccttcgcggtcttcaccatgatttacaagccaggagcggctgtcggtcgcgctcaacgcggacggttgcatatgggtccatactagcacttgaaagctgtactgtgattgatgagttcatcctagctcgtcccctccatgttcagctataggctattggccatgggccccgtcttcacccaattttttgtgatgctatcggtctggcagccgattcggggtaaagcaggccaagtcgttcatccaccatgactccatgagggatgcagatcaggctgggtccactctgcgataactttaagcaacaacagcgtagttgacgcaacgggcgaacgctgttggatcttctgccgttttgaaggatccccggcccggccaagaccactgccatgtctgtaacagactggaagtgtgggtttaccttgggatatagtactttccttcacagttaccaaagcgaaaccggctcagcgtgtgaggcaggagagcaagctcgtatctattcttggttagtttattaggcggcccagcttgggaggaggatgcgcttccgcatgagctgggaacagtgtcggtggtctactctgctctcctgactttgggtcgcgcatgcgtacccttgaggaagcgctattgccaggttctctactgatgattgcttgacccttcccgcacctagcttgggaccaaccttaagggtgcaggcggtctgccagcgggtgctttcctcgtattcgctctgcctctaagcttgcagctgctaaaaacggtgactatagagtttatggcgttcatctcatgattacggcattccaattatcgatctcgatcttctgatgtgagtgttttcttgggtgtatcatgagctgtaatttgaatctgtggtattatccattaaatgacaatcggatcgactgtctctgcgacagcggtgcaaggaatccacccacgttgtaggttcagccgcactacaggccttttgagtacttgtaacagtatgtatgtactctgtaggtacggatagattgaaagactgcgagaggtggcctcacctttgttgagagacgacttcagcccattgtaattgaagcctgtcagaccactggttatacggtaacaatgcagcgtaacttccatagcagtactaccataacttctcaggtacgactttaaccgggacagtccataatgatcgattcagcttcctatcgcgccatttcatggcagcatagatgcgcatccaagactgacggagagatctctatgacggccggtggcttgatcgcaacagtcatggagcctgtagtgagccgccttacgaccgacctatttatcgccaatgatattgggggaaggacgcatcgcgtgggagccaatgcaaggtttactatgtgtagcatactaga

SEQ ID NO: 1207 - DNA, 2156 bp, Emericella nidulans
ctgccattgcgctcccaagtgagtgcgcaaccaaatggacgcggccattttgttggaaaccagggttgttcttgcaccacagacgaaatacccgattagcctcttttacgacggcctggatcatcttcggtttgtggtgtgataggtaataaggaatgtcgaggatgacgtcgctgattagggaccggacagctggtattgtctctggggtgatatcctttaaactgaaatgattcgcagcagggtcgtctgtaacctgagcttcgagattggagtcctccaaggacagagttgaccgccagtttatagggagtaccatgattccactgtggccctcgcgcacatgtggccatacttcttcactatttagttccacattgacctgacgtcgaaaggcgttgatggcatgggtgaagtggaagctctccatgcgctccgagagcttctgcccaatgccatgtatgacaaagactaagtcagttggcgtaggtctcgcttcctccatggcgcaggcatagcagatctcgccggctcggctcggcctcattgttttgtcttgagctctgcgaaggtagtttcgaacatccacagggctaggcttggacgggtgcaatcgctcccactgtttgcggctaaaaccgcggacgacaggtataccaatttggcgtccttttcttatggcactaagcggtctccttcctctcgatactgaaggcagcagactagggcgaaggatctgtgcgttcgttccatcggcatacacgacgctcgagttcatgtaaggcttgacagccgcagcatgtgcacctgagctaccggaggcccagaagtcaacatagtctgccgactccgaaccatgaccttcgacctctcgaatgttagcatctatgctcgaggagatgctatccttgggccataaccgatgcacgatctttaattcagcatcagctccgttctccacacagctgttcagttcgtcttgccacgtctgggtccagggtttcagatagatatatccctcttctaatcgattggcgagttcggtctctaccggtaacattgtattcttgtaaaaccaggttgcgcggagaacatttgatatatcgtgtagtggactccagtaaatcggtttcatctacgagttataagtatacagatgatcatataggttagtaaaaagtacctttaaatttggcaattcgactaggtgaagtcgagacacgccgaccgggattttcgcggagggctcctcgtcttctgaatcgacatcagtatgctccgtagagtggtctcgcacttcctcctgataagtgctagttctgagcccagaaggcttcgacgctgtgtaggtctggctcgcagtttgctcctgaagactctgagttccatctctcaccgaaatggagtcaatggaatgagacaaagggctggacggctgggtaacaggaaccctgatgaaaggtgatccactgatgctgccgtcgcgagagtgatgaccaagtgaacctacgcttccagggtcaaaacctgaatcatctcccgactccccgatctttcgccggaaactctttgcgttgccaaccggagagagttctcttttccgatacgctgcgctgcttgtcgagaagctaccccccatgctgctgttcggtgctgactgatcactcgactgtttcaattcactaccctgatactccccgctgccgaaatcatcattataccgagacgctagtctttgcggcaaggcttgcatatgagaatcggaagaagtgccagcgccacggtttcgtcgacgaccagttctccccaggctgtctgcttggccatctgcagttcccgcacgctctttcccaggaacggctatcccggcgtttatttctaacgcatctgctccgaaacctttccgcttcctggtcgccttgaggttctgtacgcgtatcgataaccaagctgcttctagcgagatattgtctctaacggaaaacggctgcccgcggtacccgctcgtcgaaagactggccactggacggatgtggtagtgagctgagaggatcgtctatcggcagaaatgagacgtagaagaattgaagacgaaggtcttggcggctgggtgagagagtgccaaggaaagggggctggatcgacgccagcaagga

SEQ ID NO: 1208 - DNA, 4100 bp, Emericella nidulans
gaaaccgtcagatatgatcaatgggctgcaaaagaggcttgctcgaaacaaactctttaaatcttctacaaaacaatgctactccccggtggggtaaccaccaaacaaccaacaagtctgccaaaccccgggggcgtcaaccctgcagatgtccttgcccagatttgccgcgagacgctcgaaaagacattgacgacgctgaaaactggcattgagaacgaggccatcgcaacaagacgcgcagagtggacactgcgccgcaaagccgtggaagcatacggtgcagagctcgaaggccgactttccgatctcagcgagatgctcgacagcaacttcatgctcagcgctaaagtcaagaaggcgaagcgcaacatgctggacctgcgagcccgcctcgaccatattcgccgggagcgatagaccgtcgccctgaggctgaacgctgtgcggaggaagcatgcgcggggagttcacgccggattggtatgcccgtactatctccatctaaaaaaataaaccccttcaaagcaagcccactaacaaatacgaccaggcccgctctacgatcaaccactccctacacaacctcgacctcgccctcgagcgaggccagaaccgcacttccgccacacacagcgagtcgccaacagccggcctggaactccgccttcgcagcctggcgcagagtgtgagctcgagtgcgcccggttctcaaggcggcatcctgagtcaggtcaagtcgttcaatgcccaactggaggctgcagcgcggcgagttagagggatgacctccttgaactccttaggagccggtaccccgttattattacgattttggttatgaggaacggccggtcccgaattcactataccaggaaacgtgtctcatgcgattgaccgaaccgaaagtacagtgacatacagtgacaccgtcgaacttgcacggctcaggagcagcgtccgtgcctgcatacaactttaacaaggcaagatcgagaagcttgctatagtcaatagtggtatcgaagagcggccagggccgggcctgccttgctcccccatgaatatcaaccgaggcaagaaaattcttgcctcataaatcaggctcgccacccggagactttctgcaggcctctgtttctcgattcatccgagccacgctgattggttagcctcgggtattcggcgctgtggagcctcctgactgaataatggtcatcttttagacgatagccagatcttcaaatttatccccctcttccgcttgataagcatctcaattagcaagccgtgggaacagagtggaatcttcaagatctggattagaacgcgggcgggcctttcggtctgcttcagtagtatatattctgtccgtcttgctcagaatgtctcgtagtctccaatcttccctaaaactacaccacactactctacacaactttacattactacatacttaactcctgctcctattcttcttgctcttcctattttccctcctgcctgctcttgtaacaacacaatggactcctccaaactcttcaccccactcaaggtgggcaacatccagctcgcccaccgcattaccctccccccaatgacacgatttcgcgtcgacgaaggccatattccccaagaccaggtcgccgagtactacgcgcagcgcgccgcggtccccggcaccctgctcatcaccgaagcaacgctcatctcgacacggccgggcgtgtatacgcacgtcccgggcctctggagcaaggagcagatcgcgcagtggcgcaaggtcacggacgccgtgcatgccaagggctccttcatctacaatcaactgtgggcgcttgggcgagtcgctgaccccgaggctacgaagaaagagcacggcgggtctgagggacgggtgattgcgccgtccgctgtgccgcttgatccaagtggggagcctcccaaggagatgagcgaggaggacattgcgggtgtgattcaggatttcgcaacggcggccaaaaacgctatcgaggctgggttcgatggcgttgagatccatggcgcgaacgggtacctcgttgaccagttcatccaaaaggccgcgaacaagcggagtgaccggtggggtggcagcgtagagaaccgtgcgcgcttcccactggaagtgatccgagctgttgtcgatgcgattggcgctgagcgcacagcgattcgatacagcccgtggagcacgtttcagggaatgggggttgatccggacgaagagcagattgcgcagtttgcgtacctcgcaaagaagacggccgaattcaagcttgcgtttgtgcatcttgttgagggacggattgcaggcaataccgagacggatgagaacgggggccggaacctgcatttcttctttgatgcgtacgggcgtgctggcccgattatggtcgccggtgggtatgtcggcgagactgcgcgagaagctgcggatgtccagtacaaggactacgatgtgatgatcgccatcgggaggccatggaccgcgaacccggaccttcccttcaaggttaagaaggggatcccgttgcggccgtatgagagggagcacttctataccgtgcgcagcccgaagggatacattgattacgactttagcgaggagttcaaggctgccactggaactcggctgtgaatggcctgtcttttgcatagcgagcgtgctggtttcatatagatatgcatatagactaatcagtgtcactgacatgaatttgggttgcacctccaactgcttctctgttgaacatgacagtctcagtatttgccctaactgggacgttggccaagtattatcggctcttcaccagggaaaaaaaaaatcaacccctcagggttccgtagccttttacttttccgcaagaatatatatggtttctaaaatgccacctgcctttcaaagatagccactgcgctatataaatcggttgttcttgctcttgaagactcggtttgcacctgttgacaactcaagagatcttgtactatagcacaacttgcgaacaatcaaggtgcctggctcccccttggtgaatccgagcagctgatgcgtgtacaggcttttcagctttacatttaaagacgctagaactgcatctgcttggattatatgccagctttttgggcgctgaaagcaagcaagatgcaagaggtggtacgatcgacgactggggcgtatgttgctctatcaaaagccgattgtaacgggcgtaggtagtattgttttcaactagctgtcctgtgttcacgaatatcacaagcttaaagaaagaaacaaaagatagaagcgcagatatcttcctcctccctttatcaacctttctgacttcccggatttgtatgccgacggatccctttcccgaagttataaggacggatctcctttcctaagcttcgaggccgcaattctgaggccgtatactgatgttgcagaaaccttatctagaactgggttgagggcaatggccgacaaccaaaatccgggccatagcctgtgagaccgattatcaagattacctctgatcaccttctagctctgtaacgaatggagttatccgggctcagtttcttctcataaacctatcttcctggtatacacgtggaccagcagacatgtcagacttccagattttgtcccatcagtgctttatgtattcgtctcttcctcattactacaagccattgcgctgttagggctttggtagcctcttttgacaatccgggctctggaagaagtgaatttgtagattttaagatagcagatcctttgccagaccgttggaacttatctctagagttgatatcggatgggtcgtgcgttgacgggtctttattggctttatcagccccgtacggcttgctctgcggaggcctgaatacctcattgatcgagacattactggtgtcatggagttggttggtttccggatcccagacaacatagaaatgggtacctcggtatcccacaatatgaacttctttgcccttggtcaattatgctagttggcttcccagatgctttgaagctcatgccgatgcatcagcagtgaacaaatttgcaagatgctgatatt

SEQ ID NO: 1209 - DNA, 3933 bp, Emericella nidulans
caacatgcgtcacgaacaaagtgtattcaagccgatcttacttccccgaaagtagtcgacgaactctttacatcgtccaaccgctatgacacaatctacctcctacatggaatcatgtccagcggcgccgaggccaacttcgagcttggaatgcgcgtcaacttcgacgcaactcgggatatcctcgacaggctccgcgccgtccagcccggggtcaaagtcgtctttacgtctagcctagcggtctacggacttgcgcccaagggcttcgtgattgacgagacaaacttcccacccgtaccttcgtcatcctacggcacacagaagcttatgatcgaactgctactcaacgactactctcgtcgtgggttcatcgacggtcgcgccgtccgtctccctacggtgactgtacgagccgggaaaccaacgcaagcggcgagtagcttcgcgagcggaattatccgagagccatttcacggcgagaaggcgattctgccagttagcaaggacacagagatgtggatctgttccccgtatacggttgtcaagaaccttatccatgcggccacggtccctgctgaggcgtttggtgattccaggtctgtcaatctgcctggtcttgtggttagcgtgcaagagatgttggatgccttggaggagatcggtggcaaggagaaacgggcgcttgtcgaggagaaatacgatgcggatattgatcgaattgtgcagacgtggtcgccgcactttaacccggcccgagcactgagtttgggattctcggaggatattcccatgattgaaaatgtgcggcagtacgctagtcagttcaagtagaaatatcaatagaacaactgaaattggtataatggaggcattgttgatagtagttgatcggaatgatgtagtggtgtctaaactaggtggctctgttaggccgtaggaaagtgtcggagcggtcttggaaaagcaagtcatgtgattggctgactggctggcgaacaatttgacgactcccgaacttcaacctcgcaactccagggtcgcaggctcatcatcctctactctacctccccccctctccacatccactatttatccctcacaatggcttcccggcgcctagcgtacaacttcaaccagggctctcgcagtcgcgccgccctgaagtccatccagcccgtcaagcgtggctttgcttctcccgtcgctctcccgtccaccactcagtccaccaccctctccaacggtttcacggtacgacgacgcattggctcttgagattgtgtcctggctttgctaacgactatagatcgccactgaatactcgccgtgggcccagacatcgaccgtcggcgtctggatcgatgccggtagccgagcagagactgacaagaccaacggaaccgcgcacttcctggagcaccttgccttcaaggtgtgtttcctaaaaacccacaattaaatgatggctaacaggtcatagggcactagcaagcgctcgcagcatcagctggagctcgagattgagaacatgggtgctcacctcaacgcctacacatcggtacgctcggattgatggaacgatcgatggttttgcgtcattgcaaactaacaatgcttttagagggaaaatactgtctactacgccaagtctttcaacaacgatgtccccaaggccgtcgatatcctcgccgatattctgcagaactccaagctcgagtccgctgccattgagcgtgagagggacgtgatcctccgtgagcaggaggaggttgacaagcagctcgaggaagttgtcttcgaccaccttcacgctaccgcttaccagcaccagccccttggccgcaccatcctcggccccaaggagaacattcagaccatcacccgcgacaacctgaccgactacatcaagaccaactacactgctgaccgcatggtcctcgttggtgctggtggtatcccccacgagcagctcgtcaagctcgctgagcagcactttggctcgctcccaagcaagcccccaacctccgcccttgccgccctcaccgctgagcagaagcgccagcctgagttcattggatccgagatccgtatccgtgatgatactcttcccactgctcacatcgctcttgccgtcgagggtgtcagctggaaggacgacgactacttcactgcccttgttgcccaggccatcgtcggcaactgggaccgtgccatgggcaactctccctaccttggcagcaagctcagctccttcgttgagcgcaacaaccttgccaacagcttcatgagcttctccaccagctacagcgacactgggtaagcaccttgtcccgctttattggctctttcactaattttgcagtctctggggtatctacctcgtctccgagaacatgaccggtcttgacgaccttatccactttgccctccgcgagtggtctcgtctgtcctttaacgtcaccgcggccgaggttgagcgcgccaaggcccagctcaaggcttccatcctcctctccctcgacggtaccaccgccattgctgaagacattggtcgccagatcatcaccaccggacgccgtctctcccctgaggacatcgagcgcacgattggccagatcaccgagaaggacgtgatggactttgccaaccgcaagctgtgggatcaggatatcgccatgagcgccgtcggcagcatcgagggtatcctcgattataaccgtatccgatcggacatgagccgaaacgcctactaaacgcctagctagaatatgcggtttcttttgttctgccgatctgatgccttgttttgcgagtggtgatttaatagatagatacggtgagcgaggaggatgaagctgaagcgtgtcctgtacagtacgcaactgtcactgatatatcaaaatgtattcctttgttcttgattcgtgtctcctgtagtgtcaagttagcagttctacccggtcctggtactaactgctttggttgacgctgcattgcgtaacgcagagagcctggcaggatcacggtgggagcttaatgtgagaactcagtgttactcttagagactgcactcgtaacctattaaatccaaataacacatatcaacgccaatcctcacctcgccgtcaacttttaagagtctatcgtagtgtgatagtgccaccaaccgatttgcatcactataaaccccaaatttacaggatagccccttggtggccttgacaatggtagcaggctgacgaaacctacagtaatgatatacatccgcccaaatatgcgcaaatattccgaataagcgcctgggcaagaacccggattaataactggacattgggtccctctggccataccgccataaacatgagacctcatatttccaatccccgcgcagtgcgtccccgagcatcctattttgaaaggtaccacaggcactcccgcccggtgtacatgttataccagtgtgatcgtcaaatcggattcgtgacgcttgccagtaagaagtgacagaatcttgttataccctttaaccggactgtaacggtaggaagctctaatctgtttttgcatccccatccttcacgtgatccttggcttcctcgaaggaagaattgagactcaagaatagactatgacaaagcccgaaaccgaacaaacgggttggatcgagggttaggacccgtacccaaagcccgcaaacccgctgttcagccgccaagaaccatcttacataaatctcgccgataggctagatgctctgtataaaaatgctgactcattttatacaacgtgtttgtgttgttggcaaaccgctggctacccaaaagcccgtacgggttcatggtctgggcctatacttattcagagtaaacaacgggttcagatagtgtacccaaaccagatccgtgacaggtaactcgcgggtcgaacaag

SEQ ID NO: 1210 - DNA, 2745 bp, Emericella nidulans
agtggcttgaagatttacgccaaatcgctgaagaaggcattgttgtcatcctggtagggaacaagagtgatcttgcgggagacgatgcggattccaaccagagacgggtcactaggcaagaggcagaggaatggtgccgcatgaacaatgttgtgcgttaccttgagacgagcgccaagtcaggcgaaggagtagaacgtgcgttcctcgaagttgccgagcgcatataccggaacatcgaaatgggcaaatacgaccttaatgatcgccgcagtggagtaaagagctttggtgctactggcggtgcgaacaacagaatgcccaagaccgtgacgttagggatgaatgatgcgatgcgcaaaggtggtaatggtttaggcggaggttgttgctaattaaagttactaccccggatcttcacttcaagaatggcgtatctccgttttaggataatctccgcttcctgatcccgttgttccttaaccccgcgagccggagcaatccttaattatctcgtttgataccgaaatattgctataatcagagcaaaatacacattgatcgataaataatacagaagcctctgctttgaataaactaaagaaataatggaagcagatgagtgagaggtcgagaaaataaagggacgttgcacgctaactgtgacaacgggaactgtaacgctctatcacggttcttagttagcgattcgccaaccgctcaaccagttcaagtgacgccactgttggcttggaccttcaatgccgaacacaatcaccctgaagtagacgaaaaccccagcgaccaaagcatagagtagcccatacaccaagaatcgaaccttggtgttcaaagttttggtaagccaatcaacacagaacccgaatgtcaggatagcgtagtatagcgcggggtaatagtggtggacataggtaactcgcgccatagcgatgaaaggcacataatgcagaaaccaaccgagaacggggtacaagccggcatagtgaatgtggtcaatatctgcctggctaagctcgttgtagccgcgctgccatcgcacaaggtaccacaaggtcagcagtccaaagacagccaaactcaaggtactaccccagtagacaacagggtttccaagtagatagtatttgacgactttttcgtcccaagagcacatgcgtagaccgacattaagaatgggccattgccaaggtttcgacgcaagatcgtcctgcttgtcaggatcaggcaccaaagcattgttcgacgtcatcatcgcaacgttcaaatgtacaaagtctttgaagaaaggagacttgtacgatccaggatcaccggggggaactgcaaattatgtcagtatagctcaaattataacagactgcgcggtgtcatacgtcggtcgttggtatgggtttcaatattccagtgcgtataaacgtcacggggtttgttttccttcacacaagttgtttcaatttgcttgaaaccccactgaggaagattagtgttcccggcgcgtagataacaacccaaaaccgcatgtcgcaaacggaacgcagttgtcagagttctgatcctactcctgtctcttgaagcaacatcatcgacaacctcaaccttccaatggtccttatcatctccaatagtcaaattgccatagcaggaaacttcatggtggttcttggttattggtgcggggatgttgtgggaatgaaggttacggcctgtctggccgtggatcagacgaatgacatcaccgtcaccgacaaacctaagaggtgcctctgcatcgtactggggctccttgcgattaggatagataaaccagtcgttgttcgcgtccttgtggtgatagcaagtaacctgttgctgggacgaaccttcaggatacgtctggacatgagaatgaagtagcccgccgccgtaacccatattcttcaaagtgacccttgagccgaatgcaatttccagcgggctgtctttgcccacctgggtacctttgagattcgcttgaaacaacgagctcatctgcgcatcgcctgggccactgttctctaaaatcaggaagtggatgtagaacgaaaagatatataccagagctggtattagaatcaagcccaccacgcgtaccgcaaaatgtttagctaacgttgcctgtaatcattattagcatcaggcagagtcaaggacttttcgaaaagagtgagaaccccagacatcttcaaatcaccaaatttattccacaggtcttcaatggtgtagaggccaacaagtgcagtgcagaaaaggccaacccatttgacactacaaacgcagccaatactcacgccggtcagaaatagccaggtgaaccactcaatagagaaactcgcatgctggagacgatgaaattttgcccaacaaaatgtggtcgtgaatgtgaagcaaaggagcatagagtcaagcaatatgaatcttgaaatagtggcatatgaattctcgaaaagcaccatgaggctcacaagccaaacagtacctctacgaaaaccaagctcgcgtgccgttaggtaggcaagcggaacgcacaccacgccaaaggcagcgttgaataggcgcataaatgtgtagttaaggtcttccgggtatgtttcgccagatttgaactcgaatgatccgttataaccggcaagaaggcccgacaagccgacaagcattttccccaacggagggtgaacatcaaagtagaattcgcgcttcaggtaatgt

SEQ ID NO: 1211 - DNA, 3487 bp, Emericella nidulans
ggtgattggatactgggagggctggagtactcagcgcagctgtgggacaatgtctgctggcgagatccctgtcaatctgcttacgcatctcaacatcgcattcggttacattaacagtgctttccaaatcacaaacatggacggtctgtccgccgatgtgtacaaacaggtcggcaacctcaagtcacgcaatccaagtctcaaaatcatgatcgccctaggcggctggacgttcagcgaccccggtccgtggcaggccatattccctacactagcgtccaccgcagcgaaccgagccacttttattcagaacctgcttgggttcatgtccgagtacggctacgatggggttgacttcgactgggagtaccctggcgccgatgatcgtggtggttcggactcgatggtcgatggagagaattacactcttctgctcaaggagctgcaggaggccatcactgcaagtggacggaactaccttgtcacttttactgcaccaacgtcatactggtatcttcgccacttcgacctcaaagccatgatggagtacgtggactgggtgaatctcatgtcgtatgacctgcacggcacttgggacagcgaaaaccccatcggcaatcaaatcctcgcccacactaacctgacggaaattgacctcgcccttgatctattttggcgcgtggatgtggacccatcgtccatagtgctaggcattggcttctatggacgaaccttccagctatcatcgggctcctgctggaagccgggctgtccatttgatggccctggagcagggggtcggtgcacagcgacgcccggtatcctgtcctacatggagattatggagctcttggagaattccggcgcaacggcacacttggacgaggaggcggctgtccagtatcttgtctatgcggacaatagctgggtctcctacgatgatgcaaccaccttcgcggcaaagattgactacgcgaagagaattggtctctccggcctgatgatctgggctatcgacctcgacgacagctacctcactgcactacgatccattgtcgacccagactccctcaacaacgtggacggtctatttactctggtggacctagaaaatcttttcccgacggagtacctgccgcccgacgacaccgtactaacctggggtctgagcaccgtcgccggagatatgacggatcccagcgacgcatcctttggctttttgctcgttactggagactcgtatgccgtgacgcaactgcgcaagcgagatggcctcccagacccgtttgtcttcatagactgtcccgcaagcgtgaacgagaatgactcgaaggacgagatccacacagcaagggtaatttgtctcagcgatgatctggcgggctgcttccgggtgatggagcgaggcgtggaggggacgctcgtcgaaatgcctgaagactgcgctccgaatacatttgccagggcactgtcgctagacctgtcaaaggaccagtacgtaccagaacacattgccaaacgaagtccaacctctcaagtctttgagttttcttttgacttcaacattggtcttatgcggcgtgacaccaacaacaccagcgttcgtctagactactcgaatctgccgggatactgggattcgattgtcgactcgcctgggatccaaacggacaatcttgagaagagattctttggccctcgacactctcattggaggagccaatacgagagcacggagttcgcctactcttccgagcttgccacgaggattcacgaggtgattgacgcgccgctgttctggcaggcggaggaagactgtccgcacggtactaaccttcggttcggcgaaggctttggtgcctatgttgacggacacattgatgcaatctctactacgggttctcgatgatcgggacgatgaacaatcgcaatgatggcttcatcgtcagacaagcatctgggttcctgaaactcaccggcacgatggatatcacgtacggtattggaggtattggaacggtcgatatatcgtcggcaggcaagggcaaccctgccatcagcgacgaaacagagatcaaattgacgggcaaaaccattaccgcggggaggagggccaacactgcctcgtttgacccttacgtccagctcacgtatcagatggccacatttaatgacacagacgacaacgactttggccagagtgctgctccgttcgacggacgcctcaccgcgcgtgtggtcaccgacctgggaaacatgggggattccccggtcatcttcccgagcgacgagtcgaacgccggggacaactttgattctcggagtttgaacaatatctctatctccgatagtgatgtactgtacggcagtcccgggctcggtggcaagattgccctggggacattcatcaagttcgggttgaaagtgagcacctcgttttgggattggaggccagaaccgctagatgtgagtaaacaccatcgcacccttcagcggataatcgatatattgacttggctagttgtcgttggtgtacaacacgcagacccaattttcattctaccccacaagctatgatgagtcgtgcaccgagtacgacgttgtaacaaacgtttatcaaggagcgaaaaatatgtaggcttcctaactttgctgcgatcgtcgtgcgtgtataggtactaaggcgtccacagtcagggcttgctctggggggagaacgagaccgacattgaactagtatacgatgcggtatttcttcctgtgccccttagccatgaatactaacatatagccaaatagcaatctcccgcgcgcggtagcgtctgttatctcaattccgaggagcaacccgacagcaacgtaaccttggcagaggaagcgtcgcggagtcaggacctttcccctcgccagacagtcattatggacatgcccggctggggatacaatgggaaccggcctgtaagccccatagattactggaattggcgacccccgaccgagatcctccagggacaaaatgcagtcttcccatgcaggcctggtgcctgccacacgtgcgagaccctttccgacccgtcccataccccgtgttgtggctgcatcaatatggatataaaatatggtttctgggatattccaaactgtataagttgcgacaggcccgatggaatctaccctgggccaatacaacatgtatcgaaccgacggcgagatacgatagagaccataggggaggagcaagaagagaaaaaagaggaagaggagaaagaggagaaagatgacctagaaaagaaagacctgcatgttctagaacctcgagtcgatggcaaggcgacccgcacctccaagaaggtgatggcctgcgggggcagttttgggctgggccgcgactggcggtatcccgcatttcccagcgttcataactacggctgggaggggatcgaaaatggcgcgtgggattctatcgcgcgttactggaaaatgatct

(The sequence listing continues in the following parts.)

1-46. (canceled)

47. A method of identifying a nucleotide sequence using a computer, said method comprising comparing a target sequence to one or more sequences stored in computer readable medium having recorded thereon at least 100 nucleotide sequences including at least one sequence selected from the group consisting of SEQ ID NO: 16207 through SEQ ID NO: 18349, SEQ ID NO: 18351 through SEQ ID NO: 18356, SEQ ID NO: 18358 through SEQ ID NO: 21010, and SEQ ID NO: 21012 through SEQ ID NO: 27905 and complements thereof, and identifying said target sequence as being present in the computer readable medium based on said comparison, wherein said target sequence is compared to at least one sequence selected from the group consisting of SEQ ID NO: 16207 through SEQ ID NO: 18349, SEQ ID NO: 18351 through SEQ ID NO: 18356, SEQ ID NO: 18358 through SEQ ID NO: 21010, and SEQ ID NO: 21012 through SEQ ID NO: 27905, and wherein at least one of said comparing and identifying steps is carried out via the computer.

48. The method according to claim 47, wherein both of said comparing and identifying steps are carried out via the computer.

49. A method for identifying a nucleic acid sequence using a computer, said method comprising:
a) providing a target nucleotide sequence;
b) comparing said target nucleotide sequence to one or more nucleotide sequences stored in a computer readable medium having recorded thereon at least 100 nucleotide sequences including at least one sequence selected from the group consisting of SEQ ID NO: 16207 through SEQ ID NO: 18349, SEQ ID NO: 18351 through SEQ ID NO: 18356, SEQ ID NO: 18358 through SEQ ID NO: 21010, and SEQ ID NO: 21012 through SEQ ID NO: 27905 and complements thereof, wherein said target nucleotide sequence is compared to at least one of said sequences selected from the group consisting of SEQ ID NO: 16207 through SEQ ID NO: 18349, SEQ ID NO: 18351 through SEQ ID NO: 18356, SEQ ID NO: 18358 through SEQ ID NO: 21010, and SEQ ID NO: 21012 through SEQ ID NO: 27905; and
c) identifying said target nucleotide sequence as having significant sequence identity to said one or more nucleotide sequences stored in a computer readable medium based on said comparison, wherein at least one of said comparing and identifying steps is carried out via the computer.

50. The method according to claim 49, wherein both of said comparing and identifying steps are carried out via the computer.

51. The method according to claim 49, wherein said target sequence shares between 100% and 90% sequence identity with one or more of said nucleotide sequences stored on a computer readable medium.

52. The method according to claim 51, wherein said target sequence shares between 100% and 95% sequence identity with one or more of said nucleotide sequences stored on a computer readable medium.

53. The method according to claim 52, wherein said target sequence shares between 100% and 98% sequence identity with one or more of said nucleotide sequences stored on a computer readable medium.

54. The method according to claim 53, wherein said target sequence shares between 100% and 99% sequence identity with one or more of said nucleotide sequences stored on a computer readable medium.

55. The method according to claim 49, wherein said target sequence is identified as homologous to an open reading frame (ORF) within said nucleotide sequence stored on a computer readable medium.

56. The method of claim 49, wherein said target sequence is a nucleotide sequence of between about 30 and about 300 nucleotide residues in length.

57. The method of claim 49, wherein said target sequence is identified as homologous to a sequence encoding an Emericella nidulans protein or fragment thereof within said one or more nucleotide sequences stored on a computer readable medium.

58. A method of detecting a nucleotide sequence using a computer, said method comprising:
a) providing a target nucleotide sequence;
b) comparing said target nucleotide sequence to one or more nucleotide sequences stored in a computer readable medium having recorded thereon at least 100 nucleotide sequences including at least one sequence selected from the group consisting of SEQ ID NO: 16207 through SEQ ID NO: 18349, SEQ ID NO: 18351 through SEQ ID NO: 18356, SEQ ID NO: 18358 through SEQ ID NO: 21010, and SEQ ID NO: 21012 through SEQ ID NO: 27905 and complements thereof, wherein said target sequence is compared to at least one sequence selected from the group consisting of SEQ ID NO: 16207 through SEQ ID NO: 18349, SEQ ID NO: 18351 through SEQ ID NO: 18356, SEQ ID NO: 18358 through SEQ ID NO: 21010, and SEQ ID NO: 21012 through SEQ ID NO: 27905; and
c) identifying said target sequence as homologous to said nucleotide sequence based on said comparison, wherein at least one of said comparing and identifying steps is carried out via the computer.

59. The method according to claim 58, wherein said target sequence is homologous to an open reading frame (ORF) within said nucleotide sequence.

60. The method of claim 58, wherein said target sequence is a nucleotide sequence of between about 30 and about 300 nucleotide residues in length.

61. The method of claim 58, wherein said target sequence is identified according to degree of homology to said nucleotide sequence stored in a computer readable medium.

62. A method of ranking a target nucleotide sequence by homology to a nucleotide sequence of E. nidulans using a computer-based system, said method comprising:
a) providing a target nucleotide sequence to a computer-based system having search means comprising a program to compare a target nucleotide sequence to nucleotide sequences stored on data storage means having recorded thereon at least 100 nucleotide sequences including at least one sequence selected from the group consisting of SEQ ID NO: 16207 through SEQ ID NO: 18349, SEQ ID NO: 18351 through SEQ ID NO: 18356, SEQ ID NO: 18358 through SEQ ID NO: 21010, and SEQ ID NO: 21012 through SEQ ID NO: 27905 and complements thereof;
b) using said search means to compare said target nucleotide sequence to said nucleotide sequences stored on data storage means, wherein said target nucleotide sequence is compared to at least one sequence selected from the group consisting of SEQ ID NO: 16207 through SEQ ID NO: 18349, SEQ ID NO: 18351 through SEQ ID NO: 18356, SEQ ID NO: 18358 through SEQ ID NO: 21010, and SEQ ID NO: 21012 through SEQ ID NO: 27905; and
c) ranking said target sequence based on percent homology to said nucleotide sequence of E. nidulans, wherein at least one of said comparing and ranking steps is carried out by the computer.

63. The method of claim 62, wherein said target sequence is a nucleotide sequence of between about 30 and about 300 nucleotide residues in length.

64. The method of claim 62, wherein said search means constructs an optimal alignment for each region of the target nucleotide sequence and a nucleotide sequence stored on data storage means.

65. A method for identifying a nucleic acid sequence using a computer, said method comprising:
a) providing a target nucleotide sequence;
b) comparing said target nucleotide sequence to one or more nucleotide sequences stored in a computer readable medium having recorded thereon at least 100 nucleotide sequences including at least one sequence selected from the group consisting of SEQ ID NO: 16207 through SEQ ID NO: 18349, SEQ ID NO: 18351 through SEQ ID NO: 18356, SEQ ID NO: 18358 through SEQ ID NO: 21010, and SEQ ID NO: 21012 through SEQ ID NO: 27905 and complements thereof, wherein said target nucleotide sequence is compared to at least one of said sequences selected from the group consisting of SEQ ID NO: 16207 through SEQ ID NO: 18349, SEQ ID NO: 18351 through SEQ ID NO: 18356, SEQ ID NO: 18358 through SEQ ID NO: 21010, and SEQ ID NO: 21012 through SEQ ID NO: 27905; and
c) identifying said target nucleotide sequence as having significant sequence identity to said one or more nucleotide sequences stored in a computer readable medium, wherein said sequences stored in said computer readable medium function to facilitate said identification of said target sequence as having significant sequence identity, wherein at least one of said comparing and identifying steps is carried out via the computer.

66. The method of claim 65, wherein said method identifies a nucleic acid sequence within the Emericella nidulans genome.

67. The method of claim 65, wherein said target sequence shares between 100% and 90% sequence identity with one or more of said sequences selected from the group consisting of SEQ ID NO: 16207 through SEQ ID NO: 18349, SEQ ID NO: 18351 through SEQ ID NO: 18356, SEQ ID NO: 18358 through SEQ ID NO: 21010, and SEQ ID NO: 21012 through SEQ ID NO: 27905.

68. The method of claim 67, wherein said target sequence shares between 100% and 95% sequence identity with one or more of said sequences selected from the group consisting of SEQ ID NO: 16207 through SEQ ID NO: 18349, SEQ ID NO: 18351 through SEQ ID NO: 18356, SEQ ID NO: 18358 through SEQ ID NO: 21010, and SEQ ID NO: 21012 through SEQ ID NO: 27905.

69. The method of claim 68, wherein said target sequence shares between 100% and 98% sequence identity with one or more of said sequences selected from the group consisting of SEQ ID NO: 16207 through SEQ ID NO: 18349, SEQ ID NO: 18351 through SEQ ID NO: 18356, SEQ ID NO: 18358 through SEQ ID NO: 21010, and SEQ ID NO: 21012 through SEQ ID NO: 27905.

70. The method of claim 69, wherein said target sequence shares between 100% and 98% sequence identity with one or more of said sequences selected from the group consisting of SEQ ID NO: 16207 through SEQ ID NO: 18349, SEQ ID NO: 18351 through SEQ ID NO: 18356, SEQ ID NO: 18358 through SEQ ID NO: 21010, and SEQ ID NO: 21012 through SEQ ID NO: 27905.

71. A method for identifying the function of a fungal nucleic acid sequence by determining homology to a nucleotide sequence in the Emericella nidulans genome using a computer-based system, said method comprising:
a) providing a target fungal nucleotide sequence to a computer-based system having a homology-based search program;
b) using said homology-based search program to compare said target fungal nucleotide sequence to one or more E. nidulans nucleotide sequences stored in said computer-based system having recorded thereon at least 100 nucleotide sequences including at least one sequence selected from the group consisting of SEQ ID NO: 16207 through SEQ ID NO: 18349, SEQ ID NO: 18351 through SEQ ID NO: 18356, SEQ ID NO: 18358 through SEQ ID NO: 21010, and SEQ ID NO: 21012 through SEQ ID NO: 27905 and descriptions identifying encoded proteins, wherein said target fungal nucleotide sequence is compared to at least one of said sequences selected from the group consisting of SEQ ID NO: 16207 through SEQ ID NO: 18349, SEQ ID NO: 18351 through SEQ ID NO: 18356, SEQ ID NO: 18358 through SEQ ID NO: 21010, and SEQ ID NO: 21012 through SEQ ID NO: 27905 and provide a rank based on homology; and
c) identifying the function of said target nucleotide sequence based on homology to a nucleotide sequence in the E. nidulans genome based on said rank.

72. A method of identifying a nucleotide sequence using a computer, said method comprising comparing a target sequence to one or more sequences stored in computer readable medium having recorded thereon at least 100 nucleotide sequences including at least one sequence selected from the group consisting of SEQ ID NO: 16207 through SEQ ID NO: 18349, SEQ ID NO: 18351 through SEQ ID NO: 18356, SEQ ID NO: 18358 through SEQ ID NO: 21010, and SEQ ID NO: 21012 through SEQ ID NO: 27905 and complements thereof, and identifying said target sequence as having significant sequence identity to at least one sequence selected from the group consisting of SEQ ID NO: 16207 through SEQ ID NO: 18349, SEQ ID NO: 18351 through SEQ ID NO: 18356, SEQ ID NO: 18358 through SEQ ID NO: 21010, and SEQ ID NO: 21012 through SEQ ID NO: 27905, wherein both of said comparing and identifying steps are carried out via the computer.
